United States Patent Application Publication US 2017/0114356 A1 - sequence listing, part 47

SEQ ID NO: 63226 - DNA, 2532 bp, Zea Mays
gtccacgcggggtcgctctcggctagacgccaccgcgtcctcgttcccctcccgacttcccgagtggccgagtcccgtcccgagcgaaaagtcctccggcctcgccgtctcgtctcctcccctagtagtcaagtctcaaccacctccccaagccgcgtggagccctcatccagatcggagccagcgcgccgtgtgatgccgttccggccgtgggagtagctgtcttgcccccggcccaggagccatggcggaggatggcgaggagaagctgctcgcgacggtgcagcgcatcgtgcagacgctggggagcagcgacaccatgacagaggacatcctcaaggtgttctccaactacgacggccgcctctcgctcgacaagctctacgccgcgcgcgccgccgccgcggccgctgcgtccggtggtggcggatgaggagggggaggaggaattgtagcagagcgctcgatgccgacgtcgccggccgcggcggcggcggtgccggccacggggccgaggccaccggtcacgtcgatggagcggaccgtgcgcgcgctggaccgccagatctcgcagttcgtggccatggaccggctgatttgggcggactccgccgacgcggacgcgttcctggaggcggtcgacgatctcatcggcaccgtgcaggagctggacgccgcggggaccaaccgcgccctgctcgaccgcgccgacgagttgctcagccggtgcatggcgcggctggaggacgagttcagggcgctcatagagcgccccgacgacgccgcccccgcggtgccgggcgggttcgggtcggacgggagcgacgacgacgacgatgacttcggggccggggacggctacggcgacgagccgatccccatcgccaagccggtgacggactatgacgtcgtgatcgatgctctctcgccggggtccatcgccaacgtccaccagattgccaggaggatggtggacgccggctttggccgcgagtgcgctgaggcctacgccgcggcgcggcgcggctttgtcgacgaaagcgttgcgcgcctcggcgtccgctcccgcaccgccgaggaggttcacgcctcaccctgggaggtgcttgagttcgacatcgcccgctggatcccggccttcaacatgatgtttcgcatcctgatccccagtgagcgccgcctatgtgaccgcgttttcgacggcctcgcccccttcggcgatctcgccttcatcgccgccgtgcgtacccaggctctgcagctcatatcgttcggtgacgctatctcttcctcaagccgctcgccggagcgcctcttccgcgtcgttgacatgtacgaggctgtgcgtgacattctccctgaccttgatcctgtgttctctgacccatactctgctgcactccatgcggaggtctccgccatgtgcaacacactggggtcctctatcaaaggtatatttatggagttggaaaatctcatccgccgtgaccctgcccgagttgctgcccaaggtggtgccatacatcctatcactcggtatgttatgaactatctccgtgctgcgtgtgggtcgcggcagacattggaagaggtgatggaaggtgactttggtgttaatagagctgcgcctgtggctgttgaccctgaccgccccacatcatcccttgccgtgcacatcgcatggatcatggatgttcttcaaaagaatttggatacaaagtctaggatataccgtgatccatctcttgcttgtatcttcttgatgaataatggcaagtacatcatacagaaggtgaatgacagtgagttgggtgtttttctcggtaatgagtggatcaagcagatgacaactaaagttcgccggtggagcatggattatcagcggacaacatggggcaaggttacaactgtgctgcagactggtagtccaggcattggtggactcccagcaaaggcaatgctgcagaaaatgcgaatgtttaatacgtactttgaggagatctacgcagcgcagtcagaatgggtgatagcagatgaccagctaagggtggacattagggcagcagtggaggagacagtgatgccagtttacgcctctttaattgccaagttgaagtcttctcctgaaactgggcgggatttgtacatcaaatacactccagaggatgttgtagcccatatccagcacttgtttgaaggaccagcaaagtgataaaggatatgtagccttgtagcctgctatactgcagcttctgctcttctgaacttgtgaagatgctgtcatggattctcctattcgtggttaatttcttgtactcacgtaagctagagtatttgcagctcaaaatggacatcaaactttgaaaccgcgtcgcaggccacaacattttcatccattagctatatggaagaagtgatgtattgctgtatcaccaggttcggctggagaaaggttgttacccattgtatcttttgaaaacccatcactgctagctatatgcaataaaagttaaagcttcacagtgaatagat

SEQ ID NO: 63227 - DNA, 641 bp, Zea Mays
gaactgattgtccattcttgcttaaaatcttatttcagacaacatcagcagttaacaaggcaaagttgaagcaatagtagatgatcaaacaatttatcatactccagtatgattttaaagagaagacatacaccatctaacaacatgtatgaggtaaaatcaatgcatcatcgcaagccacccctcagaactcatggtcagaaattatcatgagtttccacaaacatataccaagtatagcaaaaagaaatactaatcgaacattgaacgaatgaagcatattaacgtatcatcaatgcttgcgaatgaagatacaatccatattgaaagtctgacaccacaaactcgtatacttggcactaaactcaaccatatgttaaaatctcgatgaatttgctgatcttcgcagaagccggtgcatcaatcgaaaccagcactaagccagtagatcagatcttgccgtccgccgcctcaaaccccagatccgggtgcgccaaggaatgaaagcagcccttggcgacgcgacggaggtgaagaacagcaggacgaaggacgcgccgacgagccccagcagcgtctcgcggtcggagaaggctcggccgaagagggcgacaggctggtcggacgcgcggaagaggtag

SEQ ID NO: 63228 - DNA, 2042 bp, Zea Mays
atcctggacgcccgtccggctctgctccattcccttcgtctccctccagcagcctccggccatcgccctctgcgatgacctccacgacgccggggaccttcggaacgctggctaactccggaccggtcgcgctctcgttcccgacgaccacctccttcgcaagcttcctaggcggcggttcgagtcctagccgaataatggacagcgggggaggagtcgggctgtccaagttcaaggccatgaccccgccttccctcccgctgtcgtcgtcgtgcccgccgccgccgcagtcgtacctccacgcgttctccggcctcctcgactcgcccatcctcttgactcccagcctattcccgtcgccgacgacgggcgcgatcccgtcggagcccttcaactggatggggacggcggagaacgacctaagcggcagcggcgtagaggctgagcagcgccagcagtacaccgactttgcgttccagacggcggcggcggcgacgtccacgattattaccggtgcggcgcacacggcgtccttcccgcagtcgtctgtgctgatgcccccatcgggacgagtaggagactcgtacagcggcgagatgctgcagcagcagccgtggacctaccaggaaccgacggcgcaattcgaggcgccggcggcgcaggctggcaacatgttcggcaccggcggcggctacggcgcggctcccggcttccgcgagcagaggcagagccaccgcccgtcgtcggacgacgggtacaactggcgcaagtacgggcagaagcagatgaaggggagcgagaacccgcgcagctactacaagtgcagcttcccgggctgccccaccaagaagaaggtggagcagtcgccggacggccaggtcacggagatcgtgtacaagggcacgcacaaccacccgaagccgcagagtacgcgccggggcgccagctcggcgccggcgtcgtacgtggtgcagagcgccagcgacgcggtgatgcccgagcattcctggggcgcgctgtccggaacacccgtggtgacgccggagaactcgtccgggtccttcggcggcgacggcgacgaggtcaacggcatgagctcgcggctgggcggtagcttcggcgccgacgatctcgacgacgatgaacccgactccaagagatggaggaaagacggtggcgacgccgacgcagcagggtgctcggtgtcggtggccagcaacaaccggacggtgcgggagccgagggttgtcgtgcagacgatgagcgacatcgacgtcctggacgacggctaccggtggcgcaagtacgggcagaaggtcgtcaagggcaacccgaacccgaggagctactacaagtgcacgggggcagggtgtctggtgaggaagcacgtggagcgcgcgtgccacgacacgtgcgcggtggtcaccacgtacgagggcaagcacaaccacgacgtgcccccggcgcgcggcagcgcctcgctctaccgcgccgcgctggcggcgcagatgccgccacagcaggccgcgagctaccagggcgcgccgatgccggccgcggagagaggcagcttcgccttgtccgggttcggcgacccggtgggcacggcgtactcttattacacgaaccaccaccaggagcaggagcagcagcagcagcagccgaaccaggcgatgcgctacgccaaggacgagccacaagactgcatgtcgtttttcgagcagcaactcctgttctgaccagatgaaacgctgccacatcgattgtggcaagacatgctcgcacttgtgaattgtgattcttttttttttactcgacacactatgtacactatctgtagtgatttgtttggaggctccaactttgcaggcatctgcagagtgggattgccttctgtaagatgtaggacacatcatttccgtagcctcctagggagcaaaggtcagggcaaatgatttttcagcagtttgactgctttttttttgtcaaaaaggaaatcgttgtaagtgcgcagatcttaaaagaaaaggtattcagttcac

SEQ ID NO: 63229 - DNA, 1937 bp, Zea Mays
aatgaataagtgacaggcttttcctgggttgttgcaaattgcaatgacgtggctgcccagttttgcctgcaaacttgtagacaatctaggctgtactgattaatttccacatttttactaatggtcagatgcctgatttctatcttctcttcaaaaagatactgtatccatctttttgcttgtttttttttcctgtattaagatgctcagctttacatgctcatgaactaacagtgaagattattatctgaaaacatactatatttcaggtgggcacctgaaatataacaactctctaatttccgcaaccattttttgtgccctcttagatctcaaatatatgtagctgcgccactttttctttgtttgtcagaatatacatggttactgacatcacagcattttttttgcgcattgccaaagtacataaacaaggtcaagattggatttctggagacagtacttaccgtttgaacatagtcgaaggaaagatgcagtacctatttgatgaggatggccgtcgttacctggatgctttcggtggcattgcaacagtttgttgtgggcactgccatccagatgttgttgaagccatagtaaaccaggcaaagcggatccagcactccacagttctatatctcaatcatgcaattgcagattttgccgaggcattggcttccaaaatgcctggtgatctgaaggttgttttcttcacaaattcaggcacggaggcaaatgagcttgcactgatgattgcacggctttacactggttgcaatgacattatctctcttaggaatggataccatgggaatgctgctggaacaatgggtgctactgctcaatccaattggaaattcaatgttgttcagacgggagtacaccatgcgcttaatccagaccccttcagaggtgcttttggttctgacggggagaaatacgccagagatgttcaggaaatcatcgaatttggaactacagggagagttggtgggttcatttcggaagccatacagggggttggtggaatagtggaactggcaccaggatacttgcccgtggcatacagtatggtaaggaaagccggtgggctctgcatcgccgacgaagttcaggcaggagtcgcgagaactggaagccacttctggggattcgaagggcatggtgtcatcccggacatagtcaccatggccaagggtatcgggaatggcatacccataggagctgtagtaacgacgccagagatcgctcaggcgggcatgcggtgctcaaagtgctggagaaggagaagctccaggagaatgcgtttgttgtgggctcctacctaaaggaacagcttaacaatctgaaagacaagcatgagatcatcggtgacgttaggggcaaaggcttccttcttggagttgagctggtgacagaccatgaaaagaaaaccccagccaaagctgagatctcacgtgtcatgaaccatatgaaagatatgggagtgttggttggtaagggtggtttctacgggaacgtttttaggataacaccaccgttgtgcttcaccaaagaggattccgacttcttcattgaggtgatggacattgcgctctcgaagctgtgaggcaagcagggcgaagatgatgtgcaaaccctggtccgtcgccatgggatttttgcccatgaataatattaagattaatgagacagcacctcgttgtctcttaatctaagacgatgccatgtcatccggtggcatggtattcctaatcctacctgccaaatcactggtattgctcgctgtctcgtaatcagacccatggagcaatatgattcttgtaaactctagcttcatccaatctgttcctcctgatctaactagtctgaatagcagctgttcgtttgtgaccaatatcaacttcttttcagatgctccatatattcctgctctc

SEQ ID NO: 63230 - DNA, 1810 bp, Zea Mays
aggcgtcgccatggccctcctccaacatcaaccagcgactcacacacccgcgcgccgcttctgtagggccccaaccaaccgcgcagggagaaaaccaccacagcacatgcagcgcctcgcctcctcccggaggctcctccaggccgcgctcgcccccgcccgggccaactccagcctctccgcggccgccgtcgccgcgcccgcgccagcgaatggcgccttcccgaagatgccggccttcgactacacgccgccgccgtacgacgggccgcgcgccgaggagatcttccggaagcgcgctcagttcctcagcccatccctttttcatttctacgatcgcccattgaacatagtcgaaggaaagatgcagtacctatttgatgaggatggccgtcgttacctggatgctttcggtggcattgcaacagtttgttgtgggcactgccatccagatgttgttgaagccatagtaaaccaggcaaagcggatccagcactccacagttctatatctcaatcatgcaattgcagattttgccgaggcattggcttccaaaatgcctggtgatctgaaggttgttttcttcacaaattcaggcacggaggcaaatgagcttgcactgatgattgcacggctttacactggttgcaatgacattatctctcttaggaatggataccatgggaatgctgctggaacaatgggtgctactgctcaatccaattggaaattcaatgttgttcagacgggagtacaccatgcgcttaatccagaccccttcagaggtgcttttggttctgacggggagaaatacgccagagatgttcaggaaatcatcgaatttggaactacagggagagttggtgggttcatttcggaagccatacagggggttggtggaatagtggaactggcaccaggatacttgcccgtggcatacagtatggtaaggaaagccggtgggctctgcatcgccgacgaagttcaggcaggagtcgcgagaactggaagccacttctggggattcgaagggcatggtgtcatcccggacatagtcaccatggccaagggtatcgggaatggcatacccataggagctgtagtaacgacgccagagatcgctcaggcgggcatgcggtgctcaaagtgctggagaaggagaagctccaggagaatgcgtttgttgtgggctcctacctaaaggaacagcttaacaatctgaaagacaagcatgagatcatcggtgacgttaggggcaaaggcttccttcttggagttgagctggtgacagaccatgaaaagaaaaccccagccaaagctgagatctcacgtgtcatgaaccatatgaaagatatgggagtgttggttggtaagggtggtttctacgggaacgtttttaggataacaccaccgttgtgcttcaccaaagaggattccgacttcttcattgaggtgatggacattgcgctctcgaagctgtgaggcaagcagggcgaagatgatgtgcaaaccctggtccgtcgccatgggatttttgcccatgaataatattaagattaatgagacagcacctcgttgtctcttaatctaagacgatgccatgtcatccggtggcatggtattcctaatcctacctgccaaatcactggtattgctcgctgtctcgtaatcagacccatggagcaatatgattcttgtaaactctagcttcatccaatctgttcctcctgatctaactagtctgaatagcagctgttcgtttgtgaccaatatcaacttcttttcagatgctccatatattcctgctctc

SEQ ID NO: 63231 - DNA, 768 bp, Zea Mays
ctaaagtgaagtctttagtaccactagagttatcaaccggtacgaatcatttctcgagagattagtaacggttggtgatcggaatcgatactaataaggtacatcaatattagttggagtcaccaactggtactaggtcctaacaattagaaccggtactaatgctaaaggtttgaaaccccttcctctagtagtggatatatgagtacttggttaactagataattatgggacatcctttttagaggtccactaaacatcctatattagtcctcttgtatcaggaatagctaatggcacatagtcaatggaaggataatatgttccctctttcccatgatatatgccccctctttcccgtaagtctatcttggccttctactctcccgctaaaagctctccattctctattgtcgacaggtgattgcttcctatgactgtaacctatccgggtggtggatcaccattctcaatagggcagggtgtctcatccttgttttgatgcttagtgcccttgctctccactacacgtcggccatagggcttcacaaaatcgttatcaagatagttgaccatcattatagggattccttttggaccaaggaagactcctgtcatggatctaagtgcttggtgacctaaggttaggtgtgtactagtaagcttgttggtgatcttgggctaaaaaatctcgagttacaatattgttgtctctcacttaaatcattgacaaacttctcttggttgaacttgcattatatagagaaa

SEQ ID NO: 63232 - DNA, 799 bp, Zea Mays
gcagccggcaggaggccggagtgagtggctggaaggagagagcgcttgagtgcggtgcatatgctcaggctagctcagcgcgcaccgtctccggcatgcatgcatatgggctgggcggcatggcagctcgatcgatgtgtgctgaggatggcgaggtgcgcgcggtggagaagcagggcacgtgcattctttccgtcgccggccggcttggcagcggccggcggcccggctctcgcagtcacgcgtacgtcgcctgagcggcgcgcgcgagagagagagacacggcaggtcgtcgccggcgcggctaactggtgcaggtgcagcagctagcttctgaaacccagccagccagccagccggccggccggccgatcgatgcgtgcatgtgcccttcttctccatcgggcacgcctcgcctgcgctgcgcacccccttctgtgagtgcatgcaagtgattgcttcctatgactgtaacctatccgggtggtggatcaccattctcaatagggcagggtgtctcatccttgttttgatgcttagtgcccttgctctccactacacgtcggccatagggcttcacaaaatcgttatcaagatagttgaccatcattatagggattccttttggaccaaggaagactcctgtcatggatctaagtgcttggtgacctaaggttaggtgtgtactagtaagcttgttggtgatcttgggctaaaaaatctcgagttacaatattgttgtctctcacttaaatcattgacaaacttctcttggttgaacttgcattatatagagaaa

SEQ ID NO: 63233 - DNA, 2185 bp, Zea Mays
ctcgcctcctgtcaattcccttcccggtcccccaccggagccagccagaggaccctaccgcggggcgaggtcgttggattattaatcctccctcgctgggtcgtcttctccgatcgtcgtcgtccacacacgagtcacgcatgcccggccggccctacctctacctggccttcttgttggctccaatcggcctctccgagctagcaaggtccctgctgcctcactgttgccacgcgtgtacgcgtatttctgcccagtggcagcgccagtacactacctcgatcgctctacaccgtgcatatacatgcatacgcgcgccaggcggcagccggcaggaggccggagtgagtggctggaaggagagagcgcttgagtgcggtgcatatgctcaggctagctcagcgcgcaccgtctccggcatgcatgcatatgggctgggcggcatggcagctcgatcgatgtgtgctgaggatggcgaggtgcgcgcggtggagaagcagggcacgtgcattctttccgtcgccggccggcttggcagcggccggcggcccggctctcgcagtcacgcgtacgtcgcctgagcggcgcgcgcgagagagagagacacggcaggtcgtcgccggcgcggctaactggtgcaggtgcagcagctagcttctgaaacccagccagccagccagccggccggccggccgatcgatgcgtgcatgtgcccttcttctccatcgggcacgcctcgcctgcgctgcgcacccccttctgtgagtgcatgcaagtaagcaaaaagactgtctgtactttaattttcacctcgagcagggtgcagcctctgcaagtctgcatgcatggaccgccgcccccaggttcttggaagcggcggccggctgcaaagtaaagcatgcatgcgcatgtgagtctaatgttttgcttccctcatcgttggatctcttttgctaatataatcattagtaccaatttcgatgatattcttcgttatgtggcctggtggttcacagcaacattattcaaccgtgcgacttttttttttcttcttgtctgacatttttttacccgtttgtctatgactaacttattattagggtaataagttagtagagcgtgttactacccctttcttctttacgaaagatcagtactagcatgttttacttgttctgatggtaagcatgagaggtatccatggatcaatacatatgcatatgcttgatcttttaatatatatcttgttcaagaagaagtggataacgagctgcatgcttcaagtgtgtactcttagagccgcacatccgcaatttcaagcttaaattggtttcatcttgtctaggaatatctttttttttctgaaaaacgtacgaaaaaagtactcgcatatacactagcgctaatcatgctaaaagtggctacatgtttaccaataagctagggcggggatgccatttttttgtttggggattattcatttagcgtgatctttggattctattgtacaccctaacaccataagcaattcatagaaatgcatatggtgttatagagagagagagaaacattacagctggttcaccagctagctagcataccgtacgtacagtaccacggtaccatacatgcaattatgctttgggctataagtggtaagcctttctttcaaatgctttcaactttggtgcgtgaagatggaagcatcattgcagctgcagacacgccaaagtggttacagcatgcatccagagagagggaaagctactagaaacaacagactggtaggagtaattcggagtgtctattatttggtgtggggtctggtgtgggctatactgcttgctgtatgtatgtgcgaagcagcagaccttatcacctctgcaacatttgatcttctgtcgcattgcatgatgatgatctaagacacagcatatcaaaatatgcgccactcgattgacaatgttagccagacttttgcctatttgttatgtttagactacttttgctattttggtatcacactgtcatgtttttttttcactatgggaagtgcactaagcttcagttacactttggtatctattcttaagaacgttttttaatgtattcaaaatgtaaatttcatttaaaaagtaccggattcacaactgatattgtgctacgaggactaatgacctcgttc

SEQ ID NO: 63234 - DNA, 8100 bp, Zea Mays
cggctggctacaagccgacactgttgcagctgtttggactgctgcagctgcaatccatagagagaaaaatactgtagaagccgcagccgcagccggattgcagccgcagcaagccacagcgaacaagctggatatttcaacggtaccgcacttacgttatctctgatcttctatcttatcccatatttcaaaatctactttacaatataaaacaatattttctacggtcgtatacacaattccaacagtaccgggcgtacgccgtccgatacgtttcgtcctcctatgtcccacctggcagtctcgcagcgcaaaccatctcaccaactagccatctatttataggcgtcgccatggccctcctccaacatcaaccagcgactcacacacccgcccgccgcttctgtagccgccgccgccaccccccccccccccccccccccccccccccaaccaaccaaccgcgcagggagaaaaccacagcgcagcacatgcagcgcctcgcctcctcccggaggctcctccaggccgcgctcgccgcggccgccgtcgccgcgcccgcgccagcgaatggcgccttccccaagatgccggccttcgactacacgccgccgccgtacaacgggccgcgcgccgagatcttccggaagcgcgctcagttcctcagcccatccctctttcatttctacgatcgcccagtacgtgtgccgctcccccatcgccactccagtcttcagttctgtgggaaggactatactgctacgaccaaaaagaaaaacaaaaaaaactgtaaattaccttcggatttcaatattttttcggtaaaaactgcaccaattgtcgccctggtgatcagttaaaatacgaagaatcgaactactagcatttttcgtaactaaaacattttttgtttactgttttgagaaatgcggtcttcttggtagtcctttggcacagagcagcagtgatctttgtcgttttccgagaggtttgataggattgctgatactgcatgtgctctgttcttatctgaagtaaaatgagatctgagataaatatacaaaagtatgcaaccaagatctgtgtcagaacccaataaaatgtcagcactcaacagccgcaaattctgtattgcaggcagtatgactcgaacaggagtcttaagtgaatcaataaaagaaacttgtaataccagtaccacaagctgtcgagtgtcgacagcaggagtattgtttttttttcagtgaatagtagatccttttgccaaatgaacatgccggatgggttgacaaatgaataagtgacaggcttttcctgggttgttgcaaattgcaatgacgtggctgcccagttttgcctgcaaacttgtagaaaatctaggttgtaccgattaatttccacttttttactaatggtcagatgcctgatttctatcttctcttcaaaagatactgtatccatctttttgcttatttttttcctgtattaagatgctcagctttacatgctcatgaactaacagtgaaggttgttgtctgaaaacatactatatttcaggtgggcacctgaaatataacaactctctaatttccgcaactatttttttgtgccctcttagatctcaaatatatgtagctgcgccactttttctttgtttgtcagaatatacatggttactgacaacacaacatttaattttttttacgcattgccaaagtacataaacaaggtcaagattggatttctggagacagtacttaccgtgtacctaacttactgactcccgtcccattaaaaaataatgttgaagcatatatacttatataatttgatagaagttggcacaaaggaagaggaaaaaaacgctagcattttgagattcatttgcatctctgaaatgaagcaaacagcaaagtaaccagtgcatgttatcattctgtaattacttaatatatgagatcgtctgagtgcctcctgtagtatatggtgaaccccgatcaagtagtattagttttccaaccaagcaacacaagctttagttttccaaccaagcaacacaagctaagagcatctccaagaaaacaagcaaaggcttccataaaccatttttatagaagaaacgctgatttccatactccaacagaatccccttccttgctcgtattttttcgcgacccacatgcgcgacaaaaaagttcccccaatcgactgcgtacgtgcgcacgctagctggtggcgtggcggacgtgtcctgctggtgtgagagaacacagggcagtggcatgcaaatttaaaaaaaccaacgacatgcatgtgggctagctacatgcattaaaagttggtccagtttcgttttagtttttattttggggaaactgctggagtaaacattttattccacccgtaatcagttttagtatgccctccataatcagtttttggggaatttttttgcatattcttttggagttgctctaaagtcatcgtcagtgccacagcaatattgcattcagctgatcatttattaatgtgatatttgttgcagttggacatagtcgaaggaaagatgcagtacctatttgatgaggatggccgtcgttacctggatgctttcggtggcattgctacagtttgctgtgggcactgccatccagatgtggttgaagccatagtaaaccaggcaaagcggatccagcactccacagttctatatctcaatcatgcaattgcagattttgccgaggcattggcttccaaaatgcctggtgatctgaaggttgttttcttcacaaattcaggcacggaggcaaatgagcttgcactgatgattgcacggctttacactggttgcaatgacattatctctcttaggaatggataccatgggaatgctgctggaacaatgggtgctactgctcaatccaattggaaattcaaggttgttcagatgggagtacaccatgcgcttaatccagaccccttcagaggtgcttttggttctgacggggagaaatacgccagagatgttcaggaaatcatcgaatttggaactacagggagagttggtgggttcatttcggaagccatacagggggttggtggaatagtggaactggcaccaggatacttgcccgtggcatacagtatggtaaggaaagccggtgggctctgcatcgctgacgaagttcaggcaggagtcgcgcgaactgggagccacttctggggattcgaagggcatggtgtcatcccggacatagtcaccatggccaagggtatcgggaatggcatacccataggagctgtcgtaacgacgccagagatcgctcaggtgttgacccgcaaaagctacttcaataggagtacctttgatggtaaccctgtcagcactgcaggcgggcatgcggtgctcaaagtgctggagaaggagaagctccaggagaatgcgtttgttgtgggctcctatctaaaggaacagcttaacaatctgaaagacaagcatgagatcatcggtgacgttaggggcaaaggcttccttcttggagttgagctggtgacagaccgtgagaagaaaaccccagccaaagctgagatctcacgtgtcatgaaccatatgaaagatatgggagtgttggttggtaagggtggtttctacgggaacgtttttaggataacaccgccgttgtgcttcaccaaagaggattccgacttcttcattgaggtgatggacattgcgctctcgaagctgtgaggcaggcagggcgaagatgatgtgcaaaccctggtccgtggccatgggttttttgcccatgaataatattaagattagtgagacagcacctcgttgtctcttaatctaagacgatgccatgtcatccggtggcatggtattcctgcttgcccataaataagggacgagttgtgagacagcacctcgttgtctcgtgatcagacccatggtccatggagcaatacgattcttgtaaactctagcttcatccaatctgttcctcctgatctaactagtctgaatagcaactgttcgtttgttaccaatatcaacttcttttcagatgctccatatattcctgctctctgtaaacaaacaattatcactgttcaatagatgcggagatgtggatataaaaattacatatacagtactgtttggtgtaccagtggtttggcaagaaaggaaaggtttaacgtacaatccaaaataaaatgttcacgtattaaattaatatgcatgatcatcatcaggtcacttgagaatgttgaacacgaagcaggcaatggtttccgtcatcaaaccgtcacgataatgatgtcactgatcatctggagcaatgacttctctacaattctctagtaaagttaaacatgcagcaactccgaaattgaccaaagtaacaaatccgcaaattgacacgtgaaaaaagacagcaaatttacatcaaaccaaacgacagtggctaccagctaaatatatgctcatccctatcttaaacagcagaggcctatttgtttctaccgatcataggctggccaccaccctttggactcggcatgctggtagacctgctgatcttgcttccggcgccaaaactcttcacgtcgatcaggtctccaaacaagttgtccggcatgtaatatggtctggctgctgccactggagattcttttggccgctgattccctttcacccgagcatttgtagccacgttcgaaccagtgtatgtttgaggaatagagaagttgtaactttgcaccggtgttggtgctggagatggaacatgttgcgctgatggagcagcatacggtgttgacatagttggataggcagctgaaggggcaacagaagcagcaggagtgtttggcgtttggtatgtcacaggctggaaaggattagctgaattggcacttgcaggcatagcccatgggggtgctggattgctcgacacatattgttggggttgagtcgaatatgccccaggctgtgcaaccggtcccgtttgggcccatggtgccacatagttattgtatggaacatatccctgatttgttggataaacctgggtgttggcagggtaatttgccccgttcgccacagcaggctgatagcttggcagtgtttctggtccatttgatgtgacactcggctgactcccattttggttctgagttgaagagtctgcagatgattcaggactgtacaaggtgaggctgagaaggtcaatcatatcctgctccttcgtcctggttccactaacagaagttgcgccgagaggtactattgcattgctctcaaccgaagaaacttcagaaagcgcccgactgcggtctcggattttgtatattcaggagggtgatgccaacacctccttttttcatcagcaggctagatacagaaaaaagaagaacttcattcctaagctgcacgttggtgatcaggtggtcacctcccaagaagataaacagaaggctgtttctgatttctatgagaacattttgggtagggctgaggagaggagctacactcttgacttggatgagttggccatccacaatcatgatttatctgctttagatgctccgtttcttgaggaggaggtgtggactgtggtaaaagatttgcctccggataaggccccggggccggatggtttcacaggtcgattttataaatcctgttggaatattattaaaggtgatgtgttgaggtctttggatgtcatccagcgtggccatgttttcaaattccgcctgcttaacacggcttatatctccttactgcctaagaagatggatgctgttgaagttaaggatttccggcctataagtttgattcatagttttgccaaattggtagctaagctcatggctactcggctggcccctttgcttccctcactggtttctgtgaaccagagtgcctttgtgagggggaggaggattcatgataactttatgcttgtccaacaaattgtgaagttgctgcataagaagaaagaaccacatatccttcttaagttggacatctccaaggcttttgactctgtttcttggtcgttccttttggaagttttaaggaaaatgggatttggtcagcgttggcgggatctcctttgtttattactgtctacttcttccactcagattttagtcaatggagagcctggggacatcattattcatcgtcgcggtctcaggcagggagatcctctttctccaatgctctttatcctagtcatggatactctgaattctttaatcaactatgccacttcgttgggtttgcttcaacctattgctgttcagcaggtcaggcatcatgtttccttctatgctgatgatgttgtagttttcttgaggcctcacattctggatctggtttcggtcagacgcattcttgatttatttggtcacgcctcaggcctccggaccaacctggttaagagctcggtctcccctattcattgttccgatgatgagctggctctttctgtggaaactctctcttgttcggttaaagtttttccttgcacttatttgggacttcctctcacaacctgtaagccttctaaagaggtgttgctggcctttgtggataaggtggcagattaccttcctgggtggaaagcttctttgttgaatagggctgggcgtcttgtgcttgtgaaagtggttctcactgctgttcctatttattggctcatagctttggatctcccgaaatggttcatcaaggctgttgataaaaagcggcgggggttcttgtggaagggacatcaacaagctaatggaggaaactgcttggtagcttgggataaggtccagagacctcttcagtatggcggccttggaatccataatcttgagcttctaggttgggccttgagaattagatggctttgggctcagaagactgatgtggagaggccgtgggctggactctcaatttctattccctataaagctcgggccctcttcgatatggctgtgaatgccgtggttgggaatggtgagaaaattattttctggactgaccgttggttggatgggcttaccatggctgagatggcacccaatcttttcagaactgaccctatgcgaattgctaagcgaaagactgtggctcaggctttgtttgggcggagttgggttcgtgatatcaagggtgctcttactgttcaggttttaattgagtacctccaggtctgggattttgttgaggaggtcgtactgcaagctgatgttcctgatcatttcagatggaagttgacacaagatggctgttatagcagcaagtctgcgtatgaggccttcttcgtgggctctaccaagtttggcccttggaagagaatctggaaaacctgggccccgtcgcgttgtaaattcttcttatggttggtgcaccataatcgggtttggaccgctgatcgtcttgagcgcagaaatctgccccatccagtgtcttgtccattttgtgaccagatgactgagacggtgcatcacttgttggttggatgtgtgtttgctcgccaaatttgggccctgatccttcaacagttggggctgctgcagttggctcctcagccctcagtgtctcgattctcaggttggtggaagagaactgttgctgctgttcctaaggggcttcgtagaggcctcaattctctaattacgttagtggcttgggagatttggaagcaccgcaacaggtgtgtctttgacaattcaagaccatgtgttgtggaagtgctaaaagctgttaatgtggagggggggctttggtgtttggctggagcttccaagctccaggaacttgtttttgggtcggtgcctactggagcttaattagctctgtaggttgtggtcgccttcttcattgatgtggcgcgacggttgtatttaagggaaggcgtgtgtgtgttggtgtttgtgtttcgggtcactcttgacctttgtacctcctttcttccttaaatgaaatgacgcgcagttctcctgcgctgttcgagaaaaaaaaaaacaggtaccaggggttgatcaccagcactcgatgatgcctcatcaccgcatatcacagatttgtttttt

SEQ ID NO: 63235 - DNA, 2306 bp, Zea Mays
cggctggctacaagccgacactgttgcagctgtttggactgctgcagctgcaatccatagagagaaaaatactgtagaagccgcagccgcagccggattgcagccgcagcaagccacagcgaacaagctggatatttcaacggtaccgcacttacgttatctctgatcttctatcttatcccatatttcaaaatctactttacaatataaaacaatattttctacggtcgtatacacaattccaacagtaccgggcgtacgccgtccgatacgtttcgtcctcctatgtcccacctggcagtctcgcagcgcaaaccatctcaccaactagccatctatttataggcgtcgccatggccctcctccaacatcaaccagcgactcacacacccgcccgccgcttctgtagccgccgccgccaccccccccccccccccccccccccccccccaaccaaccaaccgcgcagggagaaaaccacagcgcagcacatgcagcgcctcgcctcctcccggaggctcctccaggccgcgctcgccgcggccgccgtcgccgcgcccgcgccagcgaatggcgccttccccaagatgccggccttcgactacacgccgccgccgtacaacgggccgcgcgccgagatcttccggaagcgcgctcagttcctcagcccatccctctttcatttctacgatcgcccattggacatagtcgaaggaaagatgcagtacctatttgatgaggatggccgtcgttacctggatgctttcggtggcattgctacagtttgctgtgggcactgccatccagatgtggttgaagccatagtaaaccaggcaaagcggatccagcactccacagttctatatctcaatcatgcaattgcagattttgccgaggcattggcttccaaaatgcctggtgatctgaaggttgttttcttcacaaattcaggcacggaggcaaatgagcttgcactgatgattgcacggctttacactggttgcaatgacattatctctcttaggaatggataccatgggaatgctgctggaacaatgggtgctactgctcaatccaattggaaattcaaggttgttcagatgggagtacaccatgcgcttaatccagaccccttcagaggtgcttttggttctgacggggagaaatacgccagagatgttcaggaaatcatcgaatttggaactacagggagagttggtgggttcatttcggaagccatacagggggttggtggaatagtggaactggcaccaggatacttgcccgtggcatacagtatggtaaggaaagccggtgggctctgcatcgctgacgaagttcaggcaggagtcgcgcgaactgggagccacttctggggattcgaagggcatggtgtcatcccggacatagtcaccatggccaagggtatcgggaatggcatacccataggagctgtcgtaacgacgccagagatcgctcaggtgttgacccgcaaaagctacttcaataggagtacctttgatggtaaccctgtcagcactgcaggcgggcatgcggtgctcaaagtgctggagaaggagaagctccaggagaatgcgtttgttgtgggctcctatctaaaggaacagcttaacaatctgaaagacaagcatgagatcatcggtgacgttaggggcaaaggcttccttcttggagttgagctggtgacagaccgtgagaagaaaaccccagccaaagctgagatctcacgtgtcatgaaccatatgaaagatatgggagtgttggttggtaagggtggtttctacgggaacgtttttaggataacaccgccgttgtgcttcaccaaagaggattccgacttcttcattgaggtgatggacattgcgctctcgaagctgtgaggcaggcagggcgaagatgatgtgcaaaccctggtccgtggccatgggttttttgcccatgaataatattaagattagtgagacagcacctcgttgtctcttaatctaagacgatgccatgtcatccggtggcatggtattcctgcttgcccataaataagggacgagttgtgagacagcacctcgttgtctcgtgatcagacccatggtccatggagcaatacgattcttgtaaactctagcttcatccaatctgttcctcctgatctaactagtctgaatagcaactgttcgtttgttaccaatatcaacttcttttcagatgctccatatattcctgctctcaggggttgatcaccagcactcgatgatgcctcatcaccgcatatcacagatttgtttttt

SEQ ID NO: 63236 - DNA, 2611 bp, Zea Mays
ccactctccaatctatccacgcaagccgccaggaaggagtcgctggctggctcacatcacagctcactgtcgcggtgtcgcccgtggccgtctagagcatccggcttccgagttccggccttcagcgattcagcaaagcaggcgtgcaactgtgctactgtggtgcgtacactagctcttgctcttccctgattccgtccaatactccaatgtgccagcacgctgtggtgccgtactgccgtagcccgtagcacctggccagatccgtccaatactccagcactgccatccaactatccaatactctagcacctggtcgtggtgccgtactgccagcacgccgtgctcttctgcgattccgtccaatactccactttccagagtttgttatttcctcaaataatcaagatgacagaaattgatgagcacacagagatggaggttgaatcagttgaacttagtattcaagcatcacacaatcataatgcagtaattgttgcaccaacatcaaaaccacaagaggtaccatttttagctcaaacagaggatcagggagggggacgaaaggaaatggaaccaaggtcagagatatggcaacacttcattaagataaaagatgataaaggtattgttaagactgctaggtgcaaatattgccaccgaaacatgaaggcagaagctggccaacatggcacatcttctttgaagagacattttgtcgtttgtaagcgcaatccaaataagttcaataaagatccatcacagtgtattctacaagcaacacattgtgaaggtatcagcactttcaagtttgatcaagaagcattaagattggctttcgcagaaatggtcatagaagatgagcaacccttttgctttggggaaaaaccaggattgaggaagtttctatccaaagcttgtccatgatttcaacctccatctagaagaacctgtactagagatgtagtgcgttgtttcttccaagagaaagctaagctaaagaaattcttcaaagattcttgtcaaagggtgtgcttaacaacagatggttggacttcacagcaacaggatagctatatgacagtgacagctagttttattgatgaaaattggaggctgcataagaaattaattggatttttcatggtaaaggggcataaaggtgatgatattggaagaaatgtgctgagatgcatgactgactggggtttacagagagttatgacagtaacagtggacaatgcaagcgctaatgacaattgtattgggtatttgaagaggcacttgaccaaaaccaatgtagctggtgacaagtacttgcatatgaggtgtgcagcacacattgttaatctcatcgtgcatgatggactaaaagaagtagacctctctgtgaagcgtattagagctgttgtgagatatattagaaatggtggttcaaggattatcaaatttaaagagcttatagaggaagagaagttgaacaacaagcaatttttgaagattgatgtaccaacaagatggaactccacatttctcatgctaaaagctgctcttgtttacgagaaggtgttcacaaggctagctgatgaagatatgagttatgtgaatgacctatctgaagaaaaggatggttatggtcacctagaggaacatgactggcaaaatgcaaagaacatggctgattttctagaacacttccatgaccttactgttcgtgtttcagccacaaaccatataacttctcatactttgtttcatgagattggagaagttcatttgttggttcaatcatggctaaatagtgaggatgttttccaagcatcaatggtcaaaagaatgaaggagaaaatttataaatactggggactttggcacactagcaaaaacatcgatgggaatgccaatgataaggagaaagggagaggaaagggaaaggggaaggaaacatgaatttactcatctttgttgttggttgtcttgatccaagatacaagttatctatgtacacaaagataactgttgaagagatatttggtgaggaaagggggcaagtagtttgggaagctattaataattgtgttcatgacctttttgaagaatacatgaaattatattcttcaagtgaagagacaactgatgtaagtgattcaattgcatcaaagggaggtagaggaaggaaactgaaagaagtaattgctaaaaggatgaagctaggaactggttctaatagcaataacaagtctgaacttgataaatatcttgctgaagaaactgaagacacagaaatgaagcctgaccttctagtgtggtggaaggcatctgagcaaaggtttccgattctatctcgcttagctcgtgatgtgcatgctataccaatctcaagtgtagcttcagagtcagcttttagcacaggtggacgcattttagatgacttttgcagctctcttactccattcatgctagaagctctagtttgtacacaggattggctaagatggacaataccagttgacattacagagaatattgaagaactaaccaagttggaagaagaattgtttgaagaattcgggaaagtgaaacaagctgcaagttcaaagacaaatgtgac

SEQ ID NO: 63237 - DNA, 873 bp, Zea Mays
gaaacttaaaccatccataagatttccgaggattgagagaaaaattaagccttttccccctcaatctcggaaaattcgaggctcagccattagattcacgtgcggttggcgagatggctcgtctttctccccttcgttctcctggccgtccccctcctcaaccaccccatgcctcaaatgtcattgccgggaaaatccttccccatcctcaaaaagcgaaaaactctaagcccaggaagacgctacaggaatgggccgttccttgcgatggtcgttggcgcggctggacttcaggggtgacgaccccatacacgaaggtgagagacgaggcaaatggacgtggcccatgcagtgcagtgaaaagtctgaacccctcagaaagaaatgtcaagaaagatgttgctggaaggaagttcacttctcagaagaatagttaaagagatctacagcagggagtttggctgggcgccggtagactatcgtttgtgcagttgatgtcaagtgcgttggtttttctgctgtgtgctccatctgtttgcaatttgtcagctggagtcagtttctggttttaaattgtttggttcaattctggatggtttggacttgtaatcgagggcctttaccaaaaacctgttggtattgttagggttcttatgagttacttcattttgattagatggtttgtttagatgttggaatctggagtaatccaaaacatgtatggatggttagcttctattccgttagcctgaagtgctaagttctgtaataagtagctttctgttggagtctgtcaaactatgttcctatttcttaatgaaataggggggtatcccctctctgttaaaaaaatctcgaaaaattctaaataga

SEQ ID NO: 63238 - DNA, 2304 bp, Zea Mays
caccaaaccgcggagaaatttagatgcacaccgcccccgagttgtagttgtagccgactataaatagttgggggctgggagggcgagctcctcactgccaaccacacgttcccaagccagccattggttggtagcaagccaagctaatcaagctagctttagatacccgctcccgctcttcttccctccgacgaagtcagctgacgatatatacagcaggctagcttcggagttcggggcactcagcgatggccattgccggcgctcttctcctcctgctcggactcctcgcgcgggaggccgctgccggcgggtggcagagcgcgcacgccacgttctacggcggcggggacgcgtccggcacaatgggcggcgcctgcgggtacggcaacctgtacagcacggggtacggcacgagcacggcggcgctgagcacggcgctgttcaacgacggcgcggcgtgcgggtcctgctacgagctgcggtgcgacaacgacgggcggtggtgcctgccgggcaccatcaccgtcacggccaccaacttctgcccgcccaactacggcctccccagcgacgacggcggctggtgcaacccgccgcgcccgcacttcgacatggccgagccggccttcctccgcatcgcgcagtaccgcgccggcatcgtgcccgtcgcgttcaggaggtacttcagttgctcttcacatgctgtgctgcctgcgactcggcggtggtcacgcacactgcactgcactgcacacgtgacacatgcacgccggcccccagctgctacgacggctcgcaccaccaccacctacgtcctggctcgatcaattcgatttcaaaacgacccaaacgcgtcggacgtcggttcgaaggttggtgggcccggagcctaagttcggcccattagtttagtgggccaccctgcagatttgatacgggcgtggggataggctagtctgtggctgcagctgcagctgcagctgcaggcggcgcgcatgtgccctcagccctgccactgctgccagtgtcgcacctcgctcccataccaactctcggccgtcccaacccagtaaaacctcagtcacgcacgcacgtacgtagtgaccgttatttgcatgtgacgcgctgacctacgtagacagtaccagcaccgacgatttacttaatgttgttatatagctaacgtcgtataacttgccaacgctcgatcccattagctaacgtcgttcttaacccgacattaattaatctacatgtctatggcgcagagtgccgtgcgtgaagaagggcggcatccggttcaccatcaacgggcactcctacttcaacctggtgctggtgaccaacgtggcgggcgccggcgacgtgcgctccgtctccatccggggctcccgcacggggtggcagcccatgtcccggaactggggccagaactggcagagcaactcgtacctggacaggcaggcgctctcgttccaggtcaccgccagcgacggccgcaccgtcaccagcaacggcgccgtccccgctggctggcagttcggccagaccttcgagggcggccagttctgaggatgaacagctagcgcgcgcgcggctagctattggataattagttacggtactgtcgatttgtttgtttttttttttttttttgcgcgtgatgatcgagtgcatgcaagagaaagagacgacgaggagaacgacgaagacgaagacgaagcctctctccgggtatattgaaggaaggagaaggctttgcgcgcgctatgctgaggctgctaatctagcacccgcctagacgtttcccttttctcttctctggtggattacggactggatcggaccaaagatcgatccagctcctagtactaataatatagttgtacttgagaaaaatgaaataattgtaatttattgtttttttggggacctttgatattattgtactcgcgcgcgccggccttgcgtggaaattgaagttcgcaataaggccggccgccggcttttattcagcgtgccctctcgtcccttcagtagcttctggtgtgtagcagcgcggtggtgacttttggtgtttgctagggtgtaagtaacgccaccacgtacgtatcttcgcacatgggtggggcaagcatgtcctgtgtgctgacttgaattcccgcggccgcgaccggtgtcggctgcgtctgccggtgtggaatgcagccgtcgtgcactagcactactggtcctcttcagtagcctctattgacttattgagaagctagcttgtgtgcatcatccgtagatttgcttacc

SEQ ID NO: 63239 - DNA, 1345 bp, Zea Mays
cgggtaacttcatgctttccacaatgtgtgtcgacatgatgcttgtagagatgcttggaccaatcttcaactcatggggcgcttcatcctcggcctcctacgcatgcacttctcctgcttctcctgctggtcatcgcccaaggatgaattgctgctcttgaccatagggattggagcagcatgtagtttatactttatcctggttttctctctcgagatgttgcatggtgtcagtgtgtcagatgtgccgtaacagatgactccaaaatggattgcatgctcttcaaatagctacagataactatcttcacataaaatggagagtacaatgtttataaaagaaggaatatggataaggatccagattctcctatagcatatgaagaggcaaaggaaatggcaagccaaagctgcacaatttctgatgatcactcgttgttactgttatccattatctcctcagaggcattgcttttaaattcaacagcagacatggcagcctttcaagatttggcacattgacataatgacatgggttggtcacggattggatgtcaattttgctccctgtaccttgtagattatcggttatgtcaattttcgaaatttctatcgtgatggataacatttgaataaaacatagttaaataaacatgactactgtttcagtctttcgaaattctgatgctatagtgtcagtatactatgtcattttagggaaaatatatgtcatgtttattttgataaaattatatgatttctcactcaattcttgtcggtggcttcaggatttgttattttgtatatcgatctgtgtcatttgacaaagtactttgacttggtataatatgagtgttacttcgaccaaaagagcttggtaaagtgtgagaaactccgcaaacttcttctgcagacgatgactagcaacagttatgacgagggtcaagatagccgccatacatgatacattgagtacaacatcaagataaacactccctccccacacacaacttttgccttccgttcactctgtatgttgtgtttattacggttgcatatgttgtgtttattatggcatcaacacgttccattagaaaatataactattgtttgtcaagtacaaaatcataatcacatcagcttgtaataatattgcatcactgttttgtaccaaattgtaagttgttgtagcaacgcacgggcaccctactagtatatagagtaagttatcattaaattctcaaagcatcacatcaaaatggcacaagacatttaaaacatacttttggatatatatatacacacacacgcccaaacaagctcttagttgggctgtcactttaac

SEQ ID NO: 63240 - DNA, 1612 bp, Zea Mays
gtttttaaccactctatagtttgtatagacatgcaacattcatctcagggtcaagaaagaagctcaacttggcatgcttcctgtttaaagcaaggagctactgacaatggaaagcaacgattagagtaacttgatgagtgaggactattcattcagttgcttcgatcaataagtgaactaatggatgcatgtttcttttgataagtcacatatggaaagtgaagaacccaaatgatttcttcacaggaagcttggaccaatcttcaactcatggggcgcttcatcctcggcctcctacgcatgcacttctcctgcttctcctgctggtcatcgcccaagatgttgcatggtgtcagtgtgtcagatgtgccgtaacagatgactccaaaatggattgcatgctcttcaaatagctacagataactatcttcacataaaatggagagtacaatgtttataaaagaaggaatatggataaggatccagattctcctatagcatatgaagaggcaaaggaaatggcaagccaaagctgcacaatttctgatgatcactcgttgttactgttatccattatctcctcagaggcattgcttttaaattcaacagcagacatggcaggtgcaggtcctatcctatccattatctacccctgcatgtgtgccagctattctactctatgtttcaatagtttggaaataattcagagctaaggttttctgatacaggtacgtgtccactttcttctcaaggaattgcactagagcctttcaagatttggcacattgacataatgacatgggttggtcacggattggatgtcaattttgctccctgtaccttgtagattatcggttatgtcaattttcgaaatttctatcgtgatggataacatttgaataaaacatagttaaataaacatgactactgtttcagtctttcgaaattctgatgctatagtgtcagtatactatgtcattttagggaaaatatatgtcatgtttattttgataaaattatatgatttctcactcaattcttgtcggtggcttcaggatttgttattttgtatatcgatctgtgtcatttgacaaagtactttgacttggtataatatgagtgttacttcgaccaaaagagcttggtaaagtgtgagaaactccgcaaacttcttctgcagacgatgactagcaacagttatgacgagggtcaagatagccgccatacatgatacattgagtacaacatcaagataaacactccctccccacacacaacttttgccttccgttcactctgtatgttgtgtttattacggttgcatatgttgtgtttattatggcatcaacacgttccattagaaaatataactattgtttgtcaagtacaaaatcataatcacatcagcttgtaataatattgcatcactgttttgtaccaaattgtaagttgttgtagcaacgcacgggcaccctactagtatatagagtaagttatcattaaattctcaaagcatcacatcaaaatggcacaagacatttaaaacatacttttggatatatatatacacacacacgcccaaacaagctcttagttgggctgtcactttaac

SEQ ID NO: 63241 - DNA, 1925 bp, Zea Mays
ttgatcatttggacttctactccatccacaattttggtttattcagtgaggaactatgtttttaaccactctatagtttgtatagacatgcaacattcatctcagggtcaagaaagaagctcaacttggcatgcttcctgtttaaagcaaggcaagaaacatccccgccagatctctgtcgccaaagcagggctggtgaagaagtcacatatggaaagtgaagaacccaaatgatttcttcacaggaagcttggaccaatcttcaactcatggggcgcttcatcctcggcctcctacgcatgcacttctcctgcttctcctgctggtcatcgcccaagatgttgcatggtgtcagtgtgtcagatgtgccgtaacagatgactccaaaatggattgcatgctcttcaaatagctacagataactatcttcacataaaatggagagtacaatgtttataaaagaaggaatatggataaggatccagattctcctatagcatatgaagaggcaaaggaaatggcaagccaaagctgcacaatttctgatgatcactcgttgttactgttatccattatctcctcagaggcattgcttttaaattcaacagcagacatggcaggtacgtgtccactttcttctcaaggaattgcactagaggttggactttgtgggtcaagagaaatttaatgcctattgttaatacaacctttagctatttttccatgatgatggagttggacaagtaccatattgagtataagtgttagcctattatatctttgtacaaccatggcaaacgaataatttcttataacaccatgaagataatgtttaacgaagtgtgtttgcgtgcgtgtgtaatttcttcttttgttttgctgctaagtttgatagttcaaaacatgattcttgtaaagtttggttttagtctaacaaatacactcaagtcctgacatgtaaactgtaaagttggactgttgcttggtggatctgtattgaactttattttttttaaaatgttttatggcttgtatagtttgtattcacttctcacctaagctacaatttgtttttccagcctttcaagatttggcacattgacataatgacatgggttggtcacggattggatgtcaattttgctccctgtaccttgtagattatcggttatgtcaattttcgaaatttctatcgtgatggataacatttgaataaaacatagttaaataaacatgactactgtttcagtctttcgaaattctgatgctatagtgtcagtatactatgtcattttagggaaaatatatgtcatgtttattttgataaaattatatgatttctcactcaattcttgtcggtggcttcaggatttgttattttgtatatcgatctgtgtcatttgacaaagtactttgacttggtataatatgagtgttacttcgaccaaaagagcttggtaaagtgtgagaaactccgcaaacttcttctgcagacgatgactagcaacagttatgacgagggtcaagatagccgccatacatgatacattgagtacaacatcaagataaacactccctccccacacacaacttttgccttccgttcactctgtatgttgtgtttattacggttgcatatgttgtgtttattatggcatcaacacgttccattagaaaatataactattgtttgtcaagtacaaaatcataatcacatcagcttgtaataatattgcatcactgttttgtaccaaattgtaagttgttgtagcaacgcacgggcaccctactagtatatagagtaagttatcattaaattctcaaagcatcacatcaaaatggcacaagacatttaaaacatacttttggatatatatatacacacacacgcccaaacaagctcttagttgggctgtcactttaac

SEQ ID NO: 63242 - DNA, 2049 bp, Zea Mays
tttctattgtatgtttgatcatttggacttctactccatccacaattttggtttattcagtgaggaactatgtttttaaccactctatagtttgtatagacatgcaacattcatctcagggtcaagaaagaagctcaacttggcatgcttcctgtttaaagcaaggcaagaaacatccccgccagatctctgtcgccaaagcagggctggtgaagaagagctactgacaatggaaagcaacgattagagtaacttgatgagtgaggactattcattcagttgcttcgatcaataagtgaactaatggatgcatgtttcttttgataagtcacatatggaaagtgaagaacccaaatgatttcttcacaggaagcttggaccaatcttcaactcatggggcgcttcatcctcggcctcctacgcatgcacttctcctgcttctcctgctggtcatcgcccaagatgttgcatggtgtcagtgtgtcagatgtgccgtaacagatgactccaaaatggattgcatgctcttcaaatagctacagataactatcttcacataaaatggagagtacaatgtttataaaagaaggaatatggataaggatccagattctcctatagcatatgaagaggcaaaggaaatggcaagccaaagctgcacaatttctgatgatcactcgttgttactgttatccattatctcctcagaggcattgcttttaaattcaacagcagacatggcaggtacgtgtccactttcttctcaaggaattgcactagaggttggactttgtgggtcaagagaaatttaatgcctattgttaatacaacctttagctatttttccatgatgatggagttggacaagtaccatattgagtataagtgttagcctattatatctttgtacaaccatggcaaacgaataatttcttataacaccatgaagataatgtttaacgaagtgtgtttgcgtgcgtgtgtaatttcttcttttgttttgctgctaagtttgatagttcaaaacatgattcttgtaaagtttggttttagtctaacaaatacactcaagtcctgacatgtaaactgtaaagttggactgttgcttggtggatctgtattgaactttattttttttaaaatgttttatggcttgtatagtttgtattcacttctcacctaagctacaatttgtttttccagcctttcaagatttggcacattgacataatgacatgggttggtcacggattggatgtcaattttgctccctgtaccttgtagattatcggttatgtcaattttcgaaatttctatcgtgatggataacatttgaataaaacatagttaaataaacatgactactgtttcagtctttcgaaattctgatgctatagtgtcagtatactatgtcattttagggaaaatatatgtcatgtttattttgataaaattatatgatttctcactcaattcttgtcggtggcttcaggatttgttattttgtatatcgatctgtgtcatttgacaaagtactttgacttggtataatatgagtgttacttcgaccaaaagagcttggtaaagtgtgagaaactccgcaaacttcttctgcagacgatgactagcaacagttatgacgagggtcaagatagccgccatacatgatacattgagtacaacatcaagataaacactccctccccacacacaacttttgccttccgttcactctgtatgttgtgtttattacggttgcatatgttgtgtttattatggcatcaacacgttccattagaaaatataactattgtttgtcaagtacaaaatcataatcacatcagcttgtaataatattgcatcactgttttgtaccaaattgtaagttgttgtagcaacgcacgggcaccctactagtatatagagtaagttatcattaaattctcaaagcatcacatcaaaatggcacaagacatttaaaacatacttttggatatatatatacacacacacgcccaaacaagctcttagttgggctgtcactttaac

SEQ ID NO: 63243 - DNA, 2307 bp, Zea Mays
tccaagttatgacactgttaggaagatggttcaacttctctcgaaatgaagcttctgtcttcctatgtatagacaagttgttcagttaggaggtctagattctcttaaaatggtgctatctacgagttaggaggtctaggagcacactgaatgttttagaggttgatgaaatcgttgttttcctaaaaaagcattttttctgctttgtttgaaattgtttgggttttcctccccaactttcataattacctatttctattgtatgtttgatcatttggacttctactccatccacaattttggtttattcagtgaggaactatgtttttaaccactctatagtttgtatagacatgcaacattcatctcagggtcaagaaagaagctcaacttggcatgcttcctgtttaaagcaaggagctactgacaatggaaagcaacgattagagtaacttgatgagtgaggactattcattcagttgcttcgatcaataagtgaactaatggatgcatgtttcttttgataagtcacatatggaaagtgaagaacccaaatgatttcttcacaggaagcttggaccaatcttcaactcatggggcgcttcatcctcggcctcctacgcatgcacttctcctgcttctcctgctggtcatcgcccaaggatgaattgctgctcttgaccatagggattggagcagcatgtagtttatactttatcctggttttctctctcgagtgtgtcagatgtgccgtaacagatgactccaaaatggattgcatgctcttcaaatagctacagataactatcttcacataaaatggagagtacaatgtttataaaagaaggaatatggataaggatccagattctcctatagcatatgaagaggcaaaggaaatggcaagccaaagctgcacaatttctgatgatcactcgttgttactgttatccattatctcctcagaggcattgcttttaaattcaacagcagacatggcaggtacgtgtccactttcttctcaaggaattgcactagaggttggactttgtgggtcaagagaaatttaatgcctattgttaatacaacctttagctatttttccatgatgatggagttggacaagtaccatattgagtataagtgttagcctattatatctttgtacaaccatggcaaacgaataatttcttataacaccatgaagataatgtttaacgaagtgtgtttgcgtgcgtgtgtaatttcttcttttgttttgctgctaagtttgatagttcaaaacatgattcttgtaaagtttggttttagtctaacaaatacactcaagtcctgacatgtaaactgtaaagttggactgttgcttggtggatctgtattgaactttattttttttaaaatgttttatggcttgtatagtttgtattcacttctcacctaagctacaatttgtttttccagcctttcaagatttggcacattgacataatgacatgggttggtcacggattggatgtcaattttgctccctgtaccttgtagattatcggttatgtcaattttcgaaatttctatcgtgatggataacatttgaataaaacatagttaaataaacatgactactgtttcagtctttcgaaattctgatgctatagtgtcagtatactatgtcattttagggaaaatatatgtcatgtttattttgataaaattatatgatttctcactcaattcttgtcggtggcttcaggatttgttattttgtatatcgatctgtgtcatttgacaaagtactttgacttggtataatatgagtgttacttcgaccaaaagagcttggtaaagtgtgagaaactccgcaaacttcttctgcagacgatgactagcaacagttatgacgagggtcaagatagccgccatacatgatacattgagtacaacatcaagataaacactccctccccacacacaacttttgccttccgttcactctgtatgttgtgtttattacggttgcatatgttgtgtttattatggcatcaacacgttccattagaaaatataactattgtttgtcaagtacaaaatcataatcacatcagcttgtaataatattgcatcactgttttgtaccaaattgtaagttgttgtagcaacgcacgggcaccctactagtatatagagtaagttatcattaaattctcaaagcatcacatcaaaatggcacaagacatttaaaacatacttttggatatatatatacacacacacgcccaaacaagctcttagttgggctgtcactttaac

SEQ ID NO: 63244 - DNA, 2324 bp, Zea Mays
tccaagttatgacactgttaggaagatggttcaacttctctcgaaatgaagcttctgtcttcctatgtatagacaagttgttcagttaggaggtctagattctcttaaaatggtgctatctacgagttaggaggtctaggagcacactgaatgttttagaggttgatgaaatcgttgttttcctaaaaaagcattttttctgctttgtttgaaattgtttgggttttcctccccaactttcataattacctatttctattgtatgtttgatcatttggacttctactccatccacaattttggtttattcagtgaggaactatgtttttaaccactctatagtttgtatagacatgcaacattcatctcagggtcaagaaagaagctcaacttggcatgcttcctgtttaaagcaaggagctactgacaatggaaagcaacgattagagtaacttgatgagtgaggactattcattcagttgcttcgatcaataagtgaactaatggatgcatgtttcttttgataagtcacatatggaaagtgaagaacccaaatgatttcttcacaggaagcttggaccaatcttcaactcatggggcgcttcatcctcggcctcctacgcatgcacttctcctgcttctcctgctggtcatcgcccaaggatgaattgctgctcttgaccatagggattggagcagcatgtagtttatactttatcctggttttctctctcgagatgttgcatggtgtcagtgtgtcagatgtgccgtaacagatgactccaaaatggattgcatgctcttcaaatagctacagataactatcttcacataaaatggagagtacaatgtttataaaagaaggaatatggataaggatccagattctcctatagcatatgaagaggcaaaggaaatggcaagccaaagctgcacaatttctgatgatcactcgttgttactgttatccattatctcctcagaggcattgcttttaaattcaacagcagacatggcaggtacgtgtccactttcttctcaaggaattgcactagaggttggactttgtgggtcaagagaaatttaatgcctattgttaatacaacctttagctatttttccatgatgatggagttggacaagtaccatattgagtataagtgttagcctattatatctttgtacaaccatggcaaacgaataatttcttataacaccatgaagataatgtttaacgaagtgtgtttgcgtgcgtgtgtaatttcttcttttgttttgctgctaagtttgatagttcaaaacatgattcttgtaaagtttggttttagtctaacaaatacactcaagtcctgacatgtaaactgtaaagttggactgttgcttggtggatctgtattgaactttattttttttaaaatgttttatggcttgtatagtttgtattcacttctcacctaagctacaatttgtttttccagcctttcaagatttggcacattgacataatgacatgggttggtcacggattggatgtcaattttgctccctgtaccttgtagattatcggttatgtcaattttcgaaatttctatcgtgatggataacatttgaataaaacatagttaaataaacatgactactgtttcagtctttcgaaattctgatgctatagtgtcagtatactatgtcattttagggaaaatatatgtcatgtttattttgataaaattatatgatttctcactcaattcttgtcggtggcttcaggatttgttattttgtatatcgatctgtgtcatttgacaaagtactttgacttggtataatatgagtgttacttcgaccaaaagagcttggtaaagtgtgagaaactccgcaaacttcttctgcagacgatgactagcaacagttatgacgagggtcaagatagccgccatacatgatacattgagtacaacatcaagataaacactccctccccacacacaacttttgccttccgttcactctgtatgttgtgtttattacggttgcatatgttgtgtttattatggcatcaacacgttccattagaaaatataactattgtttgtcaagtacaaaatcataatcacatcagcttgtaataatattgcatcactgttttgtaccaaattgtaagttgttgtagcaacgcacgggcaccctactagtatatagagtaagttatcattaaattctcaaagcatcacatcaaaatggcacaagacatttaaaacatacttttggatatatatatacacacacacgcccaaacaagctcttagttgggctgtcactttaac

SEQ ID NO: 63245 - DNA, 2296 bp, Zea Mays
caatactgctatagtagcttctccaagttatgacactgttaggaagatggttcaacttctctcgaaatgaagcttctgtcttcctatgtatagacaagttgttcagttaggaggtctagattctcttaaaatggtgctatctacgagttaggaggtctaggagcacactgaatgttttagaggttgatgaaatcgttgttttcctaaaaaagcattttttctgctttgtttgaaattgtttgggttttcctccccaactttcataattacctatttctattgtatgtttgatcatttggacttctactccatccacaattttggtttattcagtgaggaactatgtttttaaccactctatagtttgtatagacatgcaacattcatctcagggtcaagaaagaagctcaacttggcatgcttcctgtttaaagcaaggcaagaaacatccccgccagatctctgtcgccaaagcagggctggtgaagaagttgtgtttccctcccggattgtcactactttcatatttgttcatttatgtttgttccaatttatgttggttttttacagttacagaatatgtttgttccagttgagttccagtttgaaaactggaacaaccactagcagatgcaaagttcacaaagtagcttgtcaaataatgtgcatgaactggaacaagcaacttgtgcacgaatgagcattactggaacaagtagcttgtgcatgaacgagtaatactgtagatgattggacatgagctactgacaatggaaagcaacgattagagtaacttgatgagtgaggactattcattcagttgcttcgatcaataagtgaactaatggatgcatgtttcttttgataagtcacatatggaaagtgaagaacccaaatgatttcttcacaggaagcttggaccaatcttcaactcatggggcgcttcatcctcggcctcctacgcatgcacttctcctgcttctcctgctggtcatcgcccaaggatgaattgctgctcttgaccatagggattggagcagcatgtagtttatactttatcctggttttctctctcgagtgtgtcagatgtgccgtaacagatgactccaaaatggattgcatgctcttcaaatagctacagataactatcttcacataaaatggagagtacaatgtttataaaagaaggaatatggataaggatccagattctcctatagcatatgaagaggcaaaggaaatggcaagccaaagctgcacaatttctgatgatcactcgttgttactgttatccattatctcctcagaggcattgcttttaaattcaacagcagacatggcaggtgcaggtcctatcctatccattatctacccctgcatgtgtgccagctattctactctatgtttcaatagtttggaaataattcagagctaaggttttctgatacagcctttcaagatttggcacattgacataatgacatgggttggtcacggattggatgtcaattttgctccctgtaccttgtagattatcggttatgtcaattttcgaaatttctatcgtgatggataacatttgaataaaacatagttaaataaacatgactactgtttcagtctttcgaaattctgatgctatagtgtcagtatactatgtcattttagggaaaatatatgtcatgtttattttgataaaattatatgatttctcactcaattcttgtcggtggcttcaggatttgttattttgtatatcgatctgtgtcatttgacaaagtactttgacttggtataatatgagtgttacttcgaccaaaagagcttggtaaagtgtgagaaactccgcaaacttcttctgcagacgatgactagcaacagttatgacgagggtcaagatagccgccatacatgatacattgagtacaacatcaagataaacactccctccccacacacaacttttgccttccgttcactctgtatgttgtgtttattacggttgcatatgttgtgtttattatggcatcaacacgttccattagaaaatataactattgtttgtcaagtacaaaatcataatcacatcagcttgtaataatattgcatcactgttttgtaccaaattgtaagttgttgtagcaacgcacgggcaccctactagtatatagagtaagttatcattaaattctcaaagcatcacatcaaaatggcacaagacatttaaaacatacttttggatatatatatacacacacacgcccaaacaagctcttagttgggctgtcactttaac

SEQ ID NO: 63246 - DNA, 3238 bp, Zea Mays
gtccaatactgctatagtagcttctccaagttatgacactgttaggaagatggttcaacttctctcgaaatgaagcttctgtcttcctatgtatagacaagttgttcagttaggaggtctagattctcttaaaatggtgctatctacgagttaggaggtctaggagcacactgaatgttttagaggttgatgaaatcgttgttttcctaaaaaagcattttttctgctttgtttgaaattgtttgggttttcctccccaactttcataattacctatttctattgtatgtttgatcatttggacttctactccatccacaattttggtttattcagtgaggaactatgtttttaaccactctatagtttgtatagacatgcaacattcatctcagggtcaagaaagaagctcaacttggcatgcttcctgtttaaagcaaggcaagaaacatccccgccagatctctgtcgccaaagcagggctggtgaagaagagctactgacaatggaaagcaacgattagagtaacttgatgagtgaggactattcattcagttgcttcgatcaataagtgaactaatggatgcatgtttcttttgataagtgagctaactactttagtcacaaagttcgtgttgatttctaaacatggtatgatggttttgtcatcctattcgattgagtttgggaaaaagcctgcacattctgaaaacaaacagactgcacattgtgtggctgataaggttgagtgggtaaataagatcaaagctattatttagacatactgaaaatatagtgaaggaagcgtaagcaatttttctgctatatttatgcattgtatccttgtaaaattatcaatattgttctgacttgtggggaaaggtatgagagtattcatttttttgcctcttttctgtttgcattccttcttcagtataatgtttgttagaataaccaggtgaatttacaaatttcatatccatatactttcttcgatgacaaatataaatctacctaggtttgtcataactcataggtcaatcattctaacttcaattgacattttttataaaaagtatcataaggaaaataatatattatcataaaagtgacgtccatctatatcaaattttagatattgatggtggtcagagttaaaaaacagtttgccttaagacaaaccaagatgaacttgtatttacaatcgaaggaaatattgcacattgcctagacatttaatttattagataaattcttttgttagttgttcaactttgtacgtcttataagtcacaggaacaatgtttatctagaacttcggtctcaaattatacagtagtgttcagccatacctgccatgtcacaagaaagagagataaaaagtatttaatagtagacctaatgatgctcatttgtaattgtagatattcgtatatcctttttctgcaaccttgtgaaacatgtgatggtttgacttggaacaaactttgggtctgatatagtaaaatgcaatgtatgtggagggaagtagtagaacaagacagaacaagtgccaaataaggttatatagtagaatacaatgtgtggagggaaatagtagaacaacacaaaacaagtgccaaataaggttacaaggtttatagtagcgattgcttagctgctacaacgacactcatagattagcctggcatttgcaatgtcgctcttgtatttgccataacctcacttaaggtcacacattgcctctgggaccttgacctccgctactgttgtcgcctggccgcgtcgacttcaccaatgccggggtgtccaacctcatcagcttcaccgtcgtcgactgctcccacacaaccgagctgtgggtcctggtcacatatggaaagtgaagaacccaaatgatttcttcacaggaagcttggaccaatcttcaactcatggggcgcttcatcctcggcctcctacgcatgcacttctcctgcttctcctgctggtcatcgcccaagatgttgcatggtgtcagtgtgtcagatgtgccgtaacagatgactccaaaatggattgcatgctcttcaaatagctacagataactatcttcacataaaatggagagtacaatgtttataaaagaaggaatatggataaggatccagattctcctatagcatatgaagaggcaaaggaaatggcaagccaaagctgcacaatttctgatgatcactcgttgttactgttatccattatctcctcagaggcattgcttttaaattcaacagcagacatggcaggtgcaggtcctatcctatccattatctacccctgcatgtgtgccagctattctactctatgtttcaatagtttggaaataattcagagctaaggttttctgatacagcctttcaagatttggcacattgacataatgacatgggttggtcacggattggatgtcaattttgctccctgtaccttgtagattatcggttatgtcaattttcgaaatttctatcgtgatggataacatttgaataaaacatagttaaataaacatgactactgtttcagtctttcgaaattctgatgctatagtgtcagtatactatgtcattttagggaaaatatatgtcatgtttattttgataaaattatatgatttctcactcaattcttgtcggtggcttcaggatttgttattttgtatatcgatctgtgtcatttgacaaagtactttgacttggtataatatgagtgttacttcgaccaaaagagcttggtaaagtgtgagaaactccgcaaacttcttctgcagacgatgactagcaacagttatgacgagggtcaagatagccgccatacatgatacattgagtacaacatcaagataaacactccctccccacacacaacttttgccttccgttcactctgtatgttgtgtttattacggttgcatatgttgtgtttattatggcatcaacacgttccattagaaaatataactattgtttgtcaagtacaaaatcataatcacatcagcttgtaataatattgcatcactgttttgtaccaaattgtaagttgttgtagcaacgcacgggcaccctactagtatatagagtaagttatcattaaattctcaaagcatcacatcaaaatggcacaagacatttaaaacatacttttggatatatatatacacacacacgcccaaacaagctcttagttgggctgtcactttaac

SEQ ID NO: 63247 - DNA, 3935 bp, Zea Mays
tgtccaatactgctatagtagcttctccaagttatgacactgttaggaagatggttcaacttctctcgaaatgaagcttctgtcttcctatgtatagacaagttgttcagttaggaggtctagattctcttaaaatggtgctatctacgagttaggaggtctaggagcacactgaatgttttagaggttgatgaaatcgttgttttcctaaaaaagcattttttctgctttgtttgaaattgtttgggttttcctccccaactttcataattacctatttctattgtatgtttgatcatttggacttctactccatccacaattttggtttattcagtgaggaactatgtttttaaccactctatagtttgtatagacatgcaacattcatctcagggtcaagaaagaagctcaacttggcatgcttcctgtttaaagcaaggcaagaaacatccccgccagatctctgtcgccaaagcagggctggtgaagaagttgtgtttccctcccggattgtcactactttcatatttgttcatttatgtttgttccaatttatgttggttttttacagttacagaatatgtttgttccagttgagttccagtttgaaaactggaacaaccactagcagatgcaaagttcacaaagtagcttgtcaaataatgtgcatgaactggaacaagcaacttgtgcacgaatgagcattactggaacaagtagcttgtgcatgaacgagtaatactgtagatgattggacatgtatgtctattttagatttttaatatttaatgttatatattcagctcataccatacatgaatttgcatttctgtactatactcacttaatgtcctacctgttttgttagcttcaactatccgctttaaactgacaaaaccagaccaaacatatgcaaatctcatatacctgtgaaagcaacaactgatttgccagattggttaattaaacgtaacaataaatagccccgattaaatggcttataaatatacttggatctgttcatttttcacatatcagctattaatgaagccttcactgggttcattttgtactactccattacttatttacagttacaagtattctaagaaacttaatatttcatcatcaaagttgtattcagacagtttcatttacattgctctgattttttgtactaggagctactgacaatggaaagcaacgattagagtaacttgatgagtgaggactattcattcagttgcttcgatcaataagtgaactaatggatgcatgtttcttttgataagtgagctaactactttagtcacaaagttcgtgttgatttctaaacatggtatgatggttttgtcatcctattcgattgagtttgggaaaaagcctgcacattctgaaaacaaacagactgcacattgtgtggctgataaggttgagtgggtaaataagatcaaagctattatttagacatactgaaaatatagtgaaggaagcgtaagcaatttttctgctatatttatgcattgtatccttgtaaaattatcaatattgttctgacttgtggggaaaggtatgagagtattcatttttttgcctcttttctgtttgcattccttcttcagtataatgtttgttagaataaccaggtgaatttacaaatttcatatccatatactttcttcgatgacaaatataaatctacctaggtttgtcataactcataggtcaatcattctaacttcaattgacattttttataaaaagtatcataaggaaaataatatattatcataaaagtgacgtccatctatatcaaattttagatattgatggtggtcagagttaaaaaacagtttgccttaagacaaaccaagatgaacttgtatttacaatcgaaggaaatattgcacattgcctagacatttaatttattagataaattcttttgttagttgttcaactttgtacgtcttataagtcacaggaacaatgtttatctagaacttcggtctcaaattatacagtagtgttcagccatacctgccatgtcacaagaaagagagataaaaagtatttaatagtagacctaatgatgctcatttgtaattgtagatattcgtatatcctttttctgcaaccttgtgaaacatgtgatggtttgacttggaacaaactttgggtctgatatagtaaaatgcaatgtatgtggagggaagtagtagaacaagacagaacaagtgccaaataaggttatatagtagaatacaatgtgtggagggaaatagtagaacaacacaaaacaagtgccaaataaggttacaaggtttatagtagcgattgcttagctgctacaacgacactcatagattagcctggcatttgcaatgtcgctcttgtatttgccataacctcacttaaggtcacacattgcctctgggaccttgacctccgctactgttgtcgcctggccgcgtcgacttcaccaatgccggggtgtccaacctcatcagcttcaccgtcgtcgactgctcccacacaaccgagctgtgggtcctggtaccggtcacatatggaaagtgaagaacccaaatgatttcttcacaggaagcttggaccaatcttcaactcatggggcgcttcatcctcggcctcctacgcatgcacttctcctgcttctcctgctggtcatcgcccaagatgttgcatggtgtcagtgtgtcagatgtgccgtaacagatgactccaaaatggattgcatgctcttcaaatagctacagataactatcttcacataaaatggagagtacaatgtttataaaagaaggaatatggataaggatccagattctcctatagcatatgaagaggcaaaggaaatggcaagccaaagctgcacaatttctgatgatcactcgttgttactgttatccattatctcctcagaggcattgcttttaaattcaacagcagacatggcaggtgcaggtcctatcctatccattatctacccctgcatgtgtgccagctattctactctatgtttcaatagtttggaaataattcagagctaaggttttctgatacagcctttcaagatttggcacattgacataatgacatgggttggtcacggattggatgtcaattttgctccctgtaccttgtagattatcggttatgtcaattttcgaaatttctatcgtgatggataacatttgaataaaacatagttaaataaacatgactactgtttcagtctttcgaaattctgatgctatagtgtcagtatactatgtcattttagggaaaatatatgtcatgtttattttgataaaattatatgatttctcactcaattcttgtcggtggcttcaggatttgttattttgtatatcgatctgtgtcatttgacaaagtactttgacttggtataatatgagtgttacttcgaccaaaagagcttggtaaagtgtgagaaactccgcaaacttcttctgcagacgatgactagcaacagttatgacgagggtcaagatagccgccatacatgatacattgagtacaacatcaagataaacactccctccccacacacaacttttgccttccgttcactctgtatgttgtgtttattacggttgcatatgttgtgtttattatggcatcaacacgttccattagaaaatataactattgtttgtcaagtacaaaatcataatcacatcagcttgtaataatattgcatcactgttttgtaccaaattgtaagttgttgtagcaacgcacgggcaccctactagtatatagagtaagttatcattaaattctcaaagcatcacatcaaaatggcacaagacatttaaaacatacttttggatatatatatacacacacacgcccaaacaagctcttagttgggctgtcactttaac

SEQ ID NO: 63248 - DNA, 4945 bp, Zea Mays
tgtccaatactgctatagtagcttctccaagttatgacactgttaggaagatggttcaacttctctcgaaatgaagcttctgtcttcctatgtatagacaagttgttcagttaggaggtctagattctcttaaaatggtgctatctacgagttaggaggtctaggagcacactgaatgttttagaggttgatgaaatcgttgttttcctaaaaaagcattttttctgctttgtttgaaattgtttgggttttcctccccaactttcataattacctatttctattgtatgtttgatcatttggacttctactccatccacaattttggtttattcagtgaggaactatgtttttaaccactctatagtttgtatagacatgcaacattcatctcagggtcaagaaagaagctcaacttggcatgcttcctgtttaaagcaaggcaagaaacatccccgccagatctctgtcgccaaagcagggctggtgaagaagttgtgtttccctcccggattgtcactactttcatatttgttcatttatgtttgttccaatttatgttggttttttacagttacagaatatgtttgttccagttgagttccagtttgaaaactggaacaaccactagcagatgcaaagttcacaaagtagcttgtcaaataatgtgcatgaactggaacaagcaacttgtgcacgaatgagcattactggaacaagtagcttgtgcatgaacgagtaatactgtagatgattggacatgtatgtctattttagatttttaatatttaatgttatatattcagctcataccatacatgaatttgcatttctgtactatactcacttaatgtcctacctgttttgttagcttcaactatccgctttaaactgacaaaaccagaccaaacatatgcaaatctcatatacctgtgaaagcaacaactgatttgccagattggttaattaaacgtaacaataaatagccccgattaaatggcttataaatatacttggatctgttcatttttcacatatcagctattaatgaagccttcactgggttcattttgtactactccattacttatttacagttacaagtattctaagaaacttaatatttcatcatcaaagttgtattcagacagtttcatttacattgctctgattttttgtactaggagctactgacaatggaaagcaacgattagagtaacttgatgagtgaggactattcattcagttgcttcgatcaataagtgaactaatggatgcatgtttcttttgataagtgagctaactactttagtcacaaagttcgtgttgatttctaaacatggtatgatggttttgtcatcctattcgattgagtttgggaaaaagcctgcacattctgaaaacaaacagactgcacattgtgtggctgataaggttgagtgggtaaataagatcaaagctattatttagacatactgaaaatatagtgaaggaagcgtaagcaatttttctgctatatttatgcattgtatccttgtaaaattatcaatattgttctgacttgtggggaaaggtatgagagtattcatttttttgcctcttttctgtttgcattccttcttcagtataatgtttgttagaataaccaggtgaatttacaaatttcatatccatatactttcttcgatgacaaatataaatctacctaggtttgtcataactcataggtcaatcattctaacttcaattgacattttttataaaaagtatcataaggaaaataatatattatcataaaagtgacgtccatctatatcaaattttagatattgatggtggtcagagttaaaaaacagtttgccttaagacaaaccaagatgaacttgtatttacaatcgaaggaaatattgcacattgcctagacatttaatttattagataaattcttttgttagttgttcaactttgtacgtcttataagtcacaggaacaatgtttatctagaacttcggtctcaaattatacagtagtgttcagccatacctgccatgtcacaagaaagagagataaaaagtatttaatagtagacctaatgatgctcatttgtaattgtagatattcgtatatcctttttctgcaaccttgtgaaacatgtgatggtttgacttggaacaaactttgggtctgatatagtaaaatgcaatgtatgtggagggaagtagtagaacaagacagaacaagtgccaaataaggttatatagtagaatacaatgtgtggagggaaatagtagaacaacacaaaacaagtgccaaataaggttacaaggtttatagtagcgattgcttagctgctacaacgacactcatagattagcctggcatttgcaatgtcgctcttgtatttgccataacctcacttaaggtcacacattgcctctgggaccttgacctccgctactgttgtcgcctggccgcgtcgacttcaccaatgccggggtgtccaacctcatcagcttcaccgtcgtcgactgctcccacacaaccgagctgtgggtcctggtaccggtcgcgccccgcctctgctccttctgcttcagcgagtggcagactatcgatacactcgatttcaattgttttttacgctatttactgtattgcaatgggacaatggatgattaggatttgttttttaagactggcccatgatttatcgtcgtatactatttctttaatagattgttcgctacatctactgatctacatgttcacatgtttcaacttctgtcagcatccgtagttactatatgaatgctcattctgtgtcaccttttaagtttacaaatgctcttttccaggtcacatatggaaagtgaagaacccaaatgatttcttcacaggaaggtgcttacatcttgcttccatgcctcggtagtttcggtcactattagttttgctatgcctttcctacataaataattttgctacctcaaaatgcttctaaatatgatgatttatgctggagactgctaaccttcacacatctaataagatgaagcaacaagctagaaaatgtggaatttgtcatatgtccggatgcaaaacgggtaacttcatgctttccacaatgtgtgtcgacatgatgcttgtagagatggttcgttcctttggttccatgctgacatattcctttctgtgttatcctaagatagccacattattttgatgatatgaggatgattcaaattgattggttgttttttctaatttagcttggaccaatcttcaactcatggggcgcttcatcctcggcctcctacgcatgcacttctcctgcttctcctgctggtcatcgcccaagatgttgcatggtgtcagtgtgtcagatgtgccgtaacagatgactccaaaatggattgcatgctcttcaaatagctacagataactatcttcacataaaatggagagtacaatgtttataaaagaaggaatatggataaggatccagattctcctatagcatatgaagaggcaaaggaaatggcaagccaaagctgcacaatttctgatgatcactcgttgttactgttatccattatctcctcagaggcattgcttttaaattcaacagcagacatggcaggtacgtgtccactttcttctcaaggaattgcactagaggttggactttgtgggtcaagagaaatttaatgcctattgttaatacaacctttagctatttttccatgatgatggagttggacaagtaccatattgagtataagtgttagcctattatatctttgtacaaccatggcaaacgaataatttcttataacaccatgaagataatgtttaacgaagtgtgtttgcgtgcgtgtgtaatttcttcttttgttttgctgctaagtttgatagttcaaaacatgattcttgtaaagtttggttttagtctaacaaatacactcaagtcctgacatgtaaactgtaaagttggactgttgcttggtggatctgtattgaactttattttttttaaaatgttttatggcttgtatagtttgtattcacttctcacctaagctacaatttgtttttccagcctttcaagatttggcacattgacataatgacatgggttggtcacggattggatgtcaattttgctccctgtaccttgtagattatcggttatgtcaattttcgaaatttctatcgtgatggataacatttgaataaaacatagttaaataaacatgactactgtttcagtctttcgaaattctgatgctatagtgtcagtatactatgtcattttagggaaaatatatgtcatgtttattttgataaaattatatgatttctcactcaattcttgtcggtggcttcaggatttgttattttgtatatcgatctgtgtcatttgacaaagtactttgacttggtataatatgagtgttacttcgaccaaaagagcttggtaaagtgtgagaaactccgcaaacttcttctgcagacgatgactagcaacagttatgacgagggtcaagatagccgccatacatgatacattgagtacaacatcaagataaacactccctccccacacacaacttttgccttccgttcactctgtatgttgtgtttattacggttgcatatgttgtgtttattatggcatcaacacgttccattagaaaatataactattgtttgtcaagtacaaaatcataatcacatcagcttgtaataatattgcatcactgttttgtaccaaattgtaagttgttgtagcaacgcacgggcaccctactagtatatagagtaagttatcattaaattctcaaagcatcacatcaaaatggcacaagacatttaaaacatacttttggatatatatatacacacacacgcccaaacaagctcttagttgggctgtcactttaac

SEQ ID NO: 63249 - DNA, 4287 bp, Zea Mays
tgtccaatactgctatagtagcttctccaagttatgacactgttaggaagatggttcaacttctctcgaaatgaagcttctgtcttcctatgtatagacaagttgttcagttaggaggtctagattctcttaaaatggtgctatctacgagttaggaggtctaggagcacactgaatgttttagaggttgatgaaatcgttgttttcctaaaaaagcattttttctgctttgtttgaaattgtttgggttttcctccccaactttcataattacctatttctattgtatgtttgatcatttggacttctactccatccacaattttggtttattcagtgaggaactatgtttttaaccactctatagtttgtatagacatgcaacattcatctcagggtcaagaaagaagctcaacttggcatgcttcctgtttaaagcaaggcaagaaacatccccgccagatctctgtcgccaaagcagggctggtgaagaagttgtgtttccctcccggattgtcactactttcatatttgttcatttatgtttgttccaatttatgttggttttttacagttacagaatatgtttgttccagttgagttccagtttgaaaactggaacaaccactagcagatgcaaagttcacaaagtagcttgtcaaataatgtgcatgaactggaacaagcaacttgtgcacgaatgagcattactggaacaagtagcttgtgcatgaacgagtaatactgtagatgattggacatgtatgtctattttagatttttaatatttaatgttatatattcagctcataccatacatgaatttgcatttctgtactatactcacttaatgtcctacctgttttgttagcttcaactatccgctttaaactgacaaaaccagaccaaacatatgcaaatctcatatacctgtgaaagcaacaactgatttgccagattggttaattaaacgtaacaataaatagccccgattaaatggcttataaatatacttggatctgttcatttttcacatatcagctattaatgaagccttcactgggttcattttgtactactccattacttatttacagttacaagtattctaagaaacttaatatttcatcatcaaagttgtattcagacagtttcatttacattgctctgattttttgtactaggagctactgacaatggaaagcaacgattagagtaacttgatgagtgaggactattcattcagttgcttcgatcaataagtgaactaatggatgcatgtttcttttgataagtgagctaactactttagtcacaaagttcgtgttgatttctaaacatggtatgatggttttgtcatcctattcgattgagtttgggaaaaagcctgcacattctgaaaacaaacagactgcacattgtgtggctgataaggttgagtgggtaaataagatcaaagctattatttagacatactgaaaatatagtgaaggaagcgtaagcaatttttctgctatatttatgcattgtatccttgtaaaattatcaatattgttctgacttgtggggaaaggtatgagagtattcatttttttgcctcttttctgtttgcattccttcttcagtataatgtttgttagaataaccaggtgaatttacaaatttcatatccatatactttcttcgatgacaaatataaatctacctaggtttgtcataactcataggtcaatcattctaacttcaattgacattttttataaaaagtatcataaggaaaataatatattatcataaaagtgacgtccatctatatcaaattttagatattgatggtggtcagagttaaaaaacagtttgccttaagacaaaccaagatgaacttgtatttacaatcgaaggaaatattgcacattgcctagacatttaatttattagataaattcttttgttagttgttcaactttgtacgtcttataagtcacaggaacaatgtttatctagaacttcggtctcaaattatacagtagtgttcagccatacctgccatgtcacaagaaagagagataaaaagtatttaatagtagacctaatgatgctcatttgtaattgtagatattcgtatatcctttttctgcaaccttgtgaaacatgtgatggtttgacttggaacaaactttgggtctgatatagtaaaatgcaatgtatgtggagggaagtagtagaacaagacagaacaagtgccaaataaggttatatagtagaatacaatgtgtggagggaaatagtagaacaacacaaaacaagtgccaaataaggttacaaggtttatagtagcgattgcttagctgctacaacgacactcatagattagcctggcatttgcaatgtcgctcttgtatttgccataacctcacttaaggtcacacattgcctctgggaccttgacctccgctactgttgtcgcctggccgcgtcgacttcaccaatgccggggtgtccaacctcatcagcttcaccgtcgtcgactgctcccacacaaccgagctgtgggtcctggtaccggtcacatatggaaagtgaagaacccaaatgatttcttcacaggaagcttggaccaatcttcaactcatggggcgcttcatcctcggcctcctacgcatgcacttctcctgcttctcctgctggtcatcgcccaagatgttgcatggtgtcagtgtgtcagatgtgccgtaacagatgactccaaaatggattgcatgctcttcaaatagctacagataactatcttcacataaaatggagagtacaatgtttataaaagaaggaatatggataaggatccagattctcctatagcatatgaagaggcaaaggaaatggcaagccaaagctgcacaatttctgatgatcactcgttgttactgttatccattatctcctcagaggcattgcttttaaattcaacagcagacatggcaggtacgtgtccactttcttctcaaggaattgcactagaggttggactttgtgggtcaagagaaatttaatgcctattgttaatacaacctttagctatttttccatgatgatggagttggacaagtaccatattgagtataagtgttagcctattatatctttgtacaaccatggcaaacgaataatttcttataacaccatgaagataatgtttaacgaagtgtgtttgcgtgcgtgtgtaatttcttcttttgttttgctgctaagtttgatagttcaaaacatgattcttgtaaagtttggttttagtctaacaaatacactcaagtcctgacatgtaaactgtaaagttggactgttgcttggtggatctgtattgaactttattttttttaaaatgttttatggcttgtatagtttgtattcacttctcacctaagctacaatttgtttttccagcctttcaagatttggcacattgacataatgacatgggttggtcacggattggatgtcaattttgctccctgtaccttgtagattatcggttatgtcaattttcgaaatttctatcgtgatggataacatttgaataaaacatagttaaataaacatgactactgtttcagtctttcgaaattctgatgctatagtgtcagtatactatgtcattttagggaaaatatatgtcatgtttattttgataaaattatatgatttctcactcaattcttgtcggtggcttcaggatttgttattttgtatatcgatctgtgtcatttgacaaagtactttgacttggtataatatgagtgttacttcgaccaaaagagcttggtaaagtgtgagaaactccgcaaacttcttctgcagacgatgactagcaacagttatgacgagggtcaagatagccgccatacatgatacattgagtacaacatcaagataaacactccctccccacacacaacttttgccttccgttcactctgtatgttgtgtttattacggttgcatatgttgtgtttattatggcatcaacacgttccattagaaaatataactattgtttgtcaagtacaaaatcataatcacatcagcttgtaataatattgcatcactgttttgtaccaaattgtaagttgttgtagcaacgcacgggcaccctactagtatatagagtaagttatcattaaattctcaaagcatcacatcaaaatggcacaagacatttaaaacatacttttggatatatatatacacacacacgcccaaacaagctcttagttgggctgtcactttaac

SEQ ID NO: 63250 - DNA, 4300 bp, Zea Mays
tgtccaatactgctatagtagcttctccaagttatgacactgttaggaagatggttcaacttctctcgaaatgaagcttctgtcttcctatgtatagacaagttgttcagttaggaggtctagattctcttaaaatggtgctatctacgagttaggaggtctaggagcacactgaatgttttagaggttgatgaaatcgttgttttcctaaaaaagcattttttctgctttgtttgaaattgtttgggttttcctccccaactttcataattacctatttctattgtatgtttgatcatttggacttctactccatccacaattttggtttattcagtgaggaactatgtttttaaccactctatagtttgtatagacatgcaacattcatctcagggtcaagaaagaagctcaacttggcatgcttcctgtttaaagcaaggcaagaaacatccccgccagatctctgtcgccaaagcagggctggtgaagaagttgtgtttccctcccggattgtcactactttcatatttgttcatttatgtttgttccaatttatgttggttttttacagttacagaatatgtttgttccagttgagttccagtttgaaaactggaacaaccactagcagatgcaaagttcacaaagtagcttgtcaaataatgtgcatgaactggaacaagcaacttgtgcacgaatgagcattactggaacaagtagcttgtgcatgaacgagtaatactgtagatgattggacatgtatgtctattttagatttttaatatttaatgttatatattcagctcataccatacatgaatttgcatttctgtactatactcacttaatgtcctacctgttttgttagcttcaactatccgctttaaactgacaaaaccagaccaaacatatgcaaatctcatatacctgtgaaagcaacaactgatttgccagattggttaattaaacgtaacaataaatagccccgattaaatggcttataaatatacttggatctgttcatttttcacatatcagctattaatgaagccttcactgggttcattttgtactactccattacttatttacagttacaagtattctaagaaacttaatatttcatcatcaaagttgtattcagacagtttcatttacattgctctgattttttgtactaggagctactgacaatggaaagcaacgattagagtaacttgatgagtgaggactattcattcagttgcttcgatcaataagtgaactaatggatgcatgtttcttttgataagtgagctaactactttagtcacaaagttcgtgttgatttctaaacatggtatgatggttttgtcatcctattcgattgagtttgggaaaaagcctgcacattctgaaaacaaacagactgcacattgtgtggctgataaggttgagtgggtaaataagatcaaagctattatttagacatactgaaaatatagtgaaggaagcgtaagcaatttttctgctatatttatgcattgtatccttgtaaaattatcaatattgttctgacttgtggggaaaggtatgagagtattcatttttttgcctcttttctgtttgcattccttcttcagtataatgtttgttagaataaccaggtgaatttacaaatttcatatccatatactttcttcgatgacaaatataaatctacctaggtttgtcataactcataggtcaatcattctaacttcaattgacattttttataaaaagtatcataaggaaaataatatattatcataaaagtgacgtccatctatatcaaattttagatattgatggtggtcagagttaaaaaacagtttgccttaagacaaaccaagatgaacttgtatttacaatcgaaggaaatattgcacattgcctagacatttaatttattagataaattcttttgttagttgttcaactttgtacgtcttataagtcacaggaacaatgtttatctagaacttcggtctcaaattatacagtagtgttcagccatacctgccatgtcacaagaaagagagataaaaagtatttaatagtagacctaatgatgctcatttgtaattgtagatattcgtatatcctttttctgcaaccttgtgaaacatgtgatggtttgacttggaacaaactttgggtctgatatagtaaaatgcaatgtatgtggagggaagtagtagaacaagacagaacaagtgccaaataaggttatatagtagaatacaatgtgtggagggaaatagtagaacaacacaaaacaagtgccaaataaggttacaaggtttatagtagcgattgcttagctgctacaacgacactcatagattagcctggcatttgcaatgtcgctcttgtatttgccataacctcacttaaggtcacacattgcctctgggaccttgacctccgctactgttgtcgcctggccgcgtcgacttcaccaatgccggggtgtccaacctcatcagcttcaccgtcgtcgactgctcccacacaaccgagctgtgggtcctggtaccggtcgcgccccgcctctgctccttctgcttcagcgagtggcagactatcgatacactcgatttcaattgttttttacgctatttactgtattgcaatgggacaatggatgattaggatttgttttttaagactggcccatgatttatcgtcgtatactatttctttaatagattgttcgctacatctactgatctacatgttcacatgtttcaacttctgtcagcatccgtagttactatatgaatgctcattctgtgtcaccttttaagtttacaaatgctcttttccaggtcacatatggaaagtgaagaacccaaatgatttcttcacaggaagcttggaccaatcttcaactcatggggcgcttcatcctcggcctcctacgcatgcacttctcctgcttctcctgctggtcatcgcccaaggatgaattgctgctcttgaccatagggattggagcagcatgtagtttatactttatcctggttttctctctcgagatgttgcatggtgtcagtgtgtcagatgtgccgtaacagatgactccaaaatggattgcatgctcttcaaatagctacagataactatcttcacataaaatggagagtacaatgtttataaaagaaggaatatggataaggatccagattctcctatagcatatgaagaggcaaaggaaatggcaagccaaagctgcacaatttctgatgatcactcgttgttactgttatccattatctcctcagaggcattgcttttaaattcaacagcagacatggcaggtgcaggtcctatcctatccattatctacccctgcatgtgtgccagctattctactctatgtttcaatagtttggaaataattcagagctaaggttttctgatacagcctttcaagatttggcacattgacataatgacatgggttggtcacggattggatgtcaattttgctccctgtaccttgtagattatcggttatgtcaattttcgaaatttctatcgtgatggataacatttgaataaaacatagttaaataaacatgactactgtttcagtctttcgaaattctgatgctatagtgtcagtatactatgtcattttagggaaaatatatgtcatgtttattttgataaaattatatgatttctcactcaattcttgtcggtggcttcaggatttgttattttgtatatcgatctgtgtcatttgacaaagtactttgacttggtataatatgagtgttacttcgaccaaaagagcttggtaaagtgtgagaaactccgcaaacttcttctgcagacgatgactagcaacagttatgacgagggtcaagatagccgccatacatgatacattgagtacaacatcaagataaacactccctccccacacacaacttttgccttccgttcactctgtatgttgtgtttattacggttgcatatgttgtgtttattatggcatcaacacgttccattagaaaatataactattgtttgtcaagtacaaaatcataatcacatcagcttgtaataatattgcatcactgttttgtaccaaattgtaagttgttgtagcaacgcacgggcaccctactagtatatagagtaagttatcattaaattctcaaagcatcacatcaaaatggcacaagacatttaaaacatacttttggatatatatatacacacacacgcccaaacaagctcttagttgggctgtcactttaac

SEQ ID NO: 63251 - DNA, 2501 bp, Zea Mays
atgtccaatactgctatagtagcttctccaagttatgacactgttaggaagatggttcaacttctctcgaaatgaagcttctgtcttcctatgtatagacaagttgttcagttaggaggtctagattctcttaaaatggtgctatctacgagttaggaggtctaggagcacactgaatgttttagaggttgatgaaatcgttgttttcctaaaaaagcattttttctgctttgtttgaaattgtttgggttttcctccccaactttcataattacctatttctattgtatgtttgatcatttggacttctactccatccacaattttggtttattcagtgaggaactatgtttttaaccactctatagtttgtatagacatgcaacattcatctcagggtcaagaaagaagctcaacttggcatgcttcctgtttaaagcaaggagctactgacaatggaaagcaacgattagagtaacttgatgagtgaggactattcattcagttgcttcgatcaataagtgaactaatggatgcatgtttcttttgataagtgagctaactactttagtcacaaagttcgtgttgatttctaaacatggtatgatggttttgtcatcctattcgattgagtttgggaaaaagcctgcacattctgaaaacaaacagactgcacattgtgtggctgataaggttgagtgggtaaataagatcaaagctattatttagacatactgaaaatatagtgaaggaagcgtaagcaatttttctgctatatttatgcattgtcacacattgcctctgggaccttgacctccgctactgttgtcgcctggccgcgtcgacttcaccaatgccggggtgtccaacctcatcagcttcaccgtcgtcgactgctcccacacaaccgagctgtgggtcctggtcacatatggaaagtgaagaacccaaatgatttcttcacaggaagactgctaaccttcacacatctaataagatgaagcaacaagctagaaaatgtggaatttgtcatatgtccggatgcaaaacgggtaacttcatgctttccacaatgtgtgtcgacatgatgcttgtagagatgcttggaccaatcttcaactcatggggcgcttcatcctcggcctcctacgcatgcacttctcctgcttctcctgctggtcatcgcccaaggtgcacttttcctccctgttctgttcacgtgcccatgtgtcattcttgtttttcactgtttaggatcgtgagggtgttattgcaataatagctgatggagaaatgagaatgattttcaaatgatgacaggattggcagaatgagagcgacaaaggaatgagctaaatcttttgaaatatgaagcaatatgatttctttccagtgttatatttttttatttcctatgcatttcttaaaagtgctattacatgttcacctactaatacccttgtttttcttgcatctcaaggatgaattgctgctcttgaccatagggattggagcagcatgtagtttatactttatcctggttttctctctcgagatgttgcatggtgtcagtgtgtcagatgtgccgtaacagatgactccaaaatggattgcatgctcttcaaatagctacagataactatcttcacataaaatggagagtacaatgtttataaaagaaggaatatggataaggatccagattctcctatagcatatgaagaggcaaaggaaatggcaagccaaagctgcacaatttctgatgatcactcgttgttactgttatccattatctcctcagaggcattgcttttaaattcaacagcagacatggcaggtgcaggtcctatcctatccattatctacccctgcatgtgtgccagctattctactctatgtttcaatagtttggaaataattcagagctaaggttttctgatacaggatttgttattttgtatatcgatctgtgtcatttgacaaagtactttgacttggtataatatgagtgttacttcgaccaaaagagcttggtaaagtgtgagaaactccgcaaacttcttctgcagacgatgactagcaacagttatgacgagggtcaagatagccgccatacatgatacattgagtacaacatcaagataaacactccctccccacacacaacttttgccttccgttcactctgtatgttgtgtttattacggttgcatatgttgtgtttattatggcatcaacacgttccattagaaaatataactattgtttgtcaagtacaaaatcataatcacatcagcttgtaataatattgcatcactgttttgtaccaaattgtaagttgttgtagcaacgcacgggcaccctactagtatatagagtaagttatcattaaattctcaaagcatcacatcaaaatggcacaagacatttaaaacatacttttggatatatatatacacacacacgcccaaacaagctcttagttgggctgtcactttaac

SEQ ID NO: 63252 - DNA, 3199 bp, Zea Mays
gatgtccaatactgctatagtagcttctccaagttatgacactgttaggaagatggttcaacttctctcgaaatgaagcttctgtcttcctatgtatagacaagttgttcagttaggaggtctagattctcttaaaatggtgctatctacgagttaggaggtctaggagcacactgaatgttttagaggttgatgaaatcgttgttttcctaaaaaagcattttttctgctttgtttgaaattgtttgggttttcctccccaactttcataattacctatttctattgtatgtttgatcatttggacttctactccatccacaattttggtttattcagtgaggaactatgtttttaaccactctatagtttgtatagacatgcaacattcatctcagggtcaagaaagaagctcaacttggcatgcttcctgtttaaagcaaggcaagaaacatccccgccagatctctgtcgccaaagcagggctggtgaagaagttgtgtttccctcccggattgtcactactttcatatttgttcatttatgtttgttccaatttatgttggttttttacagttacagaatatgtttgttccagttgagttccagtttgaaaactggaacaaccactagcagatgcaaagttcacaaagtagcttgtcaaataatgtgcatgaactggaacaagcaacttgtgcacgaatgagcattactggaacaagtagcttgtgcatgaacgagtaatactgtagatgattggacatgagctactgacaatggaaagcaacgattagagtaacttgatgagtgaggactattcattcagttgcttcgatcaataagtgaactaatggatgcatgtttcttttgataagtcacatatggaaagtgaagaacccaaatgatttcttcacaggaaggtgcttacatcttgcttccatgcctcgatgaagcaacaagctagaaaatgtggaatttgtcatatgtccggatgcaaaacgggtaacttcatgctttccacaatgtgtgtcgacatgatgcttgtagagatgcttggaccaatcttcaactcatggggcgcttcatcctcggcctcctacgcatgcacttctcctgcttctcctgctggtcatcgcccaaggtgcacttttcctccctgttctgttcacgtgcccatgtgtcattcttgtttttcactgtttaggatcgtgagggtgttattgcaataatagctgatggagaaatgagaatgattttcaaatgatgacaggattggcagaatgagagcgacaaaggaatgagctaaatcttttgaaatatgaagcaatatgatttctttccagtgttatatttttttatttcctatgcatttcttaaaagtgctattacatgttcacctactaatacccttgtttttcttgcatctcaaggatgaattgctgctcttgaccatagggattggagcagcatgtagtttatactttatcctggttttctctctcgagatgttgcatggtgtcagtgtgtcagatgtgccgtaacagatgactccaaaatggattgcatgctcttcaaatagctacagataactatcttcacataaaatggagagtacaatgtttataaaagaaggaatatggataaggatccagattctcctatagcatatgaagaggcaaaggaaatggcaagccaaagctgcacaatttctgatgatcactcgttgttactgttatccattatctcctcagaggcattgcttttaaattcaacagcagacatggcaggtgcaggtcctatcctatccattatctacccctgcatgtgtgccagctattctactctatgtttcaatagtttggaaataattcagagctaaggttttctgatacaggtacgtgtccactttcttctcaaggaattgcactagaggttggactttgtgggtcaagagaaatttaatgcctattgttaatacaacctttagctatttttccatgatgatggagttggacaagtaccatattgagtataagtgttagcctattatatctttgtacaaccatggcaaacgaataatttcttataacaccatgaagataatgtttaacgaagtgtgtttgcgtgcgtgtgtaatttcttcttttgttttgctgctaagtttgatagttcaaaacatgattcttgtaaagtttggttttagtctaacaaatacactcaagtcctgacatgtaaactgtaaagttggactgttgcttggtggatctgtattgaactttattttttttaaaatgttttatggcttgtatagtttgtattcacttctcacctaagctacaatttgtttttccagcctttcaagatttggcacattgacataatgacatgggttggtcacggattggatgtcaattttgctccctgtaccttgtagattatcggttatgtcaattttcgaaatttctatcgtgatggataacatttgaataaaacatagttaaataaacatgactactgtttcagtctttcgaaattctgatgctatagtgtcagtatactatgtcattttagggaaaatatatgtcatgtttattttgataaaattatatgatttctcactcaattcttgtcggtggcttcaggatttgttattttgtatatcgatctgtgtcatttgacaaagtactttgacttggtataatatgagtgttacttcgaccaaaagagcttggtaaagtgtgagaaactccgcaaacttcttctgcagacgatgactagcaacagttatgacgagggtcaagatagccgccatacatgatacattgagtacaacatcaagataaacactccctccccacacacaacttttgccttccgttcactctgtatgttgtgtttattacggttgcatatgttgtgtttattatggcatcaacacgttccattagaaaatataactattgtttgtcaagtacaaaatcataatcacatcagcttgtaataatattgcatcactgttttgtaccaaattgtaagttgttgtagcaacgcacgggcaccctactagtatatagagtaagttatcattaaattctcaaagcatcacatcaaaatggcacaagacatttaaaacatacttttggatatatatatacacacacacgcccaaacaagctcttagttgggctgtcactttaac

SEQ ID NO: 63253 - DNA, 3642 bp, Zea Mays
gatgtccaatactgctatagtagcttctccaagttatgacactgttaggaagatggttcaacttctctcgaaatgaagcttctgtcttcctatgtatagacaagttgttcagttaggaggtctagattctcttaaaatggtgctatctacgagttaggaggtctaggagcacactgaatgttttagaggttgatgaaatcgttgttttcctaaaaaagcattttttctgctttgtttgaaattgtttgggttttcctccccaactttcataattacctatttctattgtatgtttgatcatttggacttctactccatccacaattttggtttattcagtgaggaactatgtttttaaccactctatagtttgtatagacatgcaacattcatctcagggtcaagaaagaagctcaacttggcatgcttcctgtttaaagcaaggcaagaaacatccccgccagatctctgtcgccaaagcagggctggtgaagaagttgtgtttccctcccggattgtcactactttcatatttgttcatttatgtttgttccaatttatgttggttttttacagttacagaatatgtttgttccagttgagttccagtttgaaaactggaacaaccactagcagatgcaaagttcacaaagtagcttgtcaaataatgtgcatgaactggaacaagcaacttgtgcacgaatgagcattactggaacaagtagcttgtgcatgaacgagtaatactgtagatgattggacatgtatgtctattttagatttttaatatttaatgttatatattcagctcataccatacatgaatttgcatttctgtactatactcacttaatgtcctacctgttttgttagcttcaactatccgctttaaactgacaaaaccagaccaaacatatgcaaatctcatatacctgtgaaagcaacaactgatttgccagattggttaattaaacgtaacaataaatagccccgattaaatggcttataaatatacttggatctgttcatttttcacatatcagctattaatgaagccttcactgggttcattttgtactactccattacttatttacagttacaagtattctaagaaacttaatatttcatcatcaaagttgtattcagacagtttcatttacattgctctgattttttgtactaggagctactgacaatggaaagcaacgattagagtaacttgatgagtgaggactattcattcagttgcttcgatcaataagtgaactaatggatgcatgtttcttttgataagtgagctaactactttagtcacaaagttcgtgttgatttctaaacatggtatgatggttttgtcatcctattcgattgagtttgggaaaaagcctgcacattctgaaaacaaacagactgcacattgtgtggctgataaggttgagtgggtaaataagatcaaagctattatttagacatactgaaaatatagtgaaggaagcgtaagcaatttttctgctatatttatgcattgtatccttgtaaaattatcaatattgttctgacttgtggggaaaggtatgagagtattcatttttttgcctcttttctgtttgcattccttcttcagtataatgtttgttagaataaccaggtgaatttacaaatttcatatccatatactttcttcgatgacaaatataaatctacctaggtttgtcataactcataggtcaatcattctaacttcaattgacattttttataaaaagtatcataaggaaaataatatattatcataaaagtgacgtccatctatatcaaattttagatattgatggtggtcagagttaaaaaacagtttgccttaagacaaaccaagatgaacttgtatttacaatcgaaggaaatattgcacattgcctagacatttaatttattagataaattcttttgttagttgttcaactttgtacgtcttataagtcacaggaacaatgtttatctagaacttcggtctcaaattatacagtagtgttcagccatacctgccatgtcacaagaaagagagataaaaagtatttaatagtagacctaatgatgctcatttgtaattgtagatattcgtatatcctttttctgcaaccttgtgaaacatgtgatggtttgacttggaacaaactttgggtctgatatagtaaaatgcaatgtatgtggagggaagtagtagaacaagacagaacaagtgccaaataaggttatatagtagaatacaatgtgtggagggaaatagtagaacaacacaaaacaagtgccaaataaggttacaaggtttatagtagcgattgcttagctgctacaacgacactcatagattagcctggcatttgcaatgtcgctcttgtatttgccataacctcacttaaggtcacacattgcctctgggaccttgacctccgctactgttgtcgcctggccgcgtcgacttcaccaatgccggggtgtccaacctcatcagcttcaccgtcgtcgactgctcccacacaaccgagctgtgggtcctggtcacatatggaaagtgaagaacccaaatgatttcttcacaggaagcttggaccaatcttcaactcatggggcgcttcatcctcggcctcctacgcatgcacttctcctgcttctcctgctggtcatcgcccaagatgttgcatggtgtcagtgtgtcagatgtgccgtaacagatgactccaaaatggattgcatgctcttcaaatagctacagataactatcttcacataaaatggagagtacaatgtttataaaagaaggaatatggataaggatccagattctcctatagcatatgaagaggcaaaggaaatggcaagccaaagctgcacaatttctgatgatcactcgttgttactgttatccattatctcctcagaggcattgcttttaaattcaacagcagacatggcaggtgcaggtcctatcctatccattatctacccctgcatgtgtgccagctattctactctatgtttcaatagtttggaaataattcagagctaaggttttctgatacaggatttgttattttgtatatcgatctgtgtcatttgacaaagtactttgacttggtataatatgagtgttacttcgaccaaaagagcttggtaaagtgtgagaaactccgcaaacttcttctgcagacgatgactagcaacagttatgacgagggtcaagatagccgccatacatgatacattgagtacaacatcaagataaacactccctccccacacacaacttttgccttccgttcactctgtatgttgtgtttattacggttgcatatgttgtgtttattatggcatcaacacgttccattagaaaatataactattgtttgtcaagtacaaaatcataatcacatcagcttgtaataatattgcatcactgttttgtaccaaattgtaagttgttgtagcaacgcacgggcaccctactagtatatagagtaagttatcattaaattctcaaagcatcacatcaaaatggcacaagacatttaaaacatacttttggatatatatatacacacacacgcccaaacaagctcttagttgggctgtcactttaac

SEQ ID NO: 63254 - DNA, 4295 bp, Zea Mays
gatgtccaatactgctatagtagcttctccaagttatgacactgttaggaagatggttcaacttctctcgaaatgaagcttctgtcttcctatgtatagacaagttgttcagttaggaggtctagattctcttaaaatggtgctatctacgagttaggaggtctaggagcacactgaatgttttagaggttgatgaaatcgttgttttcctaaaaaagcattttttctgctttgtttgaaattgtttgggttttcctccccaactttcataattacctatttctattgtatgtttgatcatttggacttctactccatccacaattttggtttattcagtgaggaactatgtttttaaccactctatagtttgtatagacatgcaacattcatctcagggtcaagaaagaagctcaacttggcatgcttcctgtttaaagcaaggcaagaaacatccccgccagatctctgtcgccaaagcagggctggtgaagaagttgtgtttccctcccggattgtcactactttcatatttgttcatttatgtttgttccaatttatgttggttttttacagttacagaatatgtttgttccagttgagttccagtttgaaaactggaacaaccactagcagatgcaaagttcacaaagtagcttgtcaaataatgtgcatgaactggaacaagcaacttgtgcacgaatgagcattactggaacaagtagcttgtgcatgaacgagtaatactgtagatgattggacatgtatgtctattttagatttttaatatttaatgttatatattcagctcataccatacatgaatttgcatttctgtactatactcacttaatgtcctacctgttttgttagcttcaactatccgctttaaactgacaaaaccagaccaaacatatgcaaatctcatatacctgtgaaagcaacaactgatttgccagattggttaattaaacgtaacaataaatagccccgattaaatggcttataaatatacttggatctgttcatttttcacatatcagctattaatgaagccttcactgggttcattttgtactactccattacttatttacagttacaagtattctaagaaacttaatatttcatcatcaaagttgtattcagacagtttcatttacattgctctgattttttgtactaggagctactgacaatggaaagcaacgattagagtaacttgatgagtgaggactattcattcagttgcttcgatcaataagtgaactaatggatgcatgtttcttttgataagtgagctaactactttagtcacaaagttcgtgttgatttctaaacatggtatgatggttttgtcatcctattcgattgagtttgggaaaaagcctgcacattctgaaaacaaacagactgcacattgtgtggctgataaggttgagtgggtaaataagatcaaagctattatttagacatactgaaaatatagtgaaggaagcgtaagcaatttttctgctatatttatgcattgtatccttgtaaaattatcaatattgttctgacttgtggggaaaggtatgagagtattcatttttttgcctcttttctgtttgcattccttcttcagtataatgtttgttagaataaccaggtgaatttacaaatttcatatccatatactttcttcgatgacaaatataaatctacctaggtttgtcataactcataggtcaatcattctaacttcaattgacattttttataaaaagtatcataaggaaaataatatattatcataaaagtgacgtccatctatatcaaattttagatattgatggtggtcagagttaaaaaacagtttgccttaagacaaaccaagatgaacttgtatttacaatcgaaggaaatattgcacattgcctagacatttaatttattagataaattcttttgttagttgttcaactttgtacgtcttataagtcacaggaacaatgtttatctagaacttcggtctcaaattatacagtagtgttcagccatacctgccatgtcacaagaaagagagataaaaagtatttaatagtagacctaatgatgctcatttgtaattgtagatattcgtatatcctttttctgcaaccttgtgaaacatgtgatggtttgacttggaacaaactttgggtctgatatagtaaaatgcaatgtatgtggagggaagtagtagaacaagacagaacaagtgccaaataaggttatatagtagaatacaatgtgtggagggaaatagtagaacaacacaaaacaagtgccaaataaggttacaaggtttatagtagcgattgcttagctgctacaacgacactcatagattagcctggcatttgcaatgtcgctcttgtatttgccataacctcacttaaggtcacacattgcctctgggaccttgacctccgctactgttgtcgcctggccgcgtcgacttcaccaatgccggggtgtccaacctcatcagcttcaccgtcgtcgactgctcccacacaaccgagctgtgggtcctggtcacatatggaaagtgaagaacccaaatgatttcttcacaggaagcttggaccaatcttcaactcatggggcgcttcatcctcggcctcctacgcatgcacttctcctgcttctcctgctggtcatcgcccaaggtgcacttttcctccctgttctgttcacgtgcccatgtgtcattcttgtttttcactgtttaggatcgtgagggtgttattgcaataatagctgatggagaaatgagaatgattttcaaatgatgacaggattggcagaatgagagcgacaaaggaatgagctaaatcttttgaaatatgaagcaatatgatttctttccagtgttatatttttttatttcctatgcatttcttaaaagtgctattacatgttcacctactaatacccttgtttttcttgcatctcaaggatgaattgctgctcttgaccatagggattggagcagcatgtagtttatactttatcctggttttctctctcgagatgttgcatggtgtcagtgtgtcagatgtgccgtaacagatgactccaaaatggattgcatgctcttcaaatagctacagataactatcttcacataaaatggagagtacaatgtttataaaagaaggaatatggataaggatccagattctcctatagcatatgaagaggcaaaggaaatggcaagccaaagctgcacaatttctgatgatcactcgttgttactgttatccattatctcctcagaggcattgcttttaaattcaacagcagacatggcaggtgcaggtcctatcctatccattatctacccctgcatgtgtgccagctattctactctatgtttcaatagtttggaaataattcagagctaaggttttctgatacagcctttcaagatttggcacattgacataatgacatgggttggtcacggattggatgtcaattttgctccctgtaccttgtagattatcggttatgtcaattttcgaaatttctatcgtgatggataacatttgaataaaacatagttaaataaacatgactactgtttcagtctttcgaaattctgatgctatagtgtcagtatactatgtcattttagggaaaatatatgtcatgtttattttgataaaattatatgatttctcactcaattcttgtcggtggcttcaggatttgttattttgtatatcgatctgtgtcatttgacaaagtactttgacttggtataatatgagtgttacttcgaccaaaagagcttggtaaagtgtgagaaactccgcaaacttcttctgcagacgatgactagcaacagttatgacgagggtcaagatagccgccatacatgatacattgagtacaacatcaagataaacactccctccccacacacaacttttgccttccgttcactctgtatgttgtgtttattacggttgcatatgttgtgtttattatggcatcaacacgttccattagaaaatataactattgtttgtcaagtacaaaatcataatcacatcagcttgtaataatattgcatcactgttttgtaccaaattgtaagttgttgtagcaacgcacgggcaccctactagtatatagagtaagttatcattaaattctcaaagcatcacatcaaaatggcacaagacatttaaaacatacttttggatatatatatacacacacacgcccaaacaagctcttagttgggctgtcactttaac

SEQ ID NO: 63255 - DNA, 4630 bp, Zea Mays
gatgtccaatactgctatagtagcttctccaagttatgacactgttaggaagatggttcaacttctctcgaaatgaagcttctgtcttcctatgtatagacaagttgttcagttaggaggtctagattctcttaaaatggtgctatctacgagttaggaggtctaggagcacactgaatgttttagaggttgatgaaatcgttgttttcctaaaaaagcattttttctgctttgtttgaaattgtttgggttttcctccccaactttcataattacctatttctattgtatgtttgatcatttggacttctactccatccacaattttggtttattcagtgaggaactatgtttttaaccactctatagtttgtatagacatgcaacattcatctcagggtcaagaaagaagctcaacttggcatgcttcctgtttaaagcaaggcaagaaacatccccgccagatctctgtcgccaaagcagggctggtgaagaagttgtgtttccctcccggattgtcactactttcatatttgttcatttatgtttgttccaatttatgttggttttttacagttacagaatatgtttgttccagttgagttccagtttgaaaactggaacaaccactagcagatgcaaagttcacaaagtagcttgtcaaataatgtgcatgaactggaacaagcaacttgtgcacgaatgagcattactggaacaagtagcttgtgcatgaacgagtaatactgtagatgattggacatgtatgtctattttagatttttaatatttaatgttatatattcagctcataccatacatgaatttgcatttctgtactatactcacttaatgtcctacctgttttgttagcttcaactatccgctttaaactgacaaaaccagaccaaacatatgcaaatctcatatacctgtgaaagcaacaactgatttgccagattggttaattaaacgtaacaataaatagccccgattaaatggcttataaatatacttggatctgttcatttttcacatatcagctattaatgaagccttcactgggttcattttgtactactccattacttatttacagttacaagtattctaagaaacttaatatttcatcatcaaagttgtattcagacagtttcatttacattgctctgattttttgtactaggagctactgacaatggaaagcaacgattagagtaacttgatgagtgaggactattcattcagttgcttcgatcaataagtgaactaatggatgcatgtttcttttgataagtgagctaactactttagtcacaaagttcgtgttgatttctaaacatggtatgatggttttgtcatcctattcgattgagtttgggaaaaagcctgcacattctgaaaacaaacagactgcacattgtgtggctgataaggttgagtgggtaaataagatcaaagctattatttagacatactgaaaatatagtgaaggaagcgtaagcaatttttctgctatatttatgcattgtatccttgtaaaattatcaatattgttctgacttgtggggaaaggtatgagagtattcatttttttgcctcttttctgtttgcattccttcttcagtataatgtttgttagaataaccaggtgaatttacaaatttcatatccatatactttcttcgatgacaaatataaatctacctaggtttgtcataactcataggtcaatcattctaacttcaattgacattttttataaaaagtatcataaggaaaataatatattatcataaaagtgacgtccatctatatcaaattttagatattgatggtggtcagagttaaaaaacagtttgccttaagacaaaccaagatgaacttgtatttacaatcgaaggaaatattgcacattgcctagacatttaatttattagataaattcttttgttagttgttcaactttgtacgtcttataagtcacaggaacaatgtttatctagaacttcggtctcaaattatacagtagtgttcagccatacctgccatgtcacaagaaagagagataaaaagtatttaatagtagacctaatgatgctcatttgtaattgtagatattcgtatatcctttttctgcaaccttgtgaaacatgtgatggtttgacttggaacaaactttgggtctgatatagtaaaatgcaatgtatgtggagggaagtagtagaacaagacagaacaagtgccaaataaggttatatagtagaatacaatgtgtggagggaaatagtagaacaacacaaaacaagtgccaaataaggttacaaggtttatagtagcgattgcttagctgctacaacgacactcatagattagcctggcatttgcaatgtcgctcttgtatttgccataacctcacttaaggtcacacattgcctctgggaccttgacctccgctactgttgtcgcctggccgcgtcgacttcaccaatgccggggtgtccaacctcatcagcttcaccgtcgtcgactgctcccacacaaccgagctgtgggtcctggtcacatatggaaagtgaagaacccaaatgatttcttcacaggaagcttggaccaatcttcaactcatggggcgcttcatcctcggcctcctacgcatgcacttctcctgcttctcctgctggtcatcgcccaaggtgcacttttcctccctgttctgttcacgtgcccatgtgtcattcttgtttttcactgtttaggatcgtgagggtgttattgcaataatagctgatggagaaatgagaatgattttcaaatgatgacaggattggcagaatgagagcgacaaaggaatgagctaaatcttttgaaatatgaagcaatatgatttctttccagtgttatatttttttatttcctatgcatttcttaaaagtgctattacatgttcacctactaatacccttgtttttcttgcatctcaaggatgaattgctgctcttgaccatagggattggagcagcatgtagtttatactttatcctggttttctctctcgagtgtgtcagatgtgccgtaacagatgactccaaaatggattgcatgctcttcaaatagctacagataactatcttcacataaaatggagagtacaatgtttataaaagaaggaatatggataaggatccagattctcctatagcatatgaagaggcaaaggaaatggcaagccaaagctgcacaatttctgatgatcactcgttgttactgttatccattatctcctcagaggcattgcttttaaattcaacagcagacatggcaggtacgtgtccactttcttctcaaggaattgcactagaggttggactttgtgggtcaagagaaatttaatgcctattgttaatacaacctttagctatttttccatgatgatggagttggacaagtaccatattgagtataagtgttagcctattatatctttgtacaaccatggcaaacgaataatttcttataacaccatgaagataatgtttaacgaagtgtgtttgcgtgcgtgtgtaatttcttcttttgttttgctgctaagtttgatagttcaaaacatgattcttgtaaagtttggttttagtctaacaaatacactcaagtcctgacatgtaaactgtaaagttggactgttgcttggtggatctgtattgaactttattttttttaaaatgttttatggcttgtatagtttgtattcacttctcacctaagctacaatttgtttttccagcctttcaagatttggcacattgacataatgacatgggttggtcacggattggatgtcaattttgctccctgtaccttgtagattatcggttatgtcaattttcgaaatttctatcgtgatggataacatttgaataaaacatagttaaataaacatgactactgtttcagtctttcgaaattctgatgctatagtgtcagtatactatgtcattttagggaaaatatatgtcatgtttattttgataaaattatatgatttctcactcaattcttgtcggtggcttcaggatttgttattttgtatatcgatctgtgtcatttgacaaagtactttgacttggtataatatgagtgttacttcgaccaaaagagcttggtaaagtgtgagaaactccgcaaacttcttctgcagacgatgactagcaacagttatgacgagggtcaagatagccgccatacatgatacattgagtacaacatcaagataaacactccctccccacacacaacttttgccttccgttcactctgtatgttgtgtttattacggttgcatatgttgtgtttattatggcatcaacacgttccattagaaaatataactattgtttgtcaagtacaaaatcataatcacatcagcttgtaataatattgcatcactgttttgtaccaaattgtaagttgttgtagcaacgcacgggcaccctactagtatatagagtaagttatcattaaattctcaaagcatcacatcaaaatggcacaagacatttaaaacatacttttggatatatatatacacacacacgcccaaacaagctcttagttgggctgtcactttaac

SEQ ID NO: 63256 - DNA, 4331 bp, Zea Mays
gatgtccaatactgctatagtagcttctccaagttatgacactgttaggaagatggttcaacttctctcgaaatgaagcttctgtcttcctatgtatagacaagttgttcagttaggaggtctagattctcttaaaatggtgctatctacgagttaggaggtctaggagcacactgaatgttttagaggttgatgaaatcgttgttttcctaaaaaagcattttttctgctttgtttgaaattgtttgggttttcctccccaactttcataattacctatttctattgtatgtttgatcatttggacttctactccatccacaattttggtttattcagtgaggaactatgtttttaaccactctatagtttgtatagacatgcaacattcatctcagggtcaagaaagaagctcaacttggcatgcttcctgtttaaagcaaggcaagaaacatccccgccagatctctgtcgccaaagcagggctggtgaagaagttgtgtttccctcccggattgtcactactttcatatttgttcatttatgtttgttccaatttatgttggttttttacagttacagaatatgtttgttccagttgagttccagtttgaaaactggaacaaccactagcagatgcaaagttcacaaagtagcttgtcaaataatgtgcatgaactggaacaagcaacttgtgcacgaatgagcattactggaacaagtagcttgtgcatgaacgagtaatactgtagatgattggacatgtatgtctattttagatttttaatatttaatgttatatattcagctcataccatacatgaatttgcatttctgtactatactcacttaatgtcctacctgttttgttagcttcaactatccgctttaaactgacaaaaccagaccaaacatatgcaaatctcatatacctgtgaaagcaacaactgatttgccagattggttaattaaacgtaacaataaatagccccgattaaatggcttataaatatacttggatctgttcatttttcacatatcagctattaatgaagccttcactgggttcattttgtactactccattacttatttacagttacaagtattctaagaaacttaatatttcatcatcaaagttgtattcagacagtttcatttacattgctctgattttttgtactaggagctactgacaatggaaagcaacgattagagtaacttgatgagtgaggactattcattcagttgcttcgatcaataagtgaactaatggatgcatgtttcttttgataagtgagctaactactttagtcacaaagttcgtgttgatttctaaacatggtatgatggttttgtcatcctattcgattgagtttgggaaaaagcctgcacattctgaaaacaaacagactgcacattgtgtggctgataaggttgagtgggtaaataagatcaaagctattatttagacatactgaaaatatagtgaaggaagcgtaagcaatttttctgctatatttatgcattgtatccttgtaaaattatcaatattgttctgacttgtggggaaaggtatgagagtattcatttttttgcctcttttctgtttgcattccttcttcagtataatgtttgttagaataaccaggtgaatttacaaatttcatatccatatactttcttcgatgacaaatataaatctacctaggtttgtcataactcataggtcaatcattctaacttcaattgacattttttataaaaagtatcataaggaaaataatatattatcataaaagtgacgtccatctatatcaaattttagatattgatggtggtcagagttaaaaaacagtttgccttaagacaaaccaagatgaacttgtatttacaatcgaaggaaatattgcacattgcctagacatttaatttattagataaattcttttgttagttgttcaactttgtacgtcttataagtcacaggaacaatgtttatctagaacttcggtctcaaattatacagtagtgttcagccatacctgccatgtcacaagaaagagagataaaaagtatttaatagtagacctaatgatgctcatttgtaattgtagatattcgtatatcctttttctgcaaccttgtgaaacatgtgatggtttgacttggaacaaactttgggtctgatatagtaaaatgcaatgtatgtggagggaagtagtagaacaagacagaacaagtgccaaataaggttatatagtagaatacaatgtgtggagggaaatagtagaacaacacaaaacaagtgccaaataaggttacaaggtttatagtagcgattgcttagctgctacaacgacactcatagattagcctggcatttgcaatgtcgctcttgtatttgccataacctcacttaaggtcacacattgcctctgggaccttgacctccgctactgttgtcgcctggccgcgtcgacttcaccaatgccggggtgtccaacctcatcagcttcaccgtcgtcgactgctcccacacaaccgagctgtgggtcctggtcacatatggaaagtgaagaacccaaatgatttcttcacaggaagcaacaagctagaaaatgtggaatttgtcatatgtccggatgcaaaacgggtaacttcatgctttccacaatgtgtgtcgacatgatgcttgtagagatgcttggaccaatcttcaactcatggggcgcttcatcctcggcctcctacgcatgcacttctcctgcttctcctgctggtcatcgcccaaggatcgtgagggtgttattgcaataatagctgatggagaaatgagaatgattttcaaatgatgacaggattggcagaatgagagcgacaaaggaatgagctaaatcttttgaaatatgaagcaatatgatttctttccagtgttatatttttttatttcctatgcatttcttaaaagtgctattacatgttcacctactaatacccttgtttttcttgcatctcaaggatgaattgctgctcttgaccatagggattggagcagcatgtagtttatactttatcctggttttctctctcgagatgttgcatggtgtcagtgtgtcagatgtgccgtaacagatgactccaaaatggattgcatgctcttcaaatagctacagataactatcttcacataaaatggagagtacaatgtttataaaagaaggaatatggataaggatccagattctcctatagcatatgaagaggcaaaggaaatggcaagccaaagctgcacaatttctgatgatcactcgttgttactgttatccattatctcctcagaggcattgcttttaaattcaacagcagacatggcaggtgcaggtcctatcctatccattatctacccctgcatgtgtgccagctattctactctatgtttcaatagtttggaaataattcagagctaaggttttctgatacagcctttcaagatttggcacattgacataatgacatgggttggtcacggattggatgtcaattttgctccctgtaccttgtagattatcggttatgtcaattttcgaaatttctatcgtgatggataacatttgaataaaacatagttaaataaacatgactactgtttcagtctttcgaaattctgatgctatagtgtcagtatactatgtcattttagggaaaatatatgtcatgtttattttgataaaattatatgatttctcactcaattcttgtcggtggcttcaggatttgttattttgtatatcgatctgtgtcatttgacaaagtactttgacttggtataatatgagtgttacttcgaccaaaagagcttggtaaagtgtgagaaactccgcaaacttcttctgcagacgatgactagcaacagttatgacgagggtcaagatagccgccatacatgatacattgagtacaacatcaagataaacactccctccccacacacaacttttgccttccgttcactctgtatgttgtgtttattacggttgcatatgttgtgtttattatggcatcaacacgttccattagaaaatataactattgtttgtcaagtacaaaatcataatcacatcagcttgtaataatattgcatcactgttttgtaccaaattgtaagttgttgtagcaacgcacgggcaccctactagtatatagagtaagttatcattaaattctcaaagcatcacatcaaaatggcacaagacatttaaaacatacttttggatatatatatacacacacacgcccaaacaagctcttagttgggctgtcactttaac

SEQ ID NO: 63257 - DNA, 4337 bp, Zea Mays
gatgtccaatactgctatagtagcttctccaagttatgacactgttaggaagatggttcaacttctctcgaaatgaagcttctgtcttcctatgtatagacaagttgttcagttaggaggtctagattctcttaaaatggtgctatctacgagttaggaggtctaggagcacactgaatgttttagaggttgatgaaatcgttgttttcctaaaaaagcattttttctgctttgtttgaaattgtttgggttttcctccccaactttcataattacctatttctattgtatgtttgatcatttggacttctactccatccacaattttggtttattcagtgaggaactatgtttttaaccactctatagtttgtatagacatgcaacattcatctcagggtcaagaaagaagctcaacttggcatgcttcctgtttaaagcaaggcaagaaacatccccgccagatctctgtcgccaaagcagggctggtgaagaagttgtgtttccctcccggattgtcactactttcatatttgttcatttatgtttgttccaatttatgttggttttttacagttacagaatatgtttgttccagttgagttccagtttgaaaactggaacaaccactagcagatgcaaagttcacaaagtagcttgtcaaataatgtgcatgaactggaacaagcaacttgtgcacgaatgagcattactggaacaagtagcttgtgcatgaacgagtaatactgtagatgattggacatgtatgtctattttagatttttaatatttaatgttatatattcagctcataccatacatgaatttgcatttctgtactatactcacttaatgtcctacctgttttgttagcttcaactatccgctttaaactgacaaaaccagaccaaacatatgcaaatctcatatacctgtgaaagcaacaactgatttgccagattggttaattaaacgtaacaataaatagccccgattaaatggcttataaatatacttggatctgttcatttttcacatatcagctattaatgaagccttcactgggttcattttgtactactccattacttatttacagttacaagtattctaagaaacttaatatttcatcatcaaagttgtattcagacagtttcatttacattgctctgattttttgtactaggagctactgacaatggaaagcaacgattagagtaacttgatgagtgaggactattcattcagttgcttcgatcaataagtgaactaatggatgcatgtttcttttgataagtgagctaactactttagtcacaaagttcgtgttgatttctaaacatggtatgatggttttgtcatcctattcgattgagtttgggaaaaagcctgcacattctgaaaacaaacagactgcacattgtgtggctgataaggttgagtgggtaaataagatcaaagctattatttagacatactgaaaatatagtgaaggaagcgtaagcaatttttctgctatatttatgcattgtatccttgtaaaattatcaatattgttctgacttgtggggaaaggtatgagagtattcatttttttgcctcttttctgtttgcattccttcttcagtataatgtttgttagaataaccaggtgaatttacaaatttcatatccatatactttcttcgatgacaaatataaatctacctaggtttgtcataactcataggtcaatcattctaacttcaattgacattttttataaaaagtatcataaggaaaataatatattatcataaaagtgacgtccatctatatcaaattttagatattgatggtggtcagagttaaaaaacagtttgccttaagacaaaccaagatgaacttgtatttacaatcgaaggaaatattgcacattgcctagacatttaatttattagataaattcttttgttagttgttcaactttgtacgtcttataagtcacaggaacaatgtttatctagaacttcggtctcaaattatacagtagtgttcagccatacctgccatgtcacaagaaagagagataaaaagtatttaatagtagacctaatgatgctcatttgtaattgtagatattcgtatatcctttttctgcaaccttgtgaaacatgtgatggtttgacttggaacaaactttgggtctgatatagtaaaatgcaatgtatgtggagggaagtagtagaacaagacagaacaagtgccaaataaggttatatagtagaatacaatgtgtggagggaaatagtagaacaacacaaaacaagtgccaaataaggttacaaggtttatagtagcgattgcttagctgctacaacgacactcatagattagcctggcatttgcaatgtcgctcttgtatttgccataacctcacttaaggtcacacattgcctctgggaccttgacctccgctactgttgtcgcctggccgcgtcgacttcaccaatgccggggtgtccaacctcatcagcttcaccgtcgtcgactgctcccacacaaccgagctgtgggtcctggtcacatatggaaagtgaagaacccaaatgatttcttcacaggaagatgaagcaacaagctagaaaatgtggaatttgtcatatgtccggatgcaaaacgggtaacttcatgctttccacaatgtgtgtcgacatgatgcttgtagagatgcttggaccaatcttcaactcatggggcgcttcatcctcggcctcctacgcatgcacttctcctgcttctcctgctggtcatcgcccaaggatcgtgagggtgttattgcaataatagctgatggagaaatgagaatgattttcaaatgatgacaggattggcagaatgagagcgacaaaggaatgagctaaatcttttgaaatatgaagcaatatgatttctttccagtgttatatttttttatttcctatgcatttcttaaaagtgctattacatgttcacctactaatacccttgtttttcttgcatctcaaggatgaattgctgctcttgaccatagggattggagcagcatgtagtttatactttatcctggttttctctctcgagatgttgcatggtgtcagtgtgtcagatgtgccgtaacagatgactccaaaatggattgcatgctcttcaaatagctacagataactatcttcacataaaatggagagtacaatgtttataaaagaaggaatatggataaggatccagattctcctatagcatatgaagaggcaaaggaaatggcaagccaaagctgcacaatttctgatgatcactcgttgttactgttatccattatctcctcagaggcattgcttttaaattcaacagcagacatggcaggtgcaggtcctatcctatccattatctacccctgcatgtgtgccagctattctactctatgtttcaatagtttggaaataattcagagctaaggttttctgatacagcctttcaagatttggcacattgacataatgacatgggttggtcacggattggatgtcaattttgctccctgtaccttgtagattatcggttatgtcaattttcgaaatttctatcgtgatggataacatttgaataaaacatagttaaataaacatgactactgtttcagtctttcgaaattctgatgctatagtgtcagtatactatgtcattttagggaaaatatatgtcatgtttattttgataaaattatatgatttctcactcaattcttgtcggtggcttcaggatttgttattttgtatatcgatctgtgtcatttgacaaagtactttgacttggtataatatgagtgttacttcgaccaaaagagcttggtaaagtgtgagaaactccgcaaacttcttctgcagacgatgactagcaacagttatgacgagggtcaagatagccgccatacatgatacattgagtacaacatcaagataaacactccctccccacacacaacttttgccttccgttcactctgtatgttgtgtttattacggttgcatatgttgtgtttattatggcatcaacacgttccattagaaaatataactattgtttgtcaagtacaaaatcataatcacatcagcttgtaataatattgcatcactgttttgtaccaaattgtaagttgttgtagcaacgcacgggcaccctactagtatatagagtaagttatcattaaattctcaaagcatcacatcaaaatggcacaagacatttaaaacatacttttggatatatatatacacacacacgcccaaacaagctcttagttgggctgtcactttaac

SEQ ID NO: 63258 - DNA, 4669 bp, Zea Mays
gatgtccaatactgctatagtagcttctccaagttatgacactgttaggaagatggttcaacttctctcgaaatgaagcttctgtcttcctatgtatagacaagttgttcagttaggaggtctagattctcttaaaatggtgctatctacgagttaggaggtctaggagcacactgaatgttttagaggttgatgaaatcgttgttttcctaaaaaagcattttttctgctttgtttgaaattgtttgggttttcctccccaactttcataattacctatttctattgtatgtttgatcatttggacttctactccatccacaattttggtttattcagtgaggaactatgtttttaaccactctatagtttgtatagacatgcaacattcatctcagggtcaagaaagaagctcaacttggcatgcttcctgtttaaagcaaggcaagaaacatccccgccagatctctgtcgccaaagcagggctggtgaagaagttgtgtttccctcccggattgtcactactttcatatttgttcatttatgtttgttccaatttatgttggttttttacagttacagaatatgtttgttccagttgagttccagtttgaaaactggaacaaccactagcagatgcaaagttcacaaagtagcttgtcaaataatgtgcatgaactggaacaagcaacttgtgcacgaatgagcattactggaacaagtagcttgtgcatgaacgagtaatactgtagatgattggacatgtatgtctattttagatttttaatatttaatgttatatattcagctcataccatacatgaatttgcatttctgtactatactcacttaatgtcctacctgttttgttagcttcaactatccgctttaaactgacaaaaccagaccaaacatatgcaaatctcatatacctgtgaaagcaacaactgatttgccagattggttaattaaacgtaacaataaatagccccgattaaatggcttataaatatacttggatctgttcatttttcacatatcagctattaatgaagccttcactgggttcattttgtactactccattacttatttacagttacaagtattctaagaaacttaatatttcatcatcaaagttgtattcagacagtttcatttacattgctctgattttttgtactaggagctactgacaatggaaagcaacgattagagtaacttgatgagtgaggactattcattcagttgcttcgatcaataagtgaactaatggatgcatgtttcttttgataagtgagctaactactttagtcacaaagttcgtgttgatttctaaacatggtatgatggttttgtcatcctattcgattgagtttgggaaaaagcctgcacattctgaaaacaaacagactgcacattgtgtggctgataaggttgagtgggtaaataagatcaaagctattatttagacatactgaaaatatagtgaaggaagcgtaagcaatttttctgctatatttatgcattgtatccttgtaaaattatcaatattgttctgacttgtggggaaaggtatgagagtattcatttttttgcctcttttctgtttgcattccttcttcagtataatgtttgttagaataaccaggtgaatttacaaatttcatatccatatactttcttcgatgacaaatataaatctacctaggtttgtcataactcataggtcaatcattctaacttcaattgacattttttataaaaagtatcataaggaaaataatatattatcataaaagtgacgtccatctatatcaaattttagatattgatggtggtcagagttaaaaaacagtttgccttaagacaaaccaagatgaacttgtatttacaatcgaaggaaatattgcacattgcctagacatttaatttattagataaattcttttgttagttgttcaactttgtacgtcttataagtcacaggaacaatgtttatctagaacttcggtctcaaattatacagtagtgttcagccatacctgccatgtcacaagaaagagagataaaaagtatttaatagtagacctaatgatgctcatttgtaattgtagatattcgtatatcctttttctgcaaccttgtgaaacatgtgatggtttgacttggaacaaactttgggtctgatatagtaaaatgcaatgtatgtggagggaagtagtagaacaagacagaacaagtgccaaataaggttatatagtagaatacaatgtgtggagggaaatagtagaacaacacaaaacaagtgccaaataaggttacaaggtttatagtagcgattgcttagctgctacaacgacactcatagattagcctggcatttgcaatgtcgctcttgtatttgccataacctcacttaaggtcacacattgcctctgggaccttgacctccgctactgttgtcgcctggccgcgtcgacttcaccaatgccggggtgtccaacctcatcagcttcaccgtcgtcgactgctcccacacaaccgagctgtgggtcctggtaccggtcgcgccccgcctctgctccttctgcttcagcgagtggcagactatcgatacactcgatttcaattgttttttacgctatttactgtattgcaatgggacaatggatgattaggatttgttttttaagactggcccatgatttatcgtcgtatactatttctttaatagattgttcgctacatctactgatctacatgttcacatgtttcaacttctgtcagcatccgtagttactatatgaatgctcattctgtgtcaccttttaagtttacaaatgctcttttccaggtcacatatggaaagtgaagaacccaaatgatttcttcacaggaagcttggaccaatcttcaactcatggggcgcttcatcctcggcctcctacgcatgcacttctcctgcttctcctgctggtcatcgcccaagtgtgtcagatgtgccgtaacagatgactccaaaatggattgcatgctcttcaaatagctacagataactatcttcacataaaatggagagtacaatgtttataaaagaaggaatatggataaggatccagattctcctatagcatatgaagaggcaaaggaaatggcaagccaaagctgcacaatttctgatgatcactcgttgttactgttatccattatctcctcagaggcattgcttttaaattcaacagcagacatggcaggtgcaggtcctatcctatccattatctacccctgcatgtgtgccagctattctactctatgtttcaatagtttggaaataattcagagctaaggttttctgatacaggtacgtgtccactttcttctcaaggaattgcactagaggttggactttgtgggtcaagagaaatttaatgcctattgttaatacaacctttagctatttttccatgatgatggagttggacaagtaccatattgagtataagtgttagcctattatatctttgtacaaccatggcaaacgaataatttcttataacaccatgaagataatgtttaacgaagtgtgtttgcgtgcgtgtgtaatttcttcttttgttttgctgctaagtttgatagttcaaaacatgattcttgtaaagtttggttttagtctaacaaatacactcaagtcctgacatgtaaactgtaaagttggactgttgcttggtggatctgtattgaactttattttttttaaaatgttttatggcttgtatagtttgtattcacttctcacctaagctacaatttgtttttccagcctttcaagatttggcacattgacataatgacatgggttggtcacggattggatgtcaattttgctccctgtaccttgtagattatcggttatgtcaattttcgaaatttctatcgtgatggataacatttgaataaaacatagttaaataaacatgactactgtttcagtctttcgaaattctgatgctatagtgtcagtatactatgtcattttagggaaaatatatgtcatgtttattttgataaaattatatgatttctcactcaattcttgtcggtggcttcaggatttgttattttgtatatcgatctgtgtcatttgacaaagtactttgacttggtataatatgagtgttacttcgaccaaaagagcttggtaaagtgtgagaaactccgcaaacttcttctgcagacgatgactagcaacagttatgacgagggtcaagatagccgccatacatgatacattgagtacaacatcaagataaacactccctccccacacacaacttttgccttccgttcactctgtatgttgtgtttattacggttgcatatgttgtgtttattatggcatcaacacgttccattagaaaatataactattgtttgtcaagtacaaaatcataatcacatcagcttgtaataatattgcatcactgttttgtaccaaattgtaagttgttgtagcaacgcacgggcaccctactagtatatagagtaagttatcattaaattctcaaagcatcacatcaaaatggcacaagacatttaaaacatacttttggatatatatatacacacacacgcccaaacaagctcttagttgggctgtcactttaac

SEQ ID NO: 63259 - DNA, 3717 bp, Zea Mays
gatgtccaatactgctatagtagcttctccaagttatgacactgttaggaagatggttcaacttctctcgaaatgaagcttctgtcttcctatgtatagacaagttgttcagttaggaggtctagattctcttaaaatggtgctatctacgagttaggaggtctaggagcacactgaatgttttagaggttgatgaaatcgttgttttcctaaaaaagcattttttctgctttgtttgaaattgtttgggttttcctccccaactttcataattacctatttctattgtatgtttgatcatttggacttctactccatccacaattttggtttattcagtgaggaactatgtttttaaccactctatagtttgtatagacatgcaacattcatctcagggtcaagaaagaagctcaacttggcatgcttcctgtttaaagcaaggcaagaaacatccccgccagatctctgtcgccaaagcagggctggtgaagaagttgtgtttccctcccggattgtcactactttcatatttgttcatttatgtttgttccaatttatgttggttttttacagttacagaatatgtttgttccagttgagttccagtttgaaaactggaacaaccactagcagatgcaaagttcacaaagtagcttgtcaaataatgtgcatgaactggaacaagcaacttgtgcacgaatgagcattactggaacaagtagcttgtgcatgaacgagtaatactgtagatgattggacatgtatgtctattttagatttttaatatttaatgttatatattcagctcataccatacatgaatttgcatttctgtactatactcacttaatgtcctacctgttttgttagcttcaactatccgctttaaactgacaaaaccagaccaaacatatgcaaatctcatatacctgtgaaagcaacaactgatttgccagattggttaattaaacgtaacaataaatagccccgattaaatggcttataaatatacttggatctgttcatttttcacatatcagctattaatgaagccttcactgggttcattttgtactactccattacttatttacagttacaagtattctaagaaacttaatatttcatcatcaaagttgtattcagacagtttcatttacattgctctgattttttgtactaggagctactgacaatggaaagcaacgattagagtaacttgatgagtgaggactattcattcagttgcttcgatcaataagtgaactaatggatgcatgtttcttttgataagtgagctaactactttagtcacaaagttcgtgttgatttctaaacatggtatgatggttttgtcatcctattcgattgagtttgggaaaaagcctgcacattctgaaaacaaacagactgcacattgtgtggctgataaggttgagtgggtaaataagatcaaagctattatttagacatactgaaaatatagtgaaggaagcgtaagcaatttttctgctatatttatgcattgtatccttgtaaaattatcaatattgttctgacttgtggggaaaggtatgagagtattcatttttttgcctcttttctgtttgcattccttcttcagtataatgtttgttagaataaccaggtgaatttacaaatttcatatccatatactttcttcgatgacaaatataaatctacctaggtttgtcataactcataggtcaatcattctaacttcaattgacattttttataaaaagtatcataaggaaaataatatattatcataaaagtgacgtccatctatatcaaattttagatattgatggtggtcagagttaaaaaacagtttgccttaagacaaaccaagatgaacttgtatttacaatcgaaggaaatattgcacattgcctagacatttaatttattagataaattcttttgttagttgttcaactttgtacgtcttataagtcacaggaacaatgtttatctagaacttcggtctcaaattatacagtagtgttcagccatacctgccatgtcacaagaaagagagataaaaagtatttaatagtagacctaatgatgctcatttgtaattgtagatattcgtatatcctttttctgcaaccttgtgaaacatgtgatggtttgacttggaacaaactttgggtctgatatagtaaaatgcaatgtatgtggagggaagtagtagaacaagacagaacaagtgccaaataaggttatatagtagaatacaatgtgtggagggaaatagtagaacaacacaaaacaagtgccaaataaggttacaaggtttatagtagcgattgcttagctgctacaacgacactcatagattagcctggcatttgcaatgtcgctcttgtatttgccataacctcacttaaggtcacacattgcctctgggaccttgacctccgctactgttgtcgcctggccgcgtcgacttcaccaatgccggggtgtccaacctcatcagcttcaccgtcgtcgactgctcccacacaaccgagctgtgggtcctggtcacatatggaaagtgaagaacccaaatgatttcttcacaggaagcttggaccaatcttcaactcatggggcgcttcatcctcggcctcctacgcatgcacttctcctgcttctcctgctggtcatcgcccaaggatgaattgctgctcttgaccatagggattggagcagcatgtagtttatactttatcctggttttctctctcgagatgttgcatggtgtcagtgtgtcagatgtgccgtaacagatgactccaaaatggattgcatgctcttcaaatagctacagataactatcttcacataaaatggagagtacaatgtttataaaagaaggaatatggataaggatccagattctcctatagcatatgaagaggcaaaggaaatggcaagccaaagctgcacaatttctgatgatcactcgttgttactgttatccattatctcctcagaggcattgcttttaaattcaacagcagacatggcaggtgcaggtcctatcctatccattatctacccctgcatgtgtgccagctattctactctatgtttcaatagtttggaaataattcagagctaaggttttctgatacaggatttgttattttgtatatcgatctgtgtcatttgacaaagtactttgacttggtataatatgagtgttacttcgaccaaaagagcttggtaaagtgtgagaaactccgcaaacttcttctgcagacgatgactagcaacagttatgacgagggtcaagatagccgccatacatgatacattgagtacaacatcaagataaacactccctccccacacacaacttttgccttccgttcactctgtatgttgtgtttattacggttgcatatgttgtgtttattatggcatcaacacgttccattagaaaatataactattgtttgtcaagtacaaaatcataatcacatcagcttgtaataatattgcatcactgttttgtaccaaattgtaagttgttgtagcaacgcacgggcaccctactagtatatagagtaagttatcattaaattctcaaagcatcacatcaaaatggcacaagacatttaaaacatacttttggatatatatatacacacacacgcccaaacaagctcttagttgggctgtcactttaac

SEQ ID NO: 63260 - DNA, 4358 bp, Zea Mays
gatgtccaatactgctatagtagcttctccaagttatgacactgttaggaagatggttcaacttctctcgaaatgaagcttctgtcttcctatgtatagacaagttgttcagttaggaggtctagattctcttaaaatggtgctatctacgagttaggaggtctaggagcacactgaatgttttagaggttgatgaaatcgttgttttcctaaaaaagcattttttctgctttgtttgaaattgtttgggttttcctccccaactttcataattacctatttctattgtatgtttgatcatttggacttctactccatccacaattttggtttattcagtgaggaactatgtttttaaccactctatagtttgtatagacatgcaacattcatctcagggtcaagaaagaagctcaacttggcatgcttcctgtttaaagcaaggcaagaaacatccccgccagatctctgtcgccaaagcagggctggtgaagaagttgtgtttccctcccggattgtcactactttcatatttgttcatttatgtttgttccaatttatgttggttttttacagttacagaatatgtttgttccagttgagttccagtttgaaaactggaacaaccactagcagatgcaaagttcacaaagtagcttgtcaaataatgtgcatgaactggaacaagcaacttgtgcacgaatgagcattactggaacaagtagcttgtgcatgaacgagtaatactgtagatgattggacatgtatgtctattttagatttttaatatttaatgttatatattcagctcataccatacatgaatttgcatttctgtactatactcacttaatgtcctacctgttttgttagcttcaactatccgctttaaactgacaaaaccagaccaaacatatgcaaatctcatatacctgtgaaagcaacaactgatttgccagattggttaattaaacgtaacaataaatagccccgattaaatggcttataaatatacttggatctgttcatttttcacatatcagctattaatgaagccttcactgggttcattttgtactactccattacttatttacagttacaagtattctaagaaacttaatatttcatcatcaaagttgtattcagacagtttcatttacattgctctgattttttgtactaggagctactgacaatggaaagcaacgattagagtaacttgatgagtgaggactattcattcagttgcttcgatcaataagtgaactaatggatgcatgtttcttttgataagtgagctaactactttagtcacaaagttcgtgttgatttctaaacatggtatgatggttttgtcatcctattcgattgagtttgggaaaaagcctgcacattctgaaaacaaacagactgcacattgtgtggctgataaggttgagtgggtaaataagatcaaagctattatttagacatactgaaaatatagtgaaggaagcgtaagcaatttttctgctatatttatgcattgtatccttgtaaaattatcaatattgttctgacttgtggggaaaggtatgagagtattcatttttttgcctcttttctgtttgcattccttcttcagtataatgtttgttagaataaccaggtgaatttacaaatttcatatccatatactttcttcgatgacaaatataaatctacctaggtttgtcataactcataggtcaatcattctaacttcaattgacattttttataaaaagtatcataaggaaaataatatattatcataaaagtgacgtccatctatatcaaattttagatattgatggtggtcagagttaaaaaacagtttgccttaagacaaaccaagatgaacttgtatttacaatcgaaggaaatattgcacattgcctagacatttaatttattagataaattcttttgttagttgttcaactttgtacgtcttataagtcacaggaacaatgtttatctagaacttcggtctcaaattatacagtagtgttcagccatacctgccatgtcacaagaaagagagataaaaagtatttaatagtagacctaatgatgctcatttgtaattgtagatattcgtatatcctttttctgcaaccttgtgaaacatgtgatggtttgacttggaacaaactttgggtctgatatagtaaaatgcaatgtatgtggagggaagtagtagaacaagacagaacaagtgccaaataaggttatatagtagaatacaatgtgtggagggaaatagtagaacaacacaaaacaagtgccaaataaggttacaaggtttatagtagcgattgcttagctgctacaacgacactcatagattagcctggcatttgcaatgtcgctcttgtatttgccataacctcacttaaggtcacacattgcctctgggaccttgacctccgctactgttgtcgcctggccgcgtcgacttcaccaatgccggggtgtccaacctcatcagcttcaccgtcgtcgactgctcccacacaaccgagctgtgggtcctggtcacatatggaaagtgaagaacccaaatgatttcttcacaggaagcttggaccaatcttcaactcatggggcgcttcatcctcggcctcctacgcatgcacttctcctgcttctcctgctggtcatcgcccaaggatgaattgctgctcttgaccatagggattggagcagcatgtagtttatactttatcctggttttctctctcgagatgttgcatggtgtcagtgtgtcagatgtgccgtaacagatgactccaaaatggattgcatgctcttcaaatagctacagataactatcttcacataaaatggagagtacaatgtttataaaagaaggaatatggataaggatccagattctcctatagcatatgaagaggcaaaggaaatggcaagccaaagctgcacaatttctgatgatcactcgttgttactgttatccattatctcctcagaggcattgcttttaaattcaacagcagacatggcaggtacgtgtccactttcttctcaaggaattgcactagaggttggactttgtgggtcaagagaaatttaatgcctattgttaatacaacctttagctatttttccatgatgatggagttggacaagtaccatattgagtataagtgttagcctattatatctttgtacaaccatggcaaacgaataatttcttataacaccatgaagataatgtttaacgaagtgtgtttgcgtgcgtgtgtaatttcttcttttgttttgctgctaagtttgatagttcaaaacatgattcttgtaaagtttggttttagtctaacaaatacactcaagtcctgacatgtaaactgtaaagttggactgttgcttggtggatctgtattgaactttattttttttaaaatgttttatggcttgtatagtttgtattcacttctcacctaagctacaatttgtttttccagcctttcaagatttggcacattgacataatgacatgggttggtcacggattggatgtcaattttgctccctgtaccttgtagattatcggttatgtcaattttcgaaatttctatcgtgatggataacatttgaataaaacatagttaaataaacatgactactgtttcagtctttcgaaattctgatgctatagtgtcagtatactatgtcattttagggaaaatatatgtcatgtttattttgataaaattatatgatttctcactcaattcttgtcggtggcttcaggatttgttattttgtatatcgatctgtgtcatttgacaaagtactttgacttggtataatatgagtgttacttcgaccaaaagagcttggtaaagtgtgagaaactccgcaaacttcttctgcagacgatgactagcaacagttatgacgagggtcaagatagccgccatacatgatacattgagtacaacatcaagataaacactccctccccacacacaacttttgccttccgttcactctgtatgttgtgtttattacggttgcatatgttgtgtttattatggcatcaacacgttccattagaaaatataactattgtttgtcaagtacaaaatcataatcacatcagcttgtaataatattgcatcactgttttgtaccaaattgtaagttgttgtagcaacgcacgggcaccctactagtatatagagtaagttatcattaaattctcaaagcatcacatcaaaatggcacaagacatttaaaacatacttttggatatatatatacacacacacgcccaaacaagctcttagttgggctgtcactttaac

SEQ ID NO: 63261 - DNA, 3931 bp, Zea Mays
gatgtccaatactgctatagtagcttctccaagttatgacactgttaggaagatggttcaacttctctcgaaatgaagcttctgtcttcctatgtatagacaagttgttcagttaggaggtctagattctcttaaaatggtgctatctacgagttaggaggtctaggagcacactgaatgttttagaggttgatgaaatcgttgttttcctaaaaaagcattttttctgctttgtttgaaattgtttgggttttcctccccaactttcataattacctatttctattgtatgtttgatcatttggacttctactccatccacaattttggtttattcagtgaggaactatgtttttaaccactctatagtttgtatagacatgcaacattcatctcagggtcaagaaagaagctcaacttggcatgcttcctgtttaaagcaaggcaagaaacatccccgccagatctctgtcgccaaagcagggctggtgaagaagttgtgtttccctcccggattgtcactactttcatatttgttcatttatgtttgttccaatttatgttggttttttacagttacagaatatgtttgttccagttgagttccagtttgaaaactggaacaaccactagcagatgcaaagttcacaaagtagcttgtcaaataatgtgcatgaactggaacaagcaacttgtgcacgaatgagcattactggaacaagtagcttgtgcatgaacgagtaatactgtagatgattggacatgtatgtctattttagatttttaatatttaatgttatatattcagctcataccatacatgaatttgcatttctgtactatactcacttaatgtcctacctgttttgttagcttcaactatccgctttaaactgacaaaaccagaccaaacatatgcaaatctcatatacctgtgaaagcaacaactgatttgccagattggttaattaaacgtaacaataaatagccccgattaaatggcttataaatatacttggatctgttcatttttcacatatcagctattaatgaagccttcactgggttcattttgtactactccattacttatttacagttacaagtattctaagaaacttaatatttcatcatcaaagttgtattcagacagtttcatttacattgctctgattttttgtactaggagctactgacaatggaaagcaacgattagagtaacttgatgagtgaggactattcattcagttgcttcgatcaataagtgaactaatggatgcatgtttcttttgataagtgagctaactactttagtcacaaagttcgtgttgatttctaaacatggtatgatggttttgtcatcctattcgattgagtttgggaaaaagcctgcacattctgaaaacaaacagactgcacattgtgtggctgataaggttgagtgggtaaataagatcaaagctattatttagacatactgaaaatatagtgaaggaagcgtaagcaatttttctgctatatttatgcattgtatccttgtaaaattatcaatattgttctgacttgtggggaaaggtatgagagtattcatttttttgcctcttttctgtttgcattccttcttcagtataatgtttgttagaataaccaggtgaatttacaaatttcatatccatatactttcttcgatgacaaatataaatctacctaggtttgtcataactcataggtcaatcattctaacttcaattgacattttttataaaaagtatcataaggaaaataatatattatcataaaagtgacgtccatctatatcaaattttagatattgatggtggtcagagttaaaaaacagtttgccttaagacaaaccaagatgaacttgtatttacaatcgaaggaaatattgcacattgcctagacatttaatttattagataaattcttttgttagttgttcaactttgtacgtcttataagtcacaggaacaatgtttatctagaacttcggtctcaaattatacagtagtgttcagccatacctgccatgtcacaagaaagagagataaaaagtatttaatagtagacctaatgatgctcatttgtaattgtagatattcgtatatcctttttctgcaaccttgtgaaacatgtgatggtttgacttggaacaaactttgggtctgatatagtaaaatgcaatgtatgtggagggaagtagtagaacaagacagaacaagtgccaaataaggttatatagtagaatacaatgtgtggagggaaatagtagaacaacacaaaacaagtgccaaataaggttacaaggtttatagtagcgattgcttagctgctacaacgacactcatagattagcctggcatttgcaatgtcgctcttgtatttgccataacctcacttaaggtcacacattgcctctgggaccttgacctccgctactgttgtcgcctggccgcgtcgacttcaccaatgccggggtgtccaacctcatcagcttcaccgtcgtcgactgctcccacacaaccgagctgtgggtcctggtcacatatggaaagtgaagaacccaaatgatttcttcacaggaagcttggaccaatcttcaactcatggggcgcttcatcctcggcctcctacgcatgcacttctcctgcttctcctgctggtcatcgcccaagatgttgcatggtgtcagtgtgtcagatgtgccgtaacagatgactccaaaatggattgcatgctcttcaaatagctacagataactatcttcacataaaatggagagtacaatgtttataaaagaaggaatatggataaggatccagattctcctatagcatatgaagaggcaaaggaaatggcaagccaaagctgcacaatttctgatgatcactcgttgttactgttatccattatctcctcagaggcattgcttttaaattcaacagcagacatggcaggtgcaggtcctatcctatccattatctacccctgcatgtgtgccagctattctactctatgtttcaatagtttggaaataattcagagctaaggttttctgatacagcctttcaagatttggcacattgacataatgacatgggttggtcacggattggatgtcaattttgctccctgtaccttgtagattatcggttatgtcaattttcgaaatttctatcgtgatggataacatttgaataaaacatagttaaataaacatgactactgtttcagtctttcgaaattctgatgctatagtgtcagtatactatgtcattttagggaaaatatatgtcatgtttattttgataaaattatatgatttctcactcaattcttgtcggtggcttcaggatttgttattttgtatatcgatctgtgtcatttgacaaagtactttgacttggtataatatgagtgttacttcgaccaaaagagcttggtaaagtgtgagaaactccgcaaacttcttctgcagacgatgactagcaacagttatgacgagggtcaagatagccgccatacatgatacattgagtacaacatcaagataaacactccctccccacacacaacttttgccttccgttcactctgtatgttgtgtttattacggttgcatatgttgtgtttattatggcatcaacacgttccattagaaaatataactattgtttgtcaagtacaaaatcataatcacatcagcttgtaataatattgcatcactgttttgtaccaaattgtaagttgttgtagcaacgcacgggcaccctactagtatatagagtaagttatcattaaattctcaaagcatcacatcaaaatggcacaagacatttaaaacatacttttggatatatatatacacacacacgcccaaacaagctcttagttgggctgtcactttaac

SEQ ID NO: 63262 - DNA, 3914 bp, Zea Mays
gatgtccaatactgctatagtagcttctccaagttatgacactgttaggaagatggttcaacttctctcgaaatgaagcttctgtcttcctatgtatagacaagttgttcagttaggaggtctagattctcttaaaatggtgctatctacgagttaggaggtctaggagcacactgaatgttttagaggttgatgaaatcgttgttttcctaaaaaagcattttttctgctttgtttgaaattgtttgggttttcctccccaactttcataattacctatttctattgtatgtttgatcatttggacttctactccatccacaattttggtttattcagtgaggaactatgtttttaaccactctatagtttgtatagacatgcaacattcatctcagggtcaagaaagaagctcaacttggcatgcttcctgtttaaagcaaggcaagaaacatccccgccagatctctgtcgccaaagcagggctggtgaagaagttgtgtttccctcccggattgtcactactttcatatttgttcatttatgtttgttccaatttatgttggttttttacagttacagaatatgtttgttccagttgagttccagtttgaaaactggaacaaccactagcagatgcaaagttcacaaagtagcttgtcaaataatgtgcatgaactggaacaagcaacttgtgcacgaatgagcattactggaacaagtagcttgtgcatgaacgagtaatactgtagatgattggacatgtatgtctattttagatttttaatatttaatgttatatattcagctcataccatacatgaatttgcatttctgtactatactcacttaatgtcctacctgttttgttagcttcaactatccgctttaaactgacaaaaccagaccaaacatatgcaaatctcatatacctgtgaaagcaacaactgatttgccagattggttaattaaacgtaacaataaatagccccgattaaatggcttataaatatacttggatctgttcatttttcacatatcagctattaatgaagccttcactgggttcattttgtactactccattacttatttacagttacaagtattctaagaaacttaatatttcatcatcaaagttgtattcagacagtttcatttacattgctctgattttttgtactaggagctactgacaatggaaagcaacgattagagtaacttgatgagtgaggactattcattcagttgcttcgatcaataagtgaactaatggatgcatgtttcttttgataagtgagctaactactttagtcacaaagttcgtgttgatttctaaacatggtatgatggttttgtcatcctattcgattgagtttgggaaaaagcctgcacattctgaaaacaaacagactgcacattgtgtggctgataaggttgagtgggtaaataagatcaaagctattatttagacatactgaaaatatagtgaaggaagcgtaagcaatttttctgctatatttatgcattgtatccttgtaaaattatcaatattgttctgacttgtggggaaaggtatgagagtattcatttttttgcctcttttctgtttgcattccttcttcagtataatgtttgttagaataaccaggtgaatttacaaatttcatatccatatactttcttcgatgacaaatataaatctacctaggtttgtcataactcataggtcaatcattctaacttcaattgacattttttataaaaagtatcataaggaaaataatatattatcataaaagtgacgtccatctatatcaaattttagatattgatggtggtcagagttaaaaaacagtttgccttaagacaaaccaagatgaacttgtatttacaatcgaaggaaatattgcacattgcctagacatttaatttattagataaattcttttgttagttgttcaactttgtacgtcttataagtcacaggaacaatgtttatctagaacttcggtctcaaattatacagtagtgttcagccatacctgccatgtcacaagaaagagagataaaaagtatttaatagtagacctaatgatgctcatttgtaattgtagatattcgtatatcctttttctgcaaccttgtgaaacatgtgatggtttgacttggaacaaactttgggtctgatatagtaaaatgcaatgtatgtggagggaagtagtagaacaagacagaacaagtgccaaataaggttatatagtagaatacaatgtgtggagggaaatagtagaacaacacaaaacaagtgccaaataaggttacaaggtttatagtagcgattgcttagctgctacaacgacactcatagattagcctggcatttgcaatgtcgctcttgtatttgccataacctcacttaaggtcacacattgcctctgggaccttgacctccgctactgttgtcgcctggccgcgtcgacttcaccaatgccggggtgtccaacctcatcagcttcaccgtcgtcgactgctcccacacaaccgagctgtgggtcctggtcacatatggaaagtgaagaacccaaatgatttcttcacaggaagcttggaccaatcttcaactcatggggcgcttcatcctcggcctcctacgcatgcacttctcctgcttctcctgctggtcatcgcccaagtgtgtcagatgtgccgtaacagatgactccaaaatggattgcatgctcttcaaatagctacagataactatcttcacataaaatggagagtacaatgtttataaaagaaggaatatggataaggatccagattctcctatagcatatgaagaggcaaaggaaatggcaagccaaagctgcacaatttctgatgatcactcgttgttactgttatccattatctcctcagaggcattgcttttaaattcaacagcagacatggcaggtgcaggtcctatcctatccattatctacccctgcatgtgtgccagctattctactctatgtttcaatagtttggaaataattcagagctaaggttttctgatacagcctttcaagatttggcacattgacataatgacatgggttggtcacggattggatgtcaattttgctccctgtaccttgtagattatcggttatgtcaattttcgaaatttctatcgtgatggataacatttgaataaaacatagttaaataaacatgactactgtttcagtctttcgaaattctgatgctatagtgtcagtatactatgtcattttagggaaaatatatgtcatgtttattttgataaaattatatgatttctcactcaattcttgtcggtggcttcaggatttgttattttgtatatcgatctgtgtcatttgacaaagtactttgacttggtataatatgagtgttacttcgaccaaaagagcttggtaaagtgtgagaaactccgcaaacttcttctgcagacgatgactagcaacagttatgacgagggtcaagatagccgccatacatgatacattgagtacaacatcaagataaacactccctccccacacacaacttttgccttccgttcactctgtatgttgtgtttattacggttgcatatgttgtgtttattatggcatcaacacgttccattagaaaatataactattgtttgtcaagtacaaaatcataatcacatcagcttgtaataatattgcatcactgttttgtaccaaattgtaagttgttgtagcaacgcacgggcaccctactagtatatagagtaagttatcattaaattctcaaagcatcacatcaaaatggcacaagacatttaaaacatacttttggatatatatatacacacacacgcccaaacaagctcttagttgggctgtcactttaac

SEQ ID NO: 63263 - DNA, 4006 bp, Zea Mays
gatgtccaatactgctatagtagcttctccaagttatgacactgttaggaagatggttcaacttctctcgaaatgaagcttctgtcttcctatgtatagacaagttgttcagttaggaggtctagattctcttaaaatggtgctatctacgagttaggaggtctaggagcacactgaatgttttagaggttgatgaaatcgttgttttcctaaaaaagcattttttctgctttgtttgaaattgtttgggttttcctccccaactttcataattacctatttctattgtatgtttgatcatttggacttctactccatccacaattttggtttattcagtgaggaactatgtttttaaccactctatagtttgtatagacatgcaacattcatctcagggtcaagaaagaagctcaacttggcatgcttcctgtttaaagcaaggcaagaaacatccccgccagatctctgtcgccaaagcagggctggtgaagaagttgtgtttccctcccggattgtcactactttcatatttgttcatttatgtttgttccaatttatgttggttttttacagttacagaatatgtttgttccagttgagttccagtttgaaaactggaacaaccactagcagatgcaaagttcacaaagtagcttgtcaaataatgtgcatgaactggaacaagcaacttgtgcacgaatgagcattactggaacaagtagcttgtgcatgaacgagtaatactgtagatgattggacatgtatgtctattttagatttttaatatttaatgttatatattcagctcataccatacatgaatttgcatttctgtactatactcacttaatgtcctacctgttttgttagcttcaactatccgctttaaactgacaaaaccagaccaaacatatgcaaatctcatatacctgtgaaagcaacaactgatttgccagattggttaattaaacgtaacaataaatagccccgattaaatggcttataaatatacttggatctgttcatttttcacatatcagctattaatgaagccttcactgggttcattttgtactactccattacttatttacagttacaagtattctaagaaacttaatatttcatcatcaaagttgtattcagacagtttcatttacattgctctgattttttgtactaggagctactgacaatggaaagcaacgattagagtaacttgatgagtgaggactattcattcagttgcttcgatcaataagtgaactaatggatgcatgtttcttttgataagtgagctaactactttagtcacaaagttcgtgttgatttctaaacatggtatgatggttttgtcatcctattcgattgagtttgggaaaaagcctgcacattctgaaaacaaacagactgcacattgtgtggctgataaggttgagtgggtaaataagatcaaagctattatttagacatactgaaaatatagtgaaggaagcgtaagcaatttttctgctatatttatgcattgtatccttgtaaaattatcaatattgttctgacttgtggggaaaggtatgagagtattcatttttttgcctcttttctgtttgcattccttcttcagtataatgtttgttagaataaccaggtgaatttacaaatttcatatccatatactttcttcgatgacaaatataaatctacctaggtttgtcataactcataggtcaatcattctaacttcaattgacattttttataaaaagtatcataaggaaaataatatattatcataaaagtgacgtccatctatatcaaattttagatattgatggtggtcagagttaaaaaacagtttgccttaagacaaaccaagatgaacttgtatttacaatcgaaggaaatattgcacattgcctagacatttaatttattagataaattcttttgttagttgttcaactttgtacgtcttataagtcacaggaacaatgtttatctagaacttcggtctcaaattatacagtagtgttcagccatacctgccatgtcacaagaaagagagataaaaagtatttaatagtagacctaatgatgctcatttgtaattgtagatattcgtatatcctttttctgcaaccttgtgaaacatgtgatggtttgacttggaacaaactttgggtctgatatagtaaaatgcaatgtatgtggagggaagtagtagaacaagacagaacaagtgccaaataaggttatatagtagaatacaatgtgtggagggaaatagtagaacaacacaaaacaagtgccaaataaggttacaaggtttatagtagcgattgcttagctgctacaacgacactcatagattagcctggcatttgcaatgtcgctcttgtatttgccataacctcacttaaggtcacacattgcctctgggaccttgacctccgctactgttgtcgcctggccgcgtcgacttcaccaatgccggggtgtccaacctcatcagcttcaccgtcgtcgactgctcccacacaaccgagctgtgggtcctggtcacatatggaaagtgaagaacccaaatgatttcttcacaggaagcttggaccaatcttcaactcatggggcgcttcatcctcggcctcctacgcatgcacttctcctgcttctcctgctggtcatcgcccaaggatgaattgctgctcttgaccatagggattggagcagcatgtagtttatactttatcctggttttctctctcgagatgttgcatggtgtcagtgtgtcagatgtgccgtaacagatgactccaaaatggattgcatgctcttcaaatagctacagataactatcttcacataaaatggagagtacaatgtttataaaagaaggaatatggataaggatccagattctcctatagcatatgaagaggcaaaggaaatggcaagccaaagctgcacaatttctgatgatcactcgttgttactgttatccattatctcctcagaggcattgcttttaaattcaacagcagacatggcaggtgcaggtcctatcctatccattatctacccctgcatgtgtgccagctattctactctatgtttcaatagtttggaaataattcagagctaaggttttctgatacagcctttcaagatttggcacattgacataatgacatgggttggtcacggattggatgtcaattttgctccctgtaccttgtagattatcggttatgtcaattttcgaaatttctatcgtgatggataacatttgaataaaacatagttaaataaacatgactactgtttcagtctttcgaaattctgatgctatagtgtcagtatactatgtcattttagggaaaatatatgtcatgtttattttgataaaattatatgatttctcactcaattcttgtcggtggcttcaggatttgttattttgtatatcgatctgtgtcatttgacaaagtactttgacttggtataatatgagtgttacttcgaccaaaagagcttggtaaagtgtgagaaactccgcaaacttcttctgcagacgatgactagcaacagttatgacgagggtcaagatagccgccatacatgatacattgagtacaacatcaagataaacactccctccccacacacaacttttgccttccgttcactctgtatgttgtgtttattacggttgcatatgttgtgtttattatggcatcaacacgttccattagaaaatataactattgtttgtcaagtacaaaatcataatcacatcagcttgtaataatattgcatcactgttttgtaccaaattgtaagttgttgtagcaacgcacgggcaccctactagtatatagagtaagttatcattaaattctcaaagcatcacatcaaaatggcacaagacatttaaaacatacttttggatatatatatacacacacacgcccaaacaagctcttagttgggctgtcactttaac

SEQ ID NO: 63264 - DNA, 3882 bp, Zea Mays
gatgtccaatactgctatagtagcttctccaagttatgacactgttaggaagatggttcaacttctctcgaaatgaagcttctgtcttcctatgtatagacaagttgttcagttaggaggtctagattctcttaaaatggtgctatctacgagttaggaggtctaggagcacactgaatgttttagaggttgatgaaatcgttgttttcctaaaaaagcattttttctgctttgtttgaaattgtttgggttttcctccccaactttcataattacctatttctattgtatgtttgatcatttggacttctactccatccacaattttggtttattcagtgaggaactatgtttttaaccactctatagtttgtatagacatgcaacattcatctcagggtcaagaaagaagctcaacttggcatgcttcctgtttaaagcaaggcaagaaacatccccgccagatctctgtcgccaaagcagggctggtgaagaagttgtgtttccctcccggattgtcactactttcatatttgttcatttatgtttgttccaatttatgttggttttttacagttacagaatatgtttgttccagttgagttccagtttgaaaactggaacaaccactagcagatgcaaagttcacaaagtagcttgtcaaataatgtgcatgaactggaacaagcaacttgtgcacgaatgagcattactggaacaagtagcttgtgcatgaacgagtaatactgtagatgattggacatgtatgtctattttagatttttaatatttaatgttatatattcagctcataccatacatgaatttgcatttctgtactatactcacttaatgtcctacctgttttgttagcttcaactatccgctttaaactgacaaaaccagaccaaacatatgcaaatctcatatacctgtgaaagcaacaactgatttgccagattggttaattaaacgtaacaataaatagccccgattaaatggcttataaatatacttggatctgttcatttttcacatatcagctattaatgaagccttcactgggttcattttgtactactccattacttatttacagttacaagtattctaagaaacttaatatttcatcatcaaagttgtattcagacagtttcatttacattgctctgattttttgtactaggagctactgacaatggaaagcaacgattagagtaacttgatgagtgaggactattcattcagttgcttcgatcaataagtgaactaatggatgcatgtttcttttgataagtgagctaactactttagtcacaaagttcgtgttgatttctaaacatggtatgatggttttgtcatcctattcgattgagtttgggaaaaagcctgcacattctgaaaacaaacagactgcacattgtgtggctgataaggttgagtgggtaaataagatcaaagctattatttagacatactgaaaatatagtgaaggaagcgtaagcaatttttctgctatatttatgcattgtatccttgtaaaattatcaatattgttctgacttgtggggaaaggtatgagagtattcatttttttgcctcttttctgtttgcattccttcttcagtataatgtttgttagaataaccaggtgaatttacaaatttcatatccatatactttcttcgatgacaaatataaatctacctaggtttgtcataactcataggtcaatcattctaacttcaattgacattttttataaaaagtatcataaggaaaataatatattatcataaaagtgacgtccatctatatcaaattttagatattgatggtggtcagagttaaaaaacagtttgccttaagacaaaccaagatgaacttgtatttacaatcgaaggaaatattgcacattgcctagacatttaatttattagataaattcttttgttagttgttcaactttgtacgtcttataagtcacaggaacaatgtttatctagaacttcggtctcaaattatacagtagtgttcagccatacctgccatgtcacaagaaagagagataaaaagtatttaatagtagacctaatgatgctcatttgtaattgtagatattcgtatatcctttttctgcaaccttgtgaaacatgtgatggtttgacttggaacaaactttgggtctgatatagtaaaatgcaatgtatgtggagggaagtagtagaacaagacagaacaagtgccaaataaggttatatagtagaatacaatgtgtggagggaaatagtagaacaacacaaaacaagtgccaaataaggttacaaggtttatagtagcgattgcttagctgctacaacgacactcatagattagcctggcatttgcaatgtcgctcttgtatttgccataacctcacttaaggtcacacattgcctctgggaccttgacctccgctactgttgtcgcctggccgcgtcgacttcaccaatgccggggtgtccaacctcatcagcttcaccgtcgtcgactgctcccacacaaccgagctgtgggtcctggtcacatatggaaagtgaagaacccaaatgatttcttcacaggaagcttggaccaatcttcaactcatggggcgcttcatcctcggcctcctacgcatgcacttctcctgcttctcctgctggtcatcgcccaaggatgaattgctgctcttgaccatagggattggagcagcatgtagtttatactttatcctggttttctctctcgagtgtgtcagatgtgccgtaacagatgactccaaaatggattgcatgctcttcaaatagctacagataactatcttcacataaaatggagagtacaatgtttataaaagaaggaatatggataaggatccagattctcctatagcatatgaagaggcaaaggaaatggcaagccaaagctgcacaatttctgatgatcactcgttgttactgttatccattatctcctcagaggcattgcttttaaattcaacagcagacatggcagcctttcaagatttggcacattgacataatgacatgggttggtcacggattggatgtcaattttgctccctgtaccttgtagattatcggttatgtcaattttcgaaatttctatcgtgatggataacatttgaataaaacatagttaaataaacatgactactgtttcagtctttcgaaattctgatgctatagtgtcagtatactatgtcattttagggaaaatatatgtcatgtttattttgataaaattatatgatttctcactcaattcttgtcggtggcttcaggatttgttattttgtatatcgatctgtgtcatttgacaaagtactttgacttggtataatatgagtgttacttcgaccaaaagagcttggtaaagtgtgagaaactccgcaaacttcttctgcagacgatgactagcaacagttatgacgagggtcaagatagccgccatacatgatacattgagtacaacatcaagataaacactccctccccacacacaacttttgccttccgttcactctgtatgttgtgtttattacggttgcatatgttgtgtttattatggcatcaacacgttccattagaaaatataactattgtttgtcaagtacaaaatcataatcacatcagcttgtaataatattgcatcactgttttgtaccaaattgtaagttgttgtagcaacgcacgggcaccctactagtatatagagtaagttatcattaaattctcaaagcatcacatcaaaatggcacaagacatttaaaacatacttttggatatatatatacacacacacgcccaaacaagctcttagttgggctgtcactttaac

SEQ ID NO: 63265 - DNA, 3824 bp, Zea Mays
gatgtccaatactgctatagtagcttctccaagttatgacactgttaggaagatggttcaacttctctcgaaatgaagcttctgtcttcctatgtatagacaagttgttcagttaggaggtctagattctcttaaaatggtgctatctacgagttaggaggtctaggagcacactgaatgttttagaggttgatgaaatcgttgttttcctaaaaaagcattttttctgctttgtttgaaattgtttgggttttcctccccaactttcataattacctatttctattgtatgtttgatcatttggacttctactccatccacaattttggtttattcagtgaggaactatgtttttaaccactctatagtttgtatagacatgcaacattcatctcagggtcaagaaagaagctcaacttggcatgcttcctgtttaaagcaaggcaagaaacatccccgccagatctctgtcgccaaagcagggctggtgaagaagttgtgtttccctcccggattgtcactactttcatatttgttcatttatgtttgttccaatttatgttggttttttacagttacagaatatgtttgttccagttgagttccagtttgaaaactggaacaaccactagcagatgcaaagttcacaaagtagcttgtcaaataatgtgcatgaactggaacaagcaacttgtgcacgaatgagcattactggaacaagtagcttgtgcatgaacgagtaatactgtagatgattggacatgtatgtctattttagatttttaatatttaatgttatatattcagctcataccatacatgaatttgcatttctgtactatactcacttaatgtcctacctgttttgttagcttcaactatccgctttaaactgacaaaaccagaccaaacatatgcaaatctcatatacctgtgaaagcaacaactgatttgccagattggttaattaaacgtaacaataaatagccccgattaaatggcttataaatatacttggatctgttcatttttcacatatcagctattaatgaagccttcactgggttcattttgtactactccattacttatttacagttacaagtattctaagaaacttaatatttcatcatcaaagttgtattcagacagtttcatttacattgctctgattttttgtactaggagctactgacaatggaaagcaacgattagagtaacttgatgagtgaggactattcattcagttgcttcgatcaataagtgaactaatggatgcatgtttcttttgataagtgagctaactactttagtcacaaagttcgtgttgatttctaaacatggtatgatggttttgtcatcctattcgattgagtttgggaaaaagcctgcacattctgaaaacaaacagactgcacattgtgtggctgataaggttgagtgggtaaataagatcaaagctattatttagacatactgaaaatatagtgaaggaagcgtaagcaatttttctgctatatttatgcattgtatccttgtaaaattatcaatattgttctgacttgtggggaaaggtatgagagtattcatttttttgcctcttttctgtttgcattccttcttcagtataatgtttgttagaataaccaggtgaatttacaaatttcatatccatatactttcttcgatgacaaatataaatctacctaggtttgtcataactcataggtcaatcattctaacttcaattgacattttttataaaaagtatcataaggaaaataatatattatcataaaagtgacgtccatctatatcaaattttagatattgatggtggtcagagttaaaaaacagtttgccttaagacaaaccaagatgaacttgtatttacaatcgaaggaaatattgcacattgcctagacatttaatttattagataaattcttttgttagttgttcaactttgtacgtcttataagtcacaggaacaatgtttatctagaacttcggtctcaaattatacagtagtgttcagccatacctgccatgtcacaagaaagagagataaaaagtatttaatagtagacctaatgatgctcatttgtaattgtagatattcgtatatcctttttctgcaaccttgtgaaacatgtgatggtttgacttggaacaaactttgggtctgatatagtaaaatgcaatgtatgtggagggaagtagtagaacaagacagaacaagtgccaaataaggttatatagtagaatacaatgtgtggagggaaatagtagaacaacacaaaacaagtgccaaataaggttacaaggtttatagtagcgattgcttagctgctacaacgacactcatagattagcctggcatttgcaatgtcgctcttgtatttgccataacctcacttaaggtcacacattgcctctgggaccttgacctccgctactgttgtcgcctggccgcgtcgacttcaccaatgccggggtgtccaacctcatcagcttcaccgtcgtcgactgctcccacacaaccgagctgtgggtcctggtcacatatggaaagtgaagaacccaaatgatttcttcacaggaagcttggaccaatcttcaactcatggggcgcttcatcctcggcctcctacgcatgcacttctcctgcttctcctgctggtcatcgcccaagatgttgcatggtgtcagtgtgtcagatgtgccgtaacagatgactccaaaatggattgcatgctcttcaaatagctacagataactatcttcacataaaatggagagtacaatgtttataaaagaaggaatatggataaggatccagattctcctatagcatatgaagaggcaaaggaaatggcaagccaaagctgcacaatttctgatgatcactcgttgttactgttatccattatctcctcagaggcattgcttttaaattcaacagcagacatggcagcctttcaagatttggcacattgacataatgacatgggttggtcacggattggatgtcaattttgctccctgtaccttgtagattatcggttatgtcaattttcgaaatttctatcgtgatggataacatttgaataaaacatagttaaataaacatgactactgtttcagtctttcgaaattctgatgctatagtgtcagtatactatgtcattttagggaaaatatatgtcatgtttattttgataaaattatatgatttctcactcaattcttgtcggtggcttcaggatttgttattttgtatatcgatctgtgtcatttgacaaagtactttgacttggtataatatgagtgttacttcgaccaaaagagcttggtaaagtgtgagaaactccgcaaacttcttctgcagacgatgactagcaacagttatgacgagggtcaagatagccgccatacatgatacattgagtacaacatcaagataaacactccctccccacacacaacttttgccttccgttcactctgtatgttgtgtttattacggttgcatatgttgtgtttattatggcatcaacacgttccattagaaaatataactattgtttgtcaagtacaaaatcataatcacatcagcttgtaataatattgcatcactgttttgtaccaaattgtaagttgttgtagcaacgcacgggcaccctactagtatatagagtaagttatcattaaattctcaaagcatcacatcaaaatggcacaagacatttaaaacatacttttggatatatatatacacacacacgcccaaacaagctcttagttgggctgtcactttaac

SEQ ID NO: 63266 - DNA, 3405 bp, Zea Mays
tgatgtccaatactgctatagtagcttctccaagttatgacactgttaggaagatggttcaacttctctcgaaatgaagcttctgtcttcctatgtatagacaagttgttcagttaggaggtctagattctcttaaaatggtgctatctacgagttaggaggtctaggagcacactgaatgttttagaggttgatgaaatcgttgttttcctaaaaaagcattttttctgctttgtttgaaattgtttgggttttcctccccaactttcataattacctatttctattgtatgtttgatcatttggacttctactccatccacaattttggtttattcagtgaggaactatgtttttaaccactctatagtttgtatagacatgcaacattcatctcagggtcaagaaagaagctcaacttggcatgcttcctgtttaaagcaaggcaagaaacatccccgccagatctctgtcgccaaagcagggctggtgaagaagttgtgtttccctcccggattgtcactactttcatatttgttcatttatgtttgttccaatttatgttggttttttacagttacagaatatgtttgttccagttgagttccagtttgaaaactggaacaaccactagcagatgcaaagttcacaaagtagcttgtcaaataatgtgcatgaactggaacaagcaacttgtgcacgaatgagcattactggaacaagtagcttgtgcatgaacgagtaatactgtagatgattggacatgtatgtctattttagatttttaatatttaatgttatatattcagctcataccatacatgaatttgcatttctgtactatactcacttaatgtcctacctgttttgttagcttcaactatccgctttaaactgacaaaaccagaccaaacatatgcaaatctcatatacctgtgaaagcaacaactgatttgccagattggttaattaaacgtaacaataaatagccccgattaaatggcttataaatatacttggatctgttcatttttcacatatcagctattaatgaagccttcactgggttcattttgtactactccattacttatttacagttacaagtattctaagaaacttaatatttcatcatcaaagttgtattcagacagtttcatttacattgctctgattttttgtactaggagctactgacaatggaaagcaacgattagagtaacttgatgagtgaggactattcattcagttgcttcgatcaataagtgaactaatggatgcatgtttcttttgataagtcacatatggaaagtgaagaacccaaatgatttcttcacaggaagactgctaaccttcacacatctaataagatgaagcaacaagctagaaaatgtggaatttgtcatatgtccggatgcaaaacgggtaacttcatgctttccacaatgtgtgtcgacatgatgcttgtagagatgcttggaccaatcttcaactcatggggcgcttcatcctcggcctcctacgcatgcacttctcctgcttctcctgctggtcatcgcccaaggtgcacttttcctccctgttctgttcacgtgcccatgtgtcattcttgtttttcactgtttaggatcgtgagggtgttattgcaataatagctgatggagaaatgagaatgattttcaaatgatgacaggattggcagaatgagagcgacaaaggaatgagctaaatcttttgaaatatgaagcaatatgatttctttccagtgttatatttttttatttcctatgcatttcttaaaagtgctattacatgttcacctactaatacccttgtttttcttgcatctcaaggatgaattgctgctcttgaccatagggattggagcagcatgtagtttatactttatcctggttttctctctcgagtgtgtcagatgtgccgtaacagatgactccaaaatggattgcatgctcttcaaatagctacagataactatcttcacataaaatggagagtacaatgtttataaaagaaggaatatggataaggatccagattctcctatagcatatgaagaggcaaaggaaatggcaagccaaagctgcacaatttctgatgatcactcgttgttactgttatccattatctcctcagaggcattgcttttaaattcaacagcagacatggcagctatttttccatgatgatggagttggacaagtaccatattgagtataagtgttagcctattatatctttgtacaaccatggcaaacgaataatttcttataacaccatgaagataatgtttaacgaagtgtgtttgcgtgcgtgtgtaatttcttcttttgttttgctgctaagtttgatagttcaaaacatgattcttgtaaagtttggttttagtctaacaaatacactcaagtcctgacatgtaaactgtaaagttggactgttgcttggtggatctgtattgaactttattttttttaaaatgttttatggcttgtatagtttgtattcacttctcacctaagctacaatttgtttttccagcctttcaagatttggcacattgacataatgacatgggttggtcacggattggatgtcaattttgctccctgtaccttgtagattatcggttatgtcaattttcgaaatttctatcgtgatggataacatttgaataaaacatagttaaataaacatgactactgtttcagtctttcgaaattctgatgctatagtgtcagtatactatgtcattttagggaaaatatatgtcatgtttattttgataaaattatatgatttctcactcaattcttgtcggtggcttcaggatttgttattttgtatatcgatctgtgtcatttgacaaagtactttgacttggtataatatgagtgttacttcgaccaaaagagcttggtaaagtgtgagaaactccgcaaacttcttctgcagacgatgactagcaacagttatgacgagggtcaagatagccgccatacatgatacattgagtacaacatcaagataaacactccctccccacacacaacttttgccttccgttcactctgtatgttgtgtttattacggttgcatatgttgtgtttattatggcatcaacacgttccattagaaaatataactattgtttgtcaagtacaaaatcataatcacatcagcttgtaataatattgcatcactgttttgtaccaaattgtaagttgttgtagcaacgcacgggcaccctactagtatatagagtaagttatcattaaattctcaaagcatcacatcaaaatggcacaagacatttaaaacatacttttggatatatatatacacacacacgcccaaacaagctcttagttgggctgtcactttaac

SEQ ID NO: 63267 - DNA, 3806 bp, Zea Mays
tgatgtccaatactgctatagtagcttctccaagttatgacactgttaggaagatggttcaacttctctcgaaatgaagcttctgtcttcctatgtatagacaagttgttcagttaggaggtctagattctcttaaaatggtgctatctacgagttaggaggtctaggagcacactgaatgttttagaggttgatgaaatcgttgttttcctaaaaaagcattttttctgctttgtttgaaattgtttgggttttcctccccaactttcataattacctatttctattgtatgtttgatcatttggacttctactccatccacaattttggtttattcagtgaggaactatgtttttaaccactctatagtttgtatagacatgcaacattcatctcagggtcaagaaagaagctcaacttggcatgcttcctgtttaaagcaaggcaagaaacatccccgccagatctctgtcgccaaagcagggctggtgaagaagttgtgtttccctcccggattgtcactactttcatatttgttcatttatgtttgttccaatttatgttggttttttacagttacagaatatgtttgttccagttgagttccagtttgaaaactggaacaaccactagcagatgcaaagttcacaaagtagcttgtcaaataatgtgcatgaactggaacaagcaacttgtgcacgaatgagcattactggaacaagtagcttgtgcatgaacgagtaatactgtagatgattggacatgtatgtctattttagatttttaatatttaatgttatatattcagctcataccatacatgaatttgcatttctgtactatactcacttaatgtcctacctgttttgttagcttcaactatccgctttaaactgacaaaaccagaccaaacatatgcaaatctcatatacctgtgaaagcaacaactgatttgccagattggttaattaaacgtaacaataaatagccccgattaaatggcttataaatatacttggatctgttcatttttcacatatcagctattaatgaagccttcactgggttcattttgtactactccattacttatttacagttacaagtattctaagaaacttaatatttcatcatcaaagttgtattcagacagtttcatttacattgctctgattttttgtactaggagctactgacaatggaaagcaacgattagagtaacttgatgagtgaggactattcattcagttgcttcgatcaataagtgaactaatggatgcatgtttcttttgataagtgagctaactactttagtcacaaagttcgtgttgatttctaaacatggtatgatggttttgtcatcctattcgattgagtttgggaaaaagcctgcacattctgaaaacaaacagactgcacattgtgtggctgataaggttgagtgggtaaataagatcaaagctattatttagacatactgaaaatatagtgaaggaagcgtaagcaatttttctgctatatttatgcattgtatccttgtaaaattatcaatattgttctgacttgtggggaaaggtatgagagtattcatttttttgcctcttttctgtttgcattccttcttcagtataatgtttgttagaataaccaggtgaatttacaaatttcatatccatatactttcttcgatgacaaatataaatctacctaggtttgtcataactcataggtcaatcattctaacttcaattgacattttttataaaaagtatcataaggaaaataatatattatcataaaagtgacgtccatctatatcaaattttagatattgatggtggtcagagttaaaaaacagtttgccttaagacaaaccaagatgaacttgtatttacaatcgaaggaaatattgcacattgcctagacatttaatttattagataaattcttttgttagttgttcaactttgtacgtcttataagtcacaggaacaatgtttatctagaacttcggtctcaaattatacagtagtgttcagccatacctgccatgtcacaagaaagagagataaaaagtatttaatagtagacctaatgatgctcatttgtaattgtagatattcgtatatcctttttctgcaaccttgtgaaacatgtgatggtttgacttggaacaaactttgggtctgatatagtaaaatgcaatgtatgtggagggaagtagtagaacaagacagaacaagtgccaaataaggttatatagtagaatacaatgtgtggagggaaatagtagaacaacacaaaacaagtgccaaataaggttacaaggtttatagtagcgattgcttagctgctacaacgacactcatagattagcctggcatttgcaatgtcgctcttgtatttgccataacctcacttaaggtcacacattgcctctgggaccttgacctccgctactgttgtcgcctggccgcgtcgacttcaccaatgccggggtgtccaacctcatcagcttcaccgtcgtcgactgctcccacacaaccgagctgtgggtcctggtcacatatggaaagtgaagaacccaaatgatttcttcacaggaagatgaagcaacaagctagaaaatgtggaatttgtcatatgtccggatgcaaaacgggtaacttcatgctttccacaatgtgtgtcgacatgatgcttgtagagatgcttggaccaatcttcaactcatggggcgcttcatcctcggcctcctacgcatgcacttctcctgcttctcctgctggtcatcgcccaaggatgaattgctgctcttgaccatagggattggagcagcatgtagtttatactttatcctggttttctctctcgagtgtgtcagatgtgccgtaacagatgactccaaaatggattgcatgctcttcaaatagctacagataactatcttcacataaaatggagagtacaatgtttataaaagaaggaatatggataaggatccagattctcctatagcatatgaagaggcaaaggaaatggcaagccaaagctgcacaatttctgatgatcactcgttgttactgttatccattatctcctcagaggcattgcttttaaattcaacagcagacatggcaggtgcaggtcctatcctatccattatctacccctgcatgtgtgccagctattctactctatgtttcaatagtttggaaataattcagagctaaggttttctgatacaggatttgttattttgtatatcgatctgtgtcatttgacaaagtactttgacttggtataatatgagtgttacttcgaccaaaagagcttggtaaagtgtgagaaactccgcaaacttcttctgcagacgatgactagcaacagttatgacgagggtcaagatagccgccatacatgatacattgagtacaacatcaagataaacactccctccccacacacaacttttgccttccgttcactctgtatgttgtgtttattacggttgcatatgttgtgtttattatggcatcaacacgttccattagaaaatataactattgtttgtcaagtacaaaatcataatcacatcagcttgtaataatattgcatcactgttttgtaccaaattgtaagttgttgtagcaacgcacgggcaccctactagtatatagagtaagttatcattaaattctcaaagcatcacatcaaaatggcacaagacatttaaaacatacttttggatatatatatacacacacacgcccaaacaagctcttagttgggctgtcactttaac

SEQ ID NO: 63268 - DNA, 2795 bp, Zea Mays
tgatgtccaatactgctatagtagcttctccaagttatgacactgttaggaagatggttcaacttctctcgaaatgaagcttctgtcttcctatgtatagacaagttgttcagttaggaggtctagattctcttaaaatggtgctatctacgagttaggaggtctaggagcacactgaatgttttagaggttgatgaaatcgttgttttcctaaaaaagcattttttctgctttgtttgaaattgtttgggttttcctccccaactttcataattacctatttctattgtatgtttgatcatttggacttctactccatccacaattttggtttattcagtgaggaactatgtttttaaccactctatagtttgtatagacatgcaacattcatctcagggtcaagaaagaagctcaacttggcatgcttcctgtttaaagcaaggcaagaaacatccccgccagatctctgtcgccaaagcagggctggtgaagaagttgtgtttccctcccggattgtcactactttcatatttgttcatttatgtttgttccaatttatgttggttttttacagttacagaatatgtttgttccagttgagttccagtttgaaaactggaacaaccactagcagatgcaaagttcacaaagtagcttgtcaaataatgtgcatgaactggaacaagcaacttgtgcacgaatgagcattactggaacaagtagcttgtgcatgaacgagtaatactgtagatgattggacatgtatgtctattttagatttttaatatttaatgttatatattcagctcataccatacatgaatttgcatttctgtactatactcacttaatgtcctacctgttttgttagcttcaactatccgctttaaactgacaaaaccagaccaaacatatgcaaatctcatatacctgtgaaagcaacaactgatttgccagattggttaattaaacgtaacaataaatagccccgattaaatggcttataaatatacttggatctgttcatttttcacatatcagctattaatgaagccttcactgggttcattttgtactactccattacttatttacagttacaagtattctaagaaacttaatatttcatcatcaaagttgtattcagacagtttcatttacattgctctgattttttgtactaggagctactgacaatggaaagcaacgattagagtaacttgatgagtgaggactattcattcagttgcttcgatcaataagtgaactaatggatgcatgtttcttttgataagtcacatatggaaagtgaagaacccaaatgatttcttcacaggaagcttggaccaatcttcaactcatggggcgcttcatcctcggcctcctacgcatgcacttctcctgcttctcctgctggtcatcgcccaaggattggcagaatgagagcgacaaaggaatgagctaaatcttttgaaatatgaagcaatatgatttctttccagtgttatatttttttatttcctatgcatttcttaaaagtgctattacatgttcacctactaatacccttgtttttcttgcatctcaaggatgaattgctgctcttgaccatagggattggagcagcatgtagtttatactttatcctggttttctctctcgagatgttgcatggtgtcagtgtgtcagatgtgccgtaacagatgactccaaaatggattgcatgctcttcaaatagctacagataactatcttcacataaaatggagagtacaatgtttataaaagaaggaatatggataaggatccagattctcctatagcatatgaagaggcaaaggaaatggcaagccaaagctgcacaatttctgatgatcactcgttgttactgttatccattatctcctcagaggcattgcttttaaattcaacagcagacatggcagcctttcaagatttggcacattgacataatgacatgggttggtcacggattggatgtcaattttgctccctgtaccttgtagattatcggttatgtcaattttcgaaatttctatcgtgatggataacatttgaataaaacatagttaaataaacatgactactgtttcagtctttcgaaattctgatgctatagtgtcagtatactatgtcattttagggaaaatatatgtcatgtttattttgataaaattatatgatttctcactcaattcttgtcggtggcttcaggatttgttattttgtatatcgatctgtgtcatttgacaaagtactttgacttggtataatatgagtgttacttcgaccaaaagagcttggtaaagtgtgagaaactccgcaaacttcttctgcagacgatgactagcaacagttatgacgagggtcaagatagccgccatacatgatacattgagtacaacatcaagataaacactccctccccacacacaacttttgccttccgttcactctgtatgttgtgtttattacggttgcatatgttgtgtttattatggcatcaacacgttccattagaaaatataactattgtttgtcaagtacaaaatcataatcacatcagcttgtaataatattgcatcactgttttgtaccaaattgtaagttgttgtagcaacgcacgggcaccctactagtatatagagtaagttatcattaaattctcaaagcatcacatcaaaatggcacaagacatttaaaacatacttttggatatatatatacacacacacgcccaaacaagctcttagttgggctgtcactttaac

SEQ ID NO: 63269 - DNA, 4328 bp, Zea Mays
tgatgtccaatactgctatagtagcttctccaagttatgacactgttaggaagatggttcaacttctctcgaaatgaagcttctgtcttcctatgtatagacaagttgttcagttaggaggtctagattctcttaaaatggtgctatctacgagttaggaggtctaggagcacactgaatgttttagaggttgatgaaatcgttgttttcctaaaaaagcattttttctgctttgtttgaaattgtttgggttttcctccccaactttcataattacctatttctattgtatgtttgatcatttggacttctactccatccacaattttggtttattcagtgaggaactatgtttttaaccactctatagtttgtatagacatgcaacattcatctcagggtcaagaaagaagctcaacttggcatgcttcctgtttaaagcaaggcaagaaacatccccgccagatctctgtcgccaaagcagggctggtgaagaagttgtgtttccctcccggattgtcactactttcatatttgttcatttatgtttgttccaatttatgttggttttttacagttacagaatatgtttgttccagttgagttccagtttgaaaactggaacaaccactagcagatgcaaagttcacaaagtagcttgtcaaataatgtgcatgaactggaacaagcaacttgtgcacgaatgagcattactggaacaagtagcttgtgcatgaacgagtaatactgtagatgattggacatgtatgtctattttagatttttaatatttaatgttatatattcagctcataccatacatgaatttgcatttctgtactatactcacttaatgtcctacctgttttgttagcttcaactatccgctttaaactgacaaaaccagaccaaacatatgcaaatctcatatacctgtgaaagcaacaactgatttgccagattggttaattaaacgtaacaataaatagccccgattaaatggcttataaatatacttggatctgttcatttttcacatatcagctattaatgaagccttcactgggttcattttgtactactccattacttatttacagttacaagtattctaagaaacttaatatttcatcatcaaagttgtattcagacagtttcatttacattgctctgattttttgtactaggagctactgacaatggaaagcaacgattagagtaacttgatgagtgaggactattcattcagttgcttcgatcaataagtgaactaatggatgcatgtttcttttgataagtgagctaactactttagtcacaaagttcgtgttgatttctaaacatggtatgatggttttgtcatcctattcgattgagtttgggaaaaagcctgcacattctgaaaacaaacagactgcacattgtgtggctgataaggttgagtgggtaaataagatcaaagctattatttagacatactgaaaatatagtgaaggaagcgtaagcaatttttctgctatatttatgcattgtatccttgtaaaattatcaatattgttctgacttgtggggaaaggtatgagagtattcatttttttgcctcttttctgtttgcattccttcttcagtataatgtttgttagaataaccaggtgaatttacaaatttcatatccatatactttcttcgatgacaaatataaatctacctaggtttgtcataactcataggtcaatcattctaacttcaattgacattttttataaaaagtatcataaggaaaataatatattatcataaaagtgacgtccatctatatcaaattttagatattgatggtggtcagagttaaaaaacagtttgccttaagacaaaccaagatgaacttgtatttacaatcgaaggaaatattgcacattgcctagacatttaatttattagataaattcttttgttagttgttcaactttgtacgtcttataagtcacaggaacaatgtttatctagaacttcggtctcaaattatacagtagtgttcagccatacctgccatgtcacaagaaagagagataaaaagtatttaatagtagacctaatgatgctcatttgtaattgtagatattcgtatatcctttttctgcaaccttgtgaaacatgtgatggtttgacttggaacaaactttgggtctgatatagtaaaatgcaatgtatgtggagggaagtagtagaacaagacagaacaagtgccaaataaggttatatagtagaatacaatgtgtggagggaaatagtagaacaacacaaaacaagtgccaaataaggttacaaggtttatagtagcgattgcttagctgctacaacgacactcatagattagcctggcatttgcaatgtcgctcttgtatttgccataacctcacttaaggtcacacattgcctctgggaccttgacctccgctactgttgtcgcctggccgcgtcgacttcaccaatgccggggtgtccaacctcatcagcttcaccgtcgtcgactgctcccacacaaccgagctgtgggtcctggtaccggtcgcgccccgcctctgctccttctgcttcagcgagtggcagactatcgatacactcgatttcaattgttttttacgctatttactgtattgcaatgggacaatggatgattaggatttgttttttaagactggcccatgatttatcgtcgtatactatttctttaatagattgttcgctacatctactgatctacatgttcacatgtttcaacttctgtcagcatccgtagttactatatgaatgctcattctgtgtcaccttttaagtttacaaatgctcttttccaggtcacatatggaaagtgaagaacccaaatgatttcttcacaggaagactgctaaccttcacacatctaataagatgaagcaacaagctagaaaatgtggaatttgtcatatgtccggatgcaaaacgggtaacttcatgctttccacaatgtgtgtcgacatgatgcttgtagagatgcttggaccaatcttcaactcatggggcgcttcatcctcggcctcctacgcatgcacttctcctgcttctcctgctggtcatcgcccaaggtgcacttttcctccctgttctgttcacgtgcccatgtgtcattcttgtttttcactgtttaggatcgtgagggtgttattgcaataatagctgatggagaaatgagaatgattttcaaatgatgacaggattggcagaatgagagcgacaaaggaatgagctaaatcttttgaaatatgaagcaatatgatttctttccagtgttatatttttttatttcctatgcatttcttaaaagtgctattacatgttcacctactaatacccttgtttttcttgcatctcaaggatgaattgctgctcttgaccatagggattggagcagcatgtagtttatactttatcctggttttctctctcgagatgttgcatggtgtcagtgtgtcagatgtgccgtaacagatgactccaaaatggattgcatgctcttcaaatagctacagataactatcttcacataaaatggagagtacaatgtttataaaagaaggaatatggataaggatccagattctcctatagcatatgaagaggcaaaggaaatggcaagccaaagctgcacaatttctgatgatcactcgttgttactgttatccattatctcctcagaggcattgcttttaaattcaacagcagacatggcaggatttgttattttgtatatcgatctgtgtcatttgacaaagtactttgacttggtataatatgagtgttacttcgaccaaaagagcttggtaaagtgtgagaaactccgcaaacttcttctgcagacgatgactagcaacagttatgacgagggtcaagatagccgccatacatgatacattgagtacaacatcaagataaacactccctccccacacacaacttttgccttccgttcactctgtatgttgtgtttattacggttgcatatgttgtgtttattatggcatcaacacgttccattagaaaatataactattgtttgtcaagtacaaaatcataatcacatcagcttgtaataatattgcatcactgttttgtaccaaattgtaagttgttgtagcaacgcacgggcaccctactagtatatagagtaagttatcattaaattctcaaagcatcacatcaaaatggcacaagacatttaaaacatacttttggatatatatatacacacacacgcccaaacaagctcttagttgggctgtcactttaac

SEQ ID NO: 63270 - DNA, 4200 bp, Zea Mays
tgatgtccaatactgctatagtagcttctccaagttatgacactgttaggaagatggttcaacttctctcgaaatgaagcttctgtcttcctatgtatagacaagttgttcagttaggaggtctagattctcttaaaatggtgctatctacgagttaggaggtctaggagcacactgaatgttttagaggttgatgaaatcgttgttttcctaaaaaagcattttttctgctttgtttgaaattgtttgggttttcctccccaactttcataattacctatttctattgtatgtttgatcatttggacttctactccatccacaattttggtttattcagtgaggaactatgtttttaaccactctatagtttgtatagacatgcaacattcatctcagggtcaagaaagaagctcaacttggcatgcttcctgtttaaagcaaggcaagaaacatccccgccagatctctgtcgccaaagcagggctggtgaagaagttgtgtttccctcccggattgtcactactttcatatttgttcatttatgtttgttccaatttatgttggttttttacagttacagaatatgtttgttccagttgagttccagtttgaaaactggaacaaccactagcagatgcaaagttcacaaagtagcttgtcaaataatgtgcatgaactggaacaagcaacttgtgcacgaatgagcattactggaacaagtagcttgtgcatgaacgagtaatactgtagatgattggacatgtatgtctattttagatttttaatatttaatgttatatattcagctcataccatacatgaatttgcatttctgtactatactcacttaatgtcctacctgttttgttagcttcaactatccgctttaaactgacaaaaccagaccaaacatatgcaaatctcatatacctgtgaaagcaacaactgatttgccagattggttaattaaacgtaacaataaatagccccgattaaatggcttataaatatacttggatctgttcatttttcacatatcagctattaatgaagccttcactgggttcattttgtactactccattacttatttacagttacaagtattctaagaaacttaatatttcatcatcaaagttgtattcagacagtttcatttacattgctctgattttttgtactaggagctactgacaatggaaagcaacgattagagtaacttgatgagtgaggactattcattcagttgcttcgatcaataagtgaactaatggatgcatgtttcttttgataagtgagctaactactttagtcacaaagttcgtgttgatttctaaacatggtatgatggttttgtcatcctattcgattgagtttgggaaaaagcctgcacattctgaaaacaaacagactgcacattgtgtggctgataaggttgagtgggtaaataagatcaaagctattatttagacatactgaaaatatagtgaaggaagcgtaagcaatttttctgctatatttatgcattgtatccttgtaaaattatcaatattgttctgacttgtggggaaaggtatgagagtattcatttttttgcctcttttctgtttgcattccttcttcagtataatgtttgttagaataaccaggtgaatttacaaatttcatatccatatactttcttcgatgacaaatataaatctacctaggtttgtcataactcataggtcaatcattctaacttcaattgacattttttataaaaagtatcataaggaaaataatatattatcataaaagtgacgtccatctatatcaaattttagatattgatggtggtcagagttaaaaaacagtttgccttaagacaaaccaagatgaacttgtatttacaatcgaaggaaatattgcacattgcctagacatttaatttattagataaattcttttgttagttgttcaactttgtacgtcttataagtcacaggaacaatgtttatctagaacttcggtctcaaattatacagtagtgttcagccatacctgccatgtcacaagaaagagagataaaaagtatttaatagtagacctaatgatgctcatttgtaattgtagatattcgtatatcctttttctgcaaccttgtgaaacatgtgatggtttgacttggaacaaactttgggtctgatatagtaaaatgcaatgtatgtggagggaagtagtagaacaagacagaacaagtgccaaataaggttatatagtagaatacaatgtgtggagggaaatagtagaacaacacaaaacaagtgccaaataaggttacaaggtttatagtagcgattgcttagctgctacaacgacactcatagattagcctggcatttgcaatgtcgctcttgtatttgccataacctcacttaaggtcacacattgcctctgggaccttgacctccgctactgttgtcgcctggccgcgtcgacttcaccaatgccggggtgtccaacctcatcagcttcaccgtcgtcgactgctcccacacaaccgagctgtgggtcctggtaccggtcgcgccccgcctctgctccttctgcttcagcgagtggcagactatcgatacactcgatttcaattgttttttacgctatttactgtattgcaatgggacaatggatgattaggatttgttttttaagactggcccatgatttatcgtcgtatactatttctttaatagattgttcgctacatctactgatctacatgttcacatgtttcaacttctgtcagcatccgtagttactatatgaatgctcattctgtgtcaccttttaagtttacaaatgctcttttccaggtcacatatggaaagtgaagaacccaaatgatttcttcacaggaaggtgcttacatcttgcttccatgcctcggtagtttcggtcactattagttttgctatgcctttcctacataaataattttgctacctcaaaatgcttctaaatatgatgatttatgctggagactgctaaccttcacacatctaataagatgaagcaacaagctagaaaatgtggaatttgtcatatgtccggatgcaaaacgggtaacttcatgctttccacaatgtgtgtcgacatgatgcttgtagagatggttcgttcctttggttccatgctgacatattcctttctgtgttatcctaagatagccacattattttgatgatatgaggatgattcaaattgattggttgttttttctaatttagcttggaccaatcttcaactcatggggcgcttcatcctcggcctcctacgcatgcacttctcctgcttctcctgctggtcatcgcccaagatgttgcatggtgtcagtgtgtcagatgtgccgtaacagatgactccaaaatggattgcatgctcttcaaatagctacagataactatcttcacataaaatggagagtacaatgtttataaaagaaggaatatggataaggatccagattctcctatagcatatgaagaggcaaaggaaatggcaagccaaagctgcacaatttctgatgatcactcgttgttactgttatccattatctcctcagaggcattgcttttaaattcaacagcagacatggcaggatttgttattttgtatatcgatctgtgtcatttgacaaagtactttgacttggtataatatgagtgttacttcgaccaaaagagcttggtaaagtgtgagaaactccgcaaacttcttctgcagacgatgactagcaacagttatgacgagggtcaagatagccgccatacatgatacattgagtacaacatcaagataaacactccctccccacacacaacttttgccttccgttcactctgtatgttgtgtttattacggttgcatatgttgtgtttattatggcatcaacacgttccattagaaaatataactattgtttgtcaagtacaaaatcataatcacatcagcttgtaataatattgcatcactgttttgtaccaaattgtaagttgttgtagcaacgcacgggcaccctactagtatatagagtaagttatcattaaattctcaaagcatcacatcaaaatggcacaagacatttaaaacatacttttggatatatatatacacacacacgcccaaacaagctcttagttgggctgtcactttaac

SEQ ID NO: 63271 - DNA, 2378 bp, Zea Mays
tgatgtccaatactgctatagtagcttctccaagttatgacactgttaggaagatggttcaacttctctcgaaatgaagcttctgtcttcctatgtatagacaagttgttcagttaggaggtctagattctcttaaaatggtgctatctacgagttaggaggtctaggagcacactgaatgttttagaggttgatgaaatcgttgttttcctaaaaaagcattttttctgctttgtttgaaattgtttgggttttcctccccaactttcataattacctatttctattgtatgtttgatcatttggacttctactccatccacaattttggtttattcagtgaggaactatgtttttaaccactctatagtttgtatagacatgcaacattcatctcagggtcaagaaagaagctcaacttggcatgcttcctgtttaaagcaaggcaagaaacatccccgccagatctctgtcgccaaagcagggctggtgaagaagttgtgtttccctcccggattgtcactactttcatatttgttcatttatgtttgttccaatttatgttggttttttacagttacagaatatgtttgttccagttgagttccagtttgaaaactggaacaaccactagcagatgcaaagttcacaaagtagcttgtcaaataatgtgcatgaactggaacaagcaacttgtgcacgaatgagcattactggaacaagtagcttgtgcatgaacgagtaatactgtagatgattggacatgtatgtctattttagatttttaatatttaatgttatatattcagctcataccatacatgaatttgcatttctgtactatactcacttaatgtcctacctgttttgttagcttcaactatccgctttaaactgacaaaaccagaccaaacatatgcaaatctcatatacctgtgaaagcaacaactgatttgccagattggttaattaaacgtaacaataaatagccccgattaaatggcttataaatatacttggatctgttcatttttcacatatcagctattaatgaagccttcactgggttcattttgtactactccattacttatttacagttacaagtattctaagaaacttaatatttcatcatcaaagttgtattcagacagtttcatttacattgctctgattttttgtactaggagctactgacaatggaaagcaacgattagagtaacttgatgagtgaggactattcattcagttgcttcgatcaataagtgaactaatggatgcatgtttcttttgataagtcacatatggaaagtgaagaacccaaatgatttcttcacaggaagcttggaccaatcttcaactcatggggcgcttcatcctcggcctcctacgcatgcacttctcctgcttctcctgctggtcatcgcccaagatgttgcatggtgtcagtgtgtcagatgtgccgtaacagatgactccaaaatggattgcatgctcttcaaatagctacagataactatcttcacataaaatggagagtacaatgtttataaaagaaggaatatggataaggatccagattctcctatagcatatgaagaggcaaaggaaatggcaagccaaagctgcacaatttctgatgatcactcgttgttactgttatccattatctcctcagaggcattgcttttaaattcaacagcagacatggcaggtgcaggtcctatcctatccattatctacccctgcatgtgtgccagctattctactctatgtttcaatagtttggaaataattcagagctaaggttttctgatacaggatttgttattttgtatatcgatctgtgtcatttgacaaagtactttgacttggtataatatgagtgttacttcgaccaaaagagcttggtaaagtgtgagaaactccgcaaacttcttctgcagacgatgactagcaacagttatgacgagggtcaagatagccgccatacatgatacattgagtacaacatcaagataaacactccctccccacacacaacttttgccttccgttcactctgtatgttgtgtttattacggttgcatatgttgtgtttattatggcatcaacacgttccattagaaaatataactattgtttgtcaagtacaaaatcataatcacatcagcttgtaataatattgcatcactgttttgtaccaaattgtaagttgttgtagcaacgcacgggcaccctactagtatatagagtaagttatcattaaattctcaaagcatcacatcaaaatggcacaagacatttaaaacatacttttggatatatatatacacacacacgcccaaacaagctcttagttgggctgtcactttaac

SEQ ID NO: 63272 - DNA, 2453 bp, Zea Mays
tgatgtccaatactgctatagtagcttctccaagttatgacactgttaggaagatggttcaacttctctcgaaatgaagcttctgtcttcctatgtatagacaagttgttcagttaggaggtctagattctcttaaaatggtgctatctacgagttaggaggtctaggagcacactgaatgttttagaggttgatgaaatcgttgttttcctaaaaaagcattttttctgctttgtttgaaattgtttgggttttcctccccaactttcataattacctatttctattgtatgtttgatcatttggacttctactccatccacaattttggtttattcagtgaggaactatgtttttaaccactctatagtttgtatagacatgcaacattcatctcagggtcaagaaagaagctcaacttggcatgcttcctgtttaaagcaaggcaagaaacatccccgccagatctctgtcgccaaagcagggctggtgaagaagttgtgtttccctcccggattgtcactactttcatatttgttcatttatgtttgttccaatttatgttggttttttacagttacagaatatgtttgttccagttgagttccagtttgaaaactggaacaaccactagcagatgcaaagttcacaaagtagcttgtcaaataatgtgcatgaactggaacaagcaacttgtgcacgaatgagcattactggaacaagtagcttgtgcatgaacgagtaatactgtagatgattggacatgtatgtctattttagatttttaatatttaatgttatatattcagctcataccatacatgaatttgcatttctgtactatactcacttaatgtcctacctgttttgttagcttcaactatccgctttaaactgacaaaaccagaccaaacatatgcaaatctcatatacctgtgaaagcaacaactgatttgccagattggttaattaaacgtaacaataaatagccccgattaaatggcttataaatatacttggatctgttcatttttcacatatcagctattaatgaagccttcactgggttcattttgtactactccattacttatttacagttacaagtattctaagaaacttaatatttcatcatcaaagttgtattcagacagtttcatttacattgctctgattttttgtactaggagctactgacaatggaaagcaacgattagagtaacttgatgagtgaggactattcattcagttgcttcgatcaataagtgaactaatggatgcatgtttcttttgataagtcacatatggaaagtgaagaacccaaatgatttcttcacaggaagcttggaccaatcttcaactcatggggcgcttcatcctcggcctcctacgcatgcacttctcctgcttctcctgctggtcatcgcccaaggatgaattgctgctcttgaccatagggattggagcagcatgtagtttatactttatcctggttttctctctcgagatgttgcatggtgtcagtgtgtcagatgtgccgtaacagatgactccaaaatggattgcatgctcttcaaatagctacagataactatcttcacataaaatggagagtacaatgtttataaaagaaggaatatggataaggatccagattctcctatagcatatgaagaggcaaaggaaatggcaagccaaagctgcacaatttctgatgatcactcgttgttactgttatccattatctcctcagaggcattgcttttaaattcaacagcagacatggcaggtgcaggtcctatcctatccattatctacccctgcatgtgtgccagctattctactctatgtttcaatagtttggaaataattcagagctaaggttttctgatacaggatttgttattttgtatatcgatctgtgtcatttgacaaagtactttgacttggtataatatgagtgttacttcgaccaaaagagcttggtaaagtgtgagaaactccgcaaacttcttctgcagacgatgactagcaacagttatgacgagggtcaagatagccgccatacatgatacattgagtacaacatcaagataaacactccctccccacacacaacttttgccttccgttcactctgtatgttgtgtttattacggttgcatatgttgtgtttattatggcatcaacacgttccattagaaaatataactattgtttgtcaagtacaaaatcataatcacatcagcttgtaataatattgcatcactgttttgtaccaaattgtaagttgttgtagcaacgcacgggcaccctactagtatatagagtaagttatcattaaattctcaaagcatcacatcaaaatggcacaagacatttaaaacatacttttggatatatatatacacacacacgcccaaacaagctcttagttgggctgtcactttaac

SEQ ID NO: 63273 - DNA, 4463 bp, Zea Mays
tgatgtccaatactgctatagtagcttctccaagttatgacactgttaggaagatggttcaacttctctcgaaatgaagcttctgtcttcctatgtatagacaagttgttcagttaggaggtctagattctcttaaaatggtgctatctacgagttaggaggtctaggagcacactgaatgttttagaggttgatgaaatcgttgttttcctaaaaaagcattttttctgctttgtttgaaattgtttgggttttcctccccaactttcataattacctatttctattgtatgtttgatcatttggacttctactccatccacaattttggtttattcagtgaggaactatgtttttaaccactctatagtttgtatagacatgcaacattcatctcagggtcaagaaagaagctcaacttggcatgcttcctgtttaaagcaaggcaagaaacatccccgccagatctctgtcgccaaagcagggctggtgaagaagttgtgtttccctcccggattgtcactactttcatatttgttcatttatgtttgttccaatttatgttggttttttacagttacagaatatgtttgttccagttgagttccagtttgaaaactggaacaaccactagcagatgcaaagttcacaaagtagcttgtcaaataatgtgcatgaactggaacaagcaacttgtgcacgaatgagcattactggaacaagtagcttgtgcatgaacgagtaatactgtagatgattggacatgtatgtctattttagatttttaatatttaatgttatatattcagctcataccatacatgaatttgcatttctgtactatactcacttaatgtcctacctgttttgttagcttcaactatccgctttaaactgacaaaaccagaccaaacatatgcaaatctcatatacctgtgaaagcaacaactgatttgccagattggttaattaaacgtaacaataaatagccccgattaaatggcttataaatatacttggatctgttcatttttcacatatcagctattaatgaagccttcactgggttcattttgtactactccattacttatttacagttacaagtattctaagaaacttaatatttcatcatcaaagttgtattcagacagtttcatttacattgctctgattttttgtactaggagctactgacaatggaaagcaacgattagagtaacttgatgagtgaggactattcattcagttgcttcgatcaataagtgaactaatggatgcatgtttcttttgataagtgagctaactactttagtcacaaagttcgtgttgatttctaaacatggtatgatggttttgtcatcctattcgattgagtttgggaaaaagcctgcacattctgaaaacaaacagactgcacattgtgtggctgataaggttgagtgggtaaataagatcaaagctattatttagacatactgaaaatatagtgaaggaagcgtaagcaatttttctgctatatttatgcattgtatccttgtaaaattatcaatattgttctgacttgtggggaaaggtatgagagtattcatttttttgcctcttttctgtttgcattccttcttcagtataatgtttgttagaataaccaggtgaatttacaaatttcatatccatatactttcttcgatgacaaatataaatctacctaggtttgtcataactcataggtcaatcattctaacttcaattgacattttttataaaaagtatcataaggaaaataatatattatcataaaagtgacgtccatctatatcaaattttagatattgatggtggtcagagttaaaaaacagtttgccttaagacaaaccaagatgaacttgtatttacaatcgaaggaaatattgcacattgcctagacatttaatttattagataaattcttttgttagttgttcaactttgtacgtcttataagtcacaggaacaatgtttatctagaacttcggtctcaaattatacagtagtgttcagccatacctgccatgtcacaagaaagagagataaaaagtatttaatagtagacctaatgatgctcatttgtaattgtagatattcgtatatcctttttctgcaaccttgtgaaacatgtgatggtttgacttggaacaaactttgggtctgatatagtaaaatgcaatgtatgtggagggaagtagtagaacaagacagaacaagtgccaaataaggttatatagtagaatacaatgtgtggagggaaatagtagaacaacacaaaacaagtgccaaataaggttacaaggtttatagtagcgattgcttagctgctacaacgacactcatagattagcctggcatttgcaatgtcgctcttgtatttgccataacctcacttaaggtcacacattgcctctgggaccttgacctccgctactgttgtcgcctggccgcgtcgacttcaccaatgccggggtgtccaacctcatcagcttcaccgtcgtcgactgctcccacacaaccgagctgtgggtcctggtaccggtcgcgccccgcctctgctccttctgcttcagcgagtggcagactatcgatacactcgatttcaattgttttttacgctatttactgtattgcaatgggacaatggatgattaggatttgttttttaagactggcccatgatttatcgtcgtatactatttctttaatagattgttcgctacatctactgatctacatgttcacatgtttcaacttctgtcagcatccgtagttactatatgaatgctcattctgtgtcaccttttaagtttacaaatgctcttttccaggtcacatatggaaagtgaagaacccaaatgatttcttcacaggaagcttggaccaatcttcaactcatggggcgcttcatcctcggcctcctacgcatgcacttctcctgcttctcctgctggtcatcgcccaaggattggcagaatgagagcgacaaaggaatgagctaaatcttttgaaatatgaagcaatatgatttctttccagtgttatatttttttatttcctatgcatttcttaaaagtgctattacatgttcacctactaatacccttgtttttcttgcatctcaaggatgaattgctgctcttgaccatagggattggagcagcatgtagtttatactttatcctggttttctctctcgagatgttgcatggtgtcagtgtgtcagatgtgccgtaacagatgactccaaaatggattgcatgctcttcaaatagctacagataactatcttcacataaaatggagagtacaatgtttataaaagaaggaatatggataaggatccagattctcctatagcatatgaagaggcaaaggaaatggcaagccaaagctgcacaatttctgatgatcactcgttgttactgttatccattatctcctcagaggcattgcttttaaattcaacagcagacatggcaggtgcaggtcctatcctatccattatctacccctgcatgtgtgccagctattctactctatgtttcaatagtttggaaataattcagagctaaggttttctgatacagcctttcaagatttggcacattgacataatgacatgggttggtcacggattggatgtcaattttgctccctgtaccttgtagattatcggttatgtcaattttcgaaatttctatcgtgatggataacatttgaataaaacatagttaaataaacatgactactgtttcagtctttcgaaattctgatgctatagtgtcagtatactatgtcattttagggaaaatatatgtcatgtttattttgataaaattatatgatttctcactcaattcttgtcggtggcttcaggatttgttattttgtatatcgatctgtgtcatttgacaaagtactttgacttggtataatatgagtgttacttcgaccaaaagagcttggtaaagtgtgagaaactccgcaaacttcttctgcagacgatgactagcaacagttatgacgagggtcaagatagccgccatacatgatacattgagtacaacatcaagataaacactccctccccacacacaacttttgccttccgttcactctgtatgttgtgtttattacggttgcatatgttgtgtttattatggcatcaacacgttccattagaaaatataactattgtttgtcaagtacaaaatcataatcacatcagcttgtaataatattgcatcactgttttgtaccaaattgtaagttgttgtagcaacgcacgggcaccctactagtatatagagtaagttatcattaaattctcaaagcatcacatcaaaatggcacaagacatttaaaacatacttttggatatatatatacacacacacgcccaaacaagctcttagttgggctgtcactttaac

SEQ ID NO: 63274 - DNA, 4506 bp, Zea Mays
tgatgtccaatactgctatagtagcttctccaagttatgacactgttaggaagatggttcaacttctctcgaaatgaagcttctgtcttcctatgtatagacaagttgttcagttaggaggtctagattctcttaaaatggtgctatctacgagttaggaggtctaggagcacactgaatgttttagaggttgatgaaatcgttgttttcctaaaaaagcattttttctgctttgtttgaaattgtttgggttttcctccccaactttcataattacctatttctattgtatgtttgatcatttggacttctactccatccacaattttggtttattcagtgaggaactatgtttttaaccactctatagtttgtatagacatgcaacattcatctcagggtcaagaaagaagctcaacttggcatgcttcctgtttaaagcaagttacagaatatgtttgttccagttgagttccagtttgaaaactggaacaaccactagcagatgcaaagttcacaaagtagcttgtcaaataatgtgcatgaactggaacaagcaacttgtgcacgaatgagcattactggaacaagtagcttgtgcatgaacgagtaatactgtagatgattggacatgtatgtctattttagatttttaatatttaatgttatatattcagctcataccatacatgaatttgcatttctgtactatactcacttaatgtcctacctgttttgttagcttcaactatccgctttaaactgacaaaaccagaccaaacatatgcaaatctcatatacctgtgaaagcaacaactgatttgccagattggttaattaaacgtaacaataaatagccccgattaaatggcttataaatatacttggatctgttcatttttcacatatcagctattaatgaagccttcactgggttcattttgtactactccattacttatttacagttacaagtattctaagaaacttaatatttcatcatcaaagttgtattcagacagtttcatttacattgctctgattttttgtactaggagctactgacaatggaaagcaacgattagagtaacttgatgagtgaggactattcattcagttgcttcgatcaataagtgaactaatggatgcatgtttcttttgataagtgagctaactactttagtcacaaagttcgtgttgatttctaaacatggtatgatggttttgtcatcctattcgattgagtttgggaaaaagcctgcacattctgaaaacaaacagactgcacattgtgtggctgataaggttgagtgggtaaataagatcaaagctattatttagacatactgaaaatatagtgaaggaagcgtaagcaatttttctgctatatttatgcattgtatccttgtaaaattatcaatattgttctgacttgtggggaaaggtatgagagtattcatttttttgcctcttttctgtttgcattccttcttcagtataatgtttgttagaataaccaggtgaatttacaaatttcatatccatatactttcttcgatgacaaatataaatctacctaggtttgtcataactcataggtcaatcattctaacttcaattgacattttttataaaaagtatcataaggaaaataatatattatcataaaagtgacgtccatctatatcaaattttagatattgatggtggtcagagttaaaaaacagtttgccttaagacaaaccaagatgaacttgtatttacaatcgaaggaaatattgcacattgcctagacatttaatttattagataaattcttttgttagttgttcaactttgtacgtcttataagtcacaggaacaatgtttatctagaacttcggtctcaaattatacagtagtgttcagccatacctgccatgtcacaagaaagagagataaaaagtatttaatagtagacctaatgatgctcatttgtaattgtagatattcgtatatcctttttctgcaaccttgtgaaacatgtgatggtttgacttggaacaaactttgggtctgatatagtaaaatgcaatgtatgtggagggaagtagtagaacaagacagaacaagtgccaaataaggttatatagtagaatacaatgtgtggagggaaatagtagaacaacacaaaacaagtgccaaataaggttacaaggtttatagtagcgattgcttagctgctacaacgacactcatagattagcctggcatttgcaatgtcgctcttgtatttgccataacctcacttaaggtcacacattgcctctgggaccttgacctccgctactgttgtcgcctggccgcgtcgacttcaccaatgccggggtgtccaacctcatcagcttcaccgtcgtcgactgctcccacacaaccgagctgtgggtcctggtaccggtcgcgccccgcctctgctccttctgcttcagcgagtggcagactatcgatacactcgatttcaattgttttttacgctatttactgtattgcaatgggacaatggatgattaggatttgttttttaagactggcccatgatttatcgtcgtatactatttctttaatagattgttcgctacatctactgatctacatgttcacatgtttcaacttctgtcagcatccgtagttactatatgaatgctcattctgtgtcaccttttaagtttacaaatgctcttttccaggtcacatatggaaagtgaagaacccaaatgatttcttcacaggaagcttggaccaatcttcaactcatggggcgcttcatcctcggcctcctacgcatgcacttctcctgcttctcctgctggtcatcgcccaaggatgaattgctgctcttgaccatagggattggagcagcatgtagtttatactttatcctggttttctctctcgagtgtgtcagatgtgccgtaacagatgactccaaaatggattgcatgctcttcaaatagctacagataactatcttcacataaaatggagagtacaatgtttataaaagaaggaatatggataaggatccagattctcctatagcatatgaagaggcaaaggaaatggcaagccaaagctgcacaatttctgatgatcactcgttgttactgttatccattatctcctcagaggcattgcttttaaattcaacagcagacatggcaggtacgtgtccactttcttctcaaggaattgcactagaggttggactttgtgggtcaagagaaatttaatgcctattgttaatacaacctttagctatttttccatgatgatggagttggacaagtaccatattgagtataagtgttagcctattatatctttgtacaaccatggcaaacgaataatttcttataacaccatgaagataatgtttaacgaagtgtgtttgcgtgcgtgtgtaatttcttcttttgttttgctgctaagtttgatagttcaaaacatgattcttgtaaagtttggttttagtctaacaaatacactcaagtcctgacatgtaaactgtaaagttggactgttgcttggtggatctgtattgaactttattttttttaaaatgttttatggcttgtatagtttgtattcacttctcacctaagctacaatttgtttttccagcctttcaagatttggcacattgacataatgacatgggttggtcacggattggatgtcaattttgctccctgtaccttgtagattatcggttatgtcaattttcgaaatttctatcgtgatggataacatttgaataaaacatagttaaataaacatgactactgtttcagtctttcgaaattctgatgctatagtgtcagtatactatgtcattttagggaaaatatatgtcatgtttattttgataaaattatatgatttctcactcaattcttgtcggtggcttcaggatttgttattttgtatatcgatctgtgtcatttgacaaagtactttgacttggtataatatgagtgttacttcgaccaaaagagcttggtaaagtgtgagaaactccgcaaacttcttctgcagacgatgactagcaacagttatgacgagggtcaagatagccgccatacatgatacattgagtacaacatcaagataaacactccctccccacacacaacttttgccttccgttcactctgtatgttgtgtttattacggttgcatatgttgtgtttattatggcatcaacacgttccattagaaaatataactattgtttgtcaagtacaaaatcataatcacatcagcttgtaataatattgcatcactgttttgtaccaaattgtaagttgttgtagcaacgcacgggcaccctactagtatatagagtaagttatcattaaattctcaaagcatcacatcaaaatggcacaagacatttaaaacatacttttggatatatatatacacacacacgcccaaacaagctcttagttgggctgtcactttaac

SEQ ID NO: 63275 - DNA, 4179 bp, Zea Mays
tgatgtccaatactgctatagtagcttctccaagttatgacactgttaggaagatggttcaacttctctcgaaatgaagcttctgtcttcctatgtatagacaagttgttcagttaggaggtctagattctcttaaaatggtgctatctacgagttaggaggtctaggagcacactgaatgttttagaggttgatgaaatcgttgttttcctaaaaaagcattttttctgctttgtttgaaattgtttgggttttcctccccaactttcataattacctatttctattgtatgtttgatcatttggacttctactccatccacaattttggtttattcagtgaggaactatgtttttaaccactctatagtttgtatagacatgcaacattcatctcagggtcaagaaagaagctcaacttggcatgcttcctgtttaaagcaaggcaagaaacatccccgccagatctctgtcgccaaagcagggctggtgaagaagttgtgtttccctcccggattgtcactactttcatatttgttcatttatgtttgttccaatttatgttggttttttacagttacagaatatgtttgttccagttgagttccagtttgaaaactggaacaaccactagcagatgcaaagttcacaaagtagcttgtcaaataatgtgcatgaactggaacaagcaacttgtgcacgaatgagcattactggaacaagtagcttgtgcatgaacgagtaatactgtagatgattggacatgtatgtctattttagatttttaatatttaatgttatatattcagctcataccatacatgaatttgcatttctgtactatactcacttaatgtcctacctgttttgttagcttcaactatccgctttaaactgacaaaaccagaccaaacatatgcaaatctcatatacctgtgaaagcaacaactgatttgccagattggttaattaaacgtaacaataaatagccccgattaaatggcttataaatatacttggatctgttcatttttcacatatcagctattaatgaagccttcactgggttcattttgtactactccattacttatttacagttacaagtattctaagaaacttaatatttcatcatcaaagttgtattcagacagtttcatttacattgctctgattttttgtactaggagctactgacaatggaaagcaacgattagagtaacttgatgagtgaggactattcattcagttgcttcgatcaataagtgaactaatggatgcatgtttcttttgataagtgagctaactactttagtcacaaagttcgtgttgatttctaaacatggtatgatggttttgtcatcctattcgattgagtttgggaaaaagcctgcacattctgaaaacaaacagactgcacattgtgtggctgataaggttgagtgggtaaataagatcaaagctattatttagacatactgaaaatatagtgaaggaagcgtaagcaatttttctgctatatttatgcattgtatccttgtaaaattatcaatattgttctgacttgtggggaaaggtatgagagtattcatttttttgcctcttttctgtttgcattccttcttcagtataatgtttgttagaataaccaggtgaatttacaaatttcatatccatatactttcttcgatgacaaatataaatctacctaggtttgtcataactcataggtcaatcattctaacttcaattgacattttttataaaaagtatcataaggaaaataatatattatcataaaagtgacgtccatctatatcaaattttagatattgatggtggtcagagttaaaaaacagtttgccttaagacaaaccaagatgaacttgtatttacaatcgaaggaaatattgcacattgcctagacatttaatttattagataaattcttttgttagttgttcaactttgtacgtcttataagtcacaggaacaatgtttatctagaacttcggtctcaaattatacagtagtgttcagccatacctgccatgtcacaagaaagagagataaaaagtatttaatagtagacctaatgatgctcatttgtaattgtagatattcgtatatcctttttctgcaaccttgtgaaacatgtgatggtttgacttggaacaaactttgggtctgatatagtaaaatgcaatgtatgtggagggaagtagtagaacaagacagaacaagtgccaaataaggttatatagtagaatacaatgtgtggagggaaatagtagaacaacacaaaacaagtgccaaataaggttacaaggtttatagtagcgattgcttagctgctacaacgacactcatagattagcctggcatttgcaatgtcgctcttgtatttgccataacctcacttaaggtcacacattgcctctgggaccttgacctccgctactgttgtcgcctggccgcgtcgacttcaccaatgccggggtgtccaacctcatcagcttcaccgtcgtcgactgctcccacacaaccgagctgtgggtcctggtaccggtcgcgccccgcctctgctccttctgcttcagcgagtggcagactatcgatacactcgatttcaattgttttttacgctatttactgtattgcaatgggacaatggatgattaggatttgttttttaagactggcccatgatttatcgtcgtatactatttctttaatagattgttcgctacatctactgatctacatgttcacatgtttcaacttctgtcagcatccgtagttactatatgaatgctcattctgtgtcaccttttaagtttacaaatgctcttttccaggtcacatatggaaagtgaagaacccaaatgatttcttcacaggaagcttggaccaatcttcaactcatggggcgcttcatcctcggcctcctacgcatgcacttctcctgcttctcctgctggtcatcgcccaaggtgcacttttcctccctgttctgttcacgtgcccatgtgtcattcttgtttttcactgtttaggatcgtgagggtgttattgcaataatagctgatggagaaatgagaatgattttcaaatgatgacaggattggcagaatgagagcgacaaaggaatgagctaaatcttttgaaatatgaagcaatatgatttctttccagtgttatatttttttatttcctatgcatttcttaaaagtgctattacatgttcacctactaatacccttgtttttcttgcatctcaaggatgaattgctgctcttgaccatagggattggagcagcatgtagtttatactttatcctggttttctctctcgagtgtgtcagatgtgccgtaacagatgactccaaaatggattgcatgctcttcaaatagctacagataactatcttcacataaaatggagagtacaatgtttataaaagaaggaatatggataaggatccagattctcctatagcatatgaagaggcaaaggaaatggcaagccaaagctgcacaatttctgatgatcactcgttgttactgttatccattatctcctcagaggcattgcttttaaattcaacagcagacatggcaggatttgttattttgtatatcgatctgtgtcatttgacaaagtactttgacttggtataatatgagtgttacttcgaccaaaagagcttggtaaagtgtgagaaactccgcaaacttcttctgcagacgatgactagcaacagttatgacgagggtcaagatagccgccatacatgatacattgagtacaacatcaagataaacactccctccccacacacaacttttgccttccgttcactctgtatgttgtgtttattacggttgcatatgttgtgtttattatggcatcaacacgttccattagaaaatataactattgtttgtcaagtacaaaatcataatcacatcagcttgtaataatattgcatcactgttttgtaccaaattgtaagttgttgtagcaacgcacgggcaccctactagtatatagagtaagttatcattaaattctcaaagcatcacatcaaaatggcacaagacatttaaaacatacttttggatatatatatacacacacacgcccaaacaagctcttagttgggctgtcactttaac

SEQ ID NO: 63276 - DNA, 3832 bp, Zea Mays
tgatgtccaatactgctatagtagcttctccaagttatgacactgttaggaagatggttcaacttctctcgaaatgaagcttctgtcttcctatgtatagacaagttgttcagttaggaggtctagattctcttaaaatggtgctatctacgagttaggaggtctaggagcacactgaatgttttagaggttgatgaaatcgttgttttcctaaaaaagcattttttctgctttgtttgaaattgtttgggttttcctccccaactttcataattacctatttctattgtatgtttgatcatttggacttctactccatccacaattttggtttattcagtgaggaactatgtttttaaccactctatagtttgtatagacatgcaacattcatctcagggtcaagaaagaagctcaacttggcatgcttcctgtttaaagcaaggcaagaaacatccccgccagatctctgtcgccaaagcagggctggtgaagaagttgtgtttccctcccggattgtcactactttcatatttgttcatttatgtttgttccaatttatgttggttttttacagttacagaatatgtttgttccagttgagttccagtttgaaaactggaacaaccactagcagatgcaaagttcacaaagtagcttgtcaaataatgtgcatgaactggaacaagcaacttgtgcacgaatgagcattactggaacaagtagcttgtgcatgaacgagtaatactgtagatgattggacatgtatgtctattttagatttttaatatttaatgttatatattcagctcataccatacatgaatttgcatttctgtactatactcacttaatgtcctacctgttttgttagcttcaactatccgctttaaactgacaaaaccagaccaaacatatgcaaatctcatatacctgtgaaagcaacaactgatttgccagattggttaattaaacgtaacaataaatagccccgattaaatggcttataaatatacttggatctgttcatttttcacatatcagctattaatgaagccttcactgggttcattttgtactactccattacttatttacagttacaagtattctaagaaacttaatatttcatcatcaaagttgtattcagacagtttcatttacattgctctgattttttgtactaggagctactgacaatggaaagcaacgattagagtaacttgatgagtgaggactattcattcagttgcttcgatcaataagtgaactaatggatgcatgtttcttttgataagtgagctaactactttagtcacaaagttcgtgttgatttctaaacatggtatgatggttttgtcatcctattcgattgagtttgggaaaaagcctgcacattctgaaaacaaacagactgcacattgtgtggctgataaggttgagtgggtaaataagatcaaagctattatttagacatactgaaaatatagtgaaggaagcgtaagcaatttttctgctatatttatgcattgtatccttgtaaaattatcaatattgttctgacttgtggggaaaggtatgagagtattcatttttttgcctcttttctgtttgcattccttcttcagtataatgtttgttagaataaccaggtgaatttacaaatttcatatccatatactttcttcgatgacaaatataaatctacctaggtttgtcataactcataggtcaatcattctaacttcaattgacattttttataaaaagtatcataaggaaaataatatattatcataaaagtgacgtccatctatatcaaattttagatattgatggtggtcagagttaaaaaacagtttgccttaagacaaaccaagatgaacttgtatttacaatcgaaggaaatattgcacattgcctagacatttaatttattagataaattcttttgttagttgttcaactttgtacgtcttataagtcacaggaacaatgtttatctagaacttcggtctcaaattatacagtagtgttcagccatacctgccatgtcacaagaaagagagataaaaagtatttaatagtagacctaatgatgctcatttgtaattgtagatattcgtatatcctttttctgcaaccttgtgaaacatgtgatggtttgacttggaacaaactttgggtctgatatagtaaaatgcaatgtatgtggagggaagtagtagaacaagacagaacaagtgccaaataaggttatatagtagaatacaatgtgtggagggaaatagtagaacaacacaaaacaagtgccaaataaggttacaaggtttatagtagcgattgcttagctgctacaacgacactcatagattagcctggcatttgcaatgtcgctcttgtatttgccataacctcacttaaggtcacacattgcctctgggaccttgacctccgctactgttgtcgcctggccgcgtcgacttcaccaatgccggggtgtccaacctcatcagcttcaccgtcgtcgactgctcccacacaaccgagctgtgggtcctggtaccggtcgcgccccgcctctgctccttctgcttcagcgagtggcagactatcgatacactcgatttcaattgttttttacgctatttactgtattgcaatgggacaatggatgattaggatttgttttttaagactggcccatgatttatcgtcgtatactatttctttaatagattgttcgctacatctactgatctacatgttcacatgtttcaacttctgtcagcatccgtagttactatatgaatgctcattctgtgtcaccttttaagtttacaaatgctcttttccaggtcacatatggaaagtgaagaacccaaatgatttcttcacaggaagcttggaccaatcttcaactcatggggcgcttcatcctcggcctcctacgcatgcacttctcctgcttctcctgctggtcatcgcccaagatgttgcatggtgtcagtgtgtcagatgtgccgtaacagatgactccaaaatggattgcatgctcttcaaatagctacagataactatcttcacataaaatggagagtacaatgtttataaaagaaggaatatggataaggatccagattctcctatagcatatgaagaggcaaaggaaatggcaagccaaagctgcacaatttctgatgatcactcgttgttactgttatccattatctcctcagaggcattgcttttaaattcaacagcagacatggcaggatttgttattttgtatatcgatctgtgtcatttgacaaagtactttgacttggtataatatgagtgttacttcgaccaaaagagcttggtaaagtgtgagaaactccgcaaacttcttctgcagacgatgactagcaacagttatgacgagggtcaagatagccgccatacatgatacattgagtacaacatcaagataaacactccctccccacacacaacttttgccttccgttcactctgtatgttgtgtttattacggttgcatatgttgtgtttattatggcatcaacacgttccattagaaaatataactattgtttgtcaagtacaaaatcataatcacatcagcttgtaataatattgcatcactgttttgtaccaaattgtaagttgttgtagcaacgcacgggcaccctactagtatatagagtaagttatcattaaattctcaaagcatcacatcaaaatggcacaagacatttaaaacatacttttggatatatatatacacacacacgcccaaacaagctcttagttgggctgtcactttaac

SEQ ID NO: 63277 - DNA, 3739 bp, Zea Mays
tgatgtccaatactgctatagtagcttctccaagttatgacactgttaggaagatggttcaacttctctcgaaatgaagcttctgtcttcctatgtatagacaagttgttcagttaggaggtctagattctcttaaaatggtgctatctacgagttaggaggtctaggagcacactgaatgttttagaggttgatgaaatcgttgttttcctaaaaaagcattttttctgctttgtttgaaattgtttgggttttcctccccaactttcataattacctatttctattgtatgtttgatcatttggacttctactccatccacaattttggtttattcagtgaggaactatgtttttaaccactctatagtttgtatagacatgcaacattcatctcagggtcaagaaagaagctcaacttggcatgcttcctgtttaaagcaaggagctactgacaatggaaagcaacgattagagtaacttgatgagtgaggactattcattcagttgcttcgatcaataagtgaactaatggatgcatgtttcttttgataagtgagctaactactttagtcacaaagttcgtgttgatttctaaacatggtatgatggttttgtcatcctattcgattgagtttgggaaaaagcctgcacattctgaaaacaaacagactgcacattgtgtggctgataaggttgagtgggtaaataagatcaaagctattatttagacatactgaaaatatagtgaaggaagcgtaagcaatttttctgctatatttatgcattgtatccttgtaaaattatcaatattgttctgacttgtggggaaaggtatgagagtattcatttttttgcctcttttctgtttgcattccttcttcagtataatgtttgttagaataaccaggtgaatttacaaatttcatatccatatactttcttcgatgacaaatataaatctacctaggtttgtcataactcataggtcaatcattctaacttcaattgacattttttataaaaagtatcataaggaaaataatatattatcataaaagtgacgtccatctatatcaaattttagatattgatggtggtcagagttaaaaaacagtttgccttaagacaaaccaagatgaacttgtatttacaatcgaaggaaatattgcacattgcctagacatttaatttattagataaattcttttgttagttgttcaactttgtacgtcttataagtcacaggaacaatgtttatctagaacttcggtctcaaattatacagtagtgttcagccatacctgccatgtcacaagaaagagagataaaaagtatttaatagtagacctaatgatgctcatttgtaattgtagatattcgtatatcctttttctgcaaccttgtgaaacatgtgatggtttgacttggaacaaactttgggtctgatatagtaaaatgcaatgtatgtggagggaagtagtagaacaagacagaacaagtgccaaataaggttatatagtagaatacaatgtgtggagggaaatagtagaacaacacaaaacaagtgccaaataaggttacaaggtttatagtagcgattgcttagctgctacaacgacactcatagattagcctggcatttgcaatgtcgctcttgtatttgccataacctcacttaaggtcacacattgcctctgggaccttgacctccgctactgttgtcgcctggccgcgtcgacttcaccaatgccggggtgtccaacctcatcagcttcaccgtcgtcgactgctcccacacaaccgagctgtgggtcctggtaccggtcgcgccccgcctctgctccttctgcttcagcgagtggcagactatcgatacactcgatttcaattgttttttacgctatttactgtattgcaatgggacaatggatgattaggatttgttttttaagactggcccatgatttatcgtcgtatactatttctttaatagattgttcgctacatctactgatctacatgttcacatgtttcaacttctgtcagcatccgtagttactatatgaatgctcattctgtgtcaccttttaagtttacaaatgctcttttccaggtcacatatggaaagtgaagaacccaaatgatttcttcacaggaaggtgcttacatcttgcttccatgcctcggtagtttcggtcactattagttttgctatgcctttcctacataaataattttgctacctcaaaatgcttctaaatatgatgatttatgctggagactgctaaccttcacacatctaataagatgaagcaacaagctagaaaatgtggaatttgtcatatgtccggatgcaaaacgggtaacttcatgctttccacaatgtgtgtcgacatgatgcttgtagagatgcttggaccaatcttcaactcatggggcgcttcatcctcggcctcctacgcatgcacttctcctgcttctcctgctggtcatcgcccaagatgttgcatggtgtcagtgtgtcagatgtgccgtaacagatgactccaaaatggattgcatgctcttcaaatagctacagataactatcttcacataaaatggagagtacaatgtttataaaagaaggaatatggataaggatccagattctcctatagcatatgaagaggcaaaggaaatggcaagccaaagctgcacaatttctgatgatcactcgttgttactgttatccattatctcctcagaggcattgcttttaaattcaacagcagacatggcaggtgcaggtcctatcctatccattatctacccctgcatgtgtgccagctattctactctatgtttcaatagtttggaaataattcagagctaaggttttctgatacagcctttcaagatttggcacattgacataatgacatgggttggtcacggattggatgtcaattttgctccctgtaccttgtagattatcggttatgtcaattttcgaaatttctatcgtgatggataacatttgaataaaacatagttaaataaacatgactactgtttcagtctttcgaaattctgatgctatagtgtcagtatactatgtcattttagggaaaatatatgtcatgtttattttgataaaattatatgatttctcactcaattcttgtcggtggcttcaggatttgttattttgtatatcgatctgtgtcatttgacaaagtactttgacttggtataatatgagtgttacttcgaccaaaagagcttggtaaagtgtgagaaactccgcaaacttcttctgcagacgatgactagcaacagttatgacgagggtcaagatagccgccatacatgatacattgagtacaacatcaagataaacactccctccccacacacaacttttgccttccgttcactctgtatgttgtgtttattacggttgcatatgttgtgtttattatggcatcaacacgttccattagaaaatataactattgtttgtcaagtacaaaatcataatcacatcagcttgtaataatattgcatcactgttttgtaccaaattgtaagttgttgtagcaacgcacgggcaccctactagtatatagagtaagttatcattaaattctcaaagcatcacatcaaaatggcacaagacatttaaaacatacttttggatatatatatacacacacacgcccaaacaagctcttagttgggctgtcactttaac

SEQ ID NO: 63278 - DNA, 2650 bp, Zea Mays
tgatgtccaatactgctatagtagcttctccaagttatgacactgttaggaagatggttcaacttctctcgaaatgaagcttctgtcttcctatgtatagacaagttgttcagttaggaggtctagattctcttaaaatggtgctatctacgagttaggaggtctaggagcacactgaatgttttagaggttgatgaaatcgttgttttcctaaaaaagcattttttctgctttgtttgaaattgtttgggttttcctccccaactttcataattacctatttctattgtatgtttgatcatttggacttctactccatccacaattttggtttattcagtgaggaactatgtttttaaccactctatagtttgtatagacatgcaacattcatctcagggtcaagaaagaagctcaacttggcatgcttcctgtttaaagcaaggcaagaaacatccccgccagatctctgtcgccaaagcagggctggtgaagaagttgtgtttccctcccggattgtcactactttcatatttgttcatttatgtttgttccaatttatgttggttttttacagttacagaatatgtttgttccagttgagttccagtttgaaaactggaacaaccactagcagatgcaaagttcacaaagtagcttgtcaaataatgtgcatgaactggaacaagcaacttgtgcacgaatgagcattactggaacaagtagcttgtgcatgaacgagtaatactgtagatgattggacatgtatgtctattttagatttttaatatttaatgttatatattcagctcataccatacatgaatttgcatttctgtactatactcacttaatgtcctacctgttttgttagcttcaactatccgctttaaactgacaaaaccagaccaaacatatgcaaatctcatatacctgtgaaagcaacaactgatttgccagattggttaattaaacgtaacaataaatagccccgattaaatggcttataaatatacttggatctgttcatttttcacatatcagctattaatgaagccttcactgggttcattttgtactactccattacttatttacagttacaagtattctaagaaacttaatatttcatcatcaaagttgtattcagacagtttcatttacattgctctgattttttgtactaggagctactgacaatggaaagcaacgattagagtaacttgatgagtgaggactattcattcagttgcttcgatcaataagtgaactaatggatgcatgtttcttttgataagtcacatatggaaagtgaagaacccaaatgatttcttcacaggaagcttggaccaatcttcaactcatggggcgcttcatcctcggcctcctacgcatgcacttctcctgcttctcctgctggtcatcgcccaagtgtgtcagatgtgccgtaacagatgactccaaaatggattgcatgctcttcaaatagctacagataactatcttcacataaaatggagagtacaatgtttataaaagaaggaatatggataaggatccagattctcctatagcatatgaagaggcaaaggaaatggcaagccaaagctgcacaatttctgatgatcactcgttgttactgttatccattatctcctcagaggcattgcttttaaattcaacagcagacatggcaggtgcaggtcctatcctatccattatctacccctgcatgtgtgccagctattctactctatgtttcaatagtttggaaataattcagagctaaggttttctgatacagcctttcaagatttggcacattgacataatgacatgggttggtcacggattggatgtcaattttgctccctgtaccttgtagattatcggttatgtcaattttcgaaatttctatcgtgatggataacatttgaataaaacatagttaaataaacatgactactgtttcagtctttcgaaattctgatgctatagtgtcagtatactatgtcattttagggaaaatatatgtcatgtttattttgataaaattatatgatttctcactcaattcttgtcggtggcttcaggatttgttattttgtatatcgatctgtgtcatttgacaaagtactttgacttggtataatatgagtgttacttcgaccaaaagagcttggtaaagtgtgagaaactccgcaaacttcttctgcagacgatgactagcaacagttatgacgagggtcaagatagccgccatacatgatacattgagtacaacatcaagataaacactccctccccacacacaacttttgccttccgttcactctgtatgttgtgtttattacggttgcatatgttgtgtttattatggcatcaacacgttccattagaaaatataactattgtttgtcaagtacaaaatcataatcacatcagcttgtaataatattgcatcactgttttgtaccaaattgtaagttgttgtagcaacgcacgggcaccctactagtatatagagtaagttatcattaaattctcaaagcatcacatcaaaatggcacaagacatttaaaacatacttttggatatatatatacacacacacgcccaaacaagctcttagttgggctgtcactttaac

SEQ ID NO: 63279 - DNA, 4179 bp, Zea Mays
tgatgtccaatactgctatagtagcttctccaagttatgacactgttaggaagatggttcaacttctctcgaaatgaagcttctgtcttcctatgtatagacaagttgttcagttaggaggtctagattctcttaaaatggtgctatctacgagttaggaggtctaggagcacactgaatgttttagaggttgatgaaatcgttgttttcctaaaaaagcattttttctgctttgtttgaaattgtttgggttttcctccccaactttcataattacctatttctattgtatgtttgatcatttggacttctactccatccacaattttggtttattcagtgaggaactatgtttttaaccactctatagtttgtatagacatgcaacattcatctcagggtcaagaaagaagctcaacttggcatgcttcctgtttaaagcaaggcaagaaacatccccgccagatctctgtcgccaaagcagggctggtgaagaagttgtgtttccctcccggattgtcactactttcatatttgttcatttatgtttgttccaatttatgttggttttttacagttacagaatatgtttgttccagttgagttccagtttgaaaactggaacaaccactagcagatgcaaagttcacaaagtagcttgtcaaataatgtgcatgaactggaacaagcaacttgtgcacgaatgagcattactggaacaagtagcttgtgcatgaacgagtaatactgtagatgattggacatgtatgtctattttagatttttaatatttaatgttatatattcagctcataccatacatgaatttgcatttctgtactatactcacttaatgtcctacctgttttgttagcttcaactatccgctttaaactgacaaaaccagaccaaacatatgcaaatctcatatacctgtgaaagcaacaactgatttgccagattggttaattaaacgtaacaataaatagccccgattaaatggcttataaatatacttggatctgttcatttttcacatatcagctattaatgaagccttcactgggttcattttgtactactccattacttatttacagttacaagtattctaagaaacttaatatttcatcatcaaagttgtattcagacagtttcatttacattgctctgattttttgtactaggagctactgacaatggaaagcaacgattagagtaacttgatgagtgaggactattcattcagttgcttcgatcaataagtgaactaatggatgcatgtttcttttgataagtgagctaactactttagtcacaaagttcgtgttgatttctaaacatggtatgatggttttgtcatcctattcgattgagtttgggaaaaagcctgcacattctgaaaacaaacagactgcacattgtgtggctgataaggttgagtgggtaaataagatcaaagctattatttagacatactgaaaatatagtgaaggaagcgtaagcaatttttctgctatatttatgcattgtatccttgtaaaattatcaatattgttctgacttgtggggaaaggtatgagagtattcatttttttgcctcttttctgtttgcattccttcttcagtataatgtttgttagaataaccaggtgaatttacaaatttcatatccatatactttcttcgatgacaaatataaatctacctaggtttgtcataactcataggtcaatcattctaacttcaattgacattttttataaaaagtatcataaggaaaataatatattatcataaaagtgacgtccatctatatcaaattttagatattgatggtggtcagagttaaaaaacagtttgccttaagacaaaccaagatgaacttgtatttacaatcgaaggaaatattgcacattgcctagacatttaatttattagataaattcttttgttagttgttcaactttgtacgtcttataagtcacaggaacaatgtttatctagaacttcggtctcaaattatacagtagtgttcagccatacctgccatgtcacaagaaagagagataaaaagtatttaatagtagacctaatgatgctcatttgtaattgtagatattcgtatatcctttttctgcaaccttgtgaaacatgtgatggtttgacttggaacaaactttgggtctgatatagtaaaatgcaatgtatgtggagggaagtagtagaacaagacagaacaagtgccaaataaggttatatagtagaatacaatgtgtggagggaaatagtagaacaacacaaaacaagtgccaaataaggttacaaggtttatagtagcgattgcttagctgctacaacgacactcatagattagcctggcatttgcaatgtcgctcttgtatttgccataacctcacttaaggtcacacattgcctctgggaccttgacctccgctactgttgtcgcctggccgcgtcgacttcaccaatgccggggtgtccaacctcatcagcttcaccgtcgtcgactgctcccacacaaccgagctgtgggtcctggtaccggtcgcgccccgcctctgctccttctgcttcagcgagtggcagactatcgatacactcgatttcaattgttttttacgctatttactgtattgcaatgggacaatggatgattaggatttgttttttaagactggcccatgatttatcgtcgtatactatttctttaatagattgttcgctacatctactgatctacatgttcacatgtttcaacttctgtcagcatccgtagttactatatgaatgctcattctgtgtcaccttttaagtttacaaatgctcttttccaggtcacatatggaaagtgaagaacccaaatgatttcttcacaggaagcttggaccaatcttcaactcatggggcgcttcatcctcggcctcctacgcatgcacttctcctgcttctcctgctggtcatcgcccaaggatgaattgctgctcttgaccatagggattggagcagcatgtagtttatactttatcctggttttctctctcgagtgtgtcagatgtgccgtaacagatgactccaaaatggattgcatgctcttcaaatagctacagataactatcttcacataaaatggagagtacaatgtttataaaagaaggaatatggataaggatccagattctcctatagcatatgaagaggcaaaggaaatggcaagccaaagctgcacaatttctgatgatcactcgttgttactgttatccattatctcctcagaggcattgcttttaaattcaacagcagacatggcagcctttcaagatttggcacattgacataatgacatgggttggtcacggattggatgtcaattttgctccctgtaccttgtagattatcggttatgtcaattttcgaaatttctatcgtgatggataacatttgaataaaacatagttaaataaacatgactactgtttcagtctttcgaaattctgatgctatagtgtcagtatactatgtcattttagggaaaatatatgtcatgtttattttgataaaattatatgatttctcactcaattcttgtcggtggcttcaggatttgttattttgtatatcgatctgtgtcatttgacaaagtactttgacttggtataatatgagtgttacttcgaccaaaagagcttggtaaagtgtgagaaactccgcaaacttcttctgcagacgatgactagcaacagttatgacgagggtcaagatagccgccatacatgatacattgagtacaacatcaagataaacactccctccccacacacaacttttgccttccgttcactctgtatgttgtgtttattacggttgcatatgttgtgtttattatggcatcaacacgttccattagaaaatataactattgtttgtcaagtacaaaatcataatcacatcagcttgtaataatattgcatcactgttttgtaccaaattgtaagttgttgtagcaacgcacgggcaccctactagtatatagagtaagttatcattaaattctcaaagcatcacatcaaaatggcacaagacatttaaaacatacttttggatatatatatacacacacacgcccaaacaagctcttagttgggctgtcactttaac

SEQ ID NO: 63280 - DNA, 4468 bp, Zea Mays
tgatgtccaatactgctatagtagcttctccaagttatgacactgttaggaagatggttcaacttctctcgaaatgaagcttctgtcttcctatgtatagacaagttgttcagttaggaggtctagattctcttaaaatggtgctatctacgagttaggaggtctaggagcacactgaatgttttagaggttgatgaaatcgttgttttcctaaaaaagcattttttctgctttgtttgaaattgtttgggttttcctccccaactttcataattacctatttctattgtatgtttgatcatttggacttctactccatccacaattttggtttattcagtgaggaactatgtttttaaccactctatagtttgtatagacatgcaacattcatctcagggtcaagaaagaagctcaacttggcatgcttcctgtttaaagcaaggcaagaaacatccccgccagatctctgtcgccaaagcagggctggtgaagaagttgtgtttccctcccggattgtcactactttcatatttgttcatttatgtttgttccaatttatgttggttttttacagttacagaatatgtttgttccagttgagttccagtttgaaaactggaacaaccactagcagatgcaaagttcacaaagtagcttgtcaaataatgtgcatgaactggaacaagcaacttgtgcacgaatgagcattactggaacaagtagcttgtgcatgaacgagtaatactgtagatgattggacatgtatgtctattttagatttttaatatttaatgttatatattcagctcataccatacatgaatttgcatttctgtactatactcacttaatgtcctacctgttttgttagcttcaactatccgctttaaactgacaaaaccagaccaaacatatgcaaatctcatatacctgtgaaagcaacaactgatttgccagattggttaattaaacgtaacaataaatagccccgattaaatggcttataaatatacttggatctgttcatttttcacatatcagctattaatgaagccttcactgggttcattttgtactactccattacttatttacagttacaagtattctaagaaacttaatatttcatcatcaaagttgtattcagacagtttcatttacattgctctgattttttgtactaggagctactgacaatggaaagcaacgattagagtaacttgatgagtgaggactattcattcagttgcttcgatcaataagtgaactaatggatgcatgtttcttttgataagtgagctaactactttagtcacaaagttcgtgttgatttctaaacatggtatgatggttttgtcatcctattcgattgagtttgggaaaaagcctgcacattctgaaaacaaacagactgcacattgtgtggctgataaggttgagtgggtaaataagatcaaagctattatttagacatactgaaaatatagtgaaggaagcgtaagcaatttttctgctatatttatgcattgtatccttgtaaaattatcaatattgttctgacttgtggggaaaggtatgagagtattcatttttttgcctcttttctgtttgcattccttcttcagtataatgtttgttagaataaccaggtgaatttacaaatttcatatccatatactttcttcgatgacaaatataaatctacctaggtttgtcataactcataggtcaatcattctaacttcaattgacattttttataaaaagtatcataaggaaaataatatattatcataaaagtgacgtccatctatatcaaattttagatattgatggtggtcagagttaaaaaacagtttgccttaagacaaaccaagatgaacttgtatttacaatcgaaggaaatattgcacattgcctagacatttaatttattagataaattcttttgttagttgttcaactttgtacgtcttataagtcacaggaacaatgtttatctagaacttcggtctcaaattatacagtagtgttcagccatacctgccatgtcacaagaaagagagataaaaagtatttaatagtagacctaatgatgctcatttgtaattgtagatattcgtatatcctttttctgcaaccttgtgaaacatgtgatggtttgacttggaacaaactttgggtctgatatagtaaaatgcaatgtatgtggagggaagtagtagaacaagacagaacaagtgccaaataaggttatatagtagaatacaatgtgtggagggaaatagtagaacaacacaaaacaagtgccaaataaggttacaaggtttatagtagcgattgcttagctgctacaacgacactcatagattagcctggcatttgcaatgtcgctcttgtatttgccataacctcacttaaggtcacacattgcctctgggaccttgacctccgctactgttgtcgcctggccgcgtcgacttcaccaatgccggggtgtccaacctcatcagcttcaccgtcgtcgactgctcccacacaaccgagctgtgggtcctggtaccggtcgcgccccgcctctgctccttctgcttcagcgagtggcagactatcgatacactcgatttcaattgttttttacgctatttactgtattgcaatgggacaatggatgattaggatttgttttttaagactggcccatgatttatcgtcgtatactatttctttaatagattgttcgctacatctactgatctacatgttcacatgtttcaacttctgtcagcatccgtagttactatatgaatgctcattctgtgtcaccttttaagtttacaaatgctcttttccaggtcacatatggaaagtgaagaacccaaatgatttcttcacaggaagcttggaccaatcttcaactcatggggcgcttcatcctcggcctcctacgcatgcacttctcctgcttctcctgctggtcatcgcccaaggtgcacttttcctccctgttctgttcacgtgcccatgtgtcattcttgtttttcactgtttaggatcgtgagggtgttattgcaataatagctgatggagaaatgagaatgattttcaaatgatgacaggattggcagaatgagagcgacaaaggaatgagctaaatcttttgaaatatgaagcaatatgatttctttccagtgttatatttttttatttcctatgcatttcttaaaagtgctattacatgttcacctactaatacccttgtttttcttgcatctcaaggatgaattgctgctcttgaccatagggattggagcagcatgtagtttatactttatcctggttttctctctcgagtgtgtcagatgtgccgtaacagatgactccaaaatggattgcatgctcttcaaatagctacagataactatcttcacataaaatggagagtacaatgtttataaaagaaggaatatggataaggatccagattctcctatagcatatgaagaggcaaaggaaatggcaagccaaagctgcacaatttctgatgatcactcgttgttactgttatccattatctcctcagaggcattgcttttaaattcaacagcagacatggcagcctttcaagatttggcacattgacataatgacatgggttggtcacggattggatgtcaattttgctccctgtaccttgtagattatcggttatgtcaattttcgaaatttctatcgtgatggataacatttgaataaaacatagttaaataaacatgactactgtttcagtctttcgaaattctgatgctatagtgtcagtatactatgtcattttagggaaaatatatgtcatgtttattttgataaaattatatgatttctcactcaattcttgtcggtggcttcaggatttgttattttgtatatcgatctgtgtcatttgacaaagtactttgacttggtataatatgagtgttacttcgaccaaaagagcttggtaaagtgtgagaaactccgcaaacttcttctgcagacgatgactagcaacagttatgacgagggtcaagatagccgccatacatgatacattgagtacaacatcaagataaacactccctccccacacacaacttttgccttccgttcactctgtatgttgtgtttattacggttgcatatgttgtgtttattatggcatcaacacgttccattagaaaatataactattgtttgtcaagtacaaaatcataatcacatcagcttgtaataatattgcatcactgttttgtaccaaattgtaagttgttgtagcaacgcacgggcaccctactagtatatagagtaagttatcattaaattctcaaagcatcacatcaaaatggcacaagacatttaaaacatacttttggatatatatatacacacacacgcccaaacaagctcttagttgggctgtcactttaac

SEQ ID NO: 63281 - DNA, 3002 bp, Zea Mays
tgatgtccaatactgctatagtagcttctccaagttatgacactgttaggaagatggttcaacttctctcgaaatgaagcttctgtcttcctatgtatagacaagttgttcagttaggaggtctagattctcttaaaatggtgctatctacgagttaggaggtctaggagcacactgaatgttttagaggttgatgaaatcgttgttttcctaaaaaagcattttttctgctttgtttgaaattgtttgggttttcctccccaactttcataattacctatttctattgtatgtttgatcatttggacttctactccatccacaattttggtttattcagtgaggaactatgtttttaaccactctatagtttgtatagacatgcaacattcatctcagggtcaagaaagaagctcaacttggcatgcttcctgtttaaagcaaggcaagaaacatccccgccagatctctgtcgccaaagcagggctggtgaagaagttgtgtttccctcccggattgtcactactttcatatttgttcatttatgtttgttccaatttatgttggttttttacagttacagaatatgtttgttccagttgagttccagtttgaaaactggaacaaccactagcagatgcaaagttcacaaagtagcttgtcaaataatgtgcatgaactggaacaagcaacttgtgcacgaatgagcattactggaacaagtagcttgtgcatgaacgagtaatactgtagatgattggacatgtatgtctattttagatttttaatatttaatgttatatattcagctcataccatacatgaatttgcatttctgtactatactcacttaatgtcctacctgttttgttagcttcaactatccgctttaaactgacaaaaccagaccaaacatatgcaaatctcatatacctgtgaaagcaacaactgatttgccagattggttaattaaacgtaacaataaatagccccgattaaatggcttataaatatacttggatctgttcatttttcacatatcagctattaatgaagccttcactgggttcattttgtactactccattacttatttacagttacaagtattctaagaaacttaatatttcatcatcaaagttgtattcagacagtttcatttacattgctctgattttttgtactaggagctactgacaatggaaagcaacgattagagtaacttgatgagtgaggactattcattcagttgcttcgatcaataagtgaactaatggatgcatgtttcttttgataagtcacatatggaaagtgaagaacccaaatgatttcttcacaggaagcttggaccaatcttcaactcatggggcgcttcatcctcggcctcctacgcatgcacttctcctgcttctcctgctggtcatcgcccaagtgtgtcagatgtgccgtaacagatgactccaaaatggattgcatgctcttcaaatagctacagataactatcttcacataaaatggagagtacaatgtttataaaagaaggaatatggataaggatccagattctcctatagcatatgaagaggcaaaggaaatggcaagccaaagctgcacaatttctgatgatcactcgttgttactgttatccattatctcctcagaggcattgcttttaaattcaacagcagacatggcaggtacgtgtccactttcttctcaaggaattgcactagaggttggactttgtgggtcaagagaaatttaatgcctattgttaatacaacctttagctatttttccatgatgatggagttggacaagtaccatattgagtataagtgttagcctattatatctttgtacaaccatggcaaacgaataatttcttataacaccatgaagataatgtttaacgaagtgtgtttgcgtgcgtgtgtaatttcttcttttgttttgctgctaagtttgatagttcaaaacatgattcttgtaaagtttggttttagtctaacaaatacactcaagtcctgacatgtaaactgtaaagttggactgttgcttggtggatctgtattgaactttattttttttaaaatgttttatggcttgtatagtttgtattcacttctcacctaagctacaatttgtttttccagcctttcaagatttggcacattgacataatgacatgggttggtcacggattggatgtcaattttgctccctgtaccttgtagattatcggttatgtcaattttcgaaatttctatcgtgatggataacatttgaataaaacatagttaaataaacatgactactgtttcagtctttcgaaattctgatgctatagtgtcagtatactatgtcattttagggaaaatatatgtcatgtttattttgataaaattatatgatttctcactcaattcttgtcggtggcttcaggatttgttattttgtatatcgatctgtgtcatttgacaaagtactttgacttggtataatatgagtgttacttcgaccaaaagagcttggtaaagtgtgagaaactccgcaaacttcttctgcagacgatgactagcaacagttatgacgagggtcaagatagccgccatacatgatacattgagtacaacatcaagataaacactccctccccacacacaacttttgccttccgttcactctgtatgttgtgtttattacggttgcatatgttgtgtttattatggcatcaacacgttccattagaaaatataactattgtttgtcaagtacaaaatcataatcacatcagcttgtaataatattgcatcactgttttgtaccaaattgtaagttgttgtagcaacgcacgggcaccctactagtatatagagtaagttatcattaaattctcaaagcatcacatcaaaatggcacaagacatttaaaacatacttttggatatatatatacacacacacgcccaaacaagctcttagttgggctgtcactttaac

SEQ ID NO: 63282 - DNA, 4196 bp, Zea Mays
tgatgtccaatactgctatagtagcttctccaagttatgacactgttaggaagatggttcaacttctctcgaaatgaagcttctgtcttcctatgtatagacaagttgttcagttaggaggtctagattctcttaaaatggtgctatctacgagttaggaggtctaggagcacactgaatgttttagaggttgatgaaatcgttgttttcctaaaaaagcattttttctgctttgtttgaaattgtttgggttttcctccccaactttcataattacctatttctattgtatgtttgatcatttggacttctactccatccacaattttggtttattcagtgaggaactatgtttttaaccactctatagtttgtatagacatgcaacattcatctcagggtcaagaaagaagctcaacttggcatgcttcctgtttaaagcaaggcaagaaacatccccgccagatctctgtcgccaaagcagggctggtgaagaagttgtgtttccctcccggattgtcactactttcatatttgttcatttatgtttgttccaatttatgttggttttttacagttacagaatatgtttgttccagttgagttccagtttgaaaactggaacaaccactagcagatgcaaagttcacaaagtagcttgtcaaataatgtgcatgaactggaacaagcaacttgtgcacgaatgagcattactggaacaagtagcttgtgcatgaacgagtaatactgtagatgattggacatgtatgtctattttagatttttaatatttaatgttatatattcagctcataccatacatgaatttgcatttctgtactatactcacttaatgtcctacctgttttgttagcttcaactatccgctttaaactgacaaaaccagaccaaacatatgcaaatctcatatacctgtgaaagcaacaactgatttgccagattggttaattaaacgtaacaataaatagccccgattaaatggcttataaatatacttggatctgttcatttttcacatatcagctattaatgaagccttcactgggttcattttgtactactccattacttatttacagttacaagtattctaagaaacttaatatttcatcatcaaagttgtattcagacagtttcatttacattgctctgattttttgtactaggagctactgacaatggaaagcaacgattagagtaacttgatgagtgaggactattcattcagttgcttcgatcaataagtgaactaatggatgcatgtttcttttgataagtgagctaactactttagtcacaaagttcgtgttgatttctaaacatggtatgatggttttgtcatcctattcgattgagtttgggaaaaagcctgcacattctgaaaacaaacagactgcacattgtgtggctgataaggttgagtgggtaaataagatcaaagctattatttagacatactgaaaatatagtgaaggaagcgtaagcaatttttctgctatatttatgcattgtatccttgtaaaattatcaatattgttctgacttgtggggaaaggtatgagagtattcatttttttgcctcttttctgtttgcattccttcttcagtataatgtttgttagaataaccaggtgaatttacaaatttcatatccatatactttcttcgatgacaaatataaatctacctaggtttgtcataactcataggtcaatcattctaacttcaattgacattttttataaaaagtatcataaggaaaataatatattatcataaaagtgacgtccatctatatcaaattttagatattgatggtggtcagagttaaaaaacagtttgccttaagacaaaccaagatgaacttgtatttacaatcgaaggaaatattgcacattgcctagacatttaatttattagataaattcttttgttagttgttcaactttgtacgtcttataagtcacaggaacaatgtttatctagaacttcggtctcaaattatacagtagtgttcagccatacctgccatgtcacaagaaagagagataaaaagtatttaatagtagacctaatgatgctcatttgtaattgtagatattcgtatatcctttttctgcaaccttgtgaaacatgtgatggtttgacttggaacaaactttgggtctgatatagtaaaatgcaatgtatgtggagggaagtagtagaacaagacagaacaagtgccaaataaggttatatagtagaatacaatgtgtggagggaaatagtagaacaacacaaaacaagtgccaaataaggttacaaggtttatagtagcgattgcttagctgctacaacgacactcatagattagcctggcatttgcaatgtcgctcttgtatttgccataacctcacttaaggtcacacattgcctctgggaccttgacctccgctactgttgtcgcctggccgcgtcgacttcaccaatgccggggtgtccaacctcatcagcttcaccgtcgtcgactgctcccacacaaccgagctgtgggtcctggtaccggtcgcgccccgcctctgctccttctgcttcagcgagtggcagactatcgatacactcgatttcaattgttttttacgctatttactgtattgcaatgggacaatggatgattaggatttgttttttaagactggcccatgatttatcgtcgtatactatttctttaatagattgttcgctacatctactgatctacatgttcacatgtttcaacttctgtcagcatccgtagttactatatgaatgctcattctgtgtcaccttttaagtttacaaatgctcttttccaggtcacatatggaaagtgaagaacccaaatgatttcttcacaggaagcttggaccaatcttcaactcatggggcgcttcatcctcggcctcctacgcatgcacttctcctgcttctcctgctggtcatcgcccaaggtgcacttttcctccctgttctgttcacgtgcccatgtgtcattcttgtttttcactgtttaggatcgtgagggtgttattgcaataatagctgatggagaaatgagaatgattttcaaatgatgacaggattggcagaatgagagcgacaaaggaatgagctaaatcttttgaaatatgaagcaatatgatttctttccagtgttatatttttttatttcctatgcatttcttaaaagtgctattacatgttcacctactaatacccttgtttttcttgcatctcaaggatgaattgctgctcttgaccatagggattggagcagcatgtagtttatactttatcctggttttctctctcgagatgttgcatggtgtcagtgtgtcagatgtgccgtaacagatgactccaaaatggattgcatgctcttcaaatagctacagataactatcttcacataaaatggagagtacaatgtttataaaagaaggaatatggataaggatccagattctcctatagcatatgaagaggcaaaggaaatggcaagccaaagctgcacaatttctgatgatcactcgttgttactgttatccattatctcctcagaggcattgcttttaaattcaacagcagacatggcaggatttgttattttgtatatcgatctgtgtcatttgacaaagtactttgacttggtataatatgagtgttacttcgaccaaaagagcttggtaaagtgtgagaaactccgcaaacttcttctgcagacgatgactagcaacagttatgacgagggtcaagatagccgccatacatgatacattgagtacaacatcaagataaacactccctccccacacacaacttttgccttccgttcactctgtatgttgtgtttattacggttgcatatgttgtgtttattatggcatcaacacgttccattagaaaatataactattgtttgtcaagtacaaaatcataatcacatcagcttgtaataatattgcatcactgttttgtaccaaattgtaagttgttgtagcaacgcacgggcaccctactagtatatagagtaagttatcattaaattctcaaagcatcacatcaaaatggcacaagacatttaaaacatacttttggatatatatatacacacacacgcccaaacaagctcttagttgggctgtcactttaac

SEQ ID NO: 63283 - DNA, 4014 bp, Zea Mays
tgatgtccaatactgctatagtagcttctccaagttatgacactgttaggaagatggttcaacttctctcgaaatgaagcttctgtcttcctatgtatagacaagttgttcagttaggaggtctagattctcttaaaatggtgctatctacgagttaggaggtctaggagcacactgaatgttttagaggttgatgaaatcgttgttttcctaaaaaagcattttttctgctttgtttgaaattgtttgggttttcctccccaactttcataattacctatttctattgtatgtttgatcatttggacttctactccatccacaattttggtttattcagtgaggaactatgtttttaaccactctatagtttgtatagacatgcaacattcatctcagggtcaagaaagaagctcaacttggcatgcttcctgtttaaagcaaggcaagaaacatccccgccagatctctgtcgccaaagcagggctggtgaagaagttgtgtttccctcccggattgtcactactttcatatttgttcatttatgtttgttccaatttatgttggttttttacagttacagaatatgtttgttccagttgagttccagtttgaaaactggaacaaccactagcagatgcaaagttcacaaagtagcttgtcaaataatgtgcatgaactggaacaagcaacttgtgcacgaatgagcattactggaacaagtagcttgtgcatgaacgagtaatactgtagatgattggacatgtatgtctattttagatttttaatatttaatgttatatattcagctcataccatacatgaatttgcatttctgtactatactcacttaatgtcctacctgttttgttagcttcaactatccgctttaaactgacaaaaccagaccaaacatatgcaaatctcatatacctgtgaaagcaacaactgatttgccagattggttaattaaacgtaacaataaatagccccgattaaatggcttataaatatacttggatctgttcatttttcacatatcagctattaatgaagccttcactgggttcattttgtactactccattacttatttacagttacaagtattctaagaaacttaatatttcatcatcaaagttgtattcagacagtttcatttacattgctctgattttttgtactaggagctactgacaatggaaagcaacgattagagtaacttgatgagtgaggactattcattcagttgcttcgatcaataagtgaactaatggatgcatgtttcttttgataagtgagctaactactttagtcacaaagttcgtgttgatttctaaacatggtatgatggttttgtcatcctattcgattgagtttgggaaaaagcctgcacattctgaaaacaaacagactgcacattgtgtggctgataaggttgagtgggtaaataagatcaaagctattatttagacatactgaaaatatagtgaaggaagcgtaagcaatttttctgctatatttatgcattgtatccttgtaaaattatcaatattgttctgacttgtggggaaaggtatgagagtattcatttttttgcctcttttctgtttgcattccttcttcagtataatgtttgttagaataaccaggtgaatttacaaatttcatatccatatactttcttcgatgacaaatataaatctacctaggtttgtcataactcataggtcaatcattctaacttcaattgacattttttataaaaagtatcataaggaaaataatatattatcataaaagtgacgtccatctatatcaaattttagatattgatggtggtcagagttaaaaaacagtttgccttaagacaaaccaagatgaacttgtatttacaatcgaaggaaatattgcacattgcctagacatttaatttattagataaattcttttgttagttgttcaactttgtacgtcttataagtcacaggaacaatgtttatctagaacttcggtctcaaattatacagtagtgttcagccatacctgccatgtcacaagaaagagagataaaaagtatttaatagtagacctaatgatgctcatttgtaattgtagatattcgtatatcctttttctgcaaccttgtgaaacatgtgatggtttgacttggaacaaactttgggtctgatatagtaaaatgcaatgtatgtggagggaagtagtagaacaagacagaacaagtgccaaataaggttatatagtagaatacaatgtgtggagggaaatagtagaacaacacaaaacaagtgccaaataaggttacaaggtttatagtagcgattgcttagctgctacaacgacactcatagattagcctggcatttgcaatgtcgctcttgtatttgccataacctcacttaaggtcacacattgcctctgggaccttgacctccgctactgttgtcgcctggccgcgtcgacttcaccaatgccggggtgtccaacctcatcagcttcaccgtcgtcgactgctcccacacaaccgagctgtgggtcctggtaccggtcgcgccccgcctctgctccttctgcttcagcgagtggcagactatcgatacactcgatttcaattgttttttacgctatttactgtattgcaatgggacaatggatgattaggatttgttttttaagactggcccatgatttatcgtcgtatactatttctttaatagattgttcgctacatctactgatctacatgttcacatgtttcaacttctgtcagcatccgtagttactatatgaatgctcattctgtgtcaccttttaagtttacaaatgctcttttccaggtcacatatggaaagtgaagaacccaaatgatttcttcacaggaagcttggaccaatcttcaactcatggggcgcttcatcctcggcctcctacgcatgcacttctcctgcttctcctgctggtcatcgcccaaggatgaattgctgctcttgaccatagggattggagcagcatgtagtttatactttatcctggttttctctctcgagatgttgcatggtgtcagtgtgtcagatgtgccgtaacagatgactccaaaatggattgcatgctcttcaaatagctacagataactatcttcacataaaatggagagtacaatgtttataaaagaaggaatatggataaggatccagattctcctatagcatatgaagaggcaaaggaaatggcaagccaaagctgcacaatttctgatgatcactcgttgttactgttatccattatctcctcagaggcattgcttttaaattcaacagcagacatggcaggtgcaggtcctatcctatccattatctacccctgcatgtgtgccagctattctactctatgtttcaatagtttggaaataattcagagctaaggttttctgatacaggatttgttattttgtatatcgatctgtgtcatttgacaaagtactttgacttggtataatatgagtgttacttcgaccaaaagagcttggtaaagtgtgagaaactccgcaaacttcttctgcagacgatgactagcaacagttatgacgagggtcaagatagccgccatacatgatacattgagtacaacatcaagataaacactccctccccacacacaacttttgccttccgttcactctgtatgttgtgtttattacggttgcatatgttgtgtttattatggcatcaacacgttccattagaaaatataactattgtttgtcaagtacaaaatcataatcacatcagcttgtaataatattgcatcactgttttgtaccaaattgtaagttgttgtagcaacgcacgggcaccctactagtatatagagtaagttatcattaaattctcaaagcatcacatcaaaatggcacaagacatttaaaacatacttttggatatatatatacacacacacgcccaaacaagctcttagttgggctgtcactttaac

SEQ ID NO: 63284 - DNA, 3890 bp, Zea Mays
tgatgtccaatactgctatagtagcttctccaagttatgacactgttaggaagatggttcaacttctctcgaaatgaagcttctgtcttcctatgtatagacaagttgttcagttaggaggtctagattctcttaaaatggtgctatctacgagttaggaggtctaggagcacactgaatgttttagaggttgatgaaatcgttgttttcctaaaaaagcattttttctgctttgtttgaaattgtttgggttttcctccccaactttcataattacctatttctattgtatgtttgatcatttggacttctactccatccacaattttggtttattcagtgaggaactatgtttttaaccactctatagtttgtatagacatgcaacattcatctcagggtcaagaaagaagctcaacttggcatgcttcctgtttaaagcaaggcaagaaacatccccgccagatctctgtcgccaaagcagggctggtgaagaagttgtgtttccctcccggattgtcactactttcatatttgttcatttatgtttgttccaatttatgttggttttttacagttacagaatatgtttgttccagttgagttccagtttgaaaactggaacaaccactagcagatgcaaagttcacaaagtagcttgtcaaataatgtgcatgaactggaacaagcaacttgtgcacgaatgagcattactggaacaagtagcttgtgcatgaacgagtaatactgtagatgattggacatgtatgtctattttagatttttaatatttaatgttatatattcagctcataccatacatgaatttgcatttctgtactatactcacttaatgtcctacctgttttgttagcttcaactatccgctttaaactgacaaaaccagaccaaacatatgcaaatctcatatacctgtgaaagcaacaactgatttgccagattggttaattaaacgtaacaataaatagccccgattaaatggcttataaatatacttggatctgttcatttttcacatatcagctattaatgaagccttcactgggttcattttgtactactccattacttatttacagttacaagtattctaagaaacttaatatttcatcatcaaagttgtattcagacagtttcatttacattgctctgattttttgtactaggagctactgacaatggaaagcaacgattagagtaacttgatgagtgaggactattcattcagttgcttcgatcaataagtgaactaatggatgcatgtttcttttgataagtgagctaactactttagtcacaaagttcgtgttgatttctaaacatggtatgatggttttgtcatcctattcgattgagtttgggaaaaagcctgcacattctgaaaacaaacagactgcacattgtgtggctgataaggttgagtgggtaaataagatcaaagctattatttagacatactgaaaatatagtgaaggaagcgtaagcaatttttctgctatatttatgcattgtatccttgtaaaattatcaatattgttctgacttgtggggaaaggtatgagagtattcatttttttgcctcttttctgtttgcattccttcttcagtataatgtttgttagaataaccaggtgaatttacaaatttcatatccatatactttcttcgatgacaaatataaatctacctaggtttgtcataactcataggtcaatcattctaacttcaattgacattttttataaaaagtatcataaggaaaataatatattatcataaaagtgacgtccatctatatcaaattttagatattgatggtggtcagagttaaaaaacagtttgccttaagacaaaccaagatgaacttgtatttacaatcgaaggaaatattgcacattgcctagacatttaatttattagataaattcttttgttagttgttcaactttgtacgtcttataagtcacaggaacaatgtttatctagaacttcggtctcaaattatacagtagtgttcagccatacctgccatgtcacaagaaagagagataaaaagtatttaatagtagacctaatgatgctcatttgtaattgtagatattcgtatatcctttttctgcaaccttgtgaaacatgtgatggtttgacttggaacaaactttgggtctgatatagtaaaatgcaatgtatgtggagggaagtagtagaacaagacagaacaagtgccaaataaggttatatagtagaatacaatgtgtggagggaaatagtagaacaacacaaaacaagtgccaaataaggttacaaggtttatagtagcgattgcttagctgctacaacgacactcatagattagcctggcatttgcaatgtcgctcttgtatttgccataacctcacttaaggtcacacattgcctctgggaccttgacctccgctactgttgtcgcctggccgcgtcgacttcaccaatgccggggtgtccaacctcatcagcttcaccgtcgtcgactgctcccacacaaccgagctgtgggtcctggtaccggtcgcgccccgcctctgctccttctgcttcagcgagtggcagactatcgatacactcgatttcaattgttttttacgctatttactgtattgcaatgggacaatggatgattaggatttgttttttaagactggcccatgatttatcgtcgtatactatttctttaatagattgttcgctacatctactgatctacatgttcacatgtttcaacttctgtcagcatccgtagttactatatgaatgctcattctgtgtcaccttttaagtttacaaatgctcttttccaggtcacatatggaaagtgaagaacccaaatgatttcttcacaggaagcttggaccaatcttcaactcatggggcgcttcatcctcggcctcctacgcatgcacttctcctgcttctcctgctggtcatcgcccaaggatgaattgctgctcttgaccatagggattggagcagcatgtagtttatactttatcctggttttctctctcgagtgtgtcagatgtgccgtaacagatgactccaaaatggattgcatgctcttcaaatagctacagataactatcttcacataaaatggagagtacaatgtttataaaagaaggaatatggataaggatccagattctcctatagcatatgaagaggcaaaggaaatggcaagccaaagctgcacaatttctgatgatcactcgttgttactgttatccattatctcctcagaggcattgcttttaaattcaacagcagacatggcaggatttgttattttgtatatcgatctgtgtcatttgacaaagtactttgacttggtataatatgagtgttacttcgaccaaaagagcttggtaaagtgtgagaaactccgcaaacttcttctgcagacgatgactagcaacagttatgacgagggtcaagatagccgccatacatgatacattgagtacaacatcaagataaacactccctccccacacacaacttttgccttccgttcactctgtatgttgtgtttattacggttgcatatgttgtgtttattatggcatcaacacgttccattagaaaatataactattgtttgtcaagtacaaaatcataatcacatcagcttgtaataatattgcatcactgttttgtaccaaattgtaagttgttgtagcaacgcacgggcaccctactagtatatagagtaagttatcattaaattctcaaagcatcacatcaaaatggcacaagacatttaaaacatacttttggatatatatatacacacacacgcccaaacaagctcttagttgggctgtcactttaac

SEQ ID NO: 63285 - DNA, 3094 bp, Zea Mays
tgatgtccaatactgctatagtagcttctccaagttatgacactgttaggaagatggttcaacttctctcgaaatgaagcttctgtcttcctatgtatagacaagttgttcagttaggaggtctagattctcttaaaatggtgctatctacgagttaggaggtctaggagcacactgaatgttttagaggttgatgaaatcgttgttttcctaaaaaagcattttttctgctttgtttgaaattgtttgggttttcctccccaactttcataattacctatttctattgtatgtttgatcatttggacttctactccatccacaattttggtttattcagtgaggaactatgtttttaaccactctatagtttgtatagacatgcaacattcatctcagggtcaagaaagaagctcaacttggcatgcttcctgtttaaagcaaggcaagaaacatccccgccagatctctgtcgccaaagcagggctggtgaagaagttgtgtttccctcccggattgtcactactttcatatttgttcatttatgtttgttccaatttatgttggttttttacagttacagaatatgtttgttccagttgagttccagtttgaaaactggaacaaccactagcagatgcaaagttcacaaagtagcttgtcaaataatgtgcatgaactggaacaagcaacttgtgcacgaatgagcattactggaacaagtagcttgtgcatgaacgagtaatactgtagatgattggacatgtatgtctattttagatttttaatatttaatgttatatattcagctcataccatacatgaatttgcatttctgtactatactcacttaatgtcctacctgttttgttagcttcaactatccgctttaaactgacaaaaccagaccaaacatatgcaaatctcatatacctgtgaaagcaacaactgatttgccagattggttaattaaacgtaacaataaatagccccgattaaatggcttataaatatacttggatctgttcatttttcacatatcagctattaatgaagccttcactgggttcattttgtactactccattacttatttacagttacaagtattctaagaaacttaatatttcatcatcaaagttgtattcagacagtttcatttacattgctctgattttttgtactaggagctactgacaatggaaagcaacgattagagtaacttgatgagtgaggactattcattcagttgcttcgatcaataagtgaactaatggatgcatgtttcttttgataagtcacatatggaaagtgaagaacccaaatgatttcttcacaggaagcttggaccaatcttcaactcatggggcgcttcatcctcggcctcctacgcatgcacttctcctgcttctcctgctggtcatcgcccaaggatgaattgctgctcttgaccatagggattggagcagcatgtagtttatactttatcctggttttctctctcgagatgttgcatggtgtcagtgtgtcagatgtgccgtaacagatgactccaaaatggattgcatgctcttcaaatagctacagataactatcttcacataaaatggagagtacaatgtttataaaagaaggaatatggataaggatccagattctcctatagcatatgaagaggcaaaggaaatggcaagccaaagctgcacaatttctgatgatcactcgttgttactgttatccattatctcctcagaggcattgcttttaaattcaacagcagacatggcaggtacgtgtccactttcttctcaaggaattgcactagaggttggactttgtgggtcaagagaaatttaatgcctattgttaatacaacctttagctatttttccatgatgatggagttggacaagtaccatattgagtataagtgttagcctattatatctttgtacaaccatggcaaacgaataatttcttataacaccatgaagataatgtttaacgaagtgtgtttgcgtgcgtgtgtaatttcttcttttgttttgctgctaagtttgatagttcaaaacatgattcttgtaaagtttggttttagtctaacaaatacactcaagtcctgacatgtaaactgtaaagttggactgttgcttggtggatctgtattgaactttattttttttaaaatgttttatggcttgtatagtttgtattcacttctcacctaagctacaatttgtttttccagcctttcaagatttggcacattgacataatgacatgggttggtcacggattggatgtcaattttgctccctgtaccttgtagattatcggttatgtcaattttcgaaatttctatcgtgatggataacatttgaataaaacatagttaaataaacatgactactgtttcagtctttcgaaattctgatgctatagtgtcagtatactatgtcattttagggaaaatatatgtcatgtttattttgataaaattatatgatttctcactcaattcttgtcggtggcttcaggatttgttattttgtatatcgatctgtgtcatttgacaaagtactttgacttggtataatatgagtgttacttcgaccaaaagagcttggtaaagtgtgagaaactccgcaaacttcttctgcagacgatgactagcaacagttatgacgagggtcaagatagccgccatacatgatacattgagtacaacatcaagataaacactccctccccacacacaacttttgccttccgttcactctgtatgttgtgtttattacggttgcatatgttgtgtttattatggcatcaacacgttccattagaaaatataactattgtttgtcaagtacaaaatcataatcacatcagcttgtaataatattgcatcactgttttgtaccaaattgtaagttgttgtagcaacgcacgggcaccctactagtatatagagtaagttatcattaaattctcaaagcatcacatcaaaatggcacaagacatttaaaacatacttttggatatatatatacacacacacgcccaaacaagctcttagttgggctgtcactttaac

SEQ ID NO: 63286 - DNA, 3019 bp, Zea Mays
tgatgtccaatactgctatagtagcttctccaagttatgacactgttaggaagatggttcaacttctctcgaaatgaagcttctgtcttcctatgtatagacaagttgttcagttaggaggtctagattctcttaaaatggtgctatctacgagttaggaggtctaggagcacactgaatgttttagaggttgatgaaatcgttgttttcctaaaaaagcattttttctgctttgtttgaaattgtttgggttttcctccccaactttcataattacctatttctattgtatgtttgatcatttggacttctactccatccacaattttggtttattcagtgaggaactatgtttttaaccactctatagtttgtatagacatgcaacattcatctcagggtcaagaaagaagctcaacttggcatgcttcctgtttaaagcaaggcaagaaacatccccgccagatctctgtcgccaaagcagggctggtgaagaagttgtgtttccctcccggattgtcactactttcatatttgttcatttatgtttgttccaatttatgttggttttttacagttacagaatatgtttgttccagttgagttccagtttgaaaactggaacaaccactagcagatgcaaagttcacaaagtagcttgtcaaataatgtgcatgaactggaacaagcaacttgtgcacgaatgagcattactggaacaagtagcttgtgcatgaacgagtaatactgtagatgattggacatgtatgtctattttagatttttaatatttaatgttatatattcagctcataccatacatgaatttgcatttctgtactatactcacttaatgtcctacctgttttgttagcttcaactatccgctttaaactgacaaaaccagaccaaacatatgcaaatctcatatacctgtgaaagcaacaactgatttgccagattggttaattaaacgtaacaataaatagccccgattaaatggcttataaatatacttggatctgttcatttttcacatatcagctattaatgaagccttcactgggttcattttgtactactccattacttatttacagttacaagtattctaagaaacttaatatttcatcatcaaagttgtattcagacagtttcatttacattgctctgattttttgtactaggagctactgacaatggaaagcaacgattagagtaacttgatgagtgaggactattcattcagttgcttcgatcaataagtgaactaatggatgcatgtttcttttgataagtcacatatggaaagtgaagaacccaaatgatttcttcacaggaagcttggaccaatcttcaactcatggggcgcttcatcctcggcctcctacgcatgcacttctcctgcttctcctgctggtcatcgcccaagatgttgcatggtgtcagtgtgtcagatgtgccgtaacagatgactccaaaatggattgcatgctcttcaaatagctacagataactatcttcacataaaatggagagtacaatgtttataaaagaaggaatatggataaggatccagattctcctatagcatatgaagaggcaaaggaaatggcaagccaaagctgcacaatttctgatgatcactcgttgttactgttatccattatctcctcagaggcattgcttttaaattcaacagcagacatggcaggtacgtgtccactttcttctcaaggaattgcactagaggttggactttgtgggtcaagagaaatttaatgcctattgttaatacaacctttagctatttttccatgatgatggagttggacaagtaccatattgagtataagtgttagcctattatatctttgtacaaccatggcaaacgaataatttcttataacaccatgaagataatgtttaacgaagtgtgtttgcgtgcgtgtgtaatttcttcttttgttttgctgctaagtttgatagttcaaaacatgattcttgtaaagtttggttttagtctaacaaatacactcaagtcctgacatgtaaactgtaaagttggactgttgcttggtggatctgtattgaactttattttttttaaaatgttttatggcttgtatagtttgtattcacttctcacctaagctacaatttgtttttccagcctttcaagatttggcacattgacataatgacatgggttggtcacggattggatgtcaattttgctccctgtaccttgtagattatcggttatgtcaattttcgaaatttctatcgtgatggataacatttgaataaaacatagttaaataaacatgactactgtttcagtctttcgaaattctgatgctatagtgtcagtatactatgtcattttagggaaaatatatgtcatgtttattttgataaaattatatgatttctcactcaattcttgtcggtggcttcaggatttgttattttgtatatcgatctgtgtcatttgacaaagtactttgacttggtataatatgagtgttacttcgaccaaaagagcttggtaaagtgtgagaaactccgcaaacttcttctgcagacgatgactagcaacagttatgacgagggtcaagatagccgccatacatgatacattgagtacaacatcaagataaacactccctccccacacacaacttttgccttccgttcactctgtatgttgtgtttattacggttgcatatgttgtgtttattatggcatcaacacgttccattagaaaatataactattgtttgtcaagtacaaaatcataatcacatcagcttgtaataatattgcatcactgttttgtaccaaattgtaagttgttgtagcaacgcacgggcaccctactagtatatagagtaagttatcattaaattctcaaagcatcacatcaaaatggcacaagacatttaaaacatacttttggatatatatatacacacacacgcccaaacaagctcttagttgggctgtcactttaac

SEQ ID NO: 63287 - DNA, 4284 bp, Zea Mays
tgatgtccaatactgctatagtagcttctccaagttatgacactgttaggaagatggttcaacttctctcgaaatgaagcttctgtcttcctatgtatagacaagttgttcagttaggaggtctagattctcttaaaatggtgctatctacgagttaggaggtctaggagcacactgaatgttttagaggttgatgaaatcgttgttttcctaaaaaagcattttttctgctttgtttgaaattgtttgggttttcctccccaactttcataattacctatttctattgtatgtttgatcatttggacttctactccatccacaattttggtttattcagtgaggaactatgtttttaaccactctatagtttgtatagacatgcaacattcatctcagggtcaagaaagaagctcaacttggcatgcttcctgtttaaagcaaggcaagaaacatccccgccagatctctgtcgccaaagcagggctggtgaagaagttgtgtttccctcccggattgtcactactttcatatttgttcatttatgtttgttccaatttatgttggttttttacagttacagaatatgtttgttccagttgagttccagtttgaaaactggaacaaccactagcagatgcaaagttcacaaagtagcttgtcaaataatgtgcatgaactggaacaagcaacttgtgcacgaatgagcattactggaacaagtagcttgtgcatgaacgagtaatactgtagatgattggacatgtatgtctattttagatttttaatatttaatgttatatattcagctcataccatacatgaatttgcatttctgtactatactcacttaatgtcctacctgttttgttagcttcaactatccgctttaaactgacaaaaccagaccaaacatatgcaaatctcatatacctgtgaaagcaacaactgatttgccagattggttaattaaacgtaacaataaatagccccgattaaatggcttataaatatacttggatctgttcatttttcacatatcagctattaatgaagccttcactgggttcattttgtactactccattacttatttacagttacaagtattctaagaaacttaatatttcatcatcaaagttgtattcagacagtttcatttacattgctctgattttttgtactaggagctactgacaatggaaagcaacgattagagtaacttgatgagtgaggactattcattcagttgcttcgatcaataagtgaactaatggatgcatgtttcttttgataagtgagctaactactttagtcacaaagttcgtgttgatttctaaacatggtatgatggttttgtcatcctattcgattgagtttgggaaaaagcctgcacattctgaaaacaaacagactgcacattgtgtggctgataaggttgagtgggtaaataagatcaaagctattatttagacatactgaaaatatagtgaaggaagcgtaagcaatttttctgctatatttatgcattgtatccttgtaaaattatcaatattgttctgacttgtggggaaaggtatgagagtattcatttttttgcctcttttctgtttgcattccttcttcagtataatgtttgttagaataaccaggtgaatttacaaatttcatatccatatactttcttcgatgacaaatataaatctacctaggtttgtcataactcataggtcaatcattctaacttcaattgacattttttataaaaagtatcataaggaaaataatatattatcataaaagtgacgtccatctatatcaaattttagatattgatggtggtcagagttaaaaaacagtttgccttaagacaaaccaagatgaacttgtatttacaatcgaaggaaatattgcacattgcctagacatttaatttattagataaattcttttgttagttgttcaactttgtacgtcttataagtcacaggaacaatgtttatctagaacttcggtctcaaattatacagtagtgttcagccatacctgccatgtcacaagaaagagagataaaaagtatttaatagtagacctaatgatgctcatttgtaattgtagatattcgtatatcctttttctgcaaccttgtgaaacatgtgatggtttgacttggaacaaactttgggtctgatatagtaaaatgcaatgtatgtggagggaagtagtagaacaagacagaacaagtgccaaataaggttatatagtagaatacaatgtgtggagggaaatagtagaacaacacaaaacaagtgccaaataaggttacaaggtttatagtagcgattgcttagctgctacaacgacactcatagattagcctggcatttgcaatgtcgctcttgtatttgccataacctcacttaaggtcacacattgcctctgggaccttgacctccgctactgttgtcgcctggccgcgtcgacttcaccaatgccggggtgtccaacctcatcagcttcaccgtcgtcgactgctcccacacaaccgagctgtgggtcctggtcacatatggaaagtgaagaacccaaatgatttcttcacaggaagcttggaccaatcttcaactcatggggcgcttcatcctcggcctcctacgcatgcacttctcctgcttctcctgctggtcatcgcccaagatgttgcatggtgtcagtgtgtcagatgtgccgtaacagatgactccaaaatggattgcatgctcttcaaatagctacagataactatcttcacataaaatggagagtacaatgtttataaaagaaggaatatggataaggatccagattctcctatagcatatgaagaggcaaaggaaatggcaagccaaagctgcacaatttctgatgatcactcgttgttactgttatccattatctcctcagaggcattgcttttaaattcaacagcagacatggcaggtacgtgtccactttcttctcaaggaattgcactagaggttggactttgtgggtcaagagaaatttaatgcctattgttaatacaacctttagctatttttccatgatgatggagttggacaagtaccatattgagtataagtgttagcctattatatctttgtacaaccatggcaaacgaataatttcttataacaccatgaagataatgtttaacgaagtgtgtttgcgtgcgtgtgtaatttcttcttttgttttgctgctaagtttgatagttcaaaacatgattcttgtaaagtttggttttagtctaacaaatacactcaagtcctgacatgtaaactgtaaagttggactgttgcttggtggatctgtattgaactttattttttttaaaatgttttatggcttgtatagtttgtattcacttctcacctaagctacaatttgtttttccagcctttcaagatttggcacattgacataatgacatgggttggtcacggattggatgtcaattttgctccctgtaccttgtagattatcggttatgtcaattttcgaaatttctatcgtgatggataacatttgaataaaacatagttaaataaacatgactactgtttcagtctttcgaaattctgatgctatagtgtcagtatactatgtcattttagggaaaatatatgtcatgtttattttgataaaattatatgatttctcactcaattcttgtcggtggcttcaggatttgttattttgtatatcgatctgtgtcatttgacaaagtactttgacttggtataatatgagtgttacttcgaccaaaagagcttggtaaagtgtgagaaactccgcaaacttcttctgcagacgatgactagcaacagttatgacgagggtcaagatagccgccatacatgatacattgagtacaacatcaagataaacactccctccccacacacaacttttgccttccgttcactctgtatgttgtgtttattacggttgcatatgttgtgtttattatggcatcaacacgttccattagaaaatataactattgtttgtcaagtacaaaatcataatcacatcagcttgtaataatattgcatcactgttttgtaccaaattgtaagttgttgtagcaacgcacgggcaccctactagtatatagagtaagttatcattaaattctcaaagcatcacatcaaaatggcacaagacatttaaaacatacttttggatatatatatacacacacacgcccaaacaagctcttagttgggctgtcactttaac

SEQ ID NO: 63288 - DNA, 4303 bp, Zea Mays
tgatgtccaatactgctatagtagcttctccaagttatgacactgttaggaagatggttcaacttctctcgaaatgaagcttctgtcttcctatgtatagacaagttgttcagttaggaggtctagattctcttaaaatggtgctatctacgagttaggaggtctaggagcacactgaatgttttagaggttgatgaaatcgttgttttcctaaaaaagcattttttctgctttgtttgaaattgtttgggttttcctccccaactttcataattacctatttctattgtatgtttgatcatttggacttctactccatccacaattttggtttattcagtgaggaactatgtttttaaccactctatagtttgtatagacatgcaacattcatctcagggtcaagaaagaagctcaacttggcatgcttcctgtttaaagcaaggcaagaaacatccccgccagatctctgtcgccaaagcagggctggtgaagaagttgtgtttccctcccggattgtcactactttcatatttgttcatttatgtttgttccaatttatgttggttttttacagttacagaatatgtttgttccagttgagttccagtttgaaaactggaacaaccactagcagatgcaaagttcacaaagtagcttgtcaaataatgtgcatgaactggaacaagcaacttgtgcacgaatgagcattactggaacaagtagcttgtgcatgaacgagtaatactgtagatgattggacatgtatgtctattttagatttttaatatttaatgttatatattcagctcataccatacatgaatttgcatttctgtactatactcacttaatgtcctacctgttttgttagcttcaactatccgctttaaactgacaaaaccagaccaaacatatgcaaatctcatatacctgtgaaagcaacaactgatttgccagattggttaattaaacgtaacaataaatagccccgattaaatggcttataaatatacttggatctgttcatttttcacatatcagctattaatgaagccttcactgggttcattttgtactactccattacttatttacagttacaagtattctaagaaacttaatatttcatcatcaaagttgtattcagacagtttcatttacattgctctgattttttgtactaggagctactgacaatggaaagcaacgattagagtaacttgatgagtgaggactattcattcagttgcttcgatcaataagtgaactaatggatgcatgtttcttttgataagtgagctaactactttagtcacaaagttcgtgttgatttctaaacatggtatgatggttttgtcatcctattcgattgagtttgggaaaaagcctgcacattctgaaaacaaacagactgcacattgtgtggctgataaggttgagtgggtaaataagatcaaagctattatttagacatactgaaaatatagtgaaggaagcgtaagcaatttttctgctatatttatgcattgtatccttgtaaaattatcaatattgttctgacttgtggggaaaggtatgagagtattcatttttttgcctcttttctgtttgcattccttcttcagtataatgtttgttagaataaccaggtgaatttacaaatttcatatccatatactttcttcgatgacaaatataaatctacctaggtttgtcataactcataggtcaatcattctaacttcaattgacattttttataaaaagtatcataaggaaaataatatattatcataaaagtgacgtccatctatatcaaattttagatattgatggtggtcagagttaaaaaacagtttgccttaagacaaaccaagatgaacttgtatttacaatcgaaggaaatattgcacattgcctagacatttaatttattagataaattcttttgttagttgttcaactttgtacgtcttataagtcacaggaacaatgtttatctagaacttcggtctcaaattatacagtagtgttcagccatacctgccatgtcacaagaaagagagataaaaagtatttaatagtagacctaatgatgctcatttgtaattgtagatattcgtatatcctttttctgcaaccttgtgaaacatgtgatggtttgacttggaacaaactttgggtctgatatagtaaaatgcaatgtatgtggagggaagtagtagaacaagacagaacaagtgccaaataaggttatatagtagaatacaatgtgtggagggaaatagtagaacaacacaaaacaagtgccaaataaggttacaaggtttatagtagcgattgcttagctgctacaacgacactcatagattagcctggcatttgcaatgtcgctcttgtatttgccataacctcacttaaggtcacacattgcctctgggaccttgacctccgctactgttgtcgcctggccgcgtcgacttcaccaatgccggggtgtccaacctcatcagcttcaccgtcgtcgactgctcccacacaaccgagctgtgggtcctggtaccggtcgcgccccgcctctgctccttctgcttcagcgagtggcagactatcgatacactcgatttcaattgttttttacgctatttactgtattgcaatgggacaatggatgattaggatttgttttttaagactggcccatgatttatcgtcgtatactatttctttaatagattgttcgctacatctactgatctacatgttcacatgtttcaacttctgtcagcatccgtagttactatatgaatgctcattctgtgtcaccttttaagtttacaaatgctcttttccaggtcacatatggaaagtgaagaacccaaatgatttcttcacaggaagcttggaccaatcttcaactcatggggcgcttcatcctcggcctcctacgcatgcacttctcctgcttctcctgctggtcatcgcccaaggtgcacttttcctccctgttctgttcacgtgcccatgtgtcattcttgtttttcactgtttaggatcgtgagggtgttattgcaataatagctgatggagaaatgagaatgattttcaaatgatgacaggattggcagaatgagagcgacaaaggaatgagctaaatcttttgaaatatgaagcaatatgatttctttccagtgttatatttttttatttcctatgcatttcttaaaagtgctattacatgttcacctactaatacccttgtttttcttgcatctcaaggatgaattgctgctcttgaccatagggattggagcagcatgtagtttatactttatcctggttttctctctcgagatgttgcatggtgtcagtgtgtcagatgtgccgtaacagatgactccaaaatggattgcatgctcttcaaatagctacagataactatcttcacataaaatggagagtacaatgtttataaaagaaggaatatggataaggatccagattctcctatagcatatgaagaggcaaaggaaatggcaagccaaagctgcacaatttctgatgatcactcgttgttactgttatccattatctcctcagaggcattgcttttaaattcaacagcagacatggcaggtgcaggtcctatcctatccattatctacccctgcatgtgtgccagctattctactctatgtttcaatagtttggaaataattcagagctaaggttttctgatacaggatttgttattttgtatatcgatctgtgtcatttgacaaagtactttgacttggtataatatgagtgttacttcgaccaaaagagcttggtaaagtgtgagaaactccgcaaacttcttctgcagacgatgactagcaacagttatgacgagggtcaagatagccgccatacatgatacattgagtacaacatcaagataaacactccctccccacacacaacttttgccttccgttcactctgtatgttgtgtttattacggttgcatatgttgtgtttattatggcatcaacacgttccattagaaaatataactattgtttgtcaagtacaaaatcataatcacatcagcttgtaataatattgcatcactgttttgtaccaaattgtaagttgttgtagcaacgcacgggcaccctactagtatatagagtaagttatcattaaattctcaaagcatcacatcaaaatggcacaagacatttaaaacatacttttggatatatatatacacacacacgcccaaacaagctcttagttgggctgtcactttaac

SEQ ID NO: 63289 - DNA, 2436 bp, Zea Mays
tgatgtccaatactgctatagtagcttctccaagttatgacactgttaggaagatggttcaacttctctcgaaatgaagcttctgtcttcctatgtatagacaagttgttcagttaggaggtctagattctcttaaaatggtgctatctacgagttaggaggtctaggagcacactgaatgttttagaggttgatgaaatcgttgttttcctaaaaaagcattttttctgctttgtttgaaattgtttgggttttcctccccaactttcataattacctatttctattgtatgtttgatcatttggacttctactccatccacaattttggtttattcagtgaggaactatgtttttaaccactctatagtttgtatagacatgcaacattcatctcagggtcaagaaagaagctcaacttggcatgcttcctgtttaaagcaaggcaagaaacatccccgccagatctctgtcgccaaagcagggctggtgaagaagttgtgtttccctcccggattgtcactactttcatatttgttcatttatgtttgttccaatttatgttggttttttacagttacagaatatgtttgttccagttgagttccagtttgaaaactggaacaaccactagcagatgcaaagttcacaaagtagcttgtcaaataatgtgcatgaactggaacaagcaacttgtgcacgaatgagcattactggaacaagtagcttgtgcatgaacgagtaatactgtagatgattggacatgtatgtctattttagatttttaatatttaatgttatatattcagctcataccatacatgaatttgcatttctgtactatactcacttaatgtcctacctgttttgttagcttcaactatccgctttaaactgacaaaaccagaccaaacatatgcaaatctcatatacctgtgaaagcaacaactgatttgccagattggttaattaaacgtaacaataaatagccccgattaaatggcttataaatatacttggatctgttcatttttcacatatcagctattaatgaagccttcactgggttcattttgtactactccattacttatttacagttacaagtattctaagaaacttaatatttcatcatcaaagttgtattcagacagtttcatttacattgctctgattttttgtactaggagctactgacaatggaaagcaacgattagagtaacttgatgagtgaggactattcattcagttgcttcgatcaataagtgaactaatggatgcatgtttcttttgataagtcacatatggaaagtgaagaacccaaatgatttcttcacaggaagcttggaccaatcttcaactcatggggcgcttcatcctcggcctcctacgcatgcacttctcctgcttctcctgctggtcatcgcccaaggatgaattgctgctcttgaccatagggattggagcagcatgtagtttatactttatcctggttttctctctcgagtgtgtcagatgtgccgtaacagatgactccaaaatggattgcatgctcttcaaatagctacagataactatcttcacataaaatggagagtacaatgtttataaaagaaggaatatggataaggatccagattctcctatagcatatgaagaggcaaaggaaatggcaagccaaagctgcacaatttctgatgatcactcgttgttactgttatccattatctcctcagaggcattgcttttaaattcaacagcagacatggcaggtgcaggtcctatcctatccattatctacccctgcatgtgtgccagctattctactctatgtttcaatagtttggaaataattcagagctaaggttttctgatacaggatttgttattttgtatatcgatctgtgtcatttgacaaagtactttgacttggtataatatgagtgttacttcgaccaaaagagcttggtaaagtgtgagaaactccgcaaacttcttctgcagacgatgactagcaacagttatgacgagggtcaagatagccgccatacatgatacattgagtacaacatcaagataaacactccctccccacacacaacttttgccttccgttcactctgtatgttgtgtttattacggttgcatatgttgtgtttattatggcatcaacacgttccattagaaaatataactattgtttgtcaagtacaaaatcataatcacatcagcttgtaataatattgcatcactgttttgtaccaaattgtaagttgttgtagcaacgcacgggcaccctactagtatatagagtaagttatcattaaattctcaaagcatcacatcaaaatggcacaagacatttaaaacatacttttggatatatatatacacacacacgcccaaacaagctcttagttgggctgtcactttaac

SEQ ID NO: 63290 - DNA, 4655 bp, Zea Mays
tgatgtccaatactgctatagtagcttctccaagttatgacactgttaggaagatggttcaacttctctcgaaatgaagcttctgtcttcctatgtatagacaagttgttcagttaggaggtctagattctcttaaaatggtgctatctacgagttaggaggtctaggagcacactgaatgttttagaggttgatgaaatcgttgttttcctaaaaaagcattttttctgctttgtttgaaattgtttgggttttcctccccaactttcataattacctatttctattgtatgtttgatcatttggacttctactccatccacaattttggtttattcagtgaggaactatgtttttaaccactctatagtttgtatagacatgcaacattcatctcagggtcaagaaagaagctcaacttggcatgcttcctgtttaaagcaaggcaagaaacatccccgccagatctctgtcgccaaagcagggctggtgaagaagttgtgtttccctcccggattgtcactactttcatatttgttcatttatgtttgttccaatttatgttggttttttacagttacagaatatgtttgttccagttgagttccagtttgaaaactggaacaaccactagcagatgcaaagttcacaaagtagcttgtcaaataatgtgcatgaactggaacaagcaacttgtgcacgaatgagcattactggaacaagtagcttgtgcatgaacgagtaatactgtagatgattggacatgtatgtctattttagatttttaatatttaatgttatatattcagctcataccatacatgaatttgcatttctgtactatactcacttaatgtcctacctgttttgttagcttcaactatccgctttaaactgacaaaaccagaccaaacatatgcaaatctcatatacctgtgaaagcaacaactgatttgccagattggttaattaaacgtaacaataaatagccccgattaaatggcttataaatatacttggatctgttcatttttcacatatcagctattaatgaagccttcactgggttcattttgtactactccattacttatttacagttacaagtattctaagaaacttaatatttcatcatcaaagttgtattcagacagtttcatttacattgctctgattttttgtactaggagctactgacaatggaaagcaacgattagagtaacttgatgagtgaggactattcattcagttgcttcgatcaataagtgaactaatggatgcatgtttcttttgataagtgagctaactactttagtcacaaagttcgtgttgatttctaaacatggtatgatggttttgtcatcctattcgattgagtttgggaaaaagcctgcacattctgaaaacaaacagactgcacattgtgtggctgataaggttgagtgggtaaataagatcaaagctattatttagacatactgaaaatatagtgaaggaagcgtaagcaatttttctgctatatttatgcattgtatccttgtaaaattatcaatattgttctgacttgtggggaaaggtatgagagtattcatttttttgcctcttttctgtttgcattccttcttcagtataatgtttgttagaataaccaggtgaatttacaaatttcatatccatatactttcttcgatgacaaatataaatctacctaggtttgtcataactcataggtcaatcattctaacttcaattgacattttttataaaaagtatcataaggaaaataatatattatcataaaagtgacgtccatctatatcaaattttagatattgatggtggtcagagttaaaaaacagtttgccttaagacaaaccaagatgaacttgtatttacaatcgaaggaaatattgcacattgcctagacatttaatttattagataaattcttttgttagttgttcaactttgtacgtcttataagtcacaggaacaatgtttatctagaacttcggtctcaaattatacagtagtgttcagccatacctgccatgtcacaagaaagagagataaaaagtatttaatagtagacctaatgatgctcatttgtaattgtagatattcgtatatcctttttctgcaaccttgtgaaacatgtgatggtttgacttggaacaaactttgggtctgatatagtaaaatgcaatgtatgtggagggaagtagtagaacaagacagaacaagtgccaaataaggttatatagtagaatacaatgtgtggagggaaatagtagaacaacacaaaacaagtgccaaataaggttacaaggtttatagtagcgattgcttagctgctacaacgacactcatagattagcctggcatttgcaatgtcgctcttgtatttgccataacctcacttaaggtcacacattgcctctgggaccttgacctccgctactgttgtcgcctggccgcgtcgacttcaccaatgccggggtgtccaacctcatcagcttcaccgtcgtcgactgctcccacacaaccgagctgtgggtcctggtaccggtcgcgccccgcctctgctccttctgcttcagcgagtggcagactatcgatacactcgatttcaattgttttttacgctatttactgtattgcaatgggacaatggatgattaggatttgttttttaagactggcccatgatttatcgtcgtatactatttctttaatagattgttcgctacatctactgatctacatgttcacatgtttcaacttctgtcagcatccgtagttactatatgaatgctcattctgtgtcaccttttaagtttacaaatgctcttttccaggtcacatatggaaagtgaagaacccaaatgatttcttcacaggaagcttggaccaatcttcaactcatggggcgcttcatcctcggcctcctacgcatgcacttctcctgcttctcctgctggtcatcgcccaaggatgaattgctgctcttgaccatagggattggagcagcatgtagtttatactttatcctggttttctctctcgagatgttgcatggtgtcagtgtgtcagatgtgccgtaacagatgactccaaaatggattgcatgctcttcaaatagctacagataactatcttcacataaaatggagagtacaatgtttataaaagaaggaatatggataaggatccagattctcctatagcatatgaagaggcaaaggaaatggcaagccaaagctgcacaatttctgatgatcactcgttgttactgttatccattatctcctcagaggcattgcttttaaattcaacagcagacatggcaggtacgtgtccactttcttctcaaggaattgcactagaggttggactttgtgggtcaagagaaatttaatgcctattgttaatacaacctttagctatttttccatgatgatggagttggacaagtaccatattgagtataagtgttagcctattatatctttgtacaaccatggcaaacgaataatttcttataacaccatgaagataatgtttaacgaagtgtgtttgcgtgcgtgtgtaatttcttcttttgttttgctgctaagtttgatagttcaaaacatgattcttgtaaagtttggttttagtctaacaaatacactcaagtcctgacatgtaaactgtaaagttggactgttgcttggtggatctgtattgaactttattttttttaaaatgttttatggcttgtatagtttgtattcacttctcacctaagctacaatttgtttttccagcctttcaagatttggcacattgacataatgacatgggttggtcacggattggatgtcaattttgctccctgtaccttgtagattatcggttatgtcaattttcgaaatttctatcgtgatggataacatttgaataaaacatagttaaataaacatgactactgtttcagtctttcgaaattctgatgctatagtgtcagtatactatgtcattttagggaaaatatatgtcatgtttattttgataaaattatatgatttctcactcaattcttgtcggtggcttcaggatttgttattttgtatatcgatctgtgtcatttgacaaagtactttgacttggtataatatgagtgttacttcgaccaaaagagcttggtaaagtgtgagaaactccgcaaacttcttctgcagacgatgactagcaacagttatgacgagggtcaagatagccgccatacatgatacattgagtacaacatcaagataaacactccctccccacacacaacttttgccttccgttcactctgtatgttgtgtttattacggttgcatatgttgtgtttattatggcatcaacacgttccattagaaaatataactattgtttgtcaagtacaaaatcataatcacatcagcttgtaataatattgcatcactgttttgtaccaaattgtaagttgttgtagcaacgcacgggcaccctactagtatatagagtaagttatcattaaattctcaaagcatcacatcaaaatggcacaagacatttaaaacatacttttggatatatatatacacacacacgcccaaacaagctcttagttgggctgtcactttaac

SEQ ID NO: 63291 - DNA, 3815 bp, Zea Mays
tgatgtccaatactgctatagtagcttctccaagttatgacactgttaggaagatggttcaacttctctcgaaatgaagcttctgtcttcctatgtatagacaagttgttcagttaggaggtctagattctcttaaaatggtgctatctacgagttaggaggtctaggagcacactgaatgttttagaggttgatgaaatcgttgttttcctaaaaaagcattttttctgctttgtttgaaattgtttgggttttcctccccaactttcataattacctatttctattgtatgtttgatcatttggacttctactccatccacaattttggtttattcagtgaggaactatgtttttaaccactctatagtttgtatagacatgcaacattcatctcagggtcaagaaagaagctcaacttggcatgcttcctgtttaaagcaaggcaagaaacatccccgccagatctctgtcgccaaagcagggctggtgaagaagttgtgtttccctcccggattgtcactactttcatatttgttcatttatgtttgttccaatttatgttggttttttacagttacagaatatgtttgttccagttgagttccagtttgaaaactggaacaaccactagcagatgcaaagttcacaaagtagcttgtcaaataatgtgcatgaactggaacaagcaacttgtgcacgaatgagcattactggaacaagtagcttgtgcatgaacgagtaatactgtagatgattggacatgtatgtctattttagatttttaatatttaatgttatatattcagctcataccatacatgaatttgcatttctgtactatactcacttaatgtcctacctgttttgttagcttcaactatccgctttaaactgacaaaaccagaccaaacatatgcaaatctcatatacctgtgaaagcaacaactgatttgccagattggttaattaaacgtaacaataaatagccccgattaaatggcttataaatatacttggatctgttcatttttcacatatcagctattaatgaagccttcactgggttcattttgtactactccattacttatttacagttacaagtattctaagaaacttaatatttcatcatcaaagttgtattcagacagtttcatttacattgctctgattttttgtactaggagctactgacaatggaaagcaacgattagagtaacttgatgagtgaggactattcattcagttgcttcgatcaataagtgaactaatggatgcatgtttcttttgataagtgagctaactactttagtcacaaagttcgtgttgatttctaaacatggtatgatggttttgtcatcctattcgattgagtttgggaaaaagcctgcacattctgaaaacaaacagactgcacattgtgtggctgataaggttgagtgggtaaataagatcaaagctattatttagacatactgaaaatatagtgaaggaagcgtaagcaatttttctgctatatttatgcattgtatccttgtaaaattatcaatattgttctgacttgtggggaaaggtatgagagtattcatttttttgcctcttttctgtttgcattccttcttcagtataatgtttgttagaataaccaggtgaatttacaaatttcatatccatatactttcttcgatgacaaatataaatctacctaggtttgtcataactcataggtcaatcattctaacttcaattgacattttttataaaaagtatcataaggaaaataatatattatcataaaagtgacgtccatctatatcaaattttagatattgatggtggtcagagttaaaaaacagtttgccttaagacaaaccaagatgaacttgtatttacaatcgaaggaaatattgcacattgcctagacatttaatttattagataaattcttttgttagttgttcaactttgtacgtcttataagtcacaggaacaatgtttatctagaacttcggtctcaaattatacagtagtgttcagccatacctgccatgtcacaagaaagagagataaaaagtatttaatagtagacctaatgatgctcatttgtaattgtagatattcgtatatcctttttctgcaaccttgtgaaacatgtgatggtttgacttggaacaaactttgggtctgatatagtaaaatgcaatgtatgtggagggaagtagtagaacaagacagaacaagtgccaaataaggttatatagtagaatacaatgtgtggagggaaatagtagaacaacacaaaacaagtgccaaataaggttacaaggtttatagtagcgattgcttagctgctacaacgacactcatagattagcctggcatttgcaatgtcgctcttgtatttgccataacctcacttaaggtcacacattgcctctgggaccttgacctccgctactgttgtcgcctggccgcgtcgacttcaccaatgccggggtgtccaacctcatcagcttcaccgtcgtcgactgctcccacacaaccgagctgtgggtcctggtaccggtcgcgccccgcctctgctccttctgcttcagcgagtggcagactatcgatacactcgatttcaattgttttttacgctatttactgtattgcaatgggacaatggatgattaggatttgttttttaagactggcccatgatttatcgtcgtatactatttctttaatagattgttcgctacatctactgatctacatgttcacatgtttcaacttctgtcagcatccgtagttactatatgaatgctcattctgtgtcaccttttaagtttacaaatgctcttttccaggtcacatatggaaagtgaagaacccaaatgatttcttcacaggaagcttggaccaatcttcaactcatggggcgcttcatcctcggcctcctacgcatgcacttctcctgcttctcctgctggtcatcgcccaagtgtgtcagatgtgccgtaacagatgactccaaaatggattgcatgctcttcaaatagctacagataactatcttcacataaaatggagagtacaatgtttataaaagaaggaatatggataaggatccagattctcctatagcatatgaagaggcaaaggaaatggcaagccaaagctgcacaatttctgatgatcactcgttgttactgttatccattatctcctcagaggcattgcttttaaattcaacagcagacatggcaggatttgttattttgtatatcgatctgtgtcatttgacaaagtactttgacttggtataatatgagtgttacttcgaccaaaagagcttggtaaagtgtgagaaactccgcaaacttcttctgcagacgatgactagcaacagttatgacgagggtcaagatagccgccatacatgatacattgagtacaacatcaagataaacactccctccccacacacaacttttgccttccgttcactctgtatgttgtgtttattacggttgcatatgttgtgtttattatggcatcaacacgttccattagaaaatataactattgtttgtcaagtacaaaatcataatcacatcagcttgtaataatattgcatcactgttttgtaccaaattgtaagttgttgtagcaacgcacgggcaccctactagtatatagagtaagttatcattaaattctcaaagcatcacatcaaaatggcacaagacatttaaaacatacttttggatatatatatacacacacacgcccaaacaagctcttagttgggctgtcactttaac

SEQ ID NO: 63292 - DNA, 4286 bp, Zea Mays
tgatgtccaatactgctatagtagcttctccaagttatgacactgttaggaagatggttcaacttctctcgaaatgaagcttctgtcttcctatgtatagacaagttgttcagttaggaggtctagattctcttaaaatggtgctatctacgagttaggaggtctaggagcacactgaatgttttagaggttgatgaaatcgttgttttcctaaaaaagcattttttctgctttgtttgaaattgtttgggttttcctccccaactttcataattacctatttctattgtatgtttgatcatttggacttctactccatccacaattttggtttattcagtgaggaactatgtttttaaccactctatagtttgtatagacatgcaacattcatctcagggtcaagaaagaagctcaacttggcatgcttcctgtttaaagcaaggcaagaaacatccccgccagatctctgtcgccaaagcagggctggtgaagaagttgtgtttccctcccggattgtcactactttcatatttgttcatttatgtttgttccaatttatgttggttttttacagttacagaatatgtttgttccagttgagttccagtttgaaaactggaacaaccactagcagatgcaaagttcacaaagtagcttgtcaaataatgtgcatgaactggaacaagcaacttgtgcacgaatgagcattactggaacaagtagcttgtgcatgaacgagtaatactgtagatgattggacatgtatgtctattttagatttttaatatttaatgttatatattcagctcataccatacatgaatttgcatttctgtactatactcacttaatgtcctacctgttttgttagcttcaactatccgctttaaactgacaaaaccagaccaaacatatgcaaatctcatatacctgtgaaagcaacaactgatttgccagattggttaattaaacgtaacaataaatagccccgattaaatggcttataaatatacttggatctgttcatttttcacatatcagctattaatgaagccttcactgggttcattttgtactactccattacttatttacagttacaagtattctaagaaacttaatatttcatcatcaaagttgtattcagacagtttcatttacattgctctgattttttgtactaggagctactgacaatggaaagcaacgattagagtaacttgatgagtgaggactattcattcagttgcttcgatcaataagtgaactaatggatgcatgtttcttttgataagtgagctaactactttagtcacaaagttcgtgttgatttctaaacatggtatgatggttttgtcatcctattcgattgagtttgggaaaaagcctgcacattctgaaaacaaacagactgcacattgtgtggctgataaggttgagtgggtaaataagatcaaagctattatttagacatactgaaaatatagtgaaggaagcgtaagcaatttttctgctatatttatgcattgtatccttgtaaaattatcaatattgttctgacttgtggggaaaggtatgagagtattcatttttttgcctcttttctgtttgcattccttcttcagtataatgtttgttagaataaccaggtgaatttacaaatttcatatccatatactttcttcgatgacaaatataaatctacctaggtttgtcataactcataggtcaatcattctaacttcaattgacattttttataaaaagtatcataaggaaaataatatattatcataaaagtgacgtccatctatatcaaattttagatattgatggtggtcagagttaaaaaacagtttgccttaagacaaaccaagatgaacttgtatttacaatcgaaggaaatattgcacattgcctagacatttaatttattagataaattcttttgttagttgttcaactttgtacgtcttataagtcacaggaacaatgtttatctagaacttcggtctcaaattatacagtagtgttcagccatacctgccatgtcacaagaaagagagataaaaagtatttaatagtagacctaatgatgctcatttgtaattgtagatattcgtatatcctttttctgcaaccttgtgaaacatgtgatggtttgacttggaacaaactttgggtctgatatagtaaaatgcaatgtatgtggagggaagtagtagaacaagacagaacaagtgccaaataaggttatatagtagaatacaatgtgtggagggaaatagtagaacaacacaaaacaagtgccaaataaggttacaaggtttatagtagcgattgcttagctgctacaacgacactcatagattagcctggcatttgcaatgtcgctcttgtatttgccataacctcacttaaggtcacacattgcctctgggaccttgacctccgctactgttgtcgcctggccgcgtcgacttcaccaatgccggggtgtccaacctcatcagcttcaccgtcgtcgactgctcccacacaaccgagctgtgggtcctggtaccggtcgcgccccgcctctgctccttctgcttcagcgagtggcagactatcgatacactcgatttcaattgttttttacgctatttactgtattgcaatgggacaatggatgattaggatttgttttttaagactggcccatgatttatcgtcgtatactatttctttaatagattgttcgctacatctactgatctacatgttcacatgtttcaacttctgtcagcatccgtagttactatatgaatgctcattctgtgtcaccttttaagtttacaaatgctcttttccaggtcacatatggaaagtgaagaacccaaatgatttcttcacaggaagcttggaccaatcttcaactcatggggcgcttcatcctcggcctcctacgcatgcacttctcctgcttctcctgctggtcatcgcccaaggtgcacttttcctccctgttctgttcacgtgcccatgtgtcattcttgtttttcactgtttaggatcgtgagggtgttattgcaataatagctgatggagaaatgagaatgattttcaaatgatgacaggattggcagaatgagagcgacaaaggaatgagctaaatcttttgaaatatgaagcaatatgatttctttccagtgttatatttttttatttcctatgcatttcttaaaagtgctattacatgttcacctactaatacccttgtttttcttgcatctcaaggatgaattgctgctcttgaccatagggattggagcagcatgtagtttatactttatcctggttttctctctcgagtgtgtcagatgtgccgtaacagatgactccaaaatggattgcatgctcttcaaatagctacagataactatcttcacataaaatggagagtacaatgtttataaaagaaggaatatggataaggatccagattctcctatagcatatgaagaggcaaaggaaatggcaagccaaagctgcacaatttctgatgatcactcgttgttactgttatccattatctcctcagaggcattgcttttaaattcaacagcagacatggcaggtgcaggtcctatcctatccattatctacccctgcatgtgtgccagctattctactctatgtttcaatagtttggaaataattcagagctaaggttttctgatacaggatttgttattttgtatatcgatctgtgtcatttgacaaagtactttgacttggtataatatgagtgttacttcgaccaaaagagcttggtaaagtgtgagaaactccgcaaacttcttctgcagacgatgactagcaacagttatgacgagggtcaagatagccgccatacatgatacattgagtacaacatcaagataaacactccctccccacacacaacttttgccttccgttcactctgtatgttgtgtttattacggttgcatatgttgtgtttattatggcatcaacacgttccattagaaaatataactattgtttgtcaagtacaaaatcataatcacatcagcttgtaataatattgcatcactgttttgtaccaaattgtaagttgttgtagcaacgcacgggcaccctactagtatatagagtaagttatcattaaattctcaaagcatcacatcaaaatggcacaagacatttaaaacatacttttggatatatatatacacacacacgcccaaacaagctcttagttgggctgtcactttaac

SEQ ID NO: 63293 - DNA, 2503 bp, Zea Mays
tgatgtccaatactgctatagtagcttctccaagttatgacactgttaggaagatggttcaacttctctcgaaatgaagcttctgtcttcctatgtatagacaagttgttcagttaggaggtctagattctcttaaaatggtgctatctacgagttaggaggtctaggagcacactgaatgttttagaggttgatgaaatcgttgttttcctaaaaaagcattttttctgctttgtttgaaattgtttgggttttcctccccaactttcataattacctatttctattgtatgtttgatcatttggacttctactccatccacaattttggtttattcagtgaggaactatgtttttaaccactctatagtttgtatagacatgcaacattcatctcagggtcaagaaagaagctcaacttggcatgcttcctgtttaaagcaagttacagaatatgtttgttccagttgagttccagtttgaaaactggaacaaccactagcagatgcaaagttcacaaagtagcttgtcaaataatgtgcatgaactggaacaagcaacttgtgcacgaatgagcattactggaacaagtagcttgtgcatgaacgagtaatactgtagatgattggacatgtatgtctattttagatttttaatatttaatgttatatattcagctcataccatacatgaatttgcatttctgtactatactcacttaatgtcctacctgttttgttagcttcaactatccgctttaaactgacaaaaccagaccaaacatatgcaaatctcatatacctgtgaaagcaacaactgatttgccagattggttaattaaacgtaacaataaatagccccgattaaatggcttataaatatacttggatctgttcatttttcacatatcagctattaatgaagccttcactgggttcattttgtactactccattacttatttacagttacaagtattctaagaaacttaatatttcatcatcaaagttgtattcagacagtttcatttacattgctctgattttttgtactaggagctactgacaatggaaagcaacgattagagtaacttgatgagtgaggactattcattcagttgcttcgatcaataagtgaactaatggatgcatgtttcttttgataagtcacatatggaaagtgaagaacccaaatgatttcttcacaggaagcttggaccaatcttcaactcatggggcgcttcatcctcggcctcctacgcatgcacttctcctgcttctcctgctggtcatcgcccaaggatgaattgctgctcttgaccatagggattggagcagcatgtagtttatactttatcctggttttctctctcgagatgttgcatggtgtcagtgtgtcagatgtgccgtaacagatgactccaaaatggattgcatgctcttcaaatagctacagataactatcttcacataaaatggagagtacaatgtttataaaagaaggaatatggataaggatccagattctcctatagcatatgaagaggcaaaggaaatggcaagccaaagctgcacaatttctgatgatcactcgttgttactgttatccattatctcctcagaggcattgcttttaaattcaacagcagacatggcagcctttcaagatttggcacattgacataatgacatgggttggtcacggattggatgtcaattttgctccctgtaccttgtagattatcggttatgtcaattttcgaaatttctatcgtgatggataacatttgaataaaacatagttaaataaacatgactactgtttcagtctttcgaaattctgatgctatagtgtcagtatactatgtcattttagggaaaatatatgtcatgtttattttgataaaattatatgatttctcactcaattcttgtcggtggcttcaggatttgttattttgtatatcgatctgtgtcatttgacaaagtactttgacttggtataatatgagtgttacttcgaccaaaagagcttggtaaagtgtgagaaactccgcaaacttcttctgcagacgatgactagcaacagttatgacgagggtcaagatagccgccatacatgatacattgagtacaacatcaagataaacactccctccccacacacaacttttgccttccgttcactctgtatgttgtgtttattacggttgcatatgttgtgtttattatggcatcaacacgttccattagaaaatataactattgtttgtcaagtacaaaatcataatcacatcagcttgtaataatattgcatcactgttttgtaccaaattgtaagttgttgtagcaacgcacgggcaccctactagtatatagagtaagttatcattaaattctcaaagcatcacatcaaaatggcacaagacatttaaaacatacttttggatatatatatacacacacacgcccaaacaagctcttagttgggctgtcactttaac

SEQ ID NO: 63294 - DNA, 3939 bp, Zea Mays
tgatgtccaatactgctatagtagcttctccaagttatgacactgttaggaagatggttcaacttctctcgaaatgaagcttctgtcttcctatgtatagacaagttgttcagttaggaggtctagattctcttaaaatggtgctatctacgagttaggaggtctaggagcacactgaatgttttagaggttgatgaaatcgttgttttcctaaaaaagcattttttctgctttgtttgaaattgtttgggttttcctccccaactttcataattacctatttctattgtatgtttgatcatttggacttctactccatccacaattttggtttattcagtgaggaactatgtttttaaccactctatagtttgtatagacatgcaacattcatctcagggtcaagaaagaagctcaacttggcatgcttcctgtttaaagcaaggcaagaaacatccccgccagatctctgtcgccaaagcagggctggtgaagaagttgtgtttccctcccggattgtcactactttcatatttgttcatttatgtttgttccaatttatgttggttttttacagttacagaatatgtttgttccagttgagttccagtttgaaaactggaacaaccactagcagatgcaaagttcacaaagtagcttgtcaaataatgtgcatgaactggaacaagcaacttgtgcacgaatgagcattactggaacaagtagcttgtgcatgaacgagtaatactgtagatgattggacatgtatgtctattttagatttttaatatttaatgttatatattcagctcataccatacatgaatttgcatttctgtactatactcacttaatgtcctacctgttttgttagcttcaactatccgctttaaactgacaaaaccagaccaaacatatgcaaatctcatatacctgtgaaagcaacaactgatttgccagattggttaattaaacgtaacaataaatagccccgattaaatggcttataaatatacttggatctgttcatttttcacatatcagctattaatgaagccttcactgggttcattttgtactactccattacttatttacagttacaagtattctaagaaacttaatatttcatcatcaaagttgtattcagacagtttcatttacattgctctgattttttgtactaggagctactgacaatggaaagcaacgattagagtaacttgatgagtgaggactattcattcagttgcttcgatcaataagtgaactaatggatgcatgtttcttttgataagtgagctaactactttagtcacaaagttcgtgttgatttctaaacatggtatgatggttttgtcatcctattcgattgagtttgggaaaaagcctgcacattctgaaaacaaacagactgcacattgtgtggctgataaggttgagtgggtaaataagatcaaagctattatttagacatactgaaaatatagtgaaggaagcgtaagcaatttttctgctatatttatgcattgtatccttgtaaaattatcaatattgttctgacttgtggggaaaggtatgagagtattcatttttttgcctcttttctgtttgcattccttcttcagtataatgtttgttagaataaccaggtgaatttacaaatttcatatccatatactttcttcgatgacaaatataaatctacctaggtttgtcataactcataggtcaatcattctaacttcaattgacattttttataaaaagtatcataaggaaaataatatattatcataaaagtgacgtccatctatatcaaattttagatattgatggtggtcagagttaaaaaacagtttgccttaagacaaaccaagatgaacttgtatttacaatcgaaggaaatattgcacattgcctagacatttaatttattagataaattcttttgttagttgttcaactttgtacgtcttataagtcacaggaacaatgtttatctagaacttcggtctcaaattatacagtagtgttcagccatacctgccatgtcacaagaaagagagataaaaagtatttaatagtagacctaatgatgctcatttgtaattgtagatattcgtatatcctttttctgcaaccttgtgaaacatgtgatggtttgacttggaacaaactttgggtctgatatagtaaaatgcaatgtatgtggagggaagtagtagaacaagacagaacaagtgccaaataaggttatatagtagaatacaatgtgtggagggaaatagtagaacaacacaaaacaagtgccaaataaggttacaaggtttatagtagcgattgcttagctgctacaacgacactcatagattagcctggcatttgcaatgtcgctcttgtatttgccataacctcacttaaggtcacacattgcctctgggaccttgacctccgctactgttgtcgcctggccgcgtcgacttcaccaatgccggggtgtccaacctcatcagcttcaccgtcgtcgactgctcccacacaaccgagctgtgggtcctggtaccggtcgcgccccgcctctgctccttctgcttcagcgagtggcagactatcgatacactcgatttcaattgttttttacgctatttactgtattgcaatgggacaatggatgattaggatttgttttttaagactggcccatgatttatcgtcgtatactatttctttaatagattgttcgctacatctactgatctacatgttcacatgtttcaacttctgtcagcatccgtagttactatatgaatgctcattctgtgtcaccttttaagtttacaaatgctcttttccaggtcacatatggaaagtgaagaacccaaatgatttcttcacaggaagcttggaccaatcttcaactcatggggcgcttcatcctcggcctcctacgcatgcacttctcctgcttctcctgctggtcatcgcccaagatgttgcatggtgtcagtgtgtcagatgtgccgtaacagatgactccaaaatggattgcatgctcttcaaatagctacagataactatcttcacataaaatggagagtacaatgtttataaaagaaggaatatggataaggatccagattctcctatagcatatgaagaggcaaaggaaatggcaagccaaagctgcacaatttctgatgatcactcgttgttactgttatccattatctcctcagaggcattgcttttaaattcaacagcagacatggcaggtgcaggtcctatcctatccattatctacccctgcatgtgtgccagctattctactctatgtttcaatagtttggaaataattcagagctaaggttttctgatacaggatttgttattttgtatatcgatctgtgtcatttgacaaagtactttgacttggtataatatgagtgttacttcgaccaaaagagcttggtaaagtgtgagaaactccgcaaacttcttctgcagacgatgactagcaacagttatgacgagggtcaagatagccgccatacatgatacattgagtacaacatcaagataaacactccctccccacacacaacttttgccttccgttcactctgtatgttgtgtttattacggttgcatatgttgtgtttattatggcatcaacacgttccattagaaaatataactattgtttgtcaagtacaaaatcataatcacatcagcttgtaataatattgcatcactgttttgtaccaaattgtaagttgttgtagcaacgcacgggcaccctactagtatatagagtaagttatcattaaattctcaaagcatcacatcaaaatggcacaagacatttaaaacatacttttggatatatatatacacacacacgcccaaacaagctcttagttgggctgtcactttaac

SEQ ID NO: 63295 - DNA, 4196 bp, Zea Mays
tgatgtccaatactgctatagtagcttctccaagttatgacactgttaggaagatggttcaacttctctcgaaatgaagcttctgtcttcctatgtatagacaagttgttcagttaggaggtctagattctcttaaaatggtgctatctacgagttaggaggtctaggagcacactgaatgttttagaggttgatgaaatcgttgttttcctaaaaaagcattttttctgctttgtttgaaattgtttgggttttcctccccaactttcataattacctatttctattgtatgtttgatcatttggacttctactccatccacaattttggtttattcagtgaggaactatgtttttaaccactctatagtttgtatagacatgcaacattcatctcagggtcaagaaagaagctcaacttggcatgcttcctgtttaaagcaaggcaagaaacatccccgccagatctctgtcgccaaagcagggctggtgaagaagttgtgtttccctcccggattgtcactactttcatatttgttcatttatgtttgttccaatttatgttggttttttacagttacagaatatgtttgttccagttgagttccagtttgaaaactggaacaaccactagcagatgcaaagttcacaaagtagcttgtcaaataatgtgcatgaactggaacaagcaacttgtgcacgaatgagcattactggaacaagtagcttgtgcatgaacgagtaatactgtagatgattggacatgtatgtctattttagatttttaatatttaatgttatatattcagctcataccatacatgaatttgcatttctgtactatactcacttaatgtcctacctgttttgttagcttcaactatccgctttaaactgacaaaaccagaccaaacatatgcaaatctcatatacctgtgaaagcaacaactgatttgccagattggttaattaaacgtaacaataaatagccccgattaaatggcttataaatatacttggatctgttcatttttcacatatcagctattaatgaagccttcactgggttcattttgtactactccattacttatttacagttacaagtattctaagaaacttaatatttcatcatcaaagttgtattcagacagtttcatttacattgctctgattttttgtactaggagctactgacaatggaaagcaacgattagagtaacttgatgagtgaggactattcattcagttgcttcgatcaataagtgaactaatggatgcatgtttcttttgataagtgagctaactactttagtcacaaagttcgtgttgatttctaaacatggtatgatggttttgtcatcctattcgattgagtttgggaaaaagcctgcacattctgaaaacaaacagactgcacattgtgtggctgataaggttgagtgggtaaataagatcaaagctattatttagacatactgaaaatatagtgaaggaagcgtaagcaatttttctgctatatttatgcattgtatccttgtaaaattatcaatattgttctgacttgtggggaaaggtatgagagtattcatttttttgcctcttttctgtttgcattccttcttcagtataatgtttgttagaataaccaggtgaatttacaaatttcatatccatatactttcttcgatgacaaatataaatctacctaggtttgtcataactcataggtcaatcattctaacttcaattgacattttttataaaaagtatcataaggaaaataatatattatcataaaagtgacgtccatctatatcaaattttagatattgatggtggtcagagttaaaaaacagtttgccttaagacaaaccaagatgaacttgtatttacaatcgaaggaaatattgcacattgcctagacatttaatttattagataaattcttttgttagttgttcaactttgtacgtcttataagtcacaggaacaatgtttatctagaacttcggtctcaaattatacagtagtgttcagccatacctgccatgtcacaagaaagagagataaaaagtatttaatagtagacctaatgatgctcatttgtaattgtagatattcgtatatcctttttctgcaaccttgtgaaacatgtgatggtttgacttggaacaaactttgggtctgatatagtaaaatgcaatgtatgtggagggaagtagtagaacaagacagaacaagtgccaaataaggttatatagtagaatacaatgtgtggagggaaatagtagaacaacacaaaacaagtgccaaataaggttacaaggtttatagtagcgattgcttagctgctacaacgacactcatagattagcctggcatttgcaatgtcgctcttgtatttgccataacctcacttaaggtcacacattgcctctgggaccttgacctccgctactgttgtcgcctggccgcgtcgacttcaccaatgccggggtgtccaacctcatcagcttcaccgtcgtcgactgctcccacacaaccgagctgtgggtcctggtaccggtcgcgccccgcctctgctccttctgcttcagcgagtggcagactatcgatacactcgatttcaattgttttttacgctatttactgtattgcaatgggacaatggatgattaggatttgttttttaagactggcccatgatttatcgtcgtatactatttctttaatagattgttcgctacatctactgatctacatgttcacatgtttcaacttctgtcagcatccgtagttactatatgaatgctcattctgtgtcaccttttaagtttacaaatgctcttttccaggtcacatatggaaagtgaagaacccaaatgatttcttcacaggaagcttggaccaatcttcaactcatggggcgcttcatcctcggcctcctacgcatgcacttctcctgcttctcctgctggtcatcgcccaaggatgaattgctgctcttgaccatagggattggagcagcatgtagtttatactttatcctggttttctctctcgagatgttgcatggtgtcagtgtgtcagatgtgccgtaacagatgactccaaaatggattgcatgctcttcaaatagctacagataactatcttcacataaaatggagagtacaatgtttataaaagaaggaatatggataaggatccagattctcctatagcatatgaagaggcaaaggaaatggcaagccaaagctgcacaatttctgatgatcactcgttgttactgttatccattatctcctcagaggcattgcttttaaattcaacagcagacatggcagcctttcaagatttggcacattgacataatgacatgggttggtcacggattggatgtcaattttgctccctgtaccttgtagattatcggttatgtcaattttcgaaatttctatcgtgatggataacatttgaataaaacatagttaaataaacatgactactgtttcagtctttcgaaattctgatgctatagtgtcagtatactatgtcattttagggaaaatatatgtcatgtttattttgataaaattatatgatttctcactcaattcttgtcggtggcttcaggatttgttattttgtatatcgatctgtgtcatttgacaaagtactttgacttggtataatatgagtgttacttcgaccaaaagagcttggtaaagtgtgagaaactccgcaaacttcttctgcagacgatgactagcaacagttatgacgagggtcaagatagccgccatacatgatacattgagtacaacatcaagataaacactccctccccacacacaacttttgccttccgttcactctgtatgttgtgtttattacggttgcatatgttgtgtttattatggcatcaacacgttccattagaaaatataactattgtttgtcaagtacaaaatcataatcacatcagcttgtaataatattgcatcactgttttgtaccaaattgtaagttgttgtagcaacgcacgggcaccctactagtatatagagtaagttatcattaaattctcaaagcatcacatcaaaatggcacaagacatttaaaacatacttttggatatatatatacacacacacgcccaaacaagctcttagttgggctgtcactttaac

SEQ ID NO: 63296 - DNA, 4944 bp, Zea Mays
tgatgtccaatactgctatagtagcttctccaagttatgacactgttaggaagatggttcaacttctctcgaaatgaagcttctgtcttcctatgtatagacaagttgttcagttaggaggtctagattctcttaaaatggtgctatctacgagttaggaggtctaggagcacactgaatgttttagaggttgatgaaatcgttgttttcctaaaaaagcattttttctgctttgtttgaaattgtttgggttttcctccccaactttcataattacctatttctattgtatgtttgatcatttggacttctactccatccacaattttggtttattcagtgaggaactatgtttttaaccactctatagtttgtatagacatgcaacattcatctcagggtcaagaaagaagctcaacttggcatgcttcctgtttaaagcaaggcaagaaacatccccgccagatctctgtcgccaaagcagggctggtgaagaagttgtgtttccctcccggattgtcactactttcatatttgttcatttatgtttgttccaatttatgttggttttttacagttacagaatatgtttgttccagttgagttccagtttgaaaactggaacaaccactagcagatgcaaagttcacaaagtagcttgtcaaataatgtgcatgaactggaacaagcaacttgtgcacgaatgagcattactggaacaagtagcttgtgcatgaacgagtaatactgtagatgattggacatgtatgtctattttagatttttaatatttaatgttatatattcagctcataccatacatgaatttgcatttctgtactatactcacttaatgtcctacctgttttgttagcttcaactatccgctttaaactgacaaaaccagaccaaacatatgcaaatctcatatacctgtgaaagcaacaactgatttgccagattggttaattaaacgtaacaataaatagccccgattaaatggcttataaatatacttggatctgttcatttttcacatatcagctattaatgaagccttcactgggttcattttgtactactccattacttatttacagttacaagtattctaagaaacttaatatttcatcatcaaagttgtattcagacagtttcatttacattgctctgattttttgtactaggagctactgacaatggaaagcaacgattagagtaacttgatgagtgaggactattcattcagttgcttcgatcaataagtgaactaatggatgcatgtttcttttgataagtgagctaactactttagtcacaaagttcgtgttgatttctaaacatggtatgatggttttgtcatcctattcgattgagtttgggaaaaagcctgcacattctgaaaacaaacagactgcacattgtgtggctgataaggttgagtgggtaaataagatcaaagctattatttagacatactgaaaatatagtgaaggaagcgtaagcaatttttctgctatatttatgcattgtatccttgtaaaattatcaatattgttctgacttgtggggaaaggtatgagagtattcatttttttgcctcttttctgtttgcattccttcttcagtataatgtttgttagaataaccaggtgaatttacaaatttcatatccatatactttcttcgatgacaaatataaatctacctaggtttgtcataactcataggtcaatcattctaacttcaattgacattttttataaaaagtatcataaggaaaataatatattatcataaaagtgacgtccatctatatcaaattttagatattgatggtggtcagagttaaaaaacagtttgccttaagacaaaccaagatgaacttgtatttacaatcgaaggaaatattgcacattgcctagacatttaatttattagataaattcttttgttagttgttcaactttgtacgtcttataagtcacaggaacaatgtttatctagaacttcggtctcaaattatacagtagtgttcagccatacctgccatgtcacaagaaagagagataaaaagtatttaatagtagacctaatgatgctcatttgtaattgtagatattcgtatatcctttttctgcaaccttgtgaaacatgtgatggtttgacttggaacaaactttgggtctgatatagtaaaatgcaatgtatgtggagggaagtagtagaacaagacagaacaagtgccaaataaggttatatagtagaatacaatgtgtggagggaaatagtagaacaacacaaaacaagtgccaaataaggttacaaggtttatagtagcgattgcttagctgctacaacgacactcatagattagcctggcatttgcaatgtcgctcttgtatttgccataacctcacttaaggtcacacattgcctctgggaccttgacctccgctactgttgtcgcctggccgcgtcgacttcaccaatgccggggtgtccaacctcatcagcttcaccgtcgtcgactgctcccacacaaccgagctgtgggtcctggtaccggtcgcgccccgcctctgctccttctgcttcagcgagtggcagactatcgatacactcgatttcaattgttttttacgctatttactgtattgcaatgggacaatggatgattaggatttgttttttaagactggcccatgatttatcgtcgtatactatttctttaatagattgttcgctacatctactgatctacatgttcacatgtttcaacttctgtcagcatccgtagttactatatgaatgctcattctgtgtcaccttttaagtttacaaatgctcttttccaggtcacatatggaaagtgaagaacccaaatgatttcttcacaggaagcttggaccaatcttcaactcatggggcgcttcatcctcggcctcctacgcatgcacttctcctgcttctcctgctggtcatcgcccaaggtgcacttttcctccctgttctgttcacgtgcccatgtgtcattcttgtttttcactgtttaggatcgtgagggtgttattgcaataatagctgatggagaaatgagaatgattttcaaatgatgacaggattggcagaatgagagcgacaaaggaatgagctaaatcttttgaaatatgaagcaatatgatttctttccagtgttatatttttttatttcctatgcatttcttaaaagtgctattacatgttcacctactaatacccttgtttttcttgcatctcaaggatgaattgctgctcttgaccatagggattggagcagcatgtagtttatactttatcctggttttctctctcgagatgttgcatggtgtcagtgtgtcagatgtgccgtaacagatgactccaaaatggattgcatgctcttcaaatagctacagataactatcttcacataaaatggagagtacaatgtttataaaagaaggaatatggataaggatccagattctcctatagcatatgaagaggcaaaggaaatggcaagccaaagctgcacaatttctgatgatcactcgttgttactgttatccattatctcctcagaggcattgcttttaaattcaacagcagacatggcaggtacgtgtccactttcttctcaaggaattgcactagaggttggactttgtgggtcaagagaaatttaatgcctattgttaatacaacctttagctatttttccatgatgatggagttggacaagtaccatattgagtataagtgttagcctattatatctttgtacaaccatggcaaacgaataatttcttataacaccatgaagataatgtttaacgaagtgtgtttgcgtgcgtgtgtaatttcttcttttgttttgctgctaagtttgatagttcaaaacatgattcttgtaaagtttggttttagtctaacaaatacactcaagtcctgacatgtaaactgtaaagttggactgttgcttggtggatctgtattgaactttattttttttaaaatgttttatggcttgtatagtttgtattcacttctcacctaagctacaatttgtttttccagcctttcaagatttggcacattgacataatgacatgggttggtcacggattggatgtcaattttgctccctgtaccttgtagattatcggttatgtcaattttcgaaatttctatcgtgatggataacatttgaataaaacatagttaaataaacatgactactgtttcagtctttcgaaattctgatgctatagtgtcagtatactatgtcattttagggaaaatatatgtcatgtttattttgataaaattatatgatttctcactcaattcttgtcggtggcttcaggatttgttattttgtatatcgatctgtgtcatttgacaaagtactttgacttggtataatatgagtgttacttcgaccaaaagagcttggtaaagtgtgagaaactccgcaaacttcttctgcagacgatgactagcaacagttatgacgagggtcaagatagccgccatacatgatacattgagtacaacatcaagataaacactccctccccacacacaacttttgccttccgttcactctgtatgttgtgtttattacggttgcatatgttgtgtttattatggcatcaacacgttccattagaaaatataactattgtttgtcaagtacaaaatcataatcacatcagcttgtaataatattgcatcactgttttgtaccaaattgtaagttgttgtagcaacgcacgggcaccctactagtatatagagtaagttatcattaaattctcaaagcatcacatcaaaatggcacaagacatttaaaacatacttttggatatatatatacacacacacgcccaaacaagctcttagttgggctgtcactttaac

SEQ ID NO: 63297 - DNA, 3701 bp, Zea Mays
tgatgtccaatactgctatagtagcttctccaagttatgacactgttaggaagatggttcaacttctctcgaaatgaagcttctgtcttcctatgtatagacaagttgttcagttaggaggtctagattctcttaaaatggtgctatctacgagttaggaggtctaggagcacactgaatgttttagaggttgatgaaatcgttgttttcctaaaaaagcattttttctgctttgtttgaaattgtttgggttttcctccccaactttcataattacctatttctattgtatgtttgatcatttggacttctactccatccacaattttggtttattcagtgaggaactatgtttttaaccactctatagtttgtatagacatgcaacattcatctcagggtcaagaaagaagctcaacttggcatgcttcctgtttaaagcaaggcaagaaacatccccgccagatctctgtcgccaaagcagggctggtgaagaagttgtgtttccctcccggattgtcactactttcatatttgttcatttatgtttgttccaatttatgttggttttttacagttacagaatatgtttgttccagttgagttccagtttgaaaactggaacaaccactagcagatgcaaagttcacaaagtagcttgtcaaataatgtgcatgaactggaacaagcaacttgtgcacgaatgagcattactggaacaagtagcttgtgcatgaacgagtaatactgtagatgattggacatgtatgtctattttagatttttaatatttaatgttatatattcagctcataccatacatgaatttgcatttctgtactatactcacttaatgtcctacctgttttgttagcttcaactatccgctttaaactgacaaaaccagaccaaacatatgcaaatctcatatacctgtgaaagcaacaactgatttgccagattggttaattaaacgtaacaataaatagccccgattaaatggcttataaatatacttggatctgttcatttttcacatatcagctattaatgaagccttcactgggttcattttgtactactccattacttatttacagttacaagtattctaagaaacttaatatttcatcatcaaagttgtattcagacagtttcatttacattgctctgattttttgtactaggagctactgacaatggaaagcaacgattagagtaacttgatgagtgaggactattcattcagttgcttcgatcaataagtgaactaatggatgcatgtttcttttgataagtgagctaactactttagtcacaaagttcgtgttgatttctaaacatggtatgatggttttgtcatcctattcgattgagtttgggaaaaagcctgcacattctgaaaacaaacagactgcacattgtgtggctgataaggttgagtgggtaaataagatcaaagctattatttagacatactgaaaatatagtgaaggaagcgtaagcaatttttctgctatatttatgcattgtatccttgtaaaattatcaatattgttctgacttgtggggaaaggtatgagagtattcatttttttgcctcttttctgtttgcattccttcttcagtataatgtttgttagaataaccaggtgaatttacaaatttcatatccatatactttcttcgatgacaaatataaatctacctaggtttgtcataactcataggtcaatcattctaacttcaattgacattttttataaaaagtatcataaggaaaataatatattatcataaaagtgacgtccatctatatcaaattttagatattgatggtggtcagagttaaaaaacagtttgccttaagacaaaccaagatgaacttgtatttacaatcgaaggaaatattgcacattgcctagacatttaatttattagataaattcttttgttagttgttcaactttgtacgtcttataagtcacaggaacaatgtttatctagaacttcggtctcaaattatacagtagtgttcagccatacctgccatgtcacaagaaagagagataaaaagtatttaatagtagacctaatgatgctcatttgtaattgtagatattcgtatatcctttttctgcaaccttgtgaaacatgtgatggtttgacttggaacaaactttgggtctgatatagtaaaatgcaatgtatgtggagggaagtagtagaacaagacagaacaagtgccaaataaggttatatagtagaatacaatgtgtggagggaaatagtagaacaacacaaaacaagtgccaaataaggttacaaggtttatagtagcgattgcttagctgctacaacgacactcatagattagcctggcatttgcaatgtcgctcttgtatttgccataacctcacttaaggtcacacattgcctctgggaccttgacctccgctactgttgtcgcctggccgcgtcgacttcaccaatgccggggtgtccaacctcatcagcttcaccgtcgtcgactgctcccacacaaccgagctgtgggtcctggtcacatatggaaagtgaagaacccaaatgatttcttcacaggaagcttggaccaatcttcaactcatggggcgcttcatcctcggcctcctacgcatgcacttctcctgcttctcctgctggtcatcgcccaaggatgaattgctgctcttgaccatagggattggagcagcatgtagtttatactttatcctggttttctctctcgagtgtgtcagatgtgccgtaacagatgactccaaaatggattgcatgctcttcaaatagctacagataactatcttcacataaaatggagagtacaatgtttataaaagaaggaatatggataaggatccagattctcctatagcatatgaagaggcaaaggaaatggcaagccaaagctgcacaatttctgatgatcactcgttgttactgttatccattatctcctcagaggcattgcttttaaattcaacagcagacatggcaggtgcaggtcctatcctatccattatctacccctgcatgtgtgccagctattctactctatgtttcaatagtttggaaataattcagagctaaggttttctgatacaggatttgttattttgtatatcgatctgtgtcatttgacaaagtactttgacttggtataatatgagtgttacttcgaccaaaagagcttggtaaagtgtgagaaactccgcaaacttcttctgcagacgatgactagcaacagttatgacgagggtcaagatagccgccatacatgatacattgagtacaacatcaagataaacactccctccccacacacaacttttgccttccgttcactctgtatgttgtgtttattacggttgcatatgttgtgtttattatggcatcaacacgttccattagaaaatataactattgtttgtcaagtacaaaatcataatcacatcagcttgtaataatattgcatcactgttttgtaccaaattgtaagttgttgtagcaacgcacgggcaccctactagtatatagagtaagttatcattaaattctcaaagcatcacatcaaaatggcacaagacatttaaaacatacttttggatatatatatacacacacacgcccaaacaagctcttagttgggctgtcactttaac

SEQ ID NO: 63298 - DNA, 2560 bp, Zea Mays
tgatgtccaatactgctatagtagcttctccaagttatgacactgttaggaagatggttcaacttctctcgaaatgaagcttctgtcttcctatgtatagacaagttgttcagttaggaggtctagattctcttaaaatggtgctatctacgagttaggaggtctaggagcacactgaatgttttagaggttgatgaaatcgttgttttcctaaaaaagcattttttctgctttgtttgaaattgtttgggttttcctccccaactttcataattacctatttctattgtatgtttgatcatttggacttctactccatccacaattttggtttattcagtgaggaactatgtttttaaccactctatagtttgtatagacatgcaacattcatctcagggtcaagaaagaagctcaacttggcatgcttcctgtttaaagcaaggcaagaaacatccccgccagatctctgtcgccaaagcagggctggtgaagaagttgtgtttccctcccggattgtcactactttcatatttgttcatttatgtttgttccaatttatgttggttttttacagttacagaatatgtttgttccagttgagttccagtttgaaaactggaacaaccactagcagatgcaaagttcacaaagtagcttgtcaaataatgtgcatgaactggaacaagcaacttgtgcacgaatgagcattactggaacaagtagcttgtgcatgaacgagtaatactgtagatgattggacatgtatgtctattttagatttttaatatttaatgttatatattcagctcataccatacatgaatttgcatttctgtactatactcacttaatgtcctacctgttttgttagcttcaactatccgctttaaactgacaaaaccagaccaaacatatgcaaatctcatatacctgtgaaagcaacaactgatttgccagattggttaattaaacgtaacaataaatagccccgattaaatggcttataaatatacttggatctgttcatttttcacatatcagctattaatgaagccttcactgggttcattttgtactactccattacttatttacagttacaagtattctaagaaacttaatatttcatcatcaaagttgtattcagacagtttcatttacattgctctgattttttgtactaggagctactgacaatggaaagcaacgattagagtaacttgatgagtgaggactattcattcagttgcttcgatcaataagtgaactaatggatgcatgtttcttttgataagtcacatatggaaagtgaagaacccaaatgatttcttcacaggaagcttggaccaatcttcaactcatggggcgcttcatcctcggcctcctacgcatgcacttctcctgcttctcctgctggtcatcgcccaagatgttgcatggtgtcagtgtgtcagatgtgccgtaacagatgactccaaaatggattgcatgctcttcaaatagctacagataactatcttcacataaaatggagagtacaatgtttataaaagaaggaatatggataaggatccagattctcctatagcatatgaagaggcaaaggaaatggcaagccaaagctgcacaatttctgatgatcactcgttgttactgttatccattatctcctcagaggcattgcttttaaattcaacagcagacatggcagcctttcaagatttggcacattgacataatgacatgggttggtcacggattggatgtcaattttgctccctgtaccttgtagattatcggttatgtcaattttcgaaatttctatcgtgatggataacatttgaataaaacatagttaaataaacatgactactgtttcagtctttcgaaattctgatgctatagtgtcagtatactatgtcattttagggaaaatatatgtcatgtttattttgataaaattatatgatttctcactcaattcttgtcggtggcttcaggatttgttattttgtatatcgatctgtgtcatttgacaaagtactttgacttggtataatatgagtgttacttcgaccaaaagagcttggtaaagtgtgagaaactccgcaaacttcttctgcagacgatgactagcaacagttatgacgagggtcaagatagccgccatacatgatacattgagtacaacatcaagataaacactccctccccacacacaacttttgccttccgttcactctgtatgttgtgtttattacggttgcatatgttgtgtttattatggcatcaacacgttccattagaaaatataactattgtttgtcaagtacaaaatcataatcacatcagcttgtaataatattgcatcactgttttgtaccaaattgtaagttgttgtagcaacgcacgggcaccctactagtatatagagtaagttatcattaaattctcaaagcatcacatcaaaatggcacaagacatttaaaacatacttttggatatatatatacacacacacgcccaaacaagctcttagttgggctgtcactttaac

SEQ ID NO: 63299 - DNA, 3190 bp, Zea Mays
tgatgtccaatactgctatagtagcttctccaagttatgacactgttaggaagatggttcaacttctctcgaaatgaagcttctgtcttcctatgtatagacaagttgttcagttaggaggtctagattctcttaaaatggtgctatctacgagttaggaggtctaggagcacactgaatgttttagaggttgatgaaatcgttgttttcctaaaaaagcattttttctgctttgtttgaaattgtttgggttttcctccccaactttcataattacctatttctattgtatgtttgatcatttggacttctactccatccacaattttggtttattcagtgaggaactatgtttttaaccactctatagtttgtatagacatgcaacattcatctcagggtcaagaaagaagctcaacttggcatgcttcctgtttaaagcaaggcaagaaacatccccgccagatctctgtcgccaaagcagggctggtgaagaagttgtgtttccctcccggattgtcactactttcatatttgttcatttatgtttgttccaatttatgttggttttttacagttacagaatatgtttgttccagttgagttccagtttgaaaactggaacaaccactagcagatgcaaagttcacaaagtagcttgtcaaataatgtgcatgaactggaacaagcaacttgtgcacgaatgagcattactggaacaagtagcttgtgcatgaacgagtaatactgtagatgattggacatgtatgtctattttagatttttaatatttaatgttatatattcagctcataccatacatgaatttgcatttctgtactatactcacttaatgtcctacctgttttgttagcttcaactatccgctttaaactgacaaaaccagaccaaacatatgcaaatctcatatacctgtgaaagcaacaactgatttgccagattggttaattaaacgtaacaataaatagccccgattaaatggcttataaatatacttggatctgttcatttttcacatatcagctattaatgaagccttcactgggttcattttgtactactccattacttatttacagttacaagtattctaagaaacttaatatttcatcatcaaagttgtattcagacagtttcatttacattgctctgattttttgtactaggagctactgacaatggaaagcaacgattagagtaacttgatgagtgaggactattcattcagttgcttcgatcaataagtgaactaatggatgcatgtttcttttgataagtcacatatggaaagtgaagaacccaaatgatttcttcacaggaaggtgcttacatcttgcttccatgcctcgactgctaaccttcacacatctaataagatgaagcaacaagctagaaaatgtggaatttgtcatatgtccggatgcaaaacgggtaacttcatgctttccacaatgtgtgtcgacatgatgcttgtagagatgcttggaccaatcttcaactcatggggcgcttcatcctcggcctcctacgcatgcacttctcctgcttctcctgctggtcatcgcccaaggtgcacttttcctccctgttctgttcacgtgcccatgtgtcattcttgtttttcactgtttaggatcgtgagggtgttattgcaataatagctgatggagaaatgagaatgattttcaaatgatgacaggattggcagaatgagagcgacaaaggaatgagctaaatcttttgaaatatgaagcaatatgatttctttccagtgttatatttttttatttcctatgcatttcttaaaagtgctattacatgttcacctactaatacccttgtttttcttgcatctcaaggatgaattgctgctcttgaccatagggattggagcagcatgtagtttatactttatcctggttttctctctcgagatgttgcatggtgtcagtgtgtcagatgtgccgtaacagatgactccaaaatggattgcatgctcttcaaatagctacagataactatcttcacataaaatggagagtacaatgtttataaaagaaggaatatggataaggatccagattctcctatagcatatgaagaggcaaaggaaatggcaagccaaagctgcacaatttctgatgatcactcgttgttactgttatccattatctcctcagaggcattgcttttaaattcaacagcagacatggcaggtgcaggtcctatcctatccattatctacccctgcatgtgtgccagctattctactctatgtttcaatagtttggaaataattcagagctaaggttttctgatacagcctttcaagatttggcacattgacataatgacatgggttggtcacggattggatgtcaattttgctccctgtaccttgtagattatcggttatgtcaattttcgaaatttctatcgtgatggataacatttgaataaaacatagttaaataaacatgactactgtttcagtctttcgaaattctgatgctatagtgtcagtatactatgtcattttagggaaaatatatgtcatgtttattttgataaaattatatgatttctcactcaattcttgtcggtggcttcaggatttgttattttgtatatcgatctgtgtcatttgacaaagtactttgacttggtataatatgagtgttacttcgaccaaaagagcttggtaaagtgtgagaaactccgcaaacttcttctgcagacgatgactagcaacagttatgacgagggtcaagatagccgccatacatgatacattgagtacaacatcaagataaacactccctccccacacacaacttttgccttccgttcactctgtatgttgtgtttattacggttgcatatgttgtgtttattatggcatcaacacgttccattagaaaatataactattgtttgtcaagtacaaaatcataatcacatcagcttgtaataatattgcatcactgttttgtaccaaattgtaagttgttgtagcaacgcacgggcaccctactagtatatagagtaagttatcattaaattctcaaagcatcacatcaaaatggcacaagacatttaaaacatacttttggatatatatatacacacacacgcccaaacaagctcttagttgggctgtcactttaac

SEQ ID NO: 63300 - DNA, 3938 bp, Zea Mays
tgatgtccaatactgctatagtagcttctccaagttatgacactgttaggaagatggttcaacttctctcgaaatgaagcttctgtcttcctatgtatagacaagttgttcagttaggaggtctagattctcttaaaatggtgctatctacgagttaggaggtctaggagcacactgaatgttttagaggttgatgaaatcgttgttttcctaaaaaagcattttttctgctttgtttgaaattgtttgggttttcctccccaactttcataattacctatttctattgtatgtttgatcatttggacttctactccatccacaattttggtttattcagtgaggaactatgtttttaaccactctatagtttgtatagacatgcaacattcatctcagggtcaagaaagaagctcaacttggcatgcttcctgtttaaagcaaggcaagaaacatccccgccagatctctgtcgccaaagcagggctggtgaagaagttgtgtttccctcccggattgtcactactttcatatttgttcatttatgtttgttccaatttatgttggttttttacagttacagaatatgtttgttccagttgagttccagtttgaaaactggaacaaccactagcagatgcaaagttcacaaagtagcttgtcaaataatgtgcatgaactggaacaagcaacttgtgcacgaatgagcattactggaacaagtagcttgtgcatgaacgagtaatactgtagatgattggacatgtatgtctattttagatttttaatatttaatgttatatattcagctcataccatacatgaatttgcatttctgtactatactcacttaatgtcctacctgttttgttagcttcaactatccgctttaaactgacaaaaccagaccaaacatatgcaaatctcatatacctgtgaaagcaacaactgatttgccagattggttaattaaacgtaacaataaatagccccgattaaatggcttataaatatacttggatctgttcatttttcacatatcagctattaatgaagccttcactgggttcattttgtactactccattacttatttacagttacaagtattctaagaaacttaatatttcatcatcaaagttgtattcagacagtttcatttacattgctctgattttttgtactaggagctactgacaatggaaagcaacgattagagtaacttgatgagtgaggactattcattcagttgcttcgatcaataagtgaactaatggatgcatgtttcttttgataagtgagctaactactttagtcacaaagttcgtgttgatttctaaacatggtatgatggttttgtcatcctattcgattgagtttgggaaaaagcctgcacattctgaaaacaaacagactgcacattgtgtggctgataaggttgagtgggtaaataagatcaaagctattatttagacatactgaaaatatagtgaaggaagcgtaagcaatttttctgctatatttatgcattgtatccttgtaaaattatcaatattgttctgacttgtggggaaaggtatgagagtattcatttttttgcctcttttctgtttgcattccttcttcagtataatgtttgttagaataaccaggtgaatttacaaatttcatatccatatactttcttcgatgacaaatataaatctacctaggtttgtcataactcataggtcaatcattctaacttcaattgacattttttataaaaagtatcataaggaaaataatatattatcataaaagtgacgtccatctatatcaaattttagatattgatggtggtcagagttaaaaaacagtttgccttaagacaaaccaagatgaacttgtatttacaatcgaaggaaatattgcacattgcctagacatttaatttattagataaattcttttgttagttgttcaactttgtacgtcttataagtcacaggaacaatgtttatctagaacttcggtctcaaattatacagtagtgttcagccatacctgccatgtcacaagaaagagagataaaaagtatttaatagtagacctaatgatgctcatttgtaattgtagatattcgtatatcctttttctgcaaccttgtgaaacatgtgatggtttgacttggaacaaactttgggtctgatatagtaaaatgcaatgtatgtggagggaagtagtagaacaagacagaacaagtgccaaataaggttatatagtagaatacaatgtgtggagggaaatagtagaacaacacaaaacaagtgccaaataaggttacaaggtttatagtagcgattgcttagctgctacaacgacactcatagattagcctggcatttgcaatgtcgctcttgtatttgccataacctcacttaaggtcacacattgcctctgggaccttgacctccgctactgttgtcgcctggccgcgtcgacttcaccaatgccggggtgtccaacctcatcagcttcaccgtcgtcgactgctcccacacaaccgagctgtgggtcctggtcacatatggaaagtgaagaacccaaatgatttcttcacaggaagcttggaccaatcttcaactcatggggcgcttcatcctcggcctcctacgcatgcacttctcctgcttctcctgctggtcatcgcccaaggatgaattgctgctcttgaccatagggattggagcagcatgtagtttatactttatcctggttttctctctcgagatgttgcatggtgtcagtgtgtcagatgtgccgtaacagatgactccaaaatggattgcatgctcttcaaatagctacagataactatcttcacataaaatggagagtacaatgtttataaaagaaggaatatggataaggatccagattctcctatagcatatgaagaggcaaaggaaatggcaagccaaagctgcacaatttctgatgatcactcgttgttactgttatccattatctcctcagaggcattgcttttaaattcaacagcagacatggcaggtacgtgtccactttcttctcaaggaattgcactagagcctttcaagatttggcacattgacataatgacatgggttggtcacggattggatgtcaattttgctccctgtaccttgtagattatcggttatgtcaattttcgaaatttctatcgtgatggataacatttgaataaaacatagttaaataaacatgactactgtttcagtctttcgaaattctgatgctatagtgtcagtatactatgtcattttagggaaaatatatgtcatgtttattttgataaaattatatgatttctcactcaattcttgtcggtggcttcaggatttgttattttgtatatcgatctgtgtcatttgacaaagtactttgacttggtataatatgagtgttacttcgaccaaaagagcttggtaaagtgtgagaaactccgcaaacttcttctgcagacgatgactagcaacagttatgacgagggtcaagatagccgccatacatgatacattgagtacaacatcaagataaacactccctccccacacacaacttttgccttccgttcactctgtatgttgtgtttattacggttgcatatgttgtgtttattatggcatcaacacgttccattagaaaatataactattgtttgtcaagtacaaaatcataatcacatcagcttgtaataatattgcatcactgttttgtaccaaattgtaagttgttgtagcaacgcacgggcaccctactagtatatagagtaagttatcattaaattctcaaagcatcacatcaaaatggcacaagacatttaaaacatacttttggatatatatatacacacacacgcccaaacaagctcttagttgggctgtcactttaac

SEQ ID NO: 63301 - DNA, 3383 bp, Zea Mays
tgatgtccaatactgctatagtagcttctccaagttatgacactgttaggaagatggttcaacttctctcgaaatgaagcttctgtcttcctatgtatagacaagttgttcagttaggaggtctagattctcttaaaatggtgctatctacgagttaggaggtctaggagcacactgaatgttttagaggttgatgaaatcgttgttttcctaaaaaagcattttttctgctttgtttgaaattgtttgggttttcctccccaactttcataattacctatttctattgtatgtttgatcatttggacttctactccatccacaattttggtttattcagtgaggaactatgtttttaaccactctatagtttgtatagacatgcaacattcatctcagggtcaagaaagaagctcaacttggcatgcttcctgtttaaagcaaggcaagaaacatccccgccagatctctgtcgccaaagcagggctggtgaagaagttgtgtttccctcccggattgtcactactttcatatttgttcatttatgtttgttccaatttatgttggttttttacagttacagaatatgtttgttccagttgagttccagtttgaaaactggaacaaccactagcagatgcaaagttcacaaagtagcttgtcaaataatgtgcatgaactggaacaagcaacttgtgcacgaatgagcattactggaacaagtagcttgtgcatgaacgagtaatactgtagatgattggacatgtatgtctattttagatttttaatatttaatgttatatattcagctcataccatacatgaatttgcatttctgtactatactcacttaatgtcctacctgttttgttagcttcaactatccgctttaaactgacaaaaccagaccaaacatatgcaaatctcatatacctgtgaaagcaacaactgatttgccagattggttaattaaacgtaacaataaatagccccgattaaatggcttataaatatacttggatctgttcatttttcacatatcagctattaatgaagccttcactgggttcattttgtactactccattacttatttacagttacaagtattctaagaaacttaatatttcatcatcaaagttgtattcagacagtttcatttacattgctctgattttttgtactaggagctactgacaatggaaagcaacgattagagtaacttgatgagtgaggactattcattcagttgcttcgatcaataagtgaactaatggatgcatgtttcttttgataagtcacatatggaaagtgaagaacccaaatgatttcttcacaggaagcttggaccaatcttcaactcatggggcgcttcatcctcggcctcctacgcatgcacttctcctgcttctcctgctggtcatcgcccaaggtgcacttttcctccctgttctgttcacgtgcccatgtgtcattcttgtttttcactgtttaggatcgtgagggtgttattgcaataatagctgatggagaaatgagaatgattttcaaatgatgacaggattggcagaatgagagcgacaaaggaatgagctaaatcttttgaaatatgaagcaatatgatttctttccagtgttatatttttttatttcctatgcatttcttaaaagtgctattacatgttcacctactaatacccttgtttttcttgcatctcaaggatgaattgctgctcttgaccatagggattggagcagcatgtagtttatactttatcctggttttctctctcgagatgttgcatggtgtcagtgtgtcagatgtgccgtaacagatgactccaaaatggattgcatgctcttcaaatagctacagataactatcttcacataaaatggagagtacaatgtttataaaagaaggaatatggataaggatccagattctcctatagcatatgaagaggcaaaggaaatggcaagccaaagctgcacaatttctgatgatcactcgttgttactgttatccattatctcctcagaggcattgcttttaaattcaacagcagacatggcaggtacgtgtccactttcttctcaaggaattgcactagaggttggactttgtgggtcaagagaaatttaatgcctattgttaatacaacctttagctatttttccatgatgatggagttggacaagtaccatattgagtataagtgttagcctattatatctttgtacaaccatggcaaacgaataatttcttataacaccatgaagataatgtttaacgaagtgtgtttgcgtgcgtgtgtaatttcttcttttgttttgctgctaagtttgatagttcaaaacatgattcttgtaaagtttggttttagtctaacaaatacactcaagtcctgacatgtaaactgtaaagttggactgttgcttggtggatctgtattgaactttattttttttaaaatgttttatggcttgtatagtttgtattcacttctcacctaagctacaatttgtttttccagcctttcaagatttggcacattgacataatgacatgggttggtcacggattggatgtcaattttgctccctgtaccttgtagattatcggttatgtcaattttcgaaatttctatcgtgatggataacatttgaataaaacatagttaaataaacatgactactgtttcagtctttcgaaattctgatgctatagtgtcagtatactatgtcattttagggaaaatatatgtcatgtttattttgataaaattatatgatttctcactcaattcttgtcggtggcttcaggatttgttattttgtatatcgatctgtgtcatttgacaaagtactttgacttggtataatatgagtgttacttcgaccaaaagagcttggtaaagtgtgagaaactccgcaaacttcttctgcagacgatgactagcaacagttatgacgagggtcaagatagccgccatacatgatacattgagtacaacatcaagataaacactccctccccacacacaacttttgccttccgttcactctgtatgttgtgtttattacggttgcatatgttgtgtttattatggcatcaacacgttccattagaaaatataactattgtttgtcaagtacaaaatcataatcacatcagcttgtaataatattgcatcactgttttgtaccaaattgtaagttgttgtagcaacgcacgggcaccctactagtatatagagtaagttatcattaaattctcaaagcatcacatcaaaatggcacaagacatttaaaacatacttttggatatatatatacacacacacgcccaaacaagctcttagttgggctgtcactttaac

SEQ ID NO: 63302 - DNA, 2593 bp, Zea Mays
tgatgtccaatactgctatagtagcttctccaagttatgacactgttaggaagatggttcaacttctctcgaaatgaagcttctgtcttcctatgtatagacaagttgttcagttaggaggtctagattctcttaaaatggtgctatctacgagttaggaggtctaggagcacactgaatgttttagaggttgatgaaatcgttgttttcctaaaaaagcattttttctgctttgtttgaaattgtttgggttttcctccccaactttcataattacctatttctattgtatgtttgatcatttggacttctactccatccacaattttggtttattcagtgaggaactatgtttttaaccactctatagtttgtatagacatgcaacattcatctcagggtcaagaaagaagctcaacttggcatgcttcctgtttaaagcaagttacagaatatgtttgttccagttgagttccagtttgaaaactggaacaaccactagcagatgcaaagttcacaaagtagcttgtcaaataatgtgcatgaactggaacaagcaacttgtgcacgaatgagcattactggaacaagtagcttgtgcatgaacgagtaatactgtagatgattggacatgtatgtctattttagatttttaatatttaatgttatatattcagctcataccatacatgaatttgcatttctgtactatactcacttaatgtcctacctgttttgttagcttcaactatccgctttaaactgacaaaaccagaccaaacatatgcaaatctcatatacctgtgaaagcaacaactgatttgccagattggttaattaaacgtaacaataaatagccccgattaaatggcttataaatatacttggatctgttcatttttcacatatcagctattaatgaagccttcactgggttcattttgtactactccattacttatttacagttacaagtattctaagaaacttaatatttcatcatcaaagttgtattcagacagtttcatttacattgctctgattttttgtactaggagctactgacaatggaaagcaacgattagagtaacttgatgagtgaggactattcattcagttgcttcgatcaataagtgaactaatggatgcatgtttcttttgataagtcacatatggaaagtgaagaacccaaatgatttcttcacaggaagcttggaccaatcttcaactcatggggcgcttcatcctcggcctcctacgcatgcacttctcctgcttctcctgctggtcatcgcccaaggatgaattgctgctcttgaccatagggattggagcagcatgtagtttatactttatcctggttttctctctcgagtgtgtcagatgtgccgtaacagatgactccaaaatggattgcatgctcttcaaatagctacagataactatcttcacataaaatggagagtacaatgtttataaaagaaggaatatggataaggatccagattctcctatagcatatgaagaggcaaaggaaatggcaagccaaagctgcacaatttctgatgatcactcgttgttactgttatccattatctcctcagaggcattgcttttaaattcaacagcagacatggcaggtgcaggtcctatcctatccattatctacccctgcatgtgtgccagctattctactctatgtttcaatagtttggaaataattcagagctaaggttttctgatacagcctttcaagatttggcacattgacataatgacatgggttggtcacggattggatgtcaattttgctccctgtaccttgtagattatcggttatgtcaattttcgaaatttctatcgtgatggataacatttgaataaaacatagttaaataaacatgactactgtttcagtctttcgaaattctgatgctatagtgtcagtatactatgtcattttagggaaaatatatgtcatgtttattttgataaaattatatgatttctcactcaattcttgtcggtggcttcaggatttgttattttgtatatcgatctgtgtcatttgacaaagtactttgacttggtataatatgagtgttacttcgaccaaaagagcttggtaaagtgtgagaaactccgcaaacttcttctgcagacgatgactagcaacagttatgacgagggtcaagatagccgccatacatgatacattgagtacaacatcaagataaacactccctccccacacacaacttttgccttccgttcactctgtatgttgtgtttattacggttgcatatgttgtgtttattatggcatcaacacgttccattagaaaatataactattgtttgtcaagtacaaaatcataatcacatcagcttgtaataatattgcatcactgttttgtaccaaattgtaagttgttgtagcaacgcacgggcaccctactagtatatagagtaagttatcattaaattctcaaagcatcacatcaaaatggcacaagacatttaaaacatacttttggatatatatatacacacacacgcccaaacaagctcttagttgggctgtcactttaac

SEQ ID NO: 63303 - DNA, 2742 bp, Zea Mays
tgatgtccaatactgctatagtagcttctccaagttatgacactgttaggaagatggttcaacttctctcgaaatgaagcttctgtcttcctatgtatagacaagttgttcagttaggaggtctagattctcttaaaatggtgctatctacgagttaggaggtctaggagcacactgaatgttttagaggttgatgaaatcgttgttttcctaaaaaagcattttttctgctttgtttgaaattgtttgggttttcctccccaactttcataattacctatttctattgtatgtttgatcatttggacttctactccatccacaattttggtttattcagtgaggaactatgtttttaaccactctatagtttgtatagacatgcaacattcatctcagggtcaagaaagaagctcaacttggcatgcttcctgtttaaagcaaggcaagaaacatccccgccagatctctgtcgccaaagcagggctggtgaagaagttgtgtttccctcccggattgtcactactttcatatttgttcatttatgtttgttccaatttatgttggttttttacagttacagaatatgtttgttccagttgagttccagtttgaaaactggaacaaccactagcagatgcaaagttcacaaagtagcttgtcaaataatgtgcatgaactggaacaagcaacttgtgcacgaatgagcattactggaacaagtagcttgtgcatgaacgagtaatactgtagatgattggacatgtatgtctattttagatttttaatatttaatgttatatattcagctcataccatacatgaatttgcatttctgtactatactcacttaatgtcctacctgttttgttagcttcaactatccgctttaaactgacaaaaccagaccaaacatatgcaaatctcatatacctgtgaaagcaacaactgatttgccagattggttaattaaacgtaacaataaatagccccgattaaatggcttataaatatacttggatctgttcatttttcacatatcagctattaatgaagccttcactgggttcattttgtactactccattacttatttacagttacaagtattctaagaaacttaatatttcatcatcaaagttgtattcagacagtttcatttacattgctctgattttttgtactaggagctactgacaatggaaagcaacgattagagtaacttgatgagtgaggactattcattcagttgcttcgatcaataagtgaactaatggatgcatgtttcttttgataagtcacatatggaaagtgaagaacccaaatgatttcttcacaggaagcttggaccaatcttcaactcatggggcgcttcatcctcggcctcctacgcatgcacttctcctgcttctcctgctggtcatcgcccaaggatgaattgctgctcttgaccatagggattggagcagcatgtagtttatactttatcctggttttctctctcgagatgttgcatggtgtcagtgtgtcagatgtgccgtaacagatgactccaaaatggattgcatgctcttcaaatagctacagataactatcttcacataaaatggagagtacaatgtttataaaagaaggaatatggataaggatccagattctcctatagcatatgaagaggcaaaggaaatggcaagccaaagctgcacaatttctgatgatcactcgttgttactgttatccattatctcctcagaggcattgcttttaaattcaacagcagacatggcaggtgcaggtcctatcctatccattatctacccctgcatgtgtgccagctattctactctatgtttcaatagtttggaaataattcagagctaaggttttctgatacagcctttcaagatttggcacattgacataatgacatgggttggtcacggattggatgtcaattttgctccctgtaccttgtagattatcggttatgtcaattttcgaaatttctatcgtgatggataacatttgaataaaacatagttaaataaacatgactactgtttcagtctttcgaaattctgatgctatagtgtcagtatactatgtcattttagggaaaatatatgtcatgtttattttgataaaattatatgatttctcactcaattcttgtcggtggcttcaggatttgttattttgtatatcgatctgtgtcatttgacaaagtactttgacttggtataatatgagtgttacttcgaccaaaagagcttggtaaagtgtgagaaactccgcaaacttcttctgcagacgatgactagcaacagttatgacgagggtcaagatagccgccatacatgatacattgagtacaacatcaagataaacactccctccccacacacaacttttgccttccgttcactctgtatgttgtgtttattacggttgcatatgttgtgtttattatggcatcaacacgttccattagaaaatataactattgtttgtcaagtacaaaatcataatcacatcagcttgtaataatattgcatcactgttttgtaccaaattgtaagttgttgtagcaacgcacgggcaccctactagtatatagagtaagttatcattaaattctcaaagcatcacatcaaaatggcacaagacatttaaaacatacttttggatatatatatacacacacacgcccaaacaagctcttagttgggctgtcactttaac

SEQ ID NO: 63304 - DNA, 3077 bp, Zea Mays
tgatgtccaatactgctatagtagcttctccaagttatgacactgttaggaagatggttcaacttctctcgaaatgaagcttctgtcttcctatgtatagacaagttgttcagttaggaggtctagattctcttaaaatggtgctatctacgagttaggaggtctaggagcacactgaatgttttagaggttgatgaaatcgttgttttcctaaaaaagcattttttctgctttgtttgaaattgtttgggttttcctccccaactttcataattacctatttctattgtatgtttgatcatttggacttctactccatccacaattttggtttattcagtgaggaactatgtttttaaccactctatagtttgtatagacatgcaacattcatctcagggtcaagaaagaagctcaacttggcatgcttcctgtttaaagcaaggcaagaaacatccccgccagatctctgtcgccaaagcagggctggtgaagaagttgtgtttccctcccggattgtcactactttcatatttgttcatttatgtttgttccaatttatgttggttttttacagttacagaatatgtttgttccagttgagttccagtttgaaaactggaacaaccactagcagatgcaaagttcacaaagtagcttgtcaaataatgtgcatgaactggaacaagcaacttgtgcacgaatgagcattactggaacaagtagcttgtgcatgaacgagtaatactgtagatgattggacatgtatgtctattttagatttttaatatttaatgttatatattcagctcataccatacatgaatttgcatttctgtactatactcacttaatgtcctacctgttttgttagcttcaactatccgctttaaactgacaaaaccagaccaaacatatgcaaatctcatatacctgtgaaagcaacaactgatttgccagattggttaattaaacgtaacaataaatagccccgattaaatggcttataaatatacttggatctgttcatttttcacatatcagctattaatgaagccttcactgggttcattttgtactactccattacttatttacagttacaagtattctaagaaacttaatatttcatcatcaaagttgtattcagacagtttcatttacattgctctgattttttgtactaggagctactgacaatggaaagcaacgattagagtaacttgatgagtgaggactattcattcagttgcttcgatcaataagtgaactaatggatgcatgtttcttttgataagtcacatatggaaagtgaagaacccaaatgatttcttcacaggaagcttggaccaatcttcaactcatggggcgcttcatcctcggcctcctacgcatgcacttctcctgcttctcctgctggtcatcgcccaaggatgaattgctgctcttgaccatagggattggagcagcatgtagtttatactttatcctggttttctctctcgagtgtgtcagatgtgccgtaacagatgactccaaaatggattgcatgctcttcaaatagctacagataactatcttcacataaaatggagagtacaatgtttataaaagaaggaatatggataaggatccagattctcctatagcatatgaagaggcaaaggaaatggcaagccaaagctgcacaatttctgatgatcactcgttgttactgttatccattatctcctcagaggcattgcttttaaattcaacagcagacatggcaggtacgtgtccactttcttctcaaggaattgcactagaggttggactttgtgggtcaagagaaatttaatgcctattgttaatacaacctttagctatttttccatgatgatggagttggacaagtaccatattgagtataagtgttagcctattatatctttgtacaaccatggcaaacgaataatttcttataacaccatgaagataatgtttaacgaagtgtgtttgcgtgcgtgtgtaatttcttcttttgttttgctgctaagtttgatagttcaaaacatgattcttgtaaagtttggttttagtctaacaaatacactcaagtcctgacatgtaaactgtaaagttggactgttgcttggtggatctgtattgaactttattttttttaaaatgttttatggcttgtatagtttgtattcacttctcacctaagctacaatttgtttttccagcctttcaagatttggcacattgacataatgacatgggttggtcacggattggatgtcaattttgctccctgtaccttgtagattatcggttatgtcaattttcgaaatttctatcgtgatggataacatttgaataaaacatagttaaataaacatgactactgtttcagtctttcgaaattctgatgctatagtgtcagtatactatgtcattttagggaaaatatatgtcatgtttattttgataaaattatatgatttctcactcaattcttgtcggtggcttcaggatttgttattttgtatatcgatctgtgtcatttgacaaagtactttgacttggtataatatgagtgttacttcgaccaaaagagcttggtaaagtgtgagaaactccgcaaacttcttctgcagacgatgactagcaacagttatgacgagggtcaagatagccgccatacatgatacattgagtacaacatcaagataaacactccctccccacacacaacttttgccttccgttcactctgtatgttgtgtttattacggttgcatatgttgtgtttattatggcatcaacacgttccattagaaaatataactattgtttgtcaagtacaaaatcataatcacatcagcttgtaataatattgcatcactgttttgtaccaaattgtaagttgttgtagcaacgcacgggcaccctactagtatatagagtaagttatcattaaattctcaaagcatcacatcaaaatggcacaagacatttaaaacatacttttggatatatatatacacacacacgcccaaacaagctcttagttgggctgtcactttaac

SEQ ID NO: 63305 - DNA, 4286 bp, Zea Mays
tgatgtccaatactgctatagtagcttctccaagttatgacactgttaggaagatggttcaacttctctcgaaatgaagcttctgtcttcctatgtatagacaagttgttcagttaggaggtctagattctcttaaaatggtgctatctacgagttaggaggtctaggagcacactgaatgttttagaggttgatgaaatcgttgttttcctaaaaaagcattttttctgctttgtttgaaattgtttgggttttcctccccaactttcataattacctatttctattgtatgtttgatcatttggacttctactccatccacaattttggtttattcagtgaggaactatgtttttaaccactctatagtttgtatagacatgcaacattcatctcagggtcaagaaagaagctcaacttggcatgcttcctgtttaaagcaaggcaagaaacatccccgccagatctctgtcgccaaagcagggctggtgaagaagttgtgtttccctcccggattgtcactactttcatatttgttcatttatgtttgttccaatttatgttggttttttacagttacagaatatgtttgttccagttgagttccagtttgaaaactggaacaaccactagcagatgcaaagttcacaaagtagcttgtcaaataatgtgcatgaactggaacaagcaacttgtgcacgaatgagcattactggaacaagtagcttgtgcatgaacgagtaatactgtagatgattggacatgtatgtctattttagatttttaatatttaatgttatatattcagctcataccatacatgaatttgcatttctgtactatactcacttaatgtcctacctgttttgttagcttcaactatccgctttaaactgacaaaaccagaccaaacatatgcaaatctcatatacctgtgaaagcaacaactgatttgccagattggttaattaaacgtaacaataaatagccccgattaaatggcttataaatatacttggatctgttcatttttcacatatcagctattaatgaagccttcactgggttcattttgtactactccattacttatttacagttacaagtattctaagaaacttaatatttcatcatcaaagttgtattcagacagtttcatttacattgctctgattttttgtactaggagctactgacaatggaaagcaacgattagagtaacttgatgagtgaggactattcattcagttgcttcgatcaataagtgaactaatggatgcatgtttcttttgataagtgagctaactactttagtcacaaagttcgtgttgatttctaaacatggtatgatggttttgtcatcctattcgattgagtttgggaaaaagcctgcacattctgaaaacaaacagactgcacattgtgtggctgataaggttgagtgggtaaataagatcaaagctattatttagacatactgaaaatatagtgaaggaagcgtaagcaatttttctgctatatttatgcattgtatccttgtaaaattatcaatattgttctgacttgtggggaaaggtatgagagtattcatttttttgcctcttttctgtttgcattccttcttcagtataatgtttgttagaataaccaggtgaatttacaaatttcatatccatatactttcttcgatgacaaatataaatctacctaggtttgtcataactcataggtcaatcattctaacttcaattgacattttttataaaaagtatcataaggaaaataatatattatcataaaagtgacgtccatctatatcaaattttagatattgatggtggtcagagttaaaaaacagtttgccttaagacaaaccaagatgaacttgtatttacaatcgaaggaaatattgcacattgcctagacatttaatttattagataaattcttttgttagttgttcaactttgtacgtcttataagtcacaggaacaatgtttatctagaacttcggtctcaaattatacagtagtgttcagccatacctgccatgtcacaagaaagagagataaaaagtatttaatagtagacctaatgatgctcatttgtaattgtagatattcgtatatcctttttctgcaaccttgtgaaacatgtgatggtttgacttggaacaaactttgggtctgatatagtaaaatgcaatgtatgtggagggaagtagtagaacaagacagaacaagtgccaaataaggttatatagtagaatacaatgtgtggagggaaatagtagaacaacacaaaacaagtgccaaataaggttacaaggtttatagtagcgattgcttagctgctacaacgacactcatagattagcctggcatttgcaatgtcgctcttgtatttgccataacctcacttaaggtcacacattgcctctgggaccttgacctccgctactgttgtcgcctggccgcgtcgacttcaccaatgccggggtgtccaacctcatcagcttcaccgtcgtcgactgctcccacacaaccgagctgtgggtcctggtaccggtcgcgccccgcctctgctccttctgcttcagcgagtggcagactatcgatacactcgatttcaattgttttttacgctatttactgtattgcaatgggacaatggatgattaggatttgttttttaagactggcccatgatttatcgtcgtatactatttctttaatagattgttcgctacatctactgatctacatgttcacatgtttcaacttctgtcagcatccgtagttactatatgaatgctcattctgtgtcaccttttaagtttacaaatgctcttttccaggtcacatatggaaagtgaagaacccaaatgatttcttcacaggaagcttggaccaatcttcaactcatggggcgcttcatcctcggcctcctacgcatgcacttctcctgcttctcctgctggtcatcgcccaaggatgaattgctgctcttgaccatagggattggagcagcatgtagtttatactttatcctggttttctctctcgagtgtgtcagatgtgccgtaacagatgactccaaaatggattgcatgctcttcaaatagctacagataactatcttcacataaaatggagagtacaatgtttataaaagaaggaatatggataaggatccagattctcctatagcatatgaagaggcaaaggaaatggcaagccaaagctgcacaatttctgatgatcactcgttgttactgttatccattatctcctcagaggcattgcttttaaattcaacagcagacatggcaggtgcaggtcctatcctatccattatctacccctgcatgtgtgccagctattctactctatgtttcaatagtttggaaataattcagagctaaggttttctgatacagcctttcaagatttggcacattgacataatgacatgggttggtcacggattggatgtcaattttgctccctgtaccttgtagattatcggttatgtcaattttcgaaatttctatcgtgatggataacatttgaataaaacatagttaaataaacatgactactgtttcagtctttcgaaattctgatgctatagtgtcagtatactatgtcattttagggaaaatatatgtcatgtttattttgataaaattatatgatttctcactcaattcttgtcggtggcttcaggatttgttattttgtatatcgatctgtgtcatttgacaaagtactttgacttggtataatatgagtgttacttcgaccaaaagagcttggtaaagtgtgagaaactccgcaaacttcttctgcagacgatgactagcaacagttatgacgagggtcaagatagccgccatacatgatacattgagtacaacatcaagataaacactccctccccacacacaacttttgccttccgttcactctgtatgttgtgtttattacggttgcatatgttgtgtttattatggcatcaacacgttccattagaaaatataactattgtttgtcaagtacaaaatcataatcacatcagcttgtaataatattgcatcactgttttgtaccaaattgtaagttgttgtagcaacgcacgggcaccctactagtatatagagtaagttatcattaaattctcaaagcatcacatcaaaatggcacaagacatttaaaacatacttttggatatatatatacacacacacgcccaaacaagctcttagttgggctgtcactttaac

SEQ ID NO: 63306 - DNA, 4228 bp, Zea Mays
tgatgtccaatactgctatagtagcttctccaagttatgacactgttaggaagatggttcaacttctctcgaaatgaagcttctgtcttcctatgtatagacaagttgttcagttaggaggtctagattctcttaaaatggtgctatctacgagttaggaggtctaggagcacactgaatgttttagaggttgatgaaatcgttgttttcctaaaaaagcattttttctgctttgtttgaaattgtttgggttttcctccccaactttcataattacctatttctattgtatgtttgatcatttggacttctactccatccacaattttggtttattcagtgaggaactatgtttttaaccactctatagtttgtatagacatgcaacattcatctcagggtcaagaaagaagctcaacttggcatgcttcctgtttaaagcaaggcaagaaacatccccgccagatctctgtcgccaaagcagggctggtgaagaagttgtgtttccctcccggattgtcactactttcatatttgttcatttatgtttgttccaatttatgttggttttttacagttacagaatatgtttgttccagttgagttccagtttgaaaactggaacaaccactagcagatgcaaagttcacaaagtagcttgtcaaataatgtgcatgaactggaacaagcaacttgtgcacgaatgagcattactggaacaagtagcttgtgcatgaacgagtaatactgtagatgattggacatgtatgtctattttagatttttaatatttaatgttatatattcagctcataccatacatgaatttgcatttctgtactatactcacttaatgtcctacctgttttgttagcttcaactatccgctttaaactgacaaaaccagaccaaacatatgcaaatctcatatacctgtgaaagcaacaactgatttgccagattggttaattaaacgtaacaataaatagccccgattaaatggcttataaatatacttggatctgttcatttttcacatatcagctattaatgaagccttcactgggttcattttgtactactccattacttatttacagttacaagtattctaagaaacttaatatttcatcatcaaagttgtattcagacagtttcatttacattgctctgattttttgtactaggagctactgacaatggaaagcaacgattagagtaacttgatgagtgaggactattcattcagttgcttcgatcaataagtgaactaatggatgcatgtttcttttgataagtgagctaactactttagtcacaaagttcgtgttgatttctaaacatggtatgatggttttgtcatcctattcgattgagtttgggaaaaagcctgcacattctgaaaacaaacagactgcacattgtgtggctgataaggttgagtgggtaaataagatcaaagctattatttagacatactgaaaatatagtgaaggaagcgtaagcaatttttctgctatatttatgcattgtatccttgtaaaattatcaatattgttctgacttgtggggaaaggtatgagagtattcatttttttgcctcttttctgtttgcattccttcttcagtataatgtttgttagaataaccaggtgaatttacaaatttcatatccatatactttcttcgatgacaaatataaatctacctaggtttgtcataactcataggtcaatcattctaacttcaattgacattttttataaaaagtatcataaggaaaataatatattatcataaaagtgacgtccatctatatcaaattttagatattgatggtggtcagagttaaaaaacagtttgccttaagacaaaccaagatgaacttgtatttacaatcgaaggaaatattgcacattgcctagacatttaatttattagataaattcttttgttagttgttcaactttgtacgtcttataagtcacaggaacaatgtttatctagaacttcggtctcaaattatacagtagtgttcagccatacctgccatgtcacaagaaagagagataaaaagtatttaatagtagacctaatgatgctcatttgtaattgtagatattcgtatatcctttttctgcaaccttgtgaaacatgtgatggtttgacttggaacaaactttgggtctgatatagtaaaatgcaatgtatgtggagggaagtagtagaacaagacagaacaagtgccaaataaggttatatagtagaatacaatgtgtggagggaaatagtagaacaacacaaaacaagtgccaaataaggttacaaggtttatagtagcgattgcttagctgctacaacgacactcatagattagcctggcatttgcaatgtcgctcttgtatttgccataacctcacttaaggtcacacattgcctctgggaccttgacctccgctactgttgtcgcctggccgcgtcgacttcaccaatgccggggtgtccaacctcatcagcttcaccgtcgtcgactgctcccacacaaccgagctgtgggtcctggtaccggtcgcgccccgcctctgctccttctgcttcagcgagtggcagactatcgatacactcgatttcaattgttttttacgctatttactgtattgcaatgggacaatggatgattaggatttgttttttaagactggcccatgatttatcgtcgtatactatttctttaatagattgttcgctacatctactgatctacatgttcacatgtttcaacttctgtcagcatccgtagttactatatgaatgctcattctgtgtcaccttttaagtttacaaatgctcttttccaggtcacatatggaaagtgaagaacccaaatgatttcttcacaggaagcttggaccaatcttcaactcatggggcgcttcatcctcggcctcctacgcatgcacttctcctgcttctcctgctggtcatcgcccaagatgttgcatggtgtcagtgtgtcagatgtgccgtaacagatgactccaaaatggattgcatgctcttcaaatagctacagataactatcttcacataaaatggagagtacaatgtttataaaagaaggaatatggataaggatccagattctcctatagcatatgaagaggcaaaggaaatggcaagccaaagctgcacaatttctgatgatcactcgttgttactgttatccattatctcctcagaggcattgcttttaaattcaacagcagacatggcaggtgcaggtcctatcctatccattatctacccctgcatgtgtgccagctattctactctatgtttcaatagtttggaaataattcagagctaaggttttctgatacagcctttcaagatttggcacattgacataatgacatgggttggtcacggattggatgtcaattttgctccctgtaccttgtagattatcggttatgtcaattttcgaaatttctatcgtgatggataacatttgaataaaacatagttaaataaacatgactactgtttcagtctttcgaaattctgatgctatagtgtcagtatactatgtcattttagggaaaatatatgtcatgtttattttgataaaattatatgatttctcactcaattcttgtcggtggcttcaggatttgttattttgtatatcgatctgtgtcatttgacaaagtactttgacttggtataatatgagtgttacttcgaccaaaagagcttggtaaagtgtgagaaactccgcaaacttcttctgcagacgatgactagcaacagttatgacgagggtcaagatagccgccatacatgatacattgagtacaacatcaagataaacactccctccccacacacaacttttgccttccgttcactctgtatgttgtgtttattacggttgcatatgttgtgtttattatggcatcaacacgttccattagaaaatataactattgtttgtcaagtacaaaatcataatcacatcagcttgtaataatattgcatcactgttttgtaccaaattgtaagttgttgtagcaacgcacgggcaccctactagtatatagagtaagttatcattaaattctcaaagcatcacatcaaaatggcacaagacatttaaaacatacttttggatatatatatacacacacacgcccaaacaagctcttagttgggctgtcactttaac

SEQ ID NO: 63307 - DNA, 2214 bp, Zea Mays
tgatgtccaatactgctatagtagcttctccaagttatgacactgttaggaagatggttcaacttctctcgaaatgaagcttctgtcttcctatgtatagacaagttgttcagttaggaggtctagattctcttaaaatggtgctatctacgagttaggaggtctaggagcacactgaatgttttagaggttgatgaaatcgttgttttcctaaaaaagcattttttctgctttgtttgaaattgtttgggttttcctccccaactttcataattacctatttctattgtatgtttgatcatttggacttctactccatccacaattttggtttattcagtgaggaactatgtttttaaccactctatagtttgtatagacatgcaacattcatctcagggtcaagaaagaagctcaacttggcatgcttcctgtttaaagcaagttacagaatatgtttgttccagttgagttccagtttgaaaactggaacaaccactagcagatgcaaagttcacaaagtagcttgtcaaataatgtgcatgaactggaacaagcaacttgtgcacgaatgagcattactggaacaagtagcttgtgcatgaacgagtaatactgtagatgattggacatgtatgtctattttagatttttaatatttaatgttatatattcagctcataccatacatgaatttgcatttctgtactatactcacttaatgtcctacctgttttgttagcttcaactatccgctttaaactgacaaaaccagaccaaacatatgcaaatctcatatacctgtgaaagcaacaactgatttgccagattggttaattaaacgtaacaataaatagccccgattaaatggcttataaatatacttggatctgttcatttttcacatatcagctattaatgaagccttcactgggttcattttgtactactccattacttatttacagttacaagtattctaagaaacttaatatttcatcatcaaagttgtattcagacagtttcatttacattgctctgattttttgtactaggagctactgacaatggaaagcaacgattagagtaacttgatgagtgaggactattcattcagttgcttcgatcaataagtgaactaatggatgcatgtttcttttgataagtcacatatggaaagtgaagaacccaaatgatttcttcacaggaagcttggaccaatcttcaactcatggggcgcttcatcctcggcctcctacgcatgcacttctcctgcttctcctgctggtcatcgcccaaggatgaattgctgctcttgaccatagggattggagcagcatgtagtttatactttatcctggttttctctctcgagatgttgcatggtgtcagtgtgtcagatgtgccgtaacagatgactccaaaatggattgcatgctcttcaaatagctacagataactatcttcacataaaatggagagtacaatgtttataaaagaaggaatatggataaggatccagattctcctatagcatatgaagaggcaaaggaaatggcaagccaaagctgcacaatttctgatgatcactcgttgttactgttatccattatctcctcagaggcattgcttttaaattcaacagcagacatggcaggatttgttattttgtatatcgatctgtgtcatttgacaaagtactttgacttggtataatatgagtgttacttcgaccaaaagagcttggtaaagtgtgagaaactccgcaaacttcttctgcagacgatgactagcaacagttatgacgagggtcaagatagccgccatacatgatacattgagtacaacatcaagataaacactccctccccacacacaacttttgccttccgttcactctgtatgttgtgtttattacggttgcatatgttgtgtttattatggcatcaacacgttccattagaaaatataactattgtttgtcaagtacaaaatcataatcacatcagcttgtaataatattgcatcactgttttgtaccaaattgtaagttgttgtagcaacgcacgggcaccctactagtatatagagtaagttatcattaaattctcaaagcatcacatcaaaatggcacaagacatttaaaacatacttttggatatatatatacacacacacgcccaaacaagctcttagttgggctgtcactttaac

SEQ ID NO: 63308 - DNA, 4316 bp, Zea Mays
tgatgtccaatactgctatagtagcttctccaagttatgacactgttaggaagatggttcaacttctctcgaaatgaagcttctgtcttcctatgtatagacaagttgttcagttaggaggtctagattctcttaaaatggtgctatctacgagttaggaggtctaggagcacactgaatgttttagaggttgatgaaatcgttgttttcctaaaaaagcattttttctgctttgtttgaaattgtttgggttttcctccccaactttcataattacctatttctattgtatgtttgatcatttggacttctactccatccacaattttggtttattcagtgaggaactatgtttttaaccactctatagtttgtatagacatgcaacattcatctcagggtcaagaaagaagctcaacttggcatgcttcctgtttaaagcaaggcaagaaacatccccgccagatctctgtcgccaaagcagggctggtgaagaagttgtgtttccctcccggattgtcactactttcatatttgttcatttatgtttgttccaatttatgttggttttttacagttacagaatatgtttgttccagttgagttccagtttgaaaactggaacaaccactagcagatgcaaagttcacaaagtagcttgtcaaataatgtgcatgaactggaacaagcaacttgtgcacgaatgagcattactggaacaagtagcttgtgcatgaacgagtaatactgtagatgattggacatgtatgtctattttagatttttaatatttaatgttatatattcagctcataccatacatgaatttgcatttctgtactatactcacttaatgtcctacctgttttgttagcttcaactatccgctttaaactgacaaaaccagaccaaacatatgcaaatctcatatacctgtgaaagcaacaactgatttgccagattggttaattaaacgtaacaataaatagccccgattaaatggcttataaatatacttggatctgttcatttttcacatatcagctattaatgaagccttcactgggttcattttgtactactccattacttatttacagttacaagtattctaagaaacttaatatttcatcatcaaagttgtattcagacagtttcatttacattgctctgattttttgtactaggagctactgacaatggaaagcaacgattagagtaacttgatgagtgaggactattcattcagttgcttcgatcaataagtgaactaatggatgcatgtttcttttgataagtgagctaactactttagtcacaaagttcgtgttgatttctaaacatggtatgatggttttgtcatcctattcgattgagtttgggaaaaagcctgcacattctgaaaacaaacagactgcacattgtgtggctgataaggttgagtgggtaaataagatcaaagctattatttagacatactgaaaatatagtgaaggaagcgtaagcaatttttctgctatatttatgcattgtatccttgtaaaattatcaatattgttctgacttgtggggaaaggtatgagagtattcatttttttgcctcttttctgtttgcattccttcttcagtataatgtttgttagaataaccaggtgaatttacaaatttcatatccatatactttcttcgatgacaaatataaatctacctaggtttgtcataactcataggtcaatcattctaacttcaattgacattttttataaaaagtatcataaggaaaataatatattatcataaaagtgacgtccatctatatcaaattttagatattgatggtggtcagagttaaaaaacagtttgccttaagacaaaccaagatgaacttgtatttacaatcgaaggaaatattgcacattgcctagacatttaatttattagataaattcttttgttagttgttcaactttgtacgtcttataagtcacaggaacaatgtttatctagaacttcggtctcaaattatacagtagtgttcagccatacctgccatgtcacaagaaagagagataaaaagtatttaatagtagacctaatgatgctcatttgtaattgtagatattcgtatatcctttttctgcaaccttgtgaaacatgtgatggtttgacttggaacaaactttgggtctgatatagtaaaatgcaatgtatgtggagggaagtagtagaacaagacagaacaagtgccaaataaggttatatagtagaatacaatgtgtggagggaaatagtagaacaacacaaaacaagtgccaaataaggttacaaggtttatagtagcgattgcttagctgctacaacgacactcatagattagcctggcatttgcaatgtcgctcttgtatttgccataacctcacttaaggtcacacattgcctctgggaccttgacctccgctactgttgtcgcctggccgcgtcgacttcaccaatgccggggtgtccaacctcatcagcttcaccgtcgtcgactgctcccacacaaccgagctgtgggtcctggtaccggtcgcgccccgcctctgctccttctgcttcagcgagtggcagactatcgatacactcgatttcaattgttttttacgctatttactgtattgcaatgggacaatggatgattaggatttgttttttaagactggcccatgatttatcgtcgtatactatttctttaatagattgttcgctacatctactgatctacatgttcacatgtttcaacttctgtcagcatccgtagttactatatgaatgctcattctgtgtcaccttttaagtttacaaatgctcttttccaggtcacatatggaaagtgaagaacccaaatgatttcttcacaggaagatgaagcaacaagctagaaaatgtggaatttgtcatatgtccggatgcaaaacgggtaacttcatgctttccacaatgtgtgtcgacatgatgcttgtagagatgcttggaccaatcttcaactcatggggcgcttcatcctcggcctcctacgcatgcacttctcctgcttctcctgctggtcatcgcccaagtgtgtcagatgtgccgtaacagatgactccaaaatggattgcatgctcttcaaatagctacagataactatcttcacataaaatggagagtacaatgtttataaaagaaggaatatggataaggatccagattctcctatagcatatgaagaggcaaaggaaatggcaagccaaagctgcacaatttctgatgatcactcgttgttactgttatccattatctcctcagaggcattgcttttaaattcaacagcagacatggcaggtgcaggtcctatcctatccattatctacccctgcatgtgtgccagctattctactctatgtttcaatagtttggaaataattcagagctaaggttttctgatacagcctttcaagatttggcacattgacataatgacatgggttggtcacggattggatgtcaattttgctccctgtaccttgtagattatcggttatgtcaattttcgaaatttctatcgtgatggataacatttgaataaaacatagttaaataaacatgactactgtttcagtctttcgaaattctgatgctatagtgtcagtatactatgtcattttagggaaaatatatgtcatgtttattttgataaaattatatgatttctcactcaattcttgtcggtggcttcaggatttgttattttgtatatcgatctgtgtcatttgacaaagtactttgacttggtataatatgagtgttacttcgaccaaaagagcttggtaaagtgtgagaaactccgcaaacttcttctgcagacgatgactagcaacagttatgacgagggtcaagatagccgccatacatgatacattgagtacaacatcaagataaacactccctccccacacacaacttttgccttccgttcactctgtatgttgtgtttattacggttgcatatgttgtgtttattatggcatcaacacgttccattagaaaatataactattgtttgtcaagtacaaaatcataatcacatcagcttgtaataatattgcatcactgttttgtaccaaattgtaagttgttgtagcaacgcacgggcaccctactagtatatagagtaagttatcattaaattctcaaagcatcacatcaaaatggcacaagacatttaaaacatacttttggatatatatatacacacacacgcccaaacaagctcttagttgggctgtcactttaac

SEQ ID NO: 63309 - DNA, 4790 bp, Zea Mays
tgatgtccaatactgctatagtagcttctccaagttatgacactgttaggaagatggttcaacttctctcgaaatgaagcttctgtcttcctatgtatagacaagttgttcagttaggaggtctagattctcttaaaatggtgctatctacgagttaggaggtctaggagcacactgaatgttttagaggttgatgaaatcgttgttttcctaaaaaagcattttttctgctttgtttgaaattgtttgggttttcctccccaactttcataattacctatttctattgtatgtttgatcatttggacttctactccatccacaattttggtttattcagtgaggaactatgtttttaaccactctatagtttgtatagacatgcaacattcatctcagggtcaagaaagaagctcaacttggcatgcttcctgtttaaagcaaggcaagaaacatccccgccagatctctgtcgccaaagcagggctggtgaagaagttgtgtttccctcccggattgtcactactttcatatttgttcatttatgtttgttccaatttatgttggttttttacagttacagaatatgtttgttccagttgagttccagtttgaaaactggaacaaccactagcagatgcaaagttcacaaagtagcttgtcaaataatgtgcatgaactggaacaagcaacttgtgcacgaatgagcattactggaacaagtagcttgtgcatgaacgagtaatactgtagatgattggacatgtatgtctattttagatttttaatatttaatgttatatattcagctcataccatacatgaatttgcatttctgtactatactcacttaatgtcctacctgttttgttagcttcaactatccgctttaaactgacaaaaccagaccaaacatatgcaaatctcatatacctgtgaaagcaacaactgatttgccagattggttaattaaacgtaacaataaatagccccgattaaatggcttataaatatacttggatctgttcatttttcacatatcagctattaatgaagccttcactgggttcattttgtactactccattacttatttacagttacaagtattctaagaaacttaatatttcatcatcaaagttgtattcagacagtttcatttacattgctctgattttttgtactaggagctactgacaatggaaagcaacgattagagtaacttgatgagtgaggactattcattcagttgcttcgatcaataagtgaactaatggatgcatgtttcttttgataagtgagctaactactttagtcacaaagttcgtgttgatttctaaacatggtatgatggttttgtcatcctattcgattgagtttgggaaaaagcctgcacattctgaaaacaaacagactgcacattgtgtggctgataaggttgagtgggtaaataagatcaaagctattatttagacatactgaaaatatagtgaaggaagcgtaagcaatttttctgctatatttatgcattgtatccttgtaaaattatcaatattgttctgacttgtggggaaaggtatgagagtattcatttttttgcctcttttctgtttgcattccttcttcagtataatgtttgttagaataaccaggtgaatttacaaatttcatatccatatactttcttcgatgacaaatataaatctacctaggtttgtcataactcataggtcaatcattctaacttcaattgacattttttataaaaagtatcataaggaaaataatatattatcataaaagtgacgtccatctatatcaaattttagatattgatggtggtcagagttaaaaaacagtttgccttaagacaaaccaagatgaacttgtatttacaatcgaaggaaatattgcacattgcctagacatttaatttattagataaattcttttgttagttgttcaactttgtacgtcttataagtcacaggaacaatgtttatctagaacttcggtctcaaattatacagtagtgttcagccatacctgccatgtcacaagaaagagagataaaaagtatttaatagtagacctaatgatgctcatttgtaattgtagatattcgtatatcctttttctgcaaccttgtgaaacatgtgatggtttgacttggaacaaactttgggtctgatatagtaaaatgcaatgtatgtggagggaagtagtagaacaagacagaacaagtgccaaataaggttatatagtagaatacaatgtgtggagggaaatagtagaacaacacaaaacaagtgccaaataaggttacaaggtttatagtagcgattgcttagctgctacaacgacactcatagattagcctggcatttgcaatgtcgctcttgtatttgccataacctcacttaaggtcacacattgcctctgggaccttgacctccgctactgttgtcgcctggccgcgtcgacttcaccaatgccggggtgtccaacctcatcagcttcaccgtcgtcgactgctcccacacaaccgagctgtgggtcctggtaccggtcgcgccccgcctctgctccttctgcttcagcgagtggcagactatcgatacactcgatttcaattgttttttacgctatttactgtattgcaatgggacaatggatgattaggatttgttttttaagactggcccatgatttatcgtcgtatactatttctttaatagattgttcgctacatctactgatctacatgttcacatgtttcaacttctgtcagcatccgtagttactatatgaatgctcattctgtgtcaccttttaagtttacaaatgctcttttccaggtcacatatggaaagtgaagaacccaaatgatttcttcacaggaaggtgcttacatcttgcttccatgcctcggtagtttcggtcactattagttttgctatgcctttcctacataaataattttgctacctcaaaatgcttctaaatatgatgatttatgctggagactgctaaccttcacacatctaataagatgaagcaacaagctagaaaatgtggaatttgtcatatgtccggatgcaaaacgggtaacttcatgctttccacaatgtgtgtcgacatgatgcttgtagagatggttcgttcctttggttccatgctgacatattcctttctgtgttatcctaagatagccacattattttgatgatatgaggatgattcaaattgattggttgttttttctaatttagcttggaccaatcttcaactcatggggcgcttcatcctcggcctcctacgcatgcacttctcctgcttctcctgctggtcatcgcccaaggatcgtgagggtgttattgcaataatagctgatggagaaatgagaatgattttcaaatgatgacaggattggcagaatgagagcgacaaaggaatgagctaaatcttttgaaatatgaagcaatatgatttctttccagtgttatatttttttatttcctatgcatttcttaaaagtgctattacatgttcacctactaatacccttgtttttcttgcatctcaaggatgaattgctgctcttgaccatagggattggagcagcatgtagtttatactttatcctggttttctctctcgagatgttgcatggtgtcagtgtgtcagatgtgccgtaacagatgactccaaaatggattgcatgctcttcaaatagctacagataactatcttcacataaaatggagagtacaatgtttataaaagaaggaatatggataaggatccagattctcctatagcatatgaagaggcaaaggaaatggcaagccaaagctgcacaatttctgatgatcactcgttgttactgttatccattatctcctcagaggcattgcttttaaattcaacagcagacatggcagcctttcaagatttggcacattgacataatgacatgggttggtcacggattggatgtcaattttgctccctgtaccttgtagattatcggttatgtcaattttcgaaatttctatcgtgatggataacatttgaataaaacatagttaaataaacatgactactgtttcagtctttcgaaattctgatgctatagtgtcagtatactatgtcattttagggaaaatatatgtcatgtttattttgataaaattatatgatttctcactcaattcttgtcggtggcttcaggatttgttattttgtatatcgatctgtgtcatttgacaaagtactttgacttggtataatatgagtgttacttcgaccaaaagagcttggtaaagtgtgagaaactccgcaaacttcttctgcagacgatgactagcaacagttatgacgagggtcaagatagccgccatacatgatacattgagtacaacatcaagataaacactccctccccacacacaacttttgccttccgttcactctgtatgttgtgtttattacggttgcatatgttgtgtttattatggcatcaacacgttccattagaaaatataactattgtttgtcaagtacaaaatcataatcacatcagcttgtaataatattgcatcactgttttgtaccaaattgtaagttgttgtagcaacgcacgggcaccctactagtatatagagtaagttatcattaaattctcaaagcatcacatcaaaatggcacaagacatttaaaacatacttttggatatatatatacacacacacgcccaaacaagctcttagttgggctgtcactttaac

SEQ ID NO: 63310 - DNA, 2329 bp, Zea Mays
tgatgtccaatactgctatagtagcttctccaagttatgacactgttaggaagatggttcaacttctctcgaaatgaagcttctgtcttcctatgtatagacaagttgttcagttaggaggtctagattctcttaaaatggtgctatctacgagttaggaggtctaggagcacactgaatgttttagaggttgatgaaatcgttgttttcctaaaaaagcattttttctgctttgtttgaaattgtttgggttttcctccccaactttcataattacctatttctattgtatgtttgatcatttggacttctactccatccacaattttggtttattcagtgaggaactatgtttttaaccactctatagtttgtatagacatgcaacattcatctcagggtcaagaaagaagctcaacttggcatgcttcctgtttaaagcaaggcaagaaacatccccgccagatctctgtcgccaaagcagggctggtgaagaagttgtgtttccctcccggattgtcactactttcatatttgttcatttatgtttgttccaatttatgttggttttttacagttacagaatatgtttgttccagttgagttccagtttgaaaactggaacaaccactagcagatgcaaagttcacaaagtagcttgtcaaataatgtgcatgaactggaacaagcaacttgtgcacgaatgagcattactggaacaagtagcttgtgcatgaacgagtaatactgtagatgattggacatgtatgtctattttagatttttaatatttaatgttatatattcagctcataccatacatgaatttgcatttctgtactatactcacttaatgtcctacctgttttgttagcttcaactatccgctttaaactgacaaaaccagaccaaacatatgcaaatctcatatacctgtgaaagcaacaactgatttgccagattggttaattaaacgtaacaataaatagccccgattaaatggcttataaatatacttggatctgttcatttttcacatatcagctattaatgaagccttcactgggttcattttgtactactccattacttatttacagttacaagtattctaagaaacttaatatttcatcatcaaagttgtattcagacagtttcatttacattgctctgattttttgtactaggagctactgacaatggaaagcaacgattagagtaacttgatgagtgaggactattcattcagttgcttcgatcaataagtgaactaatggatgcatgtttcttttgataagtcacatatggaaagtgaagaacccaaatgatttcttcacaggaagcttggaccaatcttcaactcatggggcgcttcatcctcggcctcctacgcatgcacttctcctgcttctcctgctggtcatcgcccaaggatgaattgctgctcttgaccatagggattggagcagcatgtagtttatactttatcctggttttctctctcgagtgtgtcagatgtgccgtaacagatgactccaaaatggattgcatgctcttcaaatagctacagataactatcttcacataaaatggagagtacaatgtttataaaagaaggaatatggataaggatccagattctcctatagcatatgaagaggcaaaggaaatggcaagccaaagctgcacaatttctgatgatcactcgttgttactgttatccattatctcctcagaggcattgcttttaaattcaacagcagacatggcaggatttgttattttgtatatcgatctgtgtcatttgacaaagtactttgacttggtataatatgagtgttacttcgaccaaaagagcttggtaaagtgtgagaaactccgcaaacttcttctgcagacgatgactagcaacagttatgacgagggtcaagatagccgccatacatgatacattgagtacaacatcaagataaacactccctccccacacacaacttttgccttccgttcactctgtatgttgtgtttattacggttgcatatgttgtgtttattatggcatcaacacgttccattagaaaatataactattgtttgtcaagtacaaaatcataatcacatcagcttgtaataatattgcatcactgttttgtaccaaattgtaagttgttgtagcaacgcacgggcaccctactagtatatagagtaagttatcattaaattctcaaagcatcacatcaaaatggcacaagacatttaaaacatacttttggatatatatatacacacacacgcccaaacaagctcttagttgggctgtcactttaac

SEQ ID NO: 63311 - DNA, 3922 bp, Zea Mays
tgatgtccaatactgctatagtagcttctccaagttatgacactgttaggaagatggttcaacttctctcgaaatgaagcttctgtcttcctatgtatagacaagttgttcagttaggaggtctagattctcttaaaatggtgctatctacgagttaggaggtctaggagcacactgaatgttttagaggttgatgaaatcgttgttttcctaaaaaagcattttttctgctttgtttgaaattgtttgggttttcctccccaactttcataattacctatttctattgtatgtttgatcatttggacttctactccatccacaattttggtttattcagtgaggaactatgtttttaaccactctatagtttgtatagacatgcaacattcatctcagggtcaagaaagaagctcaacttggcatgcttcctgtttaaagcaaggcaagaaacatccccgccagatctctgtcgccaaagcagggctggtgaagaagttgtgtttccctcccggattgtcactactttcatatttgttcatttatgtttgttccaatttatgttggttttttacagttacagaatatgtttgttccagttgagttccagtttgaaaactggaacaaccactagcagatgcaaagttcacaaagtagcttgtcaaataatgtgcatgaactggaacaagcaacttgtgcacgaatgagcattactggaacaagtagcttgtgcatgaacgagtaatactgtagatgattggacatgtatgtctattttagatttttaatatttaatgttatatattcagctcataccatacatgaatttgcatttctgtactatactcacttaatgtcctacctgttttgttagcttcaactatccgctttaaactgacaaaaccagaccaaacatatgcaaatctcatatacctgtgaaagcaacaactgatttgccagattggttaattaaacgtaacaataaatagccccgattaaatggcttataaatatacttggatctgttcatttttcacatatcagctattaatgaagccttcactgggttcattttgtactactccattacttatttacagttacaagtattctaagaaacttaatatttcatcatcaaagttgtattcagacagtttcatttacattgctctgattttttgtactaggagctactgacaatggaaagcaacgattagagtaacttgatgagtgaggactattcattcagttgcttcgatcaataagtgaactaatggatgcatgtttcttttgataagtgagctaactactttagtcacaaagttcgtgttgatttctaaacatggtatgatggttttgtcatcctattcgattgagtttgggaaaaagcctgcacattctgaaaacaaacagactgcacattgtgtggctgataaggttgagtgggtaaataagatcaaagctattatttagacatactgaaaatatagtgaaggaagcgtaagcaatttttctgctatatttatgcattgtatccttgtaaaattatcaatattgttctgacttgtggggaaaggtatgagagtattcatttttttgcctcttttctgtttgcattccttcttcagtataatgtttgttagaataaccaggtgaatttacaaatttcatatccatatactttcttcgatgacaaatataaatctacctaggtttgtcataactcataggtcaatcattctaacttcaattgacattttttataaaaagtatcataaggaaaataatatattatcataaaagtgacgtccatctatatcaaattttagatattgatggtggtcagagttaaaaaacagtttgccttaagacaaaccaagatgaacttgtatttacaatcgaaggaaatattgcacattgcctagacatttaatttattagataaattcttttgttagttgttcaactttgtacgtcttataagtcacaggaacaatgtttatctagaacttcggtctcaaattatacagtagtgttcagccatacctgccatgtcacaagaaagagagataaaaagtatttaatagtagacctaatgatgctcatttgtaattgtagatattcgtatatcctttttctgcaaccttgtgaaacatgtgatggtttgacttggaacaaactttgggtctgatatagtaaaatgcaatgtatgtggagggaagtagtagaacaagacagaacaagtgccaaataaggttatatagtagaatacaatgtgtggagggaaatagtagaacaacacaaaacaagtgccaaataaggttacaaggtttatagtagcgattgcttagctgctacaacgacactcatagattagcctggcatttgcaatgtcgctcttgtatttgccataacctcacttaaggtcacacattgcctctgggaccttgacctccgctactgttgtcgcctggccgcgtcgacttcaccaatgccggggtgtccaacctcatcagcttcaccgtcgtcgactgctcccacacaaccgagctgtgggtcctggtaccggtcgcgccccgcctctgctccttctgcttcagcgagtggcagactatcgatacactcgatttcaattgttttttacgctatttactgtattgcaatgggacaatggatgattaggatttgttttttaagactggcccatgatttatcgtcgtatactatttctttaatagattgttcgctacatctactgatctacatgttcacatgtttcaacttctgtcagcatccgtagttactatatgaatgctcattctgtgtcaccttttaagtttacaaatgctcttttccaggtcacatatggaaagtgaagaacccaaatgatttcttcacaggaagcttggaccaatcttcaactcatggggcgcttcatcctcggcctcctacgcatgcacttctcctgcttctcctgctggtcatcgcccaagtgtgtcagatgtgccgtaacagatgactccaaaatggattgcatgctcttcaaatagctacagataactatcttcacataaaatggagagtacaatgtttataaaagaaggaatatggataaggatccagattctcctatagcatatgaagaggcaaaggaaatggcaagccaaagctgcacaatttctgatgatcactcgttgttactgttatccattatctcctcagaggcattgcttttaaattcaacagcagacatggcaggtgcaggtcctatcctatccattatctacccctgcatgtgtgccagctattctactctatgtttcaatagtttggaaataattcagagctaaggttttctgatacaggatttgttattttgtatatcgatctgtgtcatttgacaaagtactttgacttggtataatatgagtgttacttcgaccaaaagagcttggtaaagtgtgagaaactccgcaaacttcttctgcagacgatgactagcaacagttatgacgagggtcaagatagccgccatacatgatacattgagtacaacatcaagataaacactccctccccacacacaacttttgccttccgttcactctgtatgttgtgtttattacggttgcatatgttgtgtttattatggcatcaacacgttccattagaaaatataactattgtttgtcaagtacaaaatcataatcacatcagcttgtaataatattgcatcactgttttgtaccaaattgtaagttgttgtagcaacgcacgggcaccctactagtatatagagtaagttatcattaaattctcaaagcatcacatcaaaatggcacaagacatttaaaacatacttttggatatatatatacacacacacgcccaaacaagctcttagttgggctgtcactttaac

SEQ ID NO: 63312 - DNA, 2667 bp, Zea Mays
tgatgtccaatactgctatagtagcttctccaagttatgacactgttaggaagatggttcaacttctctcgaaatgaagcttctgtcttcctatgtatagacaagttgttcagttaggaggtctagattctcttaaaatggtgctatctacgagttaggaggtctaggagcacactgaatgttttagaggttgatgaaatcgttgttttcctaaaaaagcattttttctgctttgtttgaaattgtttgggttttcctccccaactttcataattacctatttctattgtatgtttgatcatttggacttctactccatccacaattttggtttattcagtgaggaactatgtttttaaccactctatagtttgtatagacatgcaacattcatctcagggtcaagaaagaagctcaacttggcatgcttcctgtttaaagcaaggcaagaaacatccccgccagatctctgtcgccaaagcagggctggtgaagaagttgtgtttccctcccggattgtcactactttcatatttgttcatttatgtttgttccaatttatgttggttttttacagttacagaatatgtttgttccagttgagttccagtttgaaaactggaacaaccactagcagatgcaaagttcacaaagtagcttgtcaaataatgtgcatgaactggaacaagcaacttgtgcacgaatgagcattactggaacaagtagcttgtgcatgaacgagtaatactgtagatgattggacatgtatgtctattttagatttttaatatttaatgttatatattcagctcataccatacatgaatttgcatttctgtactatactcacttaatgtcctacctgttttgttagcttcaactatccgctttaaactgacaaaaccagaccaaacatatgcaaatctcatatacctgtgaaagcaacaactgatttgccagattggttaattaaacgtaacaataaatagccccgattaaatggcttataaatatacttggatctgttcatttttcacatatcagctattaatgaagccttcactgggttcattttgtactactccattacttatttacagttacaagtattctaagaaacttaatatttcatcatcaaagttgtattcagacagtttcatttacattgctctgattttttgtactaggagctactgacaatggaaagcaacgattagagtaacttgatgagtgaggactattcattcagttgcttcgatcaataagtgaactaatggatgcatgtttcttttgataagtcacatatggaaagtgaagaacccaaatgatttcttcacaggaagcttggaccaatcttcaactcatggggcgcttcatcctcggcctcctacgcatgcacttctcctgcttctcctgctggtcatcgcccaagatgttgcatggtgtcagtgtgtcagatgtgccgtaacagatgactccaaaatggattgcatgctcttcaaatagctacagataactatcttcacataaaatggagagtacaatgtttataaaagaaggaatatggataaggatccagattctcctatagcatatgaagaggcaaaggaaatggcaagccaaagctgcacaatttctgatgatcactcgttgttactgttatccattatctcctcagaggcattgcttttaaattcaacagcagacatggcaggtgcaggtcctatcctatccattatctacccctgcatgtgtgccagctattctactctatgtttcaatagtttggaaataattcagagctaaggttttctgatacagcctttcaagatttggcacattgacataatgacatgggttggtcacggattggatgtcaattttgctccctgtaccttgtagattatcggttatgtcaattttcgaaatttctatcgtgatggataacatttgaataaaacatagttaaataaacatgactactgtttcagtctttcgaaattctgatgctatagtgtcagtatactatgtcattttagggaaaatatatgtcatgtttattttgataaaattatatgatttctcactcaattcttgtcggtggcttcaggatttgttattttgtatatcgatctgtgtcatttgacaaagtactttgacttggtataatatgagtgttacttcgaccaaaagagcttggtaaagtgtgagaaactccgcaaacttcttctgcagacgatgactagcaacagttatgacgagggtcaagatagccgccatacatgatacattgagtacaacatcaagataaacactccctccccacacacaacttttgccttccgttcactctgtatgttgtgtttattacggttgcatatgttgtgtttattatggcatcaacacgttccattagaaaatataactattgtttgtcaagtacaaaatcataatcacatcagcttgtaataatattgcatcactgttttgtaccaaattgtaagttgttgtagcaacgcacgggcaccctactagtatatagagtaagttatcattaaattctcaaagcatcacatcaaaatggcacaagacatttaaaacatacttttggatatatatatacacacacacgcccaaacaagctcttagttgggctgtcactttaac

SEQ ID NO: 63313 - DNA, 2847 bp, Zea Mays
tgatgtccaatactgctatagtagcttctccaagttatgacactgttaggaagatggttcaacttctctcgaaatgaagcttctgtcttcctatgtatagacaagttgttcagttaggaggtctagattctcttaaaatggtgctatctacgagttaggaggtctaggagcacactgaatgttttagaggttgatgaaatcgttgttttcctaaaaaagcattttttctgctttgtttgaaattgtttgggttttcctccccaactttcataattacctatttctattgtatgtttgatcatttggacttctactccatccacaattttggtttattcagtgaggaactatgtttttaaccactctatagtttgtatagacatgcaacattcatctcagggtcaagaaagaagctcaacttggcatgcttcctgtttaaagcaaggcaagaaacatccccgccagatctctgtcgccaaagcagggctggtgaagaagttgtgtttccctcccggattgtcactactttcatatttgttcatttatgtttgttccaatttatgttggttttttacagttacagaatatgtttgttccagttgagttccagtttgaaaactggaacaaccactagcagatgcaaagttcacaaagtagcttgtcaaataatgtgcatgaactggaacaagcaacttgtgcacgaatgagcattactggaacaagtagcttgtgcatgaacgagtaatactgtagatgattggacatgtatgtctattttagatttttaatatttaatgttatatattcagctcataccatacatgaatttgcatttctgtactatactcacttaatgtcctacctgttttgttagcttcaactatccgctttaaactgacaaaaccagaccaaacatatgcaaatctcatatacctgtgaaagcaacaactgatttgccagattggttaattaaacgtaacaataaatagccccgattaaatggcttataaatatacttggatctgttcatttttcacatatcagctattaatgaagccttcactgggttcattttgtactactccattacttatttacagttacaagtattctaagaaacttaatatttcatcatcaaagttgtattcagacagtttcatttacattgctctgattttttgtactaggagctactgacaatggaaagcaacgattagagtaacttgatgagtgaggactattcattcagttgcttcgatcaataagtgaactaatggatgcatgtttcttttgataagtcacatatggaaagtgaagaacccaaatgatttcttcacaggaagatgaagcaacaagctagaaaatgtggaatttgtcatatgtccggatgcaaaacgggtaacttcatgctttccacaatgtgtgtcgacatgatgcttgtagagatgcttggaccaatcttcaactcatggggcgcttcatcctcggcctcctacgcatgcacttctcctgcttctcctgctggtcatcgcccaaggatgaattgctgctcttgaccatagggattggagcagcatgtagtttatactttatcctggttttctctctcgagatgttgcatggtgtcagtgtgtcagatgtgccgtaacagatgactccaaaatggattgcatgctcttcaaatagctacagataactatcttcacataaaatggagagtacaatgtttataaaagaaggaatatggataaggatccagattctcctatagcatatgaagaggcaaaggaaatggcaagccaaagctgcacaatttctgatgatcactcgttgttactgttatccattatctcctcagaggcattgcttttaaattcaacagcagacatggcaggtgcaggtcctatcctatccattatctacccctgcatgtgtgccagctattctactctatgtttcaatagtttggaaataattcagagctaaggttttctgatacagcctttcaagatttggcacattgacataatgacatgggttggtcacggattggatgtcaattttgctccctgtaccttgtagattatcggttatgtcaattttcgaaatttctatcgtgatggataacatttgaataaaacatagttaaataaacatgactactgtttcagtctttcgaaattctgatgctatagtgtcagtatactatgtcattttagggaaaatatatgtcatgtttattttgataaaattatatgatttctcactcaattcttgtcggtggcttcaggatttgttattttgtatatcgatctgtgtcatttgacaaagtactttgacttggtataatatgagtgttacttcgaccaaaagagcttggtaaagtgtgagaaactccgcaaacttcttctgcagacgatgactagcaacagttatgacgagggtcaagatagccgccatacatgatacattgagtacaacatcaagataaacactccctccccacacacaacttttgccttccgttcactctgtatgttgtgtttattacggttgcatatgttgtgtttattatggcatcaacacgttccattagaaaatataactattgtttgtcaagtacaaaatcataatcacatcagcttgtaataatattgcatcactgttttgtaccaaattgtaagttgttgtagcaacgcacgggcaccctactagtatatagagtaagttatcattaaattctcaaagcatcacatcaaaatggcacaagacatttaaaacatacttttggatatatatatacacacacacgcccaaacaagctcttagttgggctgtcactttaac

SEQ ID NO: 63314 - DNA, 927 bp, Zea Mays
cggtaatggcggtggctcgttccctcccctagcccccggcgtcacccgtccctcccctcctgccgctgccgccgccgccgccgccgggataccgaccgccctcggtcctccgcggccgcatcacgccacgcgaccgaccttccctgctgcggcgtttcggaaacaaaacggagaagtgtcgtcccttgcagagagggttcaggggtctggatatcctgacgaaactgactcgagccgatggggtgctgtggaagcagtgccgtagatgacgaggaacatctggactacagctccggaagagtgaccatcataccagacctgaagtgttgggagcagaaattggaggaagcgaatgaacttggacagacagaacgctgctccactatacgccgagctttccttgaagcattctgatcttgttttcttctccattgacgtcgacgaactgccggaattggtcacgcaattcgatgtacgcgcaactccaacgttcatcttcatgagagacatgaaggagatcgacaagctggtcgggggcaaccaggaagaactccagaagaagttcgatccgtactgccagtgacagtagaggcgatccatggccggattcgtctgtcagtataggatcagaacgagcatggccaaacatctgattggctgaaagaaggagcaggtcagaattttgcagccagttgatgagctctctctgcgagtgtctgcatctgcatagattcgaggaactgaagcaaaggaagtaggatctctgtctagcataatgtaaggttagttagtgtgtgaaactctgcaccacattgttcacagcattcccatacagaaaagttgtaacatcagttaccagatgactcccttttgaatttgggatgcctcccactgccggtatggtatgcccaaggattcaataatgcg

SEQ ID NO: 63315 - DNA, 4007 bp, Zea Mays
cgcacagagagtttgcattgcacacacaggtcgcaggcgcgcgcatccgcaccacggcgccccatccctcccgtcagcgtcgctgcctgcctgcctgcctgcgtccgctcgcaactgcaacgacagggaggcgcgcggggagggagagggacaaaccgagaaaggcacggcacagctgcctgcctcggccctcggcacgcgctcgcgccctggtgactggtgaacactgaggactggaggcggtgggcgcggcgggtccagccaccgcgcggttcacggcggggcgcggcgcgggcgaatgccggccgtttcaacggcgggcggatcggcctgttcccctggcgctgctggcgccccccctaggcggtgactgcgaggcccgatcctgaggcgggcggcgactccgagagggcggttggctggttttcttgccaagtgccagtcagtctctctcgtctcggcgacgccgcgcgaaggtcggaactcggaatcctcttcccggcgtcgtcatcccacccccgtcggttcccttctaactcctggctcctggggccgccgccgagccgaggagaggcgcacgcgcctcgggaatggagctggcgcctccgctccgcctacgggatccgagcctgggatggcttcctgcaacttgcgcagaaaaaaaggctaaagaatgatacgtagctactagctaaaagatgtgttggcctcttttatatggcacatgatcctagctgtccttttggtaaagagattgagataaaccagcagatctgtttgggttcgggcctttcggttgagcctaaagactaaagagaagacaagatgcgtcattctgctacagagaggagattgctgtgtgcaagttgaaatatcaatgtgggcaccacttttgtcagtctcatgaatttaaatggatcattccaagtatgaccttccaccagccttctctcattgatgaggattaatatgctggaatctcctaaggaagtcatatttatattttactgcatgtgtatgctacttgttgtgtttctgctggagctcatgcaccaacttcgtaaaactatggtgtcaaaccttattggccacacaatacttgccattcttgcaagtgtagttgtggtacgagaaacttcttttaacaggattgtagatgtgatatttaatgaaggaaatgtctggtttgacatttaaacttaagaagtggtaatgcttcttagaattcctcagtttttttggggggtagttactgtgattgtatcttatctagatgatcaaaattatgaaatgagttgctcctccttaccttttgtggtttccggttgctgtttactccctccgtcccaaaatattagcattcgttttaggatgtcaatagattcatataatatttgatgtatgtgttttatattatggacacaaaaacaaagtgttaaaacgaactgtatattgggacggagggagtacttattagttgcagagtatataaatgtccactggaaaacttaaatctgttatgcttgttatccatattcacatccctttcctttctaccttgtttctaactttctatataccaaactgaaaatttcactgttcatatttattcttataaaccatggacctttatcgtgtattgctgacttctattagccttttatgtgtcaggactcaagtgtgatgaactgatggggactcttggactataactggtttcctcttattcttccagccaatcctgacaaatgtggcatctcaagctgatagctttaatttatggctctcttttctttatgcacattccatatgctagaggttctgacctaaacaccgataagcaggcccttcttgcatttgctgcatcactgcctcatggcagaaaggtcaactggacctccacaacccaagtctgcacgtcctgggttggcattacatgcacaccggacatgaagcgtgtgcgtgaagtcaggttacctgcaatagggctctttggtcctatcccatcaggcacacttagcaagctcgatgccttggaggtgttgagccttaggtcaaaccgtcttactattaatctccctcctgatgtaccatctattccctcacttcgctctctttatcttcaacacaataacctgtctggaatcataccaagttcactttcttccagtctaacattcttagacctgtcctataactcgttcaatggagaaataccatcgaaggtgcaagacatcactgaactgacagcattgcttctccagaacaactctctttctggacccatccctgaccttcgcctccccaagttgagacatttggatttgagcaacaataacctgagtggacctataccaccctccctgcagaagttcccagctacttcttttctgggaaatgcctttctgtgtggatttccattggaaccatgtccagggacaccacctgcttctccatcgtcgccatcgtcccaaaatgccaaaagaagcttctggaaaaagctcagccttggtatcataattgcaatagttgctggaggaggggttgtattcatattgatcctgatcctcttggtatgtatcttcaaaagaaagaaaaatgcagagtctggcataggatcatcttcatccaaaggaaaggcaattgcaggtaaaaggggagaaaaatccaagggggaatacagcagcagtggtattcaagaagcagagagaaataaactgtttttctttgagggctcttcatataattttgacttggaggatctgttgagggcttcggctgaagtccttggaaaaggaagttatgggactacgtacaaagctgttctggaggatggaacaacagtggtggtcaagagattgaaggaagtggtggcgggaaagagggaatttgaacagcagatggagctaattggcaaggtttgccatcatcagaacactgccccattgcgtgcttactactactccaaggatgagaagctcttggtgtatgactatgtcccactaggtagcctttgtgctgctttgcatggtaacaaagctgctggaagaaccccattggactgggagaccagggtgaagatagctctgggcactgcacgcggaatggcttatcttcactccgtgggtagcggcgggaagttcattcacgggaacatcaagtcaagcaacatccttctctcacaggaactcggcgcctgcgtcaccgagttcggccttgcccagctcatgtccacgccccacgtccacccgcggctcgtcgggtaccggtcgcccgaggtcctcgagaccaggaaaccgacgcagaaatctgacgtctacagcttcggcgtcctcctcctcgagatgctcacaggcaaagcccctctcaggtcccccgggcgcgacgactccatcgaacacctcccgaggtgggtgcagtccgtggtccgggaggagtggacgtcggaggtcttcgacgtcgacctgctgaggcacccgaacctagaggacgagatggtccagatgctccacgtcgcgatggcatgcgtcgcggtcgtccccgacgagcggcctcggatggaggaggtggtcggcaggatcgaggagatccggagctcctactcggacacgaagacgtccccggaggacaatccgagggagggcgctttctaataaatcaccgagtaccacacgtaccggaacggcagtgacttgccgtctacagaaagtaggtcggttggtttgacagctctgtgtccagtgaagctttgcagtcagtcagttgattattcctgatcattctttggtaaaagttgttttctgttcttggttccatgaggtagccccggaacgctggtggtggtttcgtttcattagcgctgctgattactgtagggtgttgtttgtggatcgtgccgcgactcggtttcgtattcgtttgaggcagcccgactctttcaagtttgatttattgaatgcgcataagtttttgccactttcctgtgccttacatacacctaattgttg

SEQ ID NO: 63316 - DNA, 3263 bp, Zea Mays
cgcacagagagtttgcattgcacacacaggtcgcaggcgcgcgcatccgcaccacggcgccccatccctcccgtcagcgtcgctgcctgcctgcctgcctgcgtccgctcgcaactgcaacgacagggaggcgcgcggggagggagagggacaaaccgagaaaggcacggcacagctgcctgcctcggccctcggcacgcgctcgcgccctggtgactggtgaacactgaggactggaggcggtgggcgcggcgggtccagccaccgcgcggttcacggcggggcgcggcgcgggcgaatgccggccgtttcaacggcgggcggatcggcctgttcccctggcgctgctggcgccccccctaggcggtgactgcgaggcccgatcctgaggcgggcggcgactccgagagggcggttggctggttttcttgccaagtgccagtcagtctctctcgtctcggcgacgccgcgcgaaggtcggaactcggaatcctcttcccggcgtcgtcatcccacccccgtcggttcccttctaactcctggctcctggggccgccgccgagccgaggagaggcgcacgcgcctcgggaatggagctggcgcctccgctccgcctacgggatccgagcctgggatggcttcctgcaacttgcgcagaaaaaaaggctaaagaatgatacgtagctactagctaaaagatgtgttggcctcttttatatggcacatgatcctagctgtccttttggtaaagagattgagataaaccagcagatctgtttgggttcgggcctttcggttgagcctaaagactaaagagaagacaagatgcgtcattctgctacagagaggagattgctgtgtgcaagttgaaatatcaatgtgggcaccacttttgtcagtctcatgaatttaaatggatcattccaagactcaagtgtgatgaactgatggggactcttggactataactggtttcctcttattcttccagccaatcctgacaaatgtggcatctcaagctgatagctttaatttatggctctcttttctttatgcacattccatatgctagaggttctgacctaaacaccgataagcaggcccttcttgcatttgctgcatcactgcctcatggcagaaaggtcaactggacctccacaacccaagtctgcacgtcctgggttggcattacatgcacaccggacatgaagcgtgtgcgtgaagtcaggttacctgcaatagggctctttggtcctatcccatcaggcacacttagcaagctcgatgccttggaggtgttgagccttaggtcaaaccgtcttactattaatctccctcctgatgtaccatctattccctcacttcgctctctttatcttcaacacaataacctgtctggaatcataccaagttcactttcttccagtctaacattcttagacctgtcctataactcgttcaatggagaaataccatcgaaggtgcaagacatcactgaactgacagcattgcttctccagaacaactctctttctggacccatccctgaccttcgcctccccaagttgagacatttggatttgagcaacaataacctgagtggacctataccaccctccctgcagaagttcccagctacttcttttctgggaaatgcctttctgtgtggatttccattggaaccatgtccagggacaccacctgcttctccatcgtcgccatcgtcccaaaatgccaaaagaagcttctggaaaaagctcagccttggtatcataattgcaatagttgctggaggaggggttgtattcatattgatcctgatcctcttggtatgtatcttcaaaagaaagaaaaatgcagagtctggcataggatcatcttcatccaaaggaaaggcaattgcaggtaaaaggggagaaaaatccaagggggaatacagcagcagtggtattcaagaagcagagagaaataaactgtttttctttgagggctcttcatataattttgacttggaggatctgttgagggcttcggctgaagtccttggaaaaggaagttatgggactacgtacaaagctgttctggaggatggaacaacagtggtggtcaagagattgaaggaagtggtggcgggaaagagggaatttgaacagcagatggagctaattggcaaggtttgccatcatcagaacactgccccattgcgtgcttactactactccaaggatgagaagctcttggtgtatgactatgtcccactaggtagcctttgtgctgctttgcatggtaacaaagctgctggaagaaccccattggactgggagaccagggtgaagatagctctgggcactgcacgcggaatggcttatcttcactccgtgggtagcggcgggaagttcattcacgggaacatcaagtcaagcaacatccttctctcacaggaactcggcgcctgcgtcaccgagttcggccttgcccagctcatgtccacgccccacgtccacccgcggctcgtcgggtaccggtcgcccgaggtcctcgagaccaggaaaccgacgcagaaatctgacgtctacagcttcggcgtcctcctcctcgagatgctcacaggcaaagcccctctcaggtcccccgggcgcgacgactccatcgaacacctcccgaggtgggtgcagtccgtggtccgggaggagtggacgtcggaggtcttcgacgtcgacctgctgaggcacccgaacctagaggacgagatggtccagatgctccacgtcgcgatggcatgcgtcgcggtcgtccccgacgagcggcctcggatggaggaggtggtcggcaggatcgaggagatccggagctcctactcggacacgaagacgtccccggaggacaatccgagggagggcgctttctaataaatcaccgagtaccacacgtaccggaacggcagtgacttgccgtctacagaaagtaggtcggttggtttgacagctctgtgtccagtgaagctttgcagtcagtcagttgattattcctgatcattctttggtaaaagttgttttctgttcttggttccatgaggtagccccggaacgctggtggtggtttcgtttcattagcgctgctgattactgtagggtgttgtttgtggatcgtgccgcgactcggtttcgtattcgtttgaggcagcccgactctttcaagtttgatttattgaatgcgcataagtttttgccactttcctgtgccttacatacacctaattgttg

SEQ ID NO: 63317 - DNA, 2985 bp, Zea Mays
cgcacagagagtttgcattgcacacacaggtcgcaggcgcgcgcatccgcaccacggcgccccatccctcccgtcagcgtcgctgcctgcctgcctgcctgcgtccgctcgcaactgcaacgacagggaggcgcgcggggagggagagggacaaaccgagaaaggcacggcacagctgcctgcctcggccctcggcacgcgctcgcgccctggtgactggtgaacactgaggactggaggcggtgggcgcggcgggtccagccaccgcgcggttcacggcggggcgcggcgcgggcgaatgccggccgtttcaacggcgggcggatcggcctgttcccctggcgctgctggcgccccccctaggcggtgactgcgaggcccgatcctgaggcgggcggcgactccgagagggcggttggctggttttcttgccaagtgccagtcagtctctctcgtctcggcgacgccgcgcgaaggtcggaactcggaatcctcttcccggcgtcgtcatcccacccccgtcggttcccttctaactcctggctcctggggccgccgccgagccgaggagaggcgcacgcgcctcgggaatggagctggcgcctccgctccgcctacgggatccgagcctgggatggcttcctgcaacttgcgcagtgtgatgaactgatggggactcttggactataactggtttcctcttattcttccagccaatcctgacaaatgtggcatctcaagctgatagctttaatttatggctctcttttctttatgcacattccatatgctagaggttctgacctaaacaccgataagcaggcccttcttgcatttgctgcatcactgcctcatggcagaaaggtcaactggacctccacaacccaagtctgcacgtcctgggttggcattacatgcacaccggacatgaagcgtgtgcgtgaagtcaggttacctgcaatagggctctttggtcctatcccatcaggcacacttagcaagctcgatgccttggaggtgttgagccttaggtcaaaccgtcttactattaatctccctcctgatgtaccatctattccctcacttcgctctctttatcttcaacacaataacctgtctggaatcataccaagttcactttcttccagtctaacattcttagacctgtcctataactcgttcaatggagaaataccatcgaaggtgcaagacatcactgaactgacagcattgcttctccagaacaactctctttctggacccatccctgaccttcgcctccccaagttgagacatttggatttgagcaacaataacctgagtggacctataccaccctccctgcagaagttcccagctacttcttttctgggaaatgcctttctgtgtggatttccattggaaccatgtccagggacaccacctgcttctccatcgtcgccatcgtcccaaaatgccaaaagaagcttctggaaaaagctcagccttggtatcataattgcaatagttgctggaggaggggttgtattcatattgatcctgatcctcttggtatgtatcttcaaaagaaagaaaaatgcagagtctggcataggatcatcttcatccaaaggaaaggcaattgcaggtaaaaggggagaaaaatccaagggggaatacagcagcagtggtattcaagaagcagagagaaataaactgtttttctttgagggctcttcatataattttgacttggaggatctgttgagggcttcggctgaagtccttggaaaaggaagttatgggactacgtacaaagctgttctggaggatggaacaacagtggtggtcaagagattgaaggaagtggtggcgggaaagagggaatttgaacagcagatggagctaattggcaaggtttgccatcatcagaacactgccccattgcgtgcttactactactccaaggatgagaagctcttggtgtatgactatgtcccactaggtagcctttgtgctgctttgcatggtaacaaagctgctggaagaaccccattggactgggagaccagggtgaagatagctctgggcactgcacgcggaatggcttatcttcactccgtgggtagcggcgggaagttcattcacgggaacatcaagtcaagcaacatccttctctcacaggaactcggcgcctgcgtcaccgagttcggccttgcccagctcatgtccacgccccacgtccacccgcggctcgtcgggtaccggtcgcccgaggtcctcgagaccaggaaaccgacgcagaaatctgacgtctacagcttcggcgtcctcctcctcgagatgctcacaggcaaagcccctctcaggtcccccgggcgcgacgactccatcgaacacctcccgaggtgggtgcagtccgtggtccgggaggagtggacgtcggaggtcttcgacgtcgacctgctgaggcacccgaacctagaggacgagatggtccagatgctccacgtcgcgatggcatgcgtcgcggtcgtccccgacgagcggcctcggatggaggaggtggtcggcaggatcgaggagatccggagctcctactcggacacgaagacgtccccggaggacaatccgagggagggcgctttctaataaatcaccgagtaccacacgtaccggaacggcagtgacttgccgtctacagaaagtaggtcggttggtttgacagctctgtgtccagtgaagctttgcagtcagtcagttgattattcctgatcattctttggtaaaagttgttttctgttcttggttccatgaggtagccccggaacgctggtggtggtttcgtttcattagcgctgctgattactgtagggtgttgtttgtggatcgtgccgcgactcggtttcgtattcgtttgaggcagcccgactctttcaagtttgatttattgaatgcgcataagtttttgccactttcctgtgccttacatacacctaattgttg

SEQ ID NO: 63318 - DNA, 3008 bp, Zea Mays
cgcacagagagtttgcattgcacacacaggtcgcaggcgcgcgcatccgcaccacggcgccccatccctcccgtcagcgtcgctgcctgcctgcctgcctgcgtccgctcgcaactgcaacgacagggaggcgcgcggggagggagagggacaaaccgagaaaggcacggcacagctgcctgcctcggccctcggcacgcgctcgcgccctggtgactggtgaacactgaggactggaggcggtgggcgcggcgggtccagccaccgcgcggttcacggcggggcgcggcgcgggcgaatgccggccgtttcaacggcgggcggatcggcctgttcccctggcgctgctggcgccccccctaggcggtgactgcgaggcccgatcctgaggcgggcggcgactccgagagggcggttggctggttttcttgccaagtgccagtcagtctctctcgtctcggcgacgccgcgcgaaggtcggaactcggaatcctcttcccggcgtcgtcatcccacccccgtcggttcccttctaactcctggctcctggggccgccgccgagccgaggagaggcgcacgcgcctcgggaatggagctggcgcctccgctccgcctacgggatccgagcctgggatggcttcctgcaacttgcgcagccttttatgtgtcaggactcaagtgtgatgaactgatggggactcttggactataactggtttcctcttattcttccagccaatcctgacaaatgtggcatctcaagctgatagctttaatttatggctctcttttctttatgcacattccatatgctagaggttctgacctaaacaccgataagcaggcccttcttgcatttgctgcatcactgcctcatggcagaaaggtcaactggacctccacaacccaagtctgcacgtcctgggttggcattacatgcacaccggacatgaagcgtgtgcgtgaagtcaggttacctgcaatagggctctttggtcctatcccatcaggcacacttagcaagctcgatgccttggaggtgttgagccttaggtcaaaccgtcttactattaatctccctcctgatgtaccatctattccctcacttcgctctctttatcttcaacacaataacctgtctggaatcataccaagttcactttcttccagtctaacattcttagacctgtcctataactcgttcaatggagaaataccatcgaaggtgcaagacatcactgaactgacagcattgcttctccagaacaactctctttctggacccatccctgaccttcgcctccccaagttgagacatttggatttgagcaacaataacctgagtggacctataccaccctccctgcagaagttcccagctacttcttttctgggaaatgcctttctgtgtggatttccattggaaccatgtccagggacaccacctgcttctccatcgtcgccatcgtcccaaaatgccaaaagaagcttctggaaaaagctcagccttggtatcataattgcaatagttgctggaggaggggttgtattcatattgatcctgatcctcttggtatgtatcttcaaaagaaagaaaaatgcagagtctggcataggatcatcttcatccaaaggaaaggcaattgcaggtaaaaggggagaaaaatccaagggggaatacagcagcagtggtattcaagaagcagagagaaataaactgtttttctttgagggctcttcatataattttgacttggaggatctgttgagggcttcggctgaagtccttggaaaaggaagttatgggactacgtacaaagctgttctggaggatggaacaacagtggtggtcaagagattgaaggaagtggtggcgggaaagagggaatttgaacagcagatggagctaattggcaaggtttgccatcatcagaacactgccccattgcgtgcttactactactccaaggatgagaagctcttggtgtatgactatgtcccactaggtagcctttgtgctgctttgcatggtaacaaagctgctggaagaaccccattggactgggagaccagggtgaagatagctctgggcactgcacgcggaatggcttatcttcactccgtgggtagcggcgggaagttcattcacgggaacatcaagtcaagcaacatccttctctcacaggaactcggcgcctgcgtcaccgagttcggccttgcccagctcatgtccacgccccacgtccacccgcggctcgtcgggtaccggtcgcccgaggtcctcgagaccaggaaaccgacgcagaaatctgacgtctacagcttcggcgtcctcctcctcgagatgctcacaggcaaagcccctctcaggtcccccgggcgcgacgactccatcgaacacctcccgaggtgggtgcagtccgtggtccgggaggagtggacgtcggaggtcttcgacgtcgacctgctgaggcacccgaacctagaggacgagatggtccagatgctccacgtcgcgatggcatgcgtcgcggtcgtccccgacgagcggcctcggatggaggaggtggtcggcaggatcgaggagatccggagctcctactcggacacgaagacgtccccggaggacaatccgagggagggcgctttctaataaatcaccgagtaccacacgtaccggaacggcagtgacttgccgtctacagaaagtaggtcggttggtttgacagctctgtgtccagtgaagctttgcagtcagtcagttgattattcctgatcattctttggtaaaagttgttttctgttcttggttccatgaggtagccccggaacgctggtggtggtttcgtttcattagcgctgctgattactgtagggtgttgtttgtggatcgtgccgcgactcggtttcgtattcgtttgaggcagcccgactctttcaagtttgatttattgaatgcgcataagtttttgccactttcctgtgccttacatacacctaattgttg

SEQ ID NO: 63319 - DNA, 1657 bp, Zea Mays
cttgtcttctcttaaaacgcagtcgcacagagagtttgcattgcacacacaggtcgcaggcgcgcgcatccgcaccacggcgccccatccctcccgtcagcgtcgctgcctgcctgcctgcctgcgtccgctcgcaactgcaacgacagggaggcgcgcggggagggagagggacaaaccgagaaaggcacggcacagctgcctgcctcggccctcggcacgcgctcgcgccctggtgactggtgaacactgaggactggaggcggtgggcgcggcgggtccagccaccgcgcggttcacggcggggcgcggcgcgggcgaatgccggccgtttcaacggcgggcggatcggcctgttcccctggcgctgctggcgccccccctaggcggtgactgcgaggcccgatcctgaggcgggcggcgactccgagagggcggttggctggttttcttgccaagtgccagtcagtctctctcgtctcggcgacgccgcgcgaaggtcggaactcggaatcctcttcccggcgtcgtcatcccacccccgtcggttcccttctaactcctggctcctggggccgccgccgagccgaggagaggcgcacgcgcctcgggaatggagctggcgcctccgctccgcctacgggatccgagcctgggatggcttcctgcaacttgcgcaggtaacaaagctgctggaagaaccccattggactgggagaccagggtgaagatagctctgggcactgcacgcggaatggcttatcttcactccgtgggtagcggcgggaagttcattcacgggaacatcaagtcaagcaacatccttctctcacaggaactcggcgcctgcgtcaccgagttcggccttgcccagctcatgtccacgccccacgtccacccgcggctcgtcgggtaccggtcgcccgaggtcctcgagaccaggaaaccgacgcagaaatctgacgtctacagcttcggcgtcctcctcctcgagatgctcacaggcaaagcccctctcaggtcccccgggcgcgacgactccatcgaacacctcccgaggtgggtgcagtccgtggtccgggaggagtggacgtcggaggtcttcgacgtcgacctgctgaggcacccgaacctagaggacgagatggtccagatgctccacgtcgcgatggcatgcgtcgcggtcgtccccgacgagcggcctcggatggaggaggtggtcggcaggatcgaggagatccggagctcctactcggacacgaagacgtccccggaggacaatccgagggagggcgctttctaataaatcaccgagtaccacacgtaccggaacggcagtgacttgccgtctacagaaagtaggtcggttggtttgacagctctgtgtccagtgaagctttgcagtcagtcagttgattattcctgatcattctttggtaaaagttgttttctgttcttggttccatgaggtagccccggaacgctggtggtggtttcgtttcattagcgctgctgattactgtagggtgttgtttgtggatcgtgccgcgactcggtttcgtattcgtttgaggcagcccgactctttcaagtttgatttattgaatgcgcataagtttttgccactttcctgtgccttacatacacctaattgttg

SEQ ID NO: 63320 - DNA, 3030 bp, Zea Mays
ctggcacgaacacacttgtcttctcttaaaacgcagtcgcacagagagtttgcattgcacacacaggtcgcaggcgcgcgcatccgcaccacggcgccccatccctcccgtcagcgtcgctgcctgcctgcctgcctgcgtccgctcgcaactgcaacgacagggaggcgcgcggggagggagagggacaaaccgagaaaggcacggcacagctgcctgcctcggccctcggcacgcgctcgcgccctggtgactggtgaacactgaggactggaggcggtgggcgcggcgggtccagccaccgcgcggttcacggcggggcgcggcgcgggcgaatgccggccgtttcaacggcgggcggatcggcctgttcccctggcgctgctggcgccccccctaggcggtgactgcgaggcccgatcctgaggcgggcggcgactccgagagggcggttggctggttttcttgccaagtgccagtcagtctctctcgtctcggcgacgccgcgcgaaggtcggaactcggaatcctcttcccggcgtcgtcatcccacccccgtcggttcccttctaactcctggctcctggggccgccgccgagccgaggagaggcgcacgcgcctcgggaatggagctggcgcctccgctccgcctacgggatccgagcctgggatggcttcctgcaacttgcgcaggactcaagtgtgatgaactgatggggactcttggactataactggtttcctcttattcttccagccaatcctgacaaatgtggcatctcaagctgatagctttaatttatggctctcttttctttatgcacattccatatgctagaggttctgacctaaacaccgataagcaggcccttcttgcatttgctgcatcactgcctcatggcagaaaggtcaactggacctccacaacccaagtctgcacgtcctgggttggcattacatgcacaccggacatgaagcgtgtgcgtgaagtcaggttacctgcaatagggctctttggtcctatcccatcaggcacacttagcaagctcgatgccttggaggtgttgagccttaggtcaaaccgtcttactattaatctccctcctgatgtaccatctattccctcacttcgctctctttatcttcaacacaataacctgtctggaatcataccaagttcactttcttccagtctaacattcttagacctgtcctataactcgttcaatggagaaataccatcgaaggtgcaagacatcactgaactgacagcattgcttctccagaacaactctctttctggacccatccctgaccttcgcctccccaagttgagacatttggatttgagcaacaataacctgagtggacctataccaccctccctgcagaagttcccagctacttcttttctgggaaatgcctttctgtgtggatttccattggaaccatgtccagggacaccacctgcttctccatcgtcgccatcgtcccaaaatgccaaaagaagcttctggaaaaagctcagccttggtatcataattgcaatagttgctggaggaggggttgtattcatattgatcctgatcctcttggtatgtatcttcaaaagaaagaaaaatgcagagtctggcataggatcatcttcatccaaaggaaaggcaattgcaggtaaaaggggagaaaaatccaagggggaatacagcagcagtggtattcaagaagcagagagaaataaactgtttttctttgagggctcttcatataattttgacttggaggatctgttgagggcttcggctgaagtccttggaaaaggaagttatgggactacgtacaaagctgttctggaggatggaacaacagtggtggtcaagagattgaaggaagtggtggcgggaaagagggaatttgaacagcagatggagctaattggcaaggtttgccatcatcagaacactgccccattgcgtgcttactactactccaaggatgagaagctcttggtgtatgactatgtcccactaggtagcctttgtgctgctttgcatggtaacaaagctgctggaagaaccccattggactgggagaccagggtgaagatagctctgggcactgcacgcggaatggcttatcttcactccgtgggtagcggcgggaagttcattcacgggaacatcaagtcaagcaacatccttctctcacaggaactcggcgcctgcgtcaccgagttcggccttgcccagctcatgtccacgccccacgtccacccgcggctcgtcgggtaccggtcgcccgaggtcctcgagaccaggaaaccgacgcagaaatctgacgtctacagcttcggcgtcctcctcctcgagatgctcacaggcaaagcccctctcaggtcccccgggcgcgacgactccatcgaacacctcccgaggtgggtgcagtccgtggtccgggaggagtggacgtcggaggtcttcgacgtcgacctgctgaggcacccgaacctagaggacgagatggtccagatgctccacgtcgcgatggcatgcgtcgcggtcgtccccgacgagcggcctcggatggaggaggtggtcggcaggatcgaggagatccggagctcctactcggacacgaagacgtccccggaggacaatccgagggagggcgctttctaataaatcaccgagtaccacacgtaccggaacggcagtgacttgccgtctacagaaagtaggtcggttggtttgacagctctgtgtccagtgaagctttgcagtcagtcagttgattattcctgatcattctttggtaaaagttgttttctgttcttggttccatgaggtagccccggaacgctggtggtggtttcgtttcattagcgctgctgattactgtagggtgttgtttgtggatcgtgccgcgactcggtttcgtattcgtttgaggcagcccgactctttcaagtttgatttattgaatgcgcataagtttttgccactttcctgtgccttacatacacctaattgttg

SEQ ID NO: 63321 - DNA, 2510 bp, Zea Mays
tcacagcgcagcggcgcagaacttcacgctctcccacgcagcccttccagcaccaccaccaccagcagcaagcatcgtcgtcccccgtccgcctctccgcttccttccaggcttctagccctctctcctcggcatctctagcgcgggcggcatctatagtagccctagccccggccgcggcattggaggaaggcagcggcattggctgcgggaaccggagaaggaggcattgactaggtacaagcctctgtaacctgccggatccggatccgaatccgcgctgccgactgccggagtgttgcctttttgcagtttgggggcaacgaagcttgctctagtctctagagatggaggacctactgggttcggagatcgggaagaacgactacgattggctcctaactcctcctgggaccccacgtgttcctgcactggagggcgctgagaaaacaccatcctcaaatatattaccgaagcgcactacaactagatcatcctcaactaccagagcatctaggctttcaatatctcaaacagagaatgggaattcgacgattcccactagacctgcaagaagtaactctgtcagccgatcatctatccagtcagctctcatgaatggcaacaacaggacatcagttctgaatacaagcatttcttcagtcacttcaagacctacaactcctagtaggcgaagcagcacagttggcacaccaaagcattcagctccagctgcacgtccagtgcctgcaagatcctctactcctgttaatactcgtccatctacaccagcaaaaactcgcccatctactcctacgagaactcgtccaacagcaccaaactcttcaactgattccgctgctgccaagactacattcacacataatgcaaggccatcaactccaaattcccggtcccgtattgttcccaattcatcttcaagtgcaactcatgtaataagccgtccgagcgcctccttgagtgcaacaagcagaccagggtcttcctcaggtaatgttcctgggataagccgtgccacctcattgtcctcaagttcggttccttcaatgagccgttccagctcacgatcatctacacctacacgacagcctgcaattcgctcatcagctccagctattggtcgttctccttctgttggacggacttctagcatcaacagctttacgacttcgtccaggtctgcagccagtactggcaggaactcagcaccttcatctgctccatcatctcgtccaagttctccaaacccacgaccccgagctccagtgcgacctcttgatatccccgattttccaaatgaaactccaccaaatctaaggacaaaattacctgaaagaccaccatctgctggcagatcacggccaggaatggctttaggcataagatcaaccccaaatactgaaccttcagctgcctcagctcctgtgaagaagatctctgtgcctgctgtgagccgaagtaaattttctgatgcatcatcaaagacctctactctcacaaatggacaccaaaatcgacaggctgacaggtccaatattgacagtcaagctaatagaccctcgagaccttccacgggtaccacagataatggatttgggaggtcgatatcaaggaggtcacttgacatggctatcaagcacatggacattcggcagaacttgggtggcattcgcggcacatccctgtttccccagagcatccgctcggctgctgccaaggtccgtccagctcgggcatcagacccagggcatggcatctcaaacggggaccagcgctacagtgacaatggaaagcagcgtgaacggacacctctcccggggactcaaacggggttctctcacgtaatggtggcagctcaaccgattcgccagacagggggagcatcgggaccaaggagaccctgagcgaactggacatctatggtagctcgcgctatgaagcgatgcttctcagggaggacgtgcggaacacaaactggctgcacgggcttgatgacaagcccgaccaaagccccctgttcgaccaccggttcgagccgctgccggagcccttcagcccgttatgacagctgctgcttgtaaattatggtcatcactatgattgactggtcgggttttctgtccttttgtgctgtcaccattacgtgagagaaccccctttgtgctgcaagatgtgtatggttccgtctgttctctgtcctataattgactggttctgcactccccccaatccaatttcagaaaccgaagacgtttgagattgcggggtttgagtctcttgatttgtgcctagagattggttttccactttccacgaattgttggactgaaagaaaaaagatctataaaagggagtaagttgctgtaatgcttggatgctcgctcgtgtgatccctgccatttatgtgctcggtttgctgtaggtgctccttgctactcttgggtagacccgcttagggtccgtttgccatttatgtgctcggtttgctg

SEQ ID NO: 63322 - DNA, 229 bp, Zea Mays
cggagccttggtgatcttcttggacgtgcttgctgctggtgcggtagacgcagaccccgcgccgatctcgcctcatagcaagccacatcgaagtcgccgccctgcgtacatgttgtcgtgcaatggagcgtcaccgccacgccttgcgccgttcgccgtggtgaaggtaccccgcagatccgccgctcaccggggcccgacactctgcgcgacagctgccgaccaaatc

SEQ ID NO: 63323 - DNA, 775 bp, Zea Mays
gaggaatcggccaccactctgcgatccactaccaccatataacgcacgtcgcgacggcggacttcagtgctgctatcagcgcggcgcaggtcgcgtagctgcgggagtcgctcttcccgcgggagcgggagctgaagtaagcaagcggataggatcgacaaggaggtgaattctcgccaaatcccgttcatctggtcactatctgcttgcgtcgtgtctagggtatgtattgtttgatatcctccttctcgaacaattatgttttacgaatgttcgcgtcagctcagtttttgttacttccgcagttcccttctcgggcagattcgattctgttctgagaggaaatagtttgtgtcttcgtcagtttttaaacatcaactaactagctgaatgtctgtgcgttgcaacgggaatatataataccggtatattacgataacttatatacaaaatgtgtgttataccgttatgaaaaaatgtttttcataatcaatttgtgattctggccatatataaattttgttatttatagtctatctgtttcactactatattacaaccaccagtatcatgcagacttcgatatatgtcacgatttaaatggtctcatcattagagagcacgttccacacataccggaagaaattcccccgtacgtcgttagtcatcagacacgtaccaccatacgcttttgcttaaacaaaaaagcaattgtgtgtttgcgaagagaattaaagacaagccggaataaaaactaccccaacggtgacgagga

SEQ ID NO: 63324 - DNA, 1406 bp, Zea Mays
tcatgctgaggtgcatggggatttgggaccatgcttatcatctgggaggcgaaggggtgacttgtcgaagagcattttatgtcaaagatgccctgctttactcacagagatagaaattattgaagacagagatagaccaccatacaaccaccttcgatggacgcgggggataactttgcttgacaatggcttaggtttataccaaataggcatcttgggttctttcttggttttgctgaaaacaagattatattattacaacatgagggcaggattaagtaggcatgatttagtccttagtctcttcatcagatgtttgaatactgaccttcaaggggaatgctccaaaccttccagtggttgccggctaatccggccggtcacaaacaaccaagtagagttgcctcgtacttcatctcgcctggctatttttagtagcatgcctgtagacatcatcgctgatcaaagatcttacagtttgtttcggagtgaagttgagtttggggatcaaggagaggactccattatcttgtcaccgcggctgaaggagattagtactcctgaccgccccgctgccctccgtttcctaggggagaagtataataacctcatggagaggtacaagaagcaggtagtcaagtgttccgaggagtgtgaaccaagatataatggcctgaagaagaagtacacagacgagtgtgcagagaggcggcgtctgtacaatgagcttattgagctaagaggtaacattagggtgttctgcagatgcagacctctgagctctgatgaggtcaaccatgggtgtttatctgttgttgagattgacccatcacacgagactgagctgcagtttgtccccagtgaaaaagaaaggaagccctttaagttcgatcacgtttctgggccagaggatgaccaaggttctcgtggtgagggtggtatccttagaaatagtgaagggccattgaaggaccacatttatttgcatcaaaaccatctgccgcctgaggtactcaaagaaaggctccctggtatttctgaaactgctgctatttttgctggtgttgacgtcaccaaggagcccattccagttttgcctactgtgcactacaatatgggtggtatcccaacgaactaccataaggaggtagtggatatcaagggtgataatccagatgctgttatccctggtctaatggctgctggtgaagcagcctgtgcagcaccgcgttggtggatgattgatcgtccagttgtatgtgactaaaacgccatgccttgtgcattagagaagatacagaatcgtcatgtcctgtacaggacagtgagccaaattcttgttcattttgcactatgatacagattgattcattaggccctaggttggaggttgtgactgatgagtt

SEQ ID NO: 63325 - DNA, 1497 bp, Zea Mays
gcgaccaagcctgatggtcagccgaagcgtggggttctcaacctgcattgcctaatgctgtcatgctgaggtgcatggggatttgggaccatggttcaaagcaagcagtctcaaaatcaagtgatggcttccgtataagagggacttttcagggtctcttgctcatcatttagcatgcttgttatattttgagtcgaaacacgtgatctccaagaaccaggtctgtctctaccttacctgcatttagcatgcttgttatattttgacagaaataatggacgaatcagtgctaaaaagaataaagggctacatttacaaggtagtgaatgtttgccatcaccataattgtttctttatattcttgttccctttcagtttgttcactgtcagattcgattatttgctttagtttattctgttgttgttttcataatcggattttttctgtttctgtcagtaggcatgatttagtccttagtctctgtaagttagcgaggctagcttaactgttgcttgattttactgccttactgatttagtcatcagatgtttgaatactgaccttcaaggggaatgctccaaaccttgagtttggggatcaaggagaggactccattatcttgtcaccgcggctgaaggagattagtactcctgaccgccccgctgccctccgtttcctaggggagaagtataataacctcatggagaggtacaagaagcaggtagtcaagtgttccgaggagtgtgaaccaagatataatggcctgaagaagaagtacacagacgagtgtgcagagaggcggcgtctgtacaatgagcttattgagctaagaggtaacattagggtgttctgcagatgcagacctctgagctctgatgaggtcaaccatgggtgtttatctgttgttgagattgacccatcacacgagactgagctgcagtttgtccccagtgaaaaagaaaggaagccctttaagttcgatcacgtttctgggccagaggatgaccaaggttctcgtggtgagggtggtatccttagaaatagtgaagggccattgaaggaccacatttatttgcatcaaaaccatctgccgcctgaggtactcaaagaaaggctccctggtatttctgaaactgctgctatttttgctggtgttgacgtcaccaaggagcccattccagttttgcctactgtgcactacaatatgggtggtatcccaacgaactaccataaggaggtagtggatatcaagggtgataatccagatgctgttatccctggtctaatggctgctggtgaagcagcctgtgcagcaccgcgttggtggatgattgatcgtccagttgtatgtgactaaaacgccatgccttgtgcattagagaagatacagaatcgtcatgtcctgtacaggacagtgagccaaattcttgttcattttgcactatgatacagattgattcattaggccctaggttggaggttgtgactgatgagtt

SEQ ID NO: 63326 - DNA, 2849 bp, Zea Mays
atggcgatgggtgataggttgcgtgccattgatctgtacgagatcctcctcttcgcgacacggctggctcgtagggcgacgacatcctcaatctatcgcgtggccaggatgagaagaaacctgaagatgcaccacagtctgaggttgagaaggacaaggagggcgcggagaatgaagaagaagaaaaggaacctgaggataagtagtctatggaatgatgtttgctccgaccatgagcaggagatgactctggaggaatatgaaaagggctctgacaaggacttgaaaaagaaagaaagtgctgaaagagaagaacggggcaagaaggcttgcctcggatctgttactactcaaaggagaaattgcttatcatctgggaggcgaaggggtgacttgtcgaagagcattttatgtcaaagatgccctgctttactcacagagatagaaattattgaagacagagatagaccaccatacaaccaccttcgatggacgcgggggataactttgcttgacaatggcttaggtttataccaaataggcatcttgggttctttcttggttttgctgaaaacaagattatattattacaacatgagggcaggattaagtaggcatgatttagtccttagtctcttcatcagatgtttgaatactgaccttcaaggggaatgctccaaaccttccagtggttgccggctaatccggccggtcacaaacaaccaagtagagttgcctcgtacttcatctcgcctggctatttttagtagcatggtactgaccgctgaagcaggcagatctggatctgtcctggctggccgctaaagaaaggttgtttacaaggcagcagaggcgatggctctttgtctttgtgcaatggtgactggtgcgaggtgtctggtttggttgcgcacaagaaccacaccaacagaagttgcctgcactgcatgcacaccatgacaccaatggcctctcatgactttttgatggaccctccattgtctctgcaaggaagttggagtgcgacctgggccttttgtctagatgcaagaagggctcgtgatagctcatttcgttctaggctttggctcatggcgcctgctattccaaggatgccatacatggaccgctagctagatttgaggttaaagaactctggtgttgttctagcctgtagacatcatcgctgatcaaagatcttacagtttgtttcggagtgaagttgtgagtaaaaagtggcgcaatatataaaatgccctgttgattgggggtgaccaattcatgccaatgctaatggagagttggagactaatatccaacatctcctcttacagataactttgagacaaatggaagctaaccgacaaatcgactaagtaaagtaattattatgcccttctgatccacagtggtgttctgaaatttattttctgcaagcaccaccagcatgcagactcttgcttgaagcagatcagcctgggtctgcactatgcagaatcaaagccagacttctcgccgattggctctgctctgctatatagtggagtaactgtggtcaaaatgaggccatgacccaatctttcgcgccataaagaaaagagacgccttgcttgacctatgggttgccagcgtcgagagttccacccaataggatagataggatggggaagaagtcgtggtcccatccatccgattggcgcccataaaaagaggtgcttgtgcttggagatttccatcgcacctgcttctcggggacccgtaaccatcgagcatcacaagaactgtaacaaaatccatatggattggagaagattgggtggttttcaatccatagcaagttaaaattcttcataattttttttccaattccttccaattcataagacatagaaatatggtagggttgttcgcttctgatttcattgtgttttttcttcaggagtttggggatcaaggagaggactccattatcttgtcaccgcggctgaaggagattagtactcctgaccgccccgctgccctccgtttcctaggggagaagtataataacctcatggagaggtacaagaagcaggtagtcaagtgttccgaggagtgtgaaccaagatataatggcctgaagaagaagtacacagacgagtgtgcagagaggcggcgtctgtacaatgagcttattgagctaagaggtaacattagggtgttctgcagatgcagacctctgagctctgatgaggtcaaccatgggtgtttatctgttgttgagattgacccatcacacgagactgagctgcagtttgtccccagtgaaaaagaaaggaagccctttaagttcgatcacgtttctgggccagaggatgaccaaggttctcgtggtgagggtggtatccttagaaatagtgaagggccattgaaggaccacatttatttgcatcaaaaccatctgccgcctgaggtactcaaagaaaggctccctggtatttctgaaactgctgctatttttgctggtgttgacgtcaccaaggagcccattccagttttgcctactgtgcactacaatatgggtggtatcccaacgaactaccataaggaggtagtggatatcaagggtgataatccagatgctgttatccctggtctaatggctgctggtgaagcagcctgtgcagcaccgcgttggtggatgattgatcgtccagttgtatgtgactaaaacgccatgccttgtgcattagagaagatacagaatcgtcatgtcctgtacaggacagtgagccaaattcttgttcattttgcactatgatacagattgattcattaggccctaggttggaggttgtgactgatgagtt

SEQ ID NO: 63327 - DNA, 1743 bp, Zea Mays
acggcacggctgacgggcctttccgttccgccgctcgcattctcccaaccctcaccaacggctaaatgcttggaggtatatcgtcgaacacctgacttgcgttgcgtgacagcgcaccccgagaccccgataagatgtggcggctctcttcggccgcggcgctcctccgacgctcgctcgccgccaccgcgcgcctctccgttccgtgtggttcagataacaccgacgatgacagggtcattcaggcgtttaagcggtgctgctcaaccagtgcaagcagtggtgtttcagatgcatcaccatgtgctgcttatgtcgagaacctctgcagatctggcaatcttgttgatgctgttcgtgttcttcgacatctgcatgacgagcagatccatgtcggcctgcacacctttaatatgttactgcaacacacagctgaagcaaacatctttactctttttgccaaggtattcaggtacctgctgctttcagaacttactcctgattcaacttcatatatgaatgttgcattggccctccagaagttggatgactgtgaaatgatactcaaatttgtaagagaaattttggaaatcacacactctagagatgctacagttatgaatcgcattatctttgccacagccaaatacggacacattgataaaagtttggtcattttcgaagagttgaagaaatatgaaaccagcttggatgttgtcacgttcaacactgttttggacatgctagggaaagctggacgggtggaccaaatgcttggtgaggtgaagctaatggaaaaacttaggcattttcctgacattgtgacatacaatacactaataaactgcatgcgaaggcttggtagactagatttgtgcaaaaggtttgctttggaaatggtagagagaggcatcactccagatttgaggacatatactgcactaattgatagttttggacggtctggccatattactgaagccctggaaatgtttcacgagatgaaaaagtcgcaccaaccttcagtttatgtctaccgtgcattgacaagcaacttgaaaaaggctggacattttgaactagcacaaaagctcaccgaggatatgaattcaagtgcttcagagttaataggcccagaagatttcaagccaaataataagggtataaggtttagaaaaaatggctaagaggtcactggttgatttttgaggcctgaattctttttatttgcgctatgtgctcacccgtagtcccatactgctatagattctggcgttggttggaatgttttggagaatgaagctcaaagaattagagagatacaaagctttaagatggcagaagcatgatggttaggcagacatgcagtgatacagggtcaagaggacctactgacctgaatgggcatttttgctgcatcattttaagcagctcacgagtcacgagaaatttgaagactcacccatttagacgacctgaaaggctgcatctgtgactcattgatcgctttatgtaacataggcacactgcaggatttggctgtgtgcctgtgacataggcgaatatcatgctaggcagaaacatgaaaaactactgcttctgcaattagtttttttcctgtgaatctttaggcatgaaaagggacaagtttccatattttctccgtttctttacccttgtaatcagagagtgtataacgtactatgagttgacgaagttcaatttattatcttagctattcga

SEQ ID NO: 63328 - DNA, 381 bp, Zea Mays
cccacgcctcctcatccacccggaggcacctcacacacacacactctctctctctccactggctgacgccgcgaccgccccaacccaactgcccttttcggagatctcgccgcctccgccgtcgacttccgtcgcccccctatcccgcgtccgggcttacccgatggcacggctgcactggcttgaggccgtcctgccgctggggatcatcggcggcatgctctgcatcatgggcaacgcccagtatttcatccacaaggccgcgcacggcaggccgaagcacatcgggaacgatatgtgggacgtcgccatggagcgccgcgacaagaagctcgtggaacaatcctccggcaactagtggcaatgttaacggaatcaagt

SEQ ID NO: 63329 - DNA, 484 bp, Zea Mays
atccacccggaggcacctcacacacacacactctctctctctccactggctgacgccgcgaccgccccaacccaactgcccttttcggagatctcgccgcctccgccgtcgacttccgtcgcccccctatcccgcgtccgggcttacccgatggcacggctgcactggcttgaggccgtcctgccgctggggatcatcggcggcatgctctgcatcatgggcaacgcccagtatttcatccacaaggccgcgcacggcaggccgaagcacatcgggaacgatatgtgggacgtcgccatggagcgccgcgacaagaagctcgtggaacaatcctccggcaactagggagtgtgtggctgcagggcagatggcgcggtgccgatggtgtcaggcgagcgcagcaggatgaagaggcgacagcaaatgcaacagggccaaggggtgatgggctatcggaagccttctgggctacttggtgccttgg

SEQ ID NO: 63330 - DNA, 385 bp, Zea Mays
cgcctttgtcttctccccaaaagaacctctcaggacctgggatctccagcgaatgcgacgtcgaaactgtcggccgtgcgtcctctctcctcgtgcgctccgcccgtctccacagttggtgcaggtcgctgaaacacttgcaacagacagagcttgcttttgaagtgctatagcacctaaaggatcagtggaaggatatctaatgtagagttaatttgaaaagattgcatctacttcttcaacaggttcaaacatggacctctgcgcatcaaagaaaagccggacaccagaccttccaagaactgaagattttctcatattatcagcagcgttttaggcgtatctgtatggattggagaggatagcactccagctatagaatttc

SEQ ID NO: 63331 - DNA, 469 bp, Zea Mays
tacaatacagagtgggacacactcgcctttgtcttctccccaaaagaacctctcaggacctgggatctccagcgaatgcgacgtcgaaactgtcggccgtgcgtcctctctcctcgtgcgctccgcccgtctccacagttggtgcaggtcgctgaaacacttgcaacagacagagcttgcttttgaagtgctatagcacctaaaggatcagtggaaggatatctaatgtagagttaatttgaaaagattgcatctacttcttcaacagaccaactagcattgatattactgatgcagaaaacgacgatatcgacgaaggaaacatagaggttcaaacatggacctctgcgcatcaaagaaaagccggacaccagaccttccaagaactgaagattttctcatattatcagcagcgttttaggcgtatctgtatggattggagaggatagcactccagctatagaatttc

SEQ ID NO: 63332 - DNA, 531 bp, Zea Mays
cttctccccaaaagaacctctcaggacctgggatctccagcgaatgcgacgtcgaaactgtcggccgtgcgtcctctctcctcgtgcgctccgcccgtctccacagttggtgcaggtcgctgaaacacttgcaacagacagagcttgcttttgaagtgctatagcacctaaaggatcagtggaaggatatctaatgtagagttaatttgaaaagattgcatctacttcttcaacaggttacgagtataacttaattaaaaaataatgaatccccaaacgacagatgcagaaagcagcaacaacaaacgcgtgaacaaaaggaaacacaactcttttactccgtatataccactacccacaaatgttgtagaagcacggaaaacccgaagagtgttacctaaccaaaatagactcggcagaagagactcaatgatgactacaacgacgacttcacagtgtgcctatttcaccaatgagtacatacaatcacttaaaggttcaaacatggacctctgcgcatcaaagaaaagc

SEQ ID NO: 63333 - DNA, 1222 bp, Zea Mays
cgggtgagcctggcccgtgctcgcctggtaaaagtgctagggttcttctcgcccatcgcagccgccgccgcggctctcgcctcttgactcgctctcgcctctcggagcaaaagctgtgtccgctcctcctggtgatcccggagccagtcctcgccgcaccgcgctgtgtctgctcctcctggtgatcccgcaccgtgctgtgtccgctccatcttcctccgccgccacactcagcgccggggctccacaaaagctggatccgtggagggttggattctctttgtagggctggatccatggagggagtgcacggcgctcgtcgcccagctcgaggtgcgagggcatgtctacctacccgaggacctacgatctcatccatgcggactcggtgttcaccctgtacaggaacagggagaagatcctcctggttgtcaagacgtattggactacccatgaggccatgaccaagatcagtagcaggactgtcaagtaaaattctcaatgttgataagaatttttcatgtttggagttgtaccaccgtttctagctccttgaactagtgatctcttgacggtttgtgcttgctgttctttctggacagtacttgctcggataggaaatttaacatgtggggggaaggaagggtaggtagtaagacccctggcccctgcaaagttttcttcaattccgaattgtgtccaaatggtaaatagaagtcattgttgcgagtcaccccgaccccggataagcataatcacaactggattcattctagcattacaattttgttctgtgtaatttcctttttttaaatcttattagcatgtgttgtcccagatctattaatgatatgaaagaacactgcttctggtcccaaattatggagagaaagggtccaacagtcgagacgcctgaatggtgccaggaatgaattggtcatttttactgtagcccagaggcttcgcgcatgggctatgctacagaggcaggactcatgcaggactcagtttttttcccgggagcatagttggcggtctagtcttcggattgatagccactagtgtgtgtttttagattctgttgggctgtgtgctcctatgggcagaggccggaagtgactttcaaggaattgtatcatctcgatgtactgttcttgatgaataaaaatccttccctttcaaaaaaagaccactacacaatcggtgcacaagcgcacatcat

SEQ ID NO: 63334 - DNA, 692 bp, Zea Mays
cttttccttcgcgggtgagcctggcccgtgctcgcctggtaaaagtgctagggttcttctcgcccatcgcagccgccgccgcggctctcgcctcttgactcgctctcgcctctcggagcaaaagctgtgtccgctcctcctggtgatcccggagccagtcctcgccgcaccgcgctgtgtctgctcctcctggtgatcccgcaccgtgctgtgtccgctccatcttcctccgccgccacactcagcgccggtgcgagggcatgtctacctacccgaggacctacgatctcatccatgcggactcggtgttcaccctgtacaggaacagggagaagatcctcctggttgtcaagacgtattggactacccatgaggccatgaccaagatcagtagcaggactgtcaagtcatttttactgtagcccagaggcttcgcgcatgggctatgctacagaggcaggactcatgcaggactcagtttttttcccgggagcatagttggcggtctagtcttcggattgatagccactagtgtgtgtttttagattctgttgggctgtgtgctcctatgggcagaggccggaagtgactttcaaggaattgtatcatctcgatgtactgttcttgatgaataaaaatccttccctttcaaaaaaagaccactacacaatcggtgcacaagcgcacatcat

SEQ ID NO: 63335 - DNA, 1234 bp, Zea Mays
gtcttttccttcgcgggtgagcctggcccgtgctcgcctggtaaaagtgctagggttcttctcgcccatcgcagccgccgccgcggctctcgcctcttgactcgctctcgcctctcggagcaaaagctgtgtccgctcctcctggtgatcccggagccagtcctcgccgcaccgcgctgtgtctgctcctcctggtgatcccgcaccgtgctgtgtccgctccatcttcctccgccgccacactcagcgccgggctccacaaaagctggatccgtggagggttggattctctttgtagggctggatccatggagggagtgcacggcgctcgtcgcccagctcgaggtgcgagggcatgtctacctacccgaggacctacgatctcatccatgcggactcggtgttcaccctgtacaggaacagggagaagatcctcctggttgtcaagacgtattggactacccatgaggccatgaccaagatcagtagcaggactgtcaagtaaaattctcaatgttgataagaatttttcatgtttggagttgtaccaccgtttctagctccttgaactagtgatctcttgacggtttgtgcttgctgttctttctggacagtacttgctcggataggaaatttaacatgtggggggaaggaagggtaggtagtaagacccctggcccctgcaaagttttcttcaattccgaattgtgtccaaatggtaaatagaagtcattgttgcgagtcaccccgaccccggataagcataatcacaactggattcattctagcattacaattttgttctgtgtaatttcctttttttaaatcttattagcatgtgttgtcccagatctattaatgatatgaaagaacactgcttctggtcccaaattatggagagaaagggtccaacagtcgagacgcctgaatggtgccaggaatgaattggtcatttttactgtagcccagaggcttcgcgcatgggctatgctacagaggcaggactcatgcaggactcagtttttttcccgggagcatagttggcggtctagtcttcggattgatagccactagtgtgtgtttttagattctgttgggctgtgtgctcctatgggcagaggccggaagtgactttcaaggaattgtatcatctcgatgtactgttcttgatgaataaaaatccttccctttcaaaaaaagaccactacacaatcggtgcacaagcgcacatcat

SEQ ID NO: 63336 - DNA, 760 bp, Zea Mays
cgggtgagcctggcccgtgctcgcctggtaaaagtgctagggttcttctcgcccatcgcagccgccgccgcggctctcgcctcttgactcgctctcgcctctcggagcaaaagctgtgtccgctcctcctggtgatcccggagccagtcctcgccgcaccgcgctgtgtctgctcctcctggtgatcccgcaccgtgctgtgtccgctccatcttcctccgccgccacactcagcgccggtgcgagggcatgtctacctacccgaggacctacgatctcatccatgcggactcggtgttcaccctgtacaggaacagggagaagatcctcctggttgtcaagacgtattggactacccatgaggccatgaccaagatcagtagcaggactgtcaatacttgctcggataggaaatttaacatgtggggggaaggaaggatctattaatgatatgaaagaacactgcttctggtcccaaattatggagagaaagggtccaacagtcgagacgcctgaatggtgccaggaatgaattggtaatgtacaaacacatttgacaggacagtaggccatgtaaacaggtctctggtctctattaaaatcatagtttctgtttaattacaatcgtagttctgttttttgttatccatattttaagttgctgctatagttcatatgattgtaatcgaaatgattgtaattagttcaatgagagaaattactagcaagaggatcaatttaattcagattattgtaaatc

SEQ ID NO: 63337 - DNA, 1192 bp, Zea Mays
cgggtgagcctggcccgtgctcgcctggtaaaagtgctagggttcttctcgcccatcgcagccgccgccgcggctctcgcctcttgactcgctctcgcctctcggagcaaaagctgtgtccgctcctcctggtgatcccggagccagtcctcgccgcaccgcgctgtgtctgctcctcctggtgatcccgcaccgtgctgtgtccgctccatcttcctccgccgccacactcagcgccgggcgaacgacgccatgccggcggatccatgcagggctccacaaaagctggatccgtggagggttggattctctttgtagggctggatccatggagggagtgcacggcgctcgtcgcccagctcgaggtgcgagggcatgtctacctacccgaggacctacgatctcatccatgcggactcggtgttcaccctgtacaggaacagggagaagatcctcctggttgtcaagacgtattggactacccatgaggccatgaccaagatcagtagcaggactgtcaagtaaaattctcaatgttgataagaatttttcatgtttggagttgtaccaccgtttctagctccttgaactagtgatctcttgacggtttgtgcttgctgttctttctggacagtacttgctcggataggaaatttaacatgtggggggaaggaagggtaggtagtaagacccctggcccctgcaaagttttcttcaattccgaattgtgtccaaatggtaaatagaagtcattgttgcgagtcaccccgaccccggataagcataatcacaactggattcattctagcattacaattttgttctgtgtaatttcctttttttaaatcttattagcatgtgttgtcccagatctattaatgatatgaaagaacactgcttctggtcccaaattatggagagaaagggtccaacagtcgagacgcctgaatggtgccaggaatgaattggtaatgtacaaacacatttgacaggacagtaggccatgtaaacaggtctctggtctctattaaaatcatagtttctgtttaattacaatcgtagttctgttttttgttatccatattttaagttgctgctatagttcatatgattgtaatcgaaatgattgtaattagttcaatgagagaaattactagcaagaggatcaatttaattcagattattgtaaatc

SEQ ID NO: 63338 - DNA, 3637 bp, Zea Mays
cgcaaattgggcttgctggctgcggttgttttcctagctagcgcccctcccccctttgaccggcggctatctgaagcggcgcgacatgcttggggttctgaacgcatgggctcgcgcgcgcgcccgcccatttgcttgcgttgacctcttcccaccaccacccagcactccggccgcggaagccgcgctggggaggcggttggtgtggtgccccgccggcttagattgatgaatcacagcgcggctcggtcgcgtggactcgacctcgtcgcctttagtacaagttgcgtcctgcgggacatagctctcgtcctccgtttcctagccttgccagtttccacgacagagagagagagagcgagaggaggaaagaagagtcatcgcagacagaagagggtgctccagcgtgcatctcgtcgcccgccgtcggcgtgattgcttggcagcaggatggaggaggccacgcggcgccgtatcacgccgacgacgacgctgctgctggccctggcggtgctggcggcgagcgttcccgccggcttctgcgccatcaaccctcaggacgcttctgctctcaacgccatccagagccaatggacgaacgcccccttgagctggtcctcggcgagcgacccctgcgacgggggctgggacggaatcatgtgcagcaacggcagggtcacgtcgctgcggctgtcaagtgtcaacatccagggcacgctcagcgacagcgtcggacagctcacccagctcatgtacctggacgtttccttcaacctcggtctcaacggccgaatgcccgctacaatcgggaacctggcgcagctcaccacgctgatcctggcaggctgtagcttcaccggagccatcccacagcaactcggcaacctgcagcagctctcgttcctggcgttgaattcgaacaagtttaccggcacaataccccctacgctgggtctactctcgaacctcttctggctggatctggctgacaatcagctcactggatctatcccggtctccacagcaacaacgccggggctcgaccaacttacccacacgaagcacttccacttcaacaagaaccagctgtctggaacactcacaggcctcttcaactccaacatgagcctgatccacatactgttcgacagcaatcaactgactggcccgataccagaggagctagggggcatttcatcgctccaagttctccgactagataggaacagccttaagggaacgattcctcctaacatcagcaacttggtcaatctgaacgagctgaacttggccagcaaccagctcactggaccgttgccagatctaagcagcatgaccaaattgaatgtcgtggatttaagcaacaactccttcgccgtttcagcagccccaaactggttcacaactttaacatctctaacctccgtatcaatatcttctggaaagctttctggcgctgtccctaagggtctcttcaggttgccccagctgcagcaagttgtgctgagcaacaacgagttcaacgggacacttgaggtcacaggcaacatcagcagtcagcttcaggctatcaatctcatgaataacggcattgctgctgccaatgtcaccccaagctacaacaagactctagtgctactagggaacccgggctgcgtggacccagagttgaaagtcttctgcagcctcaagcaggagagaatgatagcgtacaacaccagcctggccaagtgctcctctacggcctcgtgttccagtgaccagcgcctgaaccctgcaaactgcggctgcgcatacccctacgccgggaagatggtattcagagcgccgctcttcacggacctgacgaacagcgccacctttcagcagctggaggcgagcttcacgacgcagttgtctctccgcgatggctccgtgttcctctccgacatccacttcaatagcgacaactacctccagattcaggtggcgcttttcccgtcgtctggggtgtccttcagcgtggcggatctgatacggataggcttcgatctgagcaaccagacttacaaaccaccgtcgaattttggaccctattacttcattgcagatccatacgctcttttggcaggtgcttcttctcgtggcagtaaaaaatcacatatcagcactggcgctatcgctggaattgcggtagccggtggaattcttgtgattgccctcattggcatggtattatttgcgttgcgacagaaaagaagggtcaaggaagtgacaggacgaaccgaccctttcgtttcatggggagtttcccagaaagacagtggaggggctccacagcttaaaggagcaaggttgttctctctgaatgagctgaagaactgcaccaacaatttttcggacacccatgagataggctcaggaggctatggaaaggtgtacaagggaacactcgttgatggaacgcgggttgccataaagagagcagagcgcggatcaatgcaaggtgtggtggagttcaagaacgagatcgagctgctgtccagggttcatcacaggaacctggtgagcctgattggcttctgctacgaacaaggggagcagatgctggtgtacgagtacgtctccagcggaacgctgagagagaacttactagtgagaggaacgtacctggactggaagaagaggctcaggatcgcgctcgggtcagcgaggggacttgcgtaccttcacgagctcgccgatccgcctatcatccaccgggacgtcaagtccaccaatatcctcctcgacgaccacctcaaagccaaggtcgccgacttcggcctctccaagctcgtcgcggacacccagaagggccacgtctccacgcaagtgaaaggaacgctgggttacttggatccggagtactacatgacgcagcagctgtcggagaagagcgacgtgtacagcttcggggtggtgatgctggagctggtgagcgggcggcagccgatcgagagcggcaagtacatcgtgcgcgaggtcaagctggccatcgaccccaacgaccgcgaccactacgggctgcggggcctcctggacccggcgatccgggacaacgcgcgcaccgccgggttcaggcggttcgtgcagctggcgatgctgtgcgtggacgagtcggcggcggcgcggccggccatgggcgaggtggtgaaggacatcgaggccatgctgcagaacgaggtctccgggcccgacggggccaccagctccgccggctcctccgccaacgacttcgacggcgccggcggcggagcgaggtcgcacccgtacagcgacgtcgagatcacgagaggctcgtacggggacaacgcgtcggactacatgccgtacttcgaggtcaagcctaagtagaccttccagtttcagacttgtatagcttgtgagatacattgtatagatttgtattatatttcacgtttatattttttggtttctcgagcttaatttttaccatgctacttccgatctatcatgacgcaaactgtacattcctcgaaattttccaagataagttgttctgttcttatttagaagtcagattttctctcaccgtttcaaacttatggactagtttggaaactccattttccttatatgaccagtgatttcccag

SEQ ID NO: 63339 - DNA, 598 bp, Zea Mays
catgttcgtgctttcggtaatgcacttctttgtctctgattaattccggatctctctagaattctccttcttgcccccccccccaactctctttctctggtgattgtctacaccgttgagatgtggagcccgcgtgggccttaccgccaccgtgtgcgtctccacgggtgggcgcgccgccgtcgattgggcgccgacggtggtaccatggtcgacgaggtatctttggactcaagtcagcatcgcagtagaccagaataatacgaaggtttatatagcgccgaaggtgtgagcaggaaagcttcggcgtggcatcaaaaagtgaaaccgacttaaagatgaaaaggctatttggacctcgacagattactatagaattattatcaagtgtaaagggcatgaatgtaattttgtatgggttgtgtcccgtgcctataaataggtgaacagtatccccgtactgttcacgctgacttggcattcgctttttgcgccacgcttgtactatcatctccttccagttgaaggtacacttgtaattcaatgatatttctgtttatgcttgataataaaatataattgtttatgttgtctttta

SEQ ID NO: 63340 - DNA, 2065 bp, Zea Mays
ggccacaagggtatcaaaaggcttaaggttgggcaagagggcgtttgagtttgtcaacaggaaacactccaacacaagttcagcctttgggaacagagaaaagagtggaaaacacaggccagaaagatgtatcaccaacatcagggcctgagtgagctcttcaccacgaggacatcctttccaatggagcagcatctgtttttgcgtggaggaaatgcccaaggagattctgggctggttctctcaactgatgctaaaccaaggctcaaatggacacctgagttacatcagcgatttgtagatgcagtcaatcagttaggtggagcagagaaagctactccaaaaacagtcatgaggctcatgggaatcccaggactcaccttgtaccatttgaaaagccatctccagaaatacaggctgagcaagaacctccaagctcaagcaaatgtcagtacatcaaagaatgccataggatgtacatccattgctgataggattcctggaacaagcgctgcaacaatgagcagtacaaatgtcgttccgcaggcagagaagactattcaaattggtgaagcacttcagatgcaaattgaggttcagagacagttaaatgaacaacttgaggtgcaaaggcatctacaactacgaattgaagcacaagggaaatacctacaagcagttttggagcaggcacaagaaacacttggaaaacagaatttgggtcctgcgaacctggaagatgcaaaaataaaaatatcacagttagtttcacaagtatcaactgaatgcttcagtaatgcaattacagatgtaaaaggaagttcaagtgtgcataggttagagcccagacaaatccagtttgttgaaagttcaacaaatagttatttgtctgtggccgaaggattcatcaaggagcagagactacagcaccaacagcaccatggagtactaaaagcacatgatggtagttcattattttgcagaaaaagaccgcatgaacatgagacccagtttgcccttaacagaagcctaagtgagcgtaggatggcacatttgcagaatgatgaacaatacagtaaagcagagtttgggtatgaaagtgacacagagatagtgcatgagtatactgcaccccaaaatggtggaggtagcaccaccagttcggcatcaggaagcaaagtagatgcggagaagctatatctagaagagcaaaagtgtgcaagacaggtcgctgaataccccagagaaagcaagctaatagattttgagaattcgtgttcagggaagaaacttgatctgaacacccataatgtagatgacactgatcaagcttacagacattttgacttgaatgatttcagctggagctgataatatgtaagatgatagaagcaaagaaaatgaagttaaaaataatttcttccaacattgaagtattgatacatgatcaaatgtacgtcaagaggtaccatttatgtttttaagtatttagtaatagggtacagaaatggttttcactttgggccatccggcagtttactcaaaactcaagcagtatagataagaaaccagacaaatagcatcaatgaaattagagcccataagatatagaacactatgataagtagataatagcaacaaagtgaaaagtggcattattaatgaaccaagagaaacaaatggacaaatagcatttcaaaatcaatctactgggacaaacatgtctaacatcacagaccttacgttctaaactcttagttcagaacagcttgaaacaagcaggggaaatttatacgtcggtacagatggattactggcttactgctacccctcatagctaacattttagataagaaacctccactagtacaatagggctatatgaatgaaagcaatttctccaaacagccaccgccctagtagttagtagtcatctcctagtaacactgtaaaaccagcatattgtataatcagaacattaactaacaagatatggccatttagatgatatagcaagtttttaatcaaatatagtaaaaatgaatttgtcttgctgtgcttattt

SEQ ID NO: 63341 - DNA, 2068 bp, Zea Mays
ggccacaagggtatcaaaaggcttaaggttgggcaagagggcgtttgagtttgtcaacaggaaacactccaacacaagttcagcctttgggaacagagaaaagagtggaaaacacaggccagaaagcagatgtatcaccaacatcagggcctgagtgagctcttcaccacgaggacatcctttccaatggagcagcatctgtttttgcgtggaggaaatgcccaaggagattctgggctggttctctcaactgatgctaaaccaaggctcaaatggacacctgagttacatcagcgatttgtagatgcagtcaatcagttaggtggagcagagaaagctactccaaaaacagtcatgaggctcatgggaatcccaggactcaccttgtaccatttgaaaagccatctccagaaatacaggctgagcaagaacctccaagctcaagcaaatgtcagtacatcaaagaatgccataggatgtacatccattgctgataggattcctggaacaagcgctgcaacaatgagcagtacaaatgtcgttccgcaggcagagaagactattcaaattggtgaagcacttcagatgcaaattgaggttcagagacagttaaatgaacaacttgaggtgcaaaggcatctacaactacgaattgaagcacaagggaaatacctacaagcagttttggagcaggcacaagaaacacttggaaaacagaatttgggtcctgcgaacctggaagatgcaaaaataaaaatatcacagttagtttcacaagtatcaactgaatgcttcagtaatgcaattacagatgtaaaaggaagttcaagtgtgcataggttagagcccagacaaatccagtttgttgaaagttcaacaaatagttatttgtctgtggccgaaggattcatcaaggagcagagactacagcaccaacagcaccatggagtactaaaagcacatgatggtagttcattattttgcagaaaaagaccgcatgaacatgagacccagtttgcccttaacagaagcctaagtgagcgtaggatggcacatttgcagaatgatgaacaatacagtaaagcagagtttgggtatgaaagtgacacagagatagtgcatgagtatactgcaccccaaaatggtggaggtagcaccaccagttcggcatcaggaagcaaagtagatgcggagaagctatatctagaagagcaaaagtgtgcaagacaggtcgctgaataccccagagaaagcaagctaatagattttgagaattcgtgttcagggaagaaacttgatctgaacacccataatgtagatgacactgatcaagcttacagacattttgacttgaatgatttcagctggagctgataatatgtaagatgatagaagcaaagaaaatgaagttaaaaataatttcttccaacattgaagtattgatacatgatcaaatgtacgtcaagaggtaccatttatgtttttaagtatttagtaatagggtacagaaatggttttcactttgggccatccggcagtttactcaaaactcaagcagtatagataagaaaccagacaaatagcatcaatgaaattagagcccataagatatagaacactatgataagtagataatagcaacaaagtgaaaagtggcattattaatgaaccaagagaaacaaatggacaaatagcatttcaaaatcaatctactgggacaaacatgtctaacatcacagaccttacgttctaaactcttagttcagaacagcttgaaacaagcaggggaaatttatacgtcggtacagatggattactggcttactgctacccctcatagctaacattttagataagaaacctccactagtacaatagggctatatgaatgaaagcaatttctccaaacagccaccgccctagtagttagtagtcatctcctagtaacactgtaaaaccagcatattgtataatcagaacattaactaacaagatatggccatttagatgatatagcaagtttttaatcaaatatagtaaaaatgaatttgtcttgctgtgcttattt

SEQ ID NO: 63342 - DNA, 470 bp, Zea Mays
taccatggctcctgccctgtgtgccggtttgagctgccatctgaagagacagaagatttggatgagcctagcaatgtggacagaacagagaacacccatgaggaagtcagggccgatggccctgaagatgacagtgagagcagtaacagagcgtgggcccttgttccttggttcagtgggctattctcaacacctgaaccacaaactgtcagaggcgctttcactgatcagcagactcgctccacttctggaaccaacatgaatgctggcgaaagctgatctcttcctcctttgtgaataatgcccatacatctgagaatagcaatggaccttgtcagtagataacttatttttctgtactgataatccttcttggatgaatcgcaaggtacaaagtttgtgacagctccattttttgccaggattttagcgatcatttcactgttgattgatttcatagctactgagca

SEQ ID NO: 63343 - DNA, 1259 bp, Zea Mays
atggccacctccgaatttactgatccatccatctccatccccatcccgtgacccgtgcacgccgccgcttcaagtcctaacaagccgcatcgcatcgcatgcgtgtgctgtccgaccgccatctccgcagccggctggcctagctacctcacctcacctcacgcaggcacactgcacacacacccatggtggtggcggcgatgcggcggccgtgcgctgtgccagcgctgctggtggcggcggcgacggcgacgctagtgcttctgctgctgctgtcaccgtcgagcgcgcagccggtgccgtccccggcggcggcgccgggccccgcgggcgggaccgggatcgactcggcgtgcctgaactcgctgctcaacatgtcggactgcctcccgtacgtgagccaggggagcacggcgcggcgccccgacgcgccctgctgccccggagctggcgggcctcgtcggctccaaccccgtctgcctctgcgagctcctctccggcgccgccgactcctacggcatcgccgtcgactacggccgcgcgctcgcgctccccggggtctgccgcgtcgccacaccgcccgtctccacctgcacagccctcggatatcacgtccgcgtgggcccagctgcggcgcccatgtcagggtctccctcgcccatgtcaggcatctctccctccggggagggcccacagttcccaggtaagaacatcatttcgtttggttattaaatataacccatgtttcctacaacccgatcgaattcagcgaactgattcatcgagcgagttagcagtacacgtcgttggctcgttgctcttgtgcttgtgcacgatctatccggtttaaccgctagtagtatatttcattcgagaacggagttcttaataatgagtccgcacatgtgcatttctccaggaacatcgccgaccgcctcgccgccgtcctcgaccagcaccgcggcgcgccgctcctccgccggcgcgggcagccacctcgtggccctcgccatgctgccgttggccgccgccgtcagcgggatgctctaaggtcgacgactccttcgtctccgcatgcattgcgcagctggacattgttgcgtagtataagctttcactgtgttttctattctatgctgcctctgttgtactatacacataccgcggactcgatcgattatcataaggcgttagccttgcttcttgccagccgagatgagaatgagaatacatgcatgtcatgtcccgttcatgtctag

SEQ ID NO: 63344 - DNA, 1572 bp, Zea Mays
aaaatttgttaaattcatatttaaggacctttacataactgctctaagttccattgatacgtttcatcgattttcggaggaatttattcgaggaatctagtgtttgaccggctccgctcgattctgcttcgttaccacgcgggtgctatcgaatcttgggtagtttttcttcgcttgcggcctctcgaatctgacccatttccacggttcgcgtgcgccgttgccgcggatctgcgtgcttgtgccatcgggttccgtggatctagttgcgcggagatggggctcacgttcacgaagctgttcaggcggctattcgccaagaaggagatgaggattctcatggtcggtctcgatgcagctggtaagaccaccatcctctacaagctcaagctcggcgagatcgtcaccaccatccccaccattggatttaacgttgaaactgtcgagtacaagaacattagtttcactgtttgggatgtcggtggtcaggacaagatccggcccctgtggaggcactacttccagaacacccagggcctcatttttgttgtagacagcaacgacagagagcgtgttgttgaggccagagatgagctccaccggatgctgaatgaggacgagctccgtgatgctgtgcttttggtgtttgcaaacaagcaagatctgcctaatgccatgaacgctgctgaaattaccgataagcttggcctgcactccctgcgccagcggcactggtacatccagagcacatgtgctacctctggtgagggtttgtatgaggggcttgactggctttcgaacaacatcgctaacaaggctcgaagcatctaggcaaggcttcaatcagtggaagcaaactgcctctaccattacagctatgaagtatatagtcgtgattgtgtcagacgtggtgtgtttttgggagataaaaggctcttttggtcgaggagctaggtatcagatgttttttatggtacctgtaattttccgtgcttctgttttggttttgtgcaaggtataccatgtctgactgtgtgctcgccactgtctgagtcgttgtactatcccgggccggcctgtccggctgtctcttggcatagcaaaatgatcgcctaatttgttagcacatgctcggtaatatcacgagggcttcggtggtcttattgctcacgctgaattctcaactttgctcttcttttctgcggttgaggttgcatcttgtattgttggctgatttcgagcaatcagaggattgtgctacgtcgtcggaggcatcatgggatagcagctagctttcgtctttgaactgggcttcggttctaaattcgacttcacttttatccttcattaaactttttaactttgatatcgctatataaactggttgtacctttaacactatattttatctttgtaattgatggttagtgattcaagagagcattgtttttttttttgttgatcacacatgttgcgtgtgcgacgtcagctatgaactccacaaataatgtaatttttagctttggaaatcatacattttttatttatattctataaagtatacagttttta

SEQ ID NO: 63345 - DNA, 1566 bp, Zea Mays
aaaatttgttaaattcatatttaaggacctttacataactgctctaagttccattgatacgtttcatcgattttcggaggaatttattcgaggaatctagtgtttgaccggctccgctcgattctgcttcgttaccacgcgggtgctatcgaatcttgggtagtttttcttcgcttgcggcctctcgaatctgacccatttccacggttcgcgtgcgccgttgccgcggatctgcgtgcttgtgccatcgggttccgtggatctacggagatggggctcacgttcacgaagctgttcaggcggctattcgccaagaaggagatgaggattctcatggtcggtctcgatgcagctggtaagaccaccatcctctacaagctcaagctcggcgagatcgtcaccaccatccccaccattggatttaacgttgaaactgtcgagtacaagaacattagtttcactgtttgggatgtcggtggtcaggacaagatccggcccctgtggaggcactacttccagaacacccagggcctcatttttgttgtagacagcaacgacagagagcgtgttgttgaggccagagatgagctccaccggatgctgaatgaggacgagctccgtgatgctgtgcttttggtgtttgcaaacaagcaagatctgcctaatgccatgaacgctgctgaaattaccgataagcttggcctgcactccctgcgccagcggcactggtacatccagagcacatgtgctacctctggtgagggtttgtatgaggggcttgactggctttcgaacaacatcgctaacaaggctcgaagcatctaggcaaggcttcaatcagtggaagcaaactgcctctaccattacagctatgaagtatatagtcgtgattgtgtcagacgtggtgtgtttttgggagataaaaggctcttttggtcgaggagctaggtatcagatgttttttatggtacctgtaattttccgtgcttctgttttggttttgtgcaaggtataccatgtctgactgtgtgctcgccactgtctgagtcgttgtactatcccgggccggcctgtccggctgtctcttggcatagcaaaatgatcgcctaatttgttagcacatgctcggtaatatcacgagggcttcggtggtcttattgctcacgctgaattctcaactttgctcttcttttctgcggttgaggttgcatcttgtattgttggctgatttcgagcaatcagaggattgtgctacgtcgtcggaggcatcatgggatagcagctagctttcgtctttgaactgggcttcggttctaaattcgacttcacttttatccttcattaaactttttaactttgatatcgctatataaactggttgtacctttaacactatattttatctttgtaattgatggttagtgattcaagagagcattgtttttttttttgttgatcacacatgttgcgtgtgcgacgtcagctatgaactccacaaataatgtaatttttagctttggaaatcatacattttttatttatattctataaagtatacagttttta

SEQ ID NO: 63346 - DNA, 1378 bp, Zea Mays
aaaatttgttaaattcatatttaaggacctttacataactgctctaagttccattgatacgtttcatcgattttcggaggaatttattcgaggaatctagtgtttgaccggctccgctcgattctgcttcgttaccacgcgggtgctatcgaatcttggcggagatggggctcacgttcacgaagctgttcaggcggctattcgccaagaaggagatgaggattctcatggtcggtctcgatgcagctggtaagaccaccatcctctacaagctcaagctcggcgagatcgtcaccaccatccccaccattggatttaacgttgaaactgtcgagtacaagaacattagtttcactgtttgggatgtcggtggtcaggacaagatccggcccctgtggaggcactacttccagaacacccagggcctcatttttgttgtagacagcaacgacagagagcgtgttgttgaggccagagatgagctccaccggatgctgaatgaggacgagctccgtgatgctgtgcttttggtgtttgcaaacaagcaagatctgcctaatgccatgaacgctgctgaaattaccgataagcttggcctgcactccctgcgccagcggcactggtacatccagagcacatgtgctacctctggtgagggtttgtatgaggggcttgactggctttcgaacaacatcgctaacaaggctcgaagcatctaggcaaggcttcaatcagtggaagcaaactgcctctaccattacagctatgaagtatatagtcgtgattgtgtcagacgtggtgtgtttttgggagataaaaggctcttttggtcgaggagctaggtatcagatgttttttatggtacctgtaattttccgtgcttctgttttggttttgtgcaaggtataccatgtctgactgtgtgctcgccactgtctgagtcgttgtactatcccgggccggcctgtccggctgtctcttggcatagcaaaatgatcgcctaatttgttagcacatgctcggtaatatcacgagggcttcggtggtcttattgctcacgctgaattctcaactttgctcttcttttctgcggttgagctttcgtctttgaactgggcttcggttctaaattcgacttcacttttatccttcattaaactttttaactttgatatcgctatataaactggttgtacctttaacactatattttatctttgtaattgatggttagtgattcaagagagcattgtttttttttttgttgatcacacatgttgcgtgtgcgacgtcagctatgaactccacaaataatgtaatttttagctttggaaatcatacattttttatttatattctataaagtatacagttttta

SEQ ID NO: 63347 - DNA, 1367 bp, Zea Mays
aaaatttgttaaattcatatttaaggacctttacataactgctctaagttccattgatacgtttcatcgattttcggaggaatttattcgaggaatctagtgtttgaccggctccgctcgattctgcttcgttaccacgcgggtgctatcgaatcttgggtagtttttcttcgcttgcggcctctcgaatctgacccatttccacggttcgcgtgcgccgttgccgcggatctgcgtgcttgtgccatcgggttccgtggatctacggagatggggctcacgttcacgaagctgttcaggcggctattcgccaagaaggagatgaggattctcatggtcggtctcgatgcagctggtaagaccaccatcctctacaagctcaagctcggcgagatcgtcaccaccatccccaccattggatttaacgttgaaactgtcgagtacaagaacattagtttcactgtttgggatgtcggtggtcaggacaagatccggcccctgtggaggcactacttccagaacacccagggcctcatttttgttgtagacagcaacgacagagagcgtgttgttgaggccagagatgagctccaccggatgctgaatgaggacgagctccgtgatgctgtgcttttggtgtttgcaaacaagcaagatctgcctaatgccatgaacgctgctgaaattaccgataagcttggcctgcactccctgcgccagcggcactggtacatccagagcacatgtgctacctctggtgagggtttgtatgaggggcttgactggctttcgaacaacatcgctaacaaggtataccatgtctgactgtgtgctcgccactgtctgagtcgttgtactatcccgggccggcctgtccggctgtctcttggcatagcaaaatgatcgcctaatttgttagcacatgctcggtaatatcacgagggcttcggtggtcttattgctcacgctgaattctcaactttgctcttcttttctgcggttgaggttgcatcttgtattgttggctgatttcgagcaatcagaggattgtgctacgtcgtcggaggcatcatgggatagcagctagctttcgtctttgaactgggcttcggttctaaattcgacttcacttttatccttcattaaactttttaactttgatatcgctatataaactggttgtacctttaacactatattttatctttgtaattgatggttagtgattcaagagagcattgtttttttttttgttgatcacacatgttgcgtgtgcgacgtcagctatgaactccacaaataatgtaatttttagctttggaaatcatacattttttatttatattctataaagtatacagttttta

SEQ ID NO: 63348 - DNA, 1191 bp, Zea Mays
taggaatgtaattaagttttgtatggagtttataaatttagagaactaataatgtacataaatgttggagaataattttttttaaaatttgttaaattcatatttaaggacctttacataactgctctaagttccattgatacgtttcatcgattttcggaggaatttattcgaggaatctagtgtttgaccggctccgctcgattctgcttcgttaccacgcgggtgctatcgaatcttggcggagatggggctcacgttcacgaagctgttcaggcggctattcgccaagaaggagatgaggattctcatggtcggtctcgatgcagctggtaagaccaccatcctctacaagctcaagctcggcgagatcgtcaccaccatccccaccattggatttaacgttgaaactgtcgagtacaagaacattagtttcactgtttgggatgtcggtggtcaggacaagatccggcccctgtggaggcactacttccagaacacccagggcctcatttttgttgtagacagcaacgacagagagcgtgttgttgaggccagagatgagctccaccggatgctgaatgagggtttgtatgaggggcttgactggctttcgaacaacatcgctaacaaggtataccatgtctgactgtgtgctcgccactgtctgagtcgttgtactatcccgggccggcctgtccggctgtctcttggcatagcaaaatgatcgcctaatttgttagcacatgctcggtaatatcacgagggcttcggtggtcttattgctcacgctgaattctcaactttgctcttcttttctgcggttgaggttgcatcttgtattgttggctgatttcgagcaatcagaggattgtgctacgtcgtcggaggcatcatgggatagcagctagctttcgtctttgaactgggcttcggttctaaattcgacttcacttttatccttcattaaactttttaactttgatatcgctatataaactggttgtacctttaacactatattttatctttgtaattgatggttagtgattcaagagagcattgtttttttttttgttgatcacacatgttgcgtgtgcgacgtcagctatgaactccacaaataatgtaatttttagctttggaaatcatacattttttatttatattctataaagtatacagttttta

SEQ ID NO: 63349 - DNA, 739 bp, Zea Mays
cagctaggtttgcttatcaacattcaacaaaggcatcaatgcaaaaggacatacaacttgcaaggcgtatcggaggaaggcgttgggcatgatatataatatccattctgattgcatcattcttgtgaatttgtttgtaggagctagacattagtgttgttgaatgctgcatggttcctaatccttttcgcagtctaacatctgtggagttagtatgttacatggcaacagctgaacatctgtggactatatggcaacagccgaagattgtgtctgtgggataactggttgttttggttgctcttcagtagtttgtttgcttcagtatggactatggagtaaactgcatgctgaaacccgaaccactgctgaaactgcatgctgaaacccgaaccactgctacggcagttgccaggatagcaggagggcctttatgcacagtggaattgagtagagaactgagtaaaccatggttctttctccttttgaactggaacacacacagttggatcttgtttctcttcttaggccattcatcgtgtttattaggggtgtaaatggtacaaatattatctgtccgtattcgaatttgatctatctaagaaggttgaaatccgatccgtattcgagtccacgtattcagtacccgatccgtatctgaattatattcgtacccatatattcaaagttggatatttaagatgtcgataccaattctaatcttatctgtcataactcg

SEQ ID NO: 63350 - DNA, 1396 bp, Zea Mays
aagcatctctcactgcattccgggcccactactcaaacgttcggcacgccaggttggcaggtagccgttacatcgataggcactcggccactcgcacgcagacaccacaccagtgtgctcagtgctcactgctcaccataataacgctgcacctcttttcatttcaccatctcctgcccccttaaaaaaaagactcaccgtcgacacgccctcccgtcccgagagttctgaatcgaaaccgtcggccacgagagcagtgcgaggcgcccaccgcgatggctcgaaccaagcaccaggccgtgaggaagacggcggagaagcccaagaagaagctccagttcgagcgctcaggtggtgcgagtacctcggcgacgccggaaagggctgctgggaccgggggaagagcggcgtctggaggtgactcagttaagaagacgaaaccacgccaccgctggcggccagggactgtagcgctgcgggagatcaggaagtaccagaagtccactgaaccgctcatcccctttgcgcctttcgtccgtgtggtgagggagttaaccaatttcgtaacaaacgggaaagtagagcgctataccgcagaagccctccttgcgctgcaagaggcagcagaattccacttgatagaactgtttgaaatggcgaatctgtgtgccatccatgccaagcgtgtcacaatcatgcaaaaggacatacaacttgcaaggcgtatcggaggaaggcgttgggcatgatatataatatccattctgattgcatcattcttgtgaatttgtttgtaggagctagacattagtgttgttgaatgctgcatggttcctaatccttttcgcagtctaacatctgtggagttagtatgttacatggcaacagctgaacatctgtggactatatggcaacagccgaagattgtgtctgtgggataactggttgttttggttgctcttcagtagtttgtttgcttcagtatggactatggagtaaactgcatgctgaaacccgaaccactgctgaaactgcatgctgaaacccgaaccactgctacggcagttgccaggatagcaggagggcctttatgcacagtggaattgagtagagaactgagtaaaccatggttctttctccttttgaactggaacacacacagttggatcttgtttctcttcttaggccattcatcgtgtttattaggggtgtaaatggtacaaatattatctgtccgtattcgaatttgatctatctaagaaggttgaaatccgatccgtattcgagtccacgtattcagtacccgatccgtatctgaattatattcgtacccatatattcaaagttggatatttaagatgtcgataccaattctaatcttatctgtcataactcg

SEQ ID NO: 63351 - DNA, 1911 bp, Zea Mays
gagaagggaaagcattctccaatatccacctcctcctcgcccctctctctctctctctaaaagaattgaaaagataagggggaaatcctcaagtgctcgttacataaaccctaacctcgttggattcgcagcaaaagcccaccaattggaagccctccgatgttccagctgcatgctggagctgagccgtgctcggtttgacgaaattttgcatcccttctgtgcttggaccacccgattgaggctgtttctccgagggggcgtgccagcggtttcgcggcccaggtcctcacctgtgctatccggcgccggatccgggtttgttccggtgagaggtcgggcttttggtggggtctgtccagcttggagctcaatttgccggcctgagttggagtcgcgactgcggtggcggtgattgagcctttcctggcaatcttggcgggcgtttcgtcttgctgcgtggcagaaaggtgtgacctttgtgccgtgcgatgcatcccaaggcacgaatccacgccgacccggtgcgcgaggtcgaccactttgactgcctgccggattcgctcgtcctgctgatcctgaacaaggtcgaggacgtgcgatcgctcggccggtgctacgccgtgtccaagcggctttgtgggcttgtcccccttgtccatgatgtgtatgtcaagattgaccgcgtcgtggcggtcgacggcgacgctgaggacgcgctcaacctgtcatcgccgaagcctcggaacatcttctcgcacttcctgaagctgatgctcttcaccatcatcaagcctttccacaacatgcgcaaccctaatggtactgggaggtcattgttcccgcagctctcgcaccactcgccagcgcaggtgctcaggaacttcacgcacatcaggaatcttcggatcgagctcccttctggggatgtgggtactgaggagggagttctcctgaaatggcgagcagagtatgggagcacacttcagagttgtgtgatcctggggggtacccgggttgaccgcaagcctgttggtggagagcatgagcagtctttggaggataatggaagcatgccagagtctttctataccaatggtgggctgaaacttcgtgtcgtctggacaatcagctctctaattgcggcatcaacgaggcactatcttctccgctcaatcatcaatgaccattccacacttctgagcttggtactgacagatgccgatggccaaggcacattgtgcatgggagcagagcagctgaaggagttcagagagaaccagttgtcggcctcagcatgttccaacaggactcaggtcccagcctgcaacatgaagctcaagtatgctccatatcttgaactgcctggtggtatggcgttgcaaggcgccactttggtggctatcaaaccctcacctgacggaagcaatggaagccaccctaaccgtaaagaagccgacgcatttgtctttggagcatttgatgggccatttaaggctgctgtgaaggctttgatgaagaggcgcacttaccttctggagatgaatggcttctagaaatcttgtggtatcgagcttgttggtgctatgcatggcatatttagctaagcttttcatctttgtaatatccaagaaagcaccatctctagttgctgcttttagtctgctgttttagctctttgtacagtgttaacatttgattatataaaaatcgtatcaagttctctagtgtaatagcgaatcgctccatagttcaccatcctggcccctggtgtaatatccaagaaatcatatcagtttcgtaggtgtaagttgaaagtagccttggaaaaggagagccagtttatgccttcaggtacataacattcattttgggattgtgaaatgaaagagactgatctgatgccgacaa

SEQ ID NO: 63352 - DNA, 2549 bp, Zea Mays
cgccgctctctcttgagctttccttccctgttcggctcggcatccctgacctcctgttcgcgtccttctctgcccggccacccgccaccgccccgccgcaccggaggcgcgcccgcctaggcctcccctctgccaccgacggcggcggcgatccagccgagccgatcgatcctcgtgtctcgcctgcccaccaggtctttcctcctgacgttcacgtactacgtgcctctcgtccccgctccggccatgggcgtcgaggcgaagcgagatgcctggtgcggcaccaagaaaacgctaaggtgctgcatcagaacaggctggagatgcgcctctcagcactggcctctgttcagcctagtgctgctgctctacctgctgcacaggcacgcaccgggcctcttcgctctcctgctctccgcttctccggtgatcatatgcaccggcctcctcctcgctgcgctgctatgccacgggagcgcacgccttccggaggtccgtgaagacgggacggctcctgagcaagtttcagctgggaggtcttctagaaatgttgatatcagagaagaacagcagagattttcggtgcctacgacgttggagaagaacgtagccaaggaggcaggctgtggcacaagggactgtaacgggcatgctggtctggatgaaaatgttcctcttctgaagcaggttcatcaaggggatgagactgagagacctgaaggtttccacactcctgttccttcgctgaagcaagaagctgccacggaaggatacatgaagtacaacgcagaaaaagagtctgaaggtgcgttttctagcaaggatgagtgtgccagttcgttcgatgacgtgcatcgtaatgcagttgatggggaagagacagccctaggcctttgctcttcaagagaggatgttagtgacgatgttaaagtggtggcaaaggcagatcagcaagggacagtatccacagatgcacagtctgccgatggaagcgcgggtaaatgcaaatggggccgtgctttctccgtgcgccggaggaagaagcttgctgatataaagatcgaggctattagttctgttccggacaaccagttggaccattctctatgctcgccattcgctacggttggcagccatgacaacagttcatcagggtttggccctgataatgcagagggacacccacctgacgtttctatgacagactcttctccggtgattgatgagaccgagacgggccctcccctgggtctgggtgttgatcgctcttgtcctggtctccttaatactggtgattcagacaaccatttgaacatggcttctctggatcgtcaacctccgagtgttaacaatgaagtggctgacaatagcaaggccaaagatgatggcgaggaggaggagaaggatcctggaactgagcctgcatttctctggacagccgacaacgagaagaacgccatggatcttgggtactccgagaccgaacggagccgtcggctggagacgctgatggtgaagagaaaatccaggaaaaacatacagtttgagctggacggcgtgggcggtctagcagacggtttatcacggttccgtccgaaagttcatcctgtttcagttccagcgcgaaggatgaacccgtttactagcgacgacgcggagatcccaggctcggctcctcctattctgcatccacgagacgaccccttcagtttcctcaccgatgaacagccagacgacaacagtggccaccctgcacaccatagtctgggaccccaggaaccgatgccagctctgcatcaggacgcgctgttcagaaggcacgagagcttcagcttcggcaggccgccgcagagacacgggcccaggctccagccatgctttgccctggaggaatccagcctcggcgaagcgagcgcgagcggtttccagaggcagttcagcgacaggagcgtgtcgtccaggctcagcgtcgtctccgagtgcgacacggtctcttcggccggcgaccaggagcacaacgagctcgtacggaactacattcgcggggtgcgcgagtcgcctggcctgctcgggcaggacgtcgacggcgacgctgtgtgtaccagtaccgccggaaacgagtgctcggacgggatcggcttcgtggagaacgagactctgaatgctgtcatctgctgatggtgaatggatggacttggctgcaacgaaacgaaactttgatatatatattgtggatgaagagcagacgggattgctgttgtagcccctctacgtttttgtttgtttcttgtttgcactcgtctgtctaagtctaacagggggtttgtattctacctggtacatttgcacagtacaaaacacactgttttgctgtacagtattgcgtttagttgcgtcgtactgtacaaaattatcacggatagattgaatggcacgatacccttcacggtcacgggatcatgtgtgatatcgtgcacaggaagctagaaatcataacaagtcaggagacagctctccagaaacgtaataatagggataaaattcttcta

SEQ ID NO: 63353 - DNA, 1649 bp, Zea Mays
ccggccggcaaaaacccacacgacccacgcatcggcatcgcattcacgtccaaccgttcgcttgcgccctccgcaacaacgcaacgcatcgtgacgccgccgctttttgcttttccgactgctgtttccgccttttgagtaggcgttgggcgagcttcggtttcgacggacgcagccgtcaccgcctcaccggcccggccatgggcgccgccgccgcctgctctcttcgcctctgccacacgtcaccatccgctgcgacggtaaggagggaggcgctgcggcaggcggaggagctggacgagttgacgcggatggtggacctccagcaagcgcgtttggaggcggccgtcgtcggcaggaggcgggcgctcgaggccgtggagcgggggaaggagcggctgcaggagcagatcgaccgggtgctgccgctgtcgaggtccctcaccgccgcgcaccatcgagtgcaggaagcgaaggaggcgttatccggagacaaattcagactcaaggatctgcagaggctgcttcggacgaggcagcagtgcatggttagccaggttgctggtttgtaccctgtgagagtcttccatgatcttccaagacatgcagaaaacccctgtgccgatactaatggggagcatgtgacacttccagaggaaaacagaacattttcaggtggagatggaacacatttacccaccattatcaaatctccagaagcacgtggctggacattttttggttgggacattatgaagcataaaatgaagcaaaaaagttacaggaacaaggtgctacagaggtccgcagctgttctgggatatgcagcacattcttgctcatagcttgctatcttgatgttcccctccgatatcccttgcgctttggagggtcccgatcttatgtgagtgatcgcttgccttcagctgatacagcatcatcggctgctttagcaagtaccaggaacaccgaatcagaactaacagaataccctcttttcctggaatgccaagacgatgactccactagtgcctcctatgccatttatttattgcacaaggatacggagcagcttctgaactatgttggagctgagagctgtggaaggcacgtgtttggtaacctacgagaacttcttaggatcgtgcagtctgataagtttgtgtacagatgatggttccaatccatgtggttttggagtgcttatgctgtagatgtattatagagatgtaagtaggtgtttttcttttctcttcctattctttcgtgtgattcattccctctttccctgcgctaggttttttatatgtgcaggaaataggcaattatgtttttctagagaaatgaaatgtactcacacgtatggcttcttgcatatcttattcgagaaaaaagatggtccaatcgaaagtcctacaaccactgggtctgtctccttgacaagcaagtgtttgatatttagattatccaataagtcacattttgcaatcgttgggtttgaattcaaccaatcatatttattttagcttctgctctgttattctgtgaattaatgttttgctctcgtggctgacaagttagacgcgtcaggcgtcaccgcgttttgtaacccagttgatatcagacccgtttgtttgttctgttttgac

SEQ ID NO: 63354 - DNA, 1556 bp, Zea Mays
ccggccggcaaaaacccacacgacccacgcatcggcatcgcattcacgtccaaccgttcgcttgcgccctccgcaacaacgcaacgcatcgtgacgccgccgctttttgcttttccgactgctgtttccgccttttgagtaggcgttgggcgagcttcggtttcgacggacgcagccgtcaccgcctcaccggcccggccatgggcgccgccgccgcctgctctcttcgcctctgccacacgtcaccatccgctgcgacggtaaggagggaggcgctgcggcaggcggaggagctggacgagttgacgcggatggtggacctccagcaagcgcgtttggaggcggccgtcgtcggcaggaggcgggcgctcgaggccgtggagcgggggaaggagcggctgcaggagcagatcgaccgggtgctgccgctgtcgaggtccctcaccgccgcgcaccatcgagtgcaggaagcgaaggaggcgttatccggagacaaattcagactcaaggatctgcagaggctgcttcggacgaggcagcagtgcatggttagccaggttgctggtttgtaccctgtgagagtcttccatgatcttccaagacatgcagaaaacccctgtgccgatactaatggggagcatgtgacacttccagaggaaaacagaacattttcaggtggagatggaacacatttacccaccattatcaaatctccagaagcacgtggctggacattttttggttgggacattatgaagcataaaatgaagcaaaaaagttacaggaacaaggtgctacagaggtccgcagctgttctgggatatgcagcacatctgatacagcatcatcggctgctttagcaagtaccaggaacaccgaatcagaactaacagaataccctcttttcctggaatgccaagacgatgactccactagtgcctcctatgccatttatttattgcacaaggatacggagcagcttctgaactatgttggagctgagagctgtggaaggcacgtgtttggtaacctacgagaacttcttaggatcgtgcagtctgataagtttgtgtacagatgatggttccaatccatgtggttttggagtgcttatgctgtagatgtattatagagatgtaagtaggtgtttttcttttctcttcctattctttcgtgtgattcattccctctttccctgcgctaggttttttatatgtgcaggaaataggcaattatgtttttctagagaaatgaaatgtactcacacgtatggcttcttgcatatcttattcgagaaaaaagatggtccaatcgaaagtcctacaaccactgggtctgtctccttgacaagcaagtgtttgatatttagattatccaataagtcacattttgcaatcgttgggtttgaattcaaccaatcatatttattttagcttctgctctgttattctgtgaattaatgttttgctctcgtggctgacaagttagacgcgtcaggcgtcaccgcgttttgtaacccagttgatatcagacccgtttgtttgttctgttttgac

SEQ ID NO: 63355 - DNA, 2256 bp, Zea Mays
ccggccggcaaaaacccacacgacccacgcatcggcatcgcattcacgtccaaccgttcgcttgcgccctccgcaacaacgcaacgcatcgtgacgccgccgctttttgcttttccgactgctgtttccgccttttgagtaggcgttgggcgagcttcggtttcgacggacgcagccgtcaccgcctcaccggcccggccatgggcgccgccgccgcctgctctcttcgcctctgccacacgtcaccatccgctgcgacggtaaggagggaggcgctgcggcaggcggaggagctggacgagttgacgcggatggtggacctccagcaagcgcgtttggaggcggccgtcgtcggcaggaggcgggcgctcgaggccgtggagcgggggaaggagcggctgcaggagcagatcgaccgggtgctgccgctgtcgaggtccctcaccgccgcgcaccatcgagtgcaggtaatatgagcaatccgtctgcgcgacgcaaaatgctgcgagattgggctgggctattctgggcagctgcattttatccattggggcgtccgctgattgcaggaagcgaaggaggcgttatccggagacaaattcagactcaaggatctgcagaggctgcttcggacgaggcagcagtgcatggttagccaggttgctggtttgtaccctgtgagagtcttccatgatcttccaagacatgcagaaaacccctgtgccgatactaatggggagcatgtgacacttccagaggaaaacagaacattttcaggtggagatggaacacatttacccaccattatcaaatctccagaagcacgtggctggacattttttggttgggacattatgaagcataaaatgaagcaaaaaagttacaggaacaaggtgctacagaggtccgcagctgttctgggatatgcagcacatgtaagtttttcctacgaggtatttctcctgtgcagtataacaaacatccctacttatgccacctttggaacaggaaattttcacacaaataaattctttttcacaggaaatatgctcgaaacagaaaaaaatcccttaatcaaatggggcatttagttggtcttattgtcatgttcatgctgaaaggaaaaaatattaagacaataatttgcactactaaaccttgcattgctttgcatgcagaatatgctgtaaaatatagtactgattgtagaaaaaaaatcagtttttaagataattcagttttcatatattactttgcaatgttacagcttgagttttgtagtctaaagttttgggccattgcaaatcacaacattaaatatccataaagcataaacaatgataggactacaattgtttctgcctatttataatacttaatgccatcatgaggatcagaaacttagaatcactacttgcctatttatttgtttgtaggcagtcttgctcatagcttgctatcttgatgttcccctccgatatcccttgcgctttggagggtcccgatcttatgtgagtgatcgcttgccttcagctgatacagcatcatcggctgctttagcaagtaccaggaacaccgaatcagaactaacagaataccctcttttcctggaatgccaagacgatgactccactagtgcctcctatgccatttatttattgcacaaggatacggagcagcttctgaactatgttggagctgagagctgtggaaggcacgtgtttggtaacctacgagaacttcttaggatcgtgcagtctgataagtttgtgtacagatgatggttccaatccatgtggttttggagtgcttatgctgtagatgtattatagagatgtaagtaggtgtttttcttttctcttcctattctttcgtgtgattcattccctctttccctgcgctaggttttttatatgtgcaggaaataggcaattatgtttttctagagaaatgaaatgtactcacacgtatggcttcttgcatatcttattcgagaaaaaagatggtccaatcgaaagtcctacaaccactgggtctgtctccttgacaagcaagtgtttgatatttagattatccaataagtcacattttgcaatcgttgggtttgaattcaaccaatcatatttattttagcttctgctctgttattctgtgaattaatgttttgctctcgtggctgacaagttagacgcgtcaggcgtcaccgcgttttgtaacccagttgatatcagacccgtttgtttgttctgttttgac

SEQ ID NO: 63356 - DNA, 2362 bp, Zea Mays
gcaaaattgagctcccctgccatttgttctccatcccagttcccccggcaaacacactcggttctcccgtgcctctcgccgtctcgcgtcgcaacgactggccggccgccgccgccaccgccgacctacgtgccaaggtccgcatattcggaaccttcgccggcgagcacccaccaggattttttttgtacatctaagatgtacagggcctcgaatttcatacctgatcctaatcaggtgctcctagatgccaaaccattaagatcgttagctccaatgttccctgcccccatgggagtcaatgttaatcagtcaagtacaccaccattggtctgtgtcactccggttggtcaattttcagcagggtttggtgcaggcaccagtgctaatggtgccattgatgccacccctatctctgcatacaaaacaaggtcaaacatatcacttgatggtgatgatgatccttactcgggtaaccaaactgaacggaagcctaggagaggccgacctcccggttctggtcgtgatggctcaaatgttcacatgacctttgaggcactccggcgaagacatctgcagatggatgaaacacaggacgctagcaggcgtgcagacctgaaggctggtgccatcatgatggcaagtaacatcagggcaaattcgggcaagagggtaggaactgtccctggagttgaaataggagatattttctatttcaggatggagctgtgtgtcattggattgcatgcacctagtatgggaggcattgattacatgactagtaaatttggaaacgatgaggattctgtagccatatgtatcgtttccgcaggaggttatgagaatgatgatgatgacacagatgtgctggtatacagtggtcaagggggaaatagtaggaatactgaggagaggcaagaccagaagcttgagaggggtaacctagctcttgagaggagtttgcataggaagaatgagataagggttgtacgtggcttcaaggatccattttgcctaactgggaaaatttacatatatgatggcctgtacaaaattcatgagtcctggaaggagaaaacaaggtctggtatcaattgcttcaagtacaagctgctgcgtgaacctggacagcgtgatggagctgcattatggaagatgactcagaaatggatagatgatcctgctaccagaggcagggttctactagctgatctgtcatctaaggctgaaactattccagtttctcttgtcaatgaggttgaccatgagaaaggacctgcacatttcacctatactaaccaggtcaaatacgtgaggcctctcagttctatgaaaaagctgcagggctgtggatgccagagtgtttgcctgcccggtgatgccagttgtgcttgtggacaacataatggaggtgatttaccctacagttcattaggattattgtcatgccgcaaaccgatgatctatgaatgtggtgaatcttgcaactgttctacaaattgccggaacagagtgacccaaaaagggcccaggctacattttgaggtcttcaggaccaccaatcgaggctggggtcttcgttgctgggaacctgttcgtgctggttcatttatatgtgaagctagcacatatgtatcggctgatgaatttgagccactgcctatcaagataagtgcaaaaaacatgggaaatgtctcccgtttcatgaaccacagttgctcacccaatgtcttctggcaacctgttcaatatgatcatggagatgatggacacccacatataatgttctttgcactgaaacatattccacccatgacagaactgacttatgactatggtgttgctggagctgaatctagtggttcaggctctcgtagaacgaagaactgcatgtgtggatcacaaaactgccgtggactattttgatgggttaagatccttgctctttgtggttaatcatacaaaccactttcagctagatcctttcttagtctccggatgatatgagtatgactgatgattccaattgctgccatgtgtactgtgaagacagcaagttgttgtcaaactgtagaatttctgttgccctgcacggcatggtggccgttctcccaccatttgttcaaatatttatgggggtgtggattgatgtatttcttctgctaatcttgtccaccagctgcaccggtctgtgtaaacttgttatgatccctgtttgctctggacgcctggttgtttaaccgtgactccttggatctggtcatgtaaattatcctggtttaggattatgttgcttttgactcgaattttctgcctcccttgctcgtttcatgtgatgcatcgtggccgatattttcagcaa

SEQ ID NO: 63357 - DNA, 975 bp, Zea Mays
ccacacgccacgtcgtccgcgtcctagccactcacgaacgcgggccgagtcaccgcccgcccacctcctatccacttccccatctgccagccgtccgagtccgaccacctctcgtatcgattctccaagcgccgcgccgcgccgggcgaagaagctcgtctcgtctccatggcggccgcagcggtggccatctccacctccgtgtgcacgtcctcaaggcgtagcacgggctgtccgaacgtgaggccccaggcccgtccgctcctaggcatgccgtcgctgcgccggaggctgcagacggccttggccgcgacgggcaagacgccgggcgaggcggaggagcaggtccccgcgtgggccaagcccggcgcggacgagccgccaccctgggagcgcgagggcggggccgcgcgtggacaggaggcccggcaggtccccttctacgcgtacctgctcgcgtctacgatcaccgccatcgccgcgatcggctccatcttcgagtacaccaaccagcggccggtgttcgggatcgtcggccccgacagcgccctgtacgcgccgctcctgggcttcttcgtcttcaccggcgtttctgtggttcaaggccgtgcagacggcgaacagagaggccgaggagcaagaccgcagagacggattcctgtgagaggctgtgggtgactccggcgcactcgccggtgccgtcgccgtgcagaagaacgcgcaccgcaccaccgtggtgttcgcagcgacgggtgacgggtcatgtactcaagttatgtatgtcagtgtactgtattctagaattggagagagcagatggatttgcggcacaaatcagagaaaatatcataatcatcattcgtatgagtggaaaatatttgtatttatttggttgaaaatggtatagcgtttttttgcacttgaatagttagatagattgcttattgcttctagcatatttttggcactcgtgcg

SEQ ID NO: 63358 - DNA, 1262 bp, Zea Mays
gtcaaaaaaaaaaaacaccaaatttctcaggcctccctccccgcgtcgctttcgccggacaccaccacctgccgctttcccctcgcccctccgcccctttttgaccccggttacgaatccgcaccagggcctgcggcggtatactcggttccctgcccccccacgaccacgccgccgcctcctccccacgcccgcccggcgctcccggaaccgccgtgggaaacaacggctacggtggacatcggatcttcataatcgctttgtggatgccatcgcccagcttggtggaccagacagagctacacctaaaggggttctcactgtgatgggtgtaccagggatcacaatttatcatgtgaagagccatctgcagaagtatcgccttgcaaagtatatacccgactctcctgctgaaggttccaaggacgaaaagaaagattcgagtgattccctctcgaacacggattcggcaccaggattgcaaatcaatgaggcactaaagatgcaaatggaggttcagaagcgactacatgagcaactcgaggttcaaagacaactgcaactaagaattgaagcacaaggaagatacttgcagatgatcattgaggagcaacaaaagcttggtggatcaattaaggcttctgaggatcagaagctttctgattcacctccaagcttagatgactacccagagagcatgcaaccttctcccaagaaaccaaggatagacgcattatcaccagattcagagcgcgatacaacacaacctgaattcgaatcccatttgatcggtccgtgggatcacggcattgcattcccagtggaggagttcaaagcaggccctgctatgagcaagtcataaggcaaacttcaccttgacagaaaattttcagagttgacctctccacgagatgagcattctcatgtgaatatatattatcttaacaacagaatgtacgggtttttgaccctgcacctgatcccttcagccacgtccagttattcttatcactgtagtatccatcaacaagtcctgtaattatgaggatggtgttacagagtttctagcaagcatttccatcgagggaatggccctgagttgatccatgtagcaagaaagagaacatgcttacaagcaatatatttgctgtgaaaagggcacgcccctggatcttcctgaagttatgttgataaaaaaaagattatggcatatttctgaattatttctgaactcggcattatttatagtcttcgtttcatgt

SEQ ID NO: 63359 - DNA, 1389 bp, Zea Mays
gtcaaaaaaaaaaaacaccaaatttctcaggcctccctccccgcgtcgctttcgccggacaccaccacctgccgctttcccctcgcccctccgcccctttttgaccccggttacgaatccgcaccagggcctgcggcggtatactcggttccctgcccccccacgaccacgccgccgcctcctccccacgcccgcccggcgctcccggaaccgccgcattcacatgatgtatcatgcgaagaatttttctgtgccctttgctccgcagagggcacaggataatgagcatgcaagtaatattggaggtattggtggacccaacataagcaaccctgctaatcctgtaggaagtgggaaacaacggctacggtggacatcggatcttcataatcgctttgtggatgccatcgcccagcttggtggaccagacagagctacacctaaaggggttctcactgtgatgggtgtaccagggatcacaatttatcatgtgaagagccatctgcagaagtatcgccttgcaaagtatatacccgactctcctgctgaaggttccaaggacgaaaagaaagattcgagtgattccctctcgaacacggattcggcaccaggattgcaaatcaatgaggcactaaagatgcaaatggaggttcagaagcgactacatgagcaactcgagacaactgcaactaagaattgaagcacaaggaagatacttgcagatgatcattgaggagcaacaaaagcttggtggatcaattaaggcttctgaggatcagaagctttctgattcacctccaagcttagatgactacccagagagcatgcaaccttctcccaagaaaccaaggatagacgcattatcaccagattcagagcgcgatacaacacaacctgaattcgaatcccatttgatcggtccgtgggatcacggcattgcattcccagtggaggagttcaaagcaggccctgctatgagcaagtcataaggcaaacttcaccttgacagaaaattttcagagttgacctctccacgagatgagcattctcatgtgaatatatattatcttaacaacagaatgtacgggtttttgaccctgcacctgatcccttcagccacgtccagttattcttatcactgtagtatccatcaacaagtcctgtaattatgaggatggtgttacagagtttctagcaagcatttccatcgagggaatggccctgagttgatccatgtagcaagaaagagaacatgcttacaagcaatatatttgctgtgaaaagggcacgcccctggatcttcctgaagttatgttgataaaaaaaagattatggcatatttctgaattatttctgaactcggcattatttatagtcttcgtttcatgt

SEQ ID NO: 63360 - DNA, 2278 bp, Zea Mays
gtcttttctcccctctttggctctctattgtctctcccctagcaatgcaaatggggaatgctgaactgctggtgtggtggttgagggcactcagagttatttctgtaccattcacgtgccagaaccctgattgatagtttcgcttttcctccttaatcgtttgaccttttcttgtgtccattttagatcttgctggtccttgtgggttttatctcttttatgtgtttccccgtttcgttgttttcggttctcctttgcctttgtttcccttttctgttctttgggggttgagctctgaggttttcatacggggtttcatctctagcctaccccaacgtgcttgggacaaaaaaggctttgttgttgttgttgttgttgttgttgaccctgaagtcgttgctcttgttacctgtagaatttagtaacatattttttccgaagaaataagtctgatttttttgtcatgccattgcaagtctgggaaatgggttctgaaatgggataagttgctaattcctcacgtgtaactgtgcttctggaaacaaagtgaaggaatcaaccatggcaacttcctggaaaggcgattgaagggcacatattggactattatatatccttccattgcctctctagtcaacgttgtttggcccgtgctggatagaaaatcttgaaaagaagctccatgtacaggtgcacgccacttcgcatcattgactggatcatcaggagctgatgcctggaggtgttaattcgccggtccgtgccttcaaatctgttggtgggcagccagtagtgttcgactctgtaaagggttctcgtatgtgggatgttgatgggaatgagtacattgattacgttggttcctggggtcctgcaatcatcggccatgcagatgataaggttaatgctgcattgattgaaactctgaagaaaggaactagctttggtgctccatgtttgctggagaacgtattggctgagatggtcatctctgccgtgccaagtatcgaaatggtccgctttgtcaactcagggacagaagcctgcatgggagcgctccgcctcgtgcgcgcattcaccgggcgggagaagatcatcaagttcgaaggctgctaccatggccatgccgattccttccttgtcaaagctggcagtggtgtcgccacccttggcctcccagactcccctggcgtccccaagggggccacctacgagactctaacggcaccctacaatgatgtcgaggcagtgaagaaactgttcgaggacaacgcgggggagattgctgccgtcttcctcgagccagttgttggcaacgctggtttcatccccccacagcctggtttccttaacgctctccgcgacttgaccagacaggatggtgcgctcctggtcttcgatgaagtgatgaccggcttccgtctgtcttacggtggagctcaggagtacttcgggatcacccctgacgtgacgaccttgggcaagatcatcgggggtggcctccccgttggtgcctacggtgggagaagggacatcatggagatggttgcccccgcagggccgatgtaccaggcaggaactctcagcgggaaccctctagccatgaccgctgggatccacacgctcaagcggctgacagagcccggcacctacgagtacttggacaagatcaccggcgaactcgtccgtgggatactggacgtcggtgcgaaagcagggcatgagatgtgcggaggacatatcagaggaatgtttggcttcttcttcaccggcgggcccgtccacaatttcggggacgccaagaagagcgacaccgagaagttcgggaggttctaccgtggcatgctggaggagggcgtgtacttcgctccatcgcagttcgaggcggggttcaccagcttggcgcacacctcccaggacatcgagaagaccgtcgaggccgctgagaaggttctgaagcggatatagggggtccgcttcaagcaagcatgcagagagcatttcctcgtatttacgttcttgtactcttagttctatatgccaccgaggttttgtattgtgcagcagcaggacagcttctgtaagttcctctttctgaattagtgggtcttgtttttgtcagtgccaataaatctatggtccacgattacggtttcgttgttgtactgatgttcagatacaggattgtctagaacctttttttttagaaaaaaaaaacaatatccacattagtaatgcactgacccgggacttgcataagccatctcggactcttccc

SEQ ID NO: 63361 - DNA, 2403 bp, Zea Mays
ctgctttaacttcaattgtatcagcacattttttctctctgttctttttcccgtctaccttcctttgttcacgaggatacaagactggccaacgagagtcaggcgaggcaagcgaagcgagccagcaacctccaccgtagcatgcagctgccattgccatccccggggttgggagccatgtggagcctcctccccctcctcctcttcctcagctcgtccctgctcgccgcaaccaccatagcctacgacctgtggtacaccgagtgcgcgagcaacacgaactacacgcgcgggggcgcgttccaggccaacctcgacgcgctcctctcctccctccccgccgccgcggccgcgtcgtacgggttcgccgacaacttcacaggcgccgcgcccgaccaggcctacggcctcgcgcagtgccgcggcgacgtcaacgcgtcgacgtgcctcgcgtgcttggacggcgctgcgcggcacatggccgccacctgccccggccagaaggacgccatgcttatctacgacgagtgcctgctgcggcactccaacgcgagtttcttgggcgcggccgacgcgtcggtgaggttctgcgcgtggaacccgcagaacgcgacgcagccggaggagttcaggacgcggctcggcgcgctgatgggcaacctcacggcgcgggcggcgttcgcgtccccgcggatgttcgcggccgggaaggccgccgtctcgcccttcgcgaacgtctacggcatggcgcagtgcacgcgggacctcgccgacgacgactgcaaccgctgcctcgacggcgtcgtcgcgttcatcccgaactgctgcgacgggaagcagggcggccgggtcatcgcccgcagctgctccatccggttcgaggtgtactcgttctacgacgccttgggcgcccaggaggccatgtcgccggccgcggcccccgtccccggaggcgggccgaccaacggcagcgggcactccgtggacggaaacaccgggagcagcagtcacacggtccggacagctcttctcgtagcaattcctgtcgctgtcgcgctgctgctgctagttgctgtcttcctcttcctctgcaggaggaacagacaactgcacaagcatgtgcaggttgcaagcagcgtacacgaagatgaagaagacatgagaagctcagagtctctcctctatgatctgagcaccctacgagctgccacggacaacttttcggaagaaaataagctcggcgagggagggtttggcccagtctacaaaggcacgctgcaggacgggcaggacattgcggtgaagaggctgtcagcaacttcgcagcaggggcaggtggagatgaagaacgaggtggtcctgttggcgaagctccagcacaggaacttggtgcgcctgctcggctgctgcaccgaggagcacgagaggctcctcgtctacgagttcctcaccaacaatagcctcgacaaaatcatcttcgcacggcggcatgagctgggctggggactgaggcagaggatcatcgagggcatcgggcgagggctcctctacctccacgaggactcgaggctgaccatcatccaccgcgacctcaaggccagcaacatcctgctggacgcggacatgaaccccaagatctctgacttcggcttggccaagctgttcagcatcgactccagcgtgggaaacaccagccgcattgccggaacatacggatacatggcgccggagtacgccctgcacggcatcttctcggccaagtcggacgtcttcagctacggcgtccttgtcctcgagatcgtcaccggccgccgaaactcgtacacgcatgcttcgggaccgtctgaagatctgcttacctttgtttggacgcactggagccgtgggagcgtgcagcctctgctggaggggtgccccgacgagggtctccgtgcgcaggaggtgctgaggtgcatccacgtcgctctgctctgcgtccaggaggatccgcacgaccgccccagcatggcatcggtcgtcgtcatgctcaacagccgctccatcacgctaccggcgcccgccgcgccggcgtacgcggtgcccggccgcgcggtcacggcatcagagaacccgccgcggaggatgagcttgggtcgccagggtcccatggcggcagctcgggagccttctatcaacgaagcttccgtgtctgagttgcaccctcgttgatgctgtacgagtcactgaatcactgaatcggcgtggatgccggaccgccgatcaatcgatggacaacaatgatgctttgtgttcgttttttttaatcttcgttttgaattcgggagtacagtttgtattcgaaattgtcccatggaaagtgtttgtggaacttctcgtcgggattttgttcagacgcttgtaaaa

SEQ ID NO: 63362 - DNA, 1686 bp, Zea Mays
cggatcaccagatccgctcccttccccccgtcagcagtagaggcgcgagaagttgtggaagacccgtctcccttcccataaacacgacagaggaaacacacgagacactggatatatggttggacctctggcctctttctcatcttcattccatatgaggggtacatgttctatatatagagacgcgatagccctcagggctatattcgatatttgcccacgtaacccttcattagggtttctcaacacaggggaccggaggtgggacccatccatggagccatagcaataccgacggttccacagctttccttcgccgcaccgctttgcttcctcgcaaagcatcagatcgtggtcgagtcgccgtcaacgacgcggcgctggtaccgcagcatccttcgcccccgcccccgtccccgtcaccgtattcgcatcgtccggcaaacggcgaccagcgcaaacaccttccacaagccattgctttagtttgttccctcttgctataaaatatgcccgctcctgcactactactactactaccagcgatagtggccggcatcatccgtctcgtctctcctctcctctcctttttccccctccctgcacagcgccgctcaccgtcaccggaccacagcagcgatcgatggctgagaacgacctcgaggccatcgagctcgcgcgcttcgcggtcgccgagcacaacagcaagaccaacgcgatgctggaattcgagaggctggtgaaggtgaggcaccaggtcgtggccgggaccctgcaccacttcaccgtcgaggtgaaggaggccggcggcggcgaaaagaagctgtacgaggccaaggtgtgggagaaggcgtgggagaacttcaagcagctgcagagcttcgagctcgtcggagacgccgcggtcgcctgaggcgcacaggcttttcgctggaggctggagcacaacaatgaaagaatttaactgtcatcccactggaaaagtatgatataatgaataaaccagcgtcttacccacatgtattgtaccctaatgagatatttgaccactgtaatagaatgagatgtgctaaggaatctgaaagccttcttgctttttgttgccaacttgccatacatgatacatccgccaacaggtctcagctatccaagaaagcagaaggatagataacataaaactggagagcaactggaatgtacaaacggtactatctgcgaaagcaatagctgctaatagaacctaacttgagaacattacagtcaactagtcaaacgaccttaacctctgggacattataagctacatcggcagctttggcggctatatgatacatgagaactgctacagagttaagctgaacctacagttgtcctgctattcctactcatcaactctgaagctatataacggcggagctagtcttcattgtcataatcctcgtcctcctccaatctatggtttgttgacagagcaaactggacagggtccatctccatcttgttcatgtcagccagttcccaagcaccaaagaagtccttgagttttgctccttcccttaaccgtggaacagatggtccaggtgctgcagtggctgcagcgcaactagttgctggagctgacagctggggttcgggtggcactgtaacctcatcctcttcatcggttggatctaaattcaagtcaat

SEQ ID NO: 63363 - DNA, 2051 bp, Zea Mays
cgattctccacgtggccaccgcgcccagtccacgctcccccaaccagcccacctaaacccccgacccatcccgacctcttcctcaaatcctcagatccgccccctcctccacccttgcgccgcgctttcacagctctcccgcctccggatccagatccgccgccaccaacgcctgctcctccccctcccgctgcaccaccaccatcaagaggtccagcagggcggcagcggcagcggcggcggcggcgacatggggcgtgacggcggtggcggtgtcgccggcggcatgtctgactcggtgctccggaaggtgctcctctcctacttctacgtggcggtgtggatcttcctctccttctccgtcatcgtctacaacaagtacatcctcgacccaaagatgtacaactggcccttccccatctccctcaccatggtgcacatgggtttctgctcatccctcgccgtcgcgctcgtccgcgtcctccgcgtcgtcgacctccccacatcgccctccatgacgccgcagttctacacctcctccgtcgtccccatcggcgcgctctacgcgatgtcgctctggttctccaactccgcctatatctacctgtccgtgtcattcatccagatgctcaaggcgctgatgcccgtcgccgtctactccatcggcgtcctcttcaagaaggagaccttcaggtcctcctccatgctcaacatgctctccatctcattcggtgttgccatcgccgcctacggcgaggcgcgcttcgacgtgcgcggcgtcgcgctgcagctcgccgccgtcgccttcgaggccacgcggctcgtgctcatccagatcctgctcacgtccaagggcatctcgctcaaccctatcacctcgctctactatgtcgcgccgtgctgcttctgcttcctcctcgtgccctgggccttcgtcgagctgcccaggctgcgcgccgtcggtaccttccaaccggattttttcgtctttgggacgaactcactctgcgcctttgcgctcaaccttgccgtcttcctgctggtcggcaagacctcggcgctgaccatgaacgtcgcgggagtagtcaaggactggctgttgattgccttctcgtggtctgtgatccgtgacaccgtcacaccgatcaacctgttcgggtacgggatcgcgtttttaggggtgggctactacaatcatgtcaagctgcaggcgctcaaggctaaggaggcacagaagaaagccacacaggctgatgaggaggccgggtcgctcttgcaggagcgcgatggacacagtgatcgcaagagcgacaatcaggcctagagggccagatctgatcctggcttccccatattggttggttctcgatacattcatgatattgctaccattgtcacttacatgtgagagaagtgttttttgttagcttgcattgtgatataagagttcatcttgagaaagacgttatgtttacatctaacgtttgtggcaatcaaaaatcaatattgcattgtggaccattggctactgaaggcatctgttttgtttacacaaatgaaatagaattctaaaaaaaattgttctgtgaacaggttaccactagcctggaactgcgacaaaataagaaatagtcgaaaccaataaagcctagcattttgttgttctactcggtcattttggtgtcctaaacttgtaattttgctggaatattgtacagggcatctgatgcaaggtgcaaagactggtgttaggtctgcggttgctttcaaggaggaaggcggccattcctcactacctctctttgcccattgtctacatttatttgttctactagtagattaggggactacagatgtactcctgcagatggttaatttggtggctattttcgatatataatgagcttacagtaatctacgagctgagtctttctgcctgcgaagtttctgtttattcgtggaccggtcggcgtgttgtgtggatcagctttgtagtactttagtttcatactccgctttgtggtaaaaaaaaatcaaagaacgtttgcttt

SEQ ID NO: 63364 - DNA, 1626 bp, Zea Mays
gccaacaaaaacctcccagcactggcaagaacagggaatcgtcccctccctccgtctccaccgcccaccactgatcggatcacgtcggcgtcccatctcctcctccacgacacagaacgccgctccctttccgggattctcctctccaatcgcagctaaaacgcaacgcactggatcggacgtcgccaaaaagatcggtggcgacaccataaagaaagaatccgagaaaaggcgaaaggggaggagagaaaggggaggtacaaaatttctacccgctagaggttagctagctcggcggcgagggaacgagagacgccctaccgtcgattccatatcgtcgctccgatattctgatgccggaatcctgcttttccggctagcttaccgatacctcctagctcaccatttcttggagtttggtgtcctttctcgagtgtttccttcctccctcccgggttctactgctgagtggcatctttcttgtgcgacttgtccgttgaccacaggcggagaaatttgttctcggcacacattctctgccacaatggacgatggagctgacctcccctgccaactgctcttctcccacccggagatgcctgacagcttcgacgagttcttcaacagcgccacgacgacctgcacccacacgcacagctgcaacccgcccggcccctcggtcgccatgcacacccacacgtgcctgcacgcgcacaccctggtcctgggcagcggcggggaggacgacgacgacgccagggaggactcggcgaagccgcgcagaccgctggggaacagggaagctgtgcgcaagtaccgggagaagaagaaggcgcacgcggcctttctggaagaggaggtcaagaagctccgcgccgccaaccagcagctccagagacggctgcagggccatgcagctttggaggcggaggtggcgaggctccggggtctcctgctcgatatccggggcaagatcgacgccgaggtcggcggcgtgctcccttttcagaagccgtgcagtgtgggctccgtggcgtgtgccgatcctgctctgtgcttcaacggcaactcggaggttggaggcggctgggaggagagctcaagaccggcagccgcggactgcaggatcgatgaagtgcgagggatgtcacgggaaattgatgtcccagaaggcttgcgtcattccatggatgttgttgcgagcttcgtgagttctgatcccctggctgaatgagcgcgtttgcctgattggcagttttttttttttggggcctctgccagtgccagcttcttttggcttgcttgaaaggtcaaattttcatgtaattagaagaattgaggaactgataatgagtggaactacctccactgtggtccatgcttcttgtgctggtgttcagtgtgtatagctgagattatattgaactaatataaatgcactgaacactgtttacatctgaaaaaaggtcatttctgtgggtgcaagattttttattttatttttctgcaattacaggacgactacaaaatcgtcagattgtttgttcattctgcagaacgtagaggattttttttccgcccagagtttctctggaataccactagcccgattgtactttgttcatg

SEQ ID NO: 63365 - DNA, 1491 bp, Zea Mays
ttgcgagccaacaaaaacctcccagcactggcaagaacagggaatcgtcccctccctccgtctccaccgcccaccactgatcggatcacgtcggcgtcccatctcctcctccacgacacagaacgccgctccctttccgggattctcctctccaatcgcagctaaaacgcaacgcactggatcggacgtcgccaaaaagatcggtggcgacaccataaagaaagaatccgagaaaaggcgaaaggggaggagagaaaggggagctcaccatttcttggagtttggtgtcctttctcgagtgtttccttcctccctcccgggttctactgctgagtggcatctttcttgtgcgacttgtccgttgaccacaggcggagaaatttgttctcggcacacattctctgccacaatggacgatggagctgacctcccctgccaactgctcttctcccacccggagatgcctgacagcttcgacgagttcttcaacagcgccacgacgacctgcacccacacgcacagctgcaacccgcccggcccctcggtcgccatgcacacccacacgtgcctgcacgcgcacaccctggtcctgggcagcggcggggaggacgacgacgacgccagggaggactcggcgaagccgcgcagaccgctggggaacagggaagctgtgcgcaagtaccgggagaagaagaaggcgcacgcggcctttctggaagaggaggtcaagaagctccgcgccgccaaccagcagctccagagacggctgcagggccatgcagctttggaggcggaggtggcgaggctccggggtctcctgctcgatatccggggcaagatcgacgccgaggtcggcggcgtgctcccttttcagaagccgtgcagtgtgggctccgtggcgtgtgccgatcctgctctgtgcttcaacggcaactcggaggttggaggcggctgggaggagagctcaagaccggcagccgcggactgcaggatcgatgaagtgcgagggatgtcacgggaaattgatgtcccagaaggcttgcgtcattccatggatgttgttgcgagcttcgtgagttctgatcccctggctgaatgagcgcgtttgcctgattggcagttttttttttttggggcctctgccagtgccagcttcttttggcttgcttgaaaggtcaaattttcatgtaattagaagaattgaggaactgataatgagtggaactacctccactgtggtccatgcttcttgtgctggtgttcagtgtgtatagctgagattatattgaactaatataaatgcactgaacactgtttacatctgaaaaaaggtcatttctgtgggtgcaagattttttattttatttttctgcaattacaggacgactacaaaatcgtcagattgtttgttcattctgcagaacgtagaggattttttttccgcccagagtttctctggaataccactagcccgattgtactttgttcatg

SEQ ID NO: 63366 - DNA, 2496 bp, Zea Mays
ccgtgctctcgcagatcccttggggccgtctcgcctccgcgcgacgccggcagcgagctgagtttggtttcgccgggttgctcggtttgcggtttattcttcccgcgattttagtttttgcgtcgatcctgtttcgtcctcgccttctcagcgtgtgggttgcaggattttgggtccgatccggtcttaggcgttcgtcatggcgtcgtgtggcgaggagatggaggcaggggcaacaaagttttggaagtagattgaggcgttgactggactgatgttcatagtatcgggagaagatcgttcggatatatatatttacctaaatcgctcatctgttagttcatactcattttttgtccgctgcaattcttaattgcttaaattggggctggtggttttctccagcaactcgattgaatggatggatgggtcggaggcgagtttgatcctgcttctccttgtgcaatcaggagttcggaactgtttagagttccttgcgtttgttcactaaccatcctctctcctgtcttccttcaaaaattggcattataagcttgattacccttcattggaaattctgcttgctggatctgcaggggcagaagagttttggaactagattgaggcgttaactggactgatgttcatagtatcgggagaagatcgttcggatatatctacctaaatcgctcttctactattggttcatatttaatttctgtccgctgcaatttttagttaattatattggggctgatggttttctccagcaacaagattattatatggatggatggatggatggtgttcaagcgccttgcctgtcctgtcttgccctttgtcccttcgtcgcctcgggcctcggcgtgctcgcattttccattacttcgtttcgattttgagccgggtatcatcttcacctgttgttttgttccgctgctttgcgcctccgtgctcccgcagatccctttgggccgtttcgcctccgcgcgacgctgggagcgagctgagtatggtttggctgggttgttcagtttgcggtgtattcttcctgcaattctagttttcgtgttgattcggtatcgtcctcgacttctcagcgtgtgggttgcaggattgggtccgatcggtgttgtgagagttcgtcatgatggcgtgtggcgaggagatacaggcaggttcactattattgttgatttcgggtttaaggatattctgaaaacaatggttcctaatagaagattaactatggcatgttttggtttgagtccggccattccatgatttttattagagctgatcttgtggcaattgagcatcttctgcctaggccaaattggatggattcctagttttattggcaaacataactgtggcatgttttgagtccgatcatgcaatgatttttattggagcatcttctgccaaatagatggaagactcactagttttgttggacgaaattaactggaagcttgtgatgttttacaattggcacacgttgaatgttcagtcctgtgactaaataaaatactctagatacctgctcctgctcgtactaggtttacttattgattgttgcagcgaagttatttactgttttttacgtagcgtctttgttgtagaatacttcgtttggcacaaaaaccggttacgttgtttgtttctttttataatgctgagaacatgatattttttttgttgggtattatatgtgttctgattatttgtttgtttgtttgtttgcggtttaacactgcctttgccggtcccaagcccggatgcgaaaatgtggagggaactgcaggttgcttagtcgcacaatctccttcacattttttcaagagagatctatttttctaaggctccgtttggatcattggaattgaatttcattctaataatagtaatttaggcatatcaattaagaaattttggatttatacaaaatatatttgtatactattattaacaagatataagagatatttatgtgttacatttttacaatagaggagtgagacgaagagtgtcatgtaagttaaagagtagaaacaaattttactaatacataaaaccatttcttatcctctatcccatgaatttgagatagacttatatatgaactttggaaagtggtggaatgtcagattccaaactaaataagttactttattgagtgaattctaatttctctaaaatgaagggatccaaacgccccgtaaaagaaaatgaaaactaacccttagttccactttataccatagcaatctgctggcgaagtgttcagtagcttgttctatttattcaatctgctggccacctgttcagtagatggttgaggtttagtgttgagactttattccaagacaagtgctctgccactgaatgaacgcatcataatgaacttgtccaaagtgtccggacaatcgaagcacatcctcgtcattgtccctgtcgggcgtatcatttcatcgattgaaaagtgtgaactga

SEQ ID NO: 63367 - DNA, 4036 bp, Zea Mays
caagcgcctcgcctctcctgtccttgtcttgcccttcgtcgcctcggcgcggccgccatccgtcgctcgggcgggggcctcggcgcgctcgtgttttacgtcacttccttctctatatactacgtttcgatttcgaggcgggtcggcttcttcttcaccggttgatttgttccgctgctttgcgcctccgtgctctcgcagatcccttggggccgtctcgcctccgcgcgacgccggcagcgagctgagtttggtttcgccgggttgctcggtttgcggtttattcttcccgcgattttagtttttgcgtcgatcctgtttcgtcctcgccttctcagcgtgtgggttgcaggattttgggtccgatccggtcttaggcgttcgtcatggcgtcgtgtggcgaggagatggaggcagttttcgtgttgattcggtatcgtcctcgacttctcagcgtgtgggttgcaggattgggtccgatcggtgttgtgagagttcgtcatgatggcgtgtggcgaggagatacaggcaggtcagtcttctgtcagatccgacgttaattggttttgttgattggacatggattgatgatttctcaggctcaaatgtatccgggtgtggtaccatcagaacctctcgtagcctgcacaccaactggattcggcccgttcttattttaattgctgatctcgcttgtgtcctttttggtgttagtcgtcctgacttcagaagcagaagaaagggtccagcgctggttacggagatattagttgaagggttgaggttttcttatggttcattcattgtttttcgtttgatgtcgtcatattggtgtgaagatcgcaaccggacttactataagcttgtttgcacttcattggaaatgctgctggctggatctgcgggggcaacagagttttggaagttgattgaggtgttgactggaccggtgtatcaggaaaagatcgttgggatatacataccaaaattgcttttgtattggttcgtcttcagtttctgtgcgctgcaattctttgtttcttatattggggccggtggttttctccagcaagattatatggatggatggggttggaggcgtgtttgatctggcttgtgcttgtgcaatcagaagttaggaactgttcagagttccttgtttgttcactaaccatcctctctcctgccgttcttcgaaaattgacactataagcatgattacccttcattggaaatgctgtttgctggatctgcaggggcaacatagttttcgaagtagattgtggcattgactggattgatgccatagaccatagtaccgggagaagattgttaggatacatctacctagtcgtaaatcgctcttctattggtttatggtttatactcattttctgccggctacaattcttaaatgttttaaattggggttggtgggtttctccagcaacttgattatatggatggatgggtgggtgggttggaggcgagttcgaccctgcttctgcttctgcaatcagaagatttgaactgttcagagttacttgtttgtgttcactaactatcctctctgccaatcttctttgaaaattggctttcctcaaaggtttcccttcgttagtaaatctgcagttttaggagacaccactagagttcgtcctcatagatacaaaaggacattgctggttatggagaggtcagttgaaggctggaggtttgactatgttcgttgtttttttatatgttatatatggctgttctgatgtcacttaatggtgggtgaagtttgccaccggactaatttgaagtttgattgcccttaattagaaaaatgtggttagctggatcaggtgatgttttggaggaatagaggtagatttaagcattttggaggtggattgaagctttgactggactccaagttcattgcatctggagaacatcgtttggctctgcctctcttttattggtgctcctaaatttcttgttccttacatttgggatggcggttctctacttctgtttctgcatgagttagattctgtttctgcatgagcaataagttctgaattgttcaggattcccttcgtttgctgtcaatgttcttcgaaaattttactgtcaatgttcttctgaaaagttagctgtccgtttctgcagatgcacacaagctgagatagaatttccaacaattggtgttgtctccagagcccatccttgttccactggccatttggttcgccttggatttgaaggttcattaagtatatccttgagccaaaatagaaaaaaaaaatcatagaagagctctttggtatccagagaaaaccctccgagtagtgtgcaactgtgcattaatgtgaagtttgataacttggactgacatgttgttttcatgctctgcggtagtttgcgctaactactctgactattccagttcccttgttttgtttgagacatcttaatattcttcaatctaaccagagttcacctaaaacttttgctcatatcagccatttattttggatccagttgtctgatttaagttgatggatgtttggttggatttctgcagttggagctaaggtgcgggttgctagttagacatgagttctagacatttcccactatggagtcttccttccagtgataaataattctttgcgctaactttatttgaagctgtccttaacctatatgcctcatatgatggtgcaggttcactattattgttgatttcgggtttaaggatattctgaaaacaatggttcctaatagaagattaactatggcatgttttggtttgagtccggccattccatgatttttattagagctgatcttgtggcaattgagcatcttctgcctaggccaaattggatggattcctagttttattggcaaacataactgtggcatgttttgagtccgatcatgcaatgatttttattggagcatcttctgccaaatagatggaagactcactagttttgttggacgaaattaactggaagcttgtgatgttttacaattggcacacgttgaatgttcagtcctgtgactaaataaaatactctagatacctgctcctgctcgtactaggtttacttattgattgttgcagcgaagttatttactgttttttacgtagcgtctttgttgtagaatacttcgtttggcacaaaaaccggttacgttgtttgtttctttttataatgctgagaacatgatattttttttgttgggtattatatgtgttctgattatttgtttgtttgtttgtttgcggtttaacactgcctttgccggtcccaagcccggatgcgaaaatgtggagggaactgcaggttgcttagtcgcacaatctccttcacattttttcaagagagatctatttttctaaggctccgtttggatcattggaattgaatttcattctaataatagtaatttaggcatatcaattaagaaattttggatttatacaaaatatatttgtatactattattaacaagatataagagatatttatgtgttacatttttacaatagaggagtgagacgaagagtgtcatgtaagttaaagagtagaaacaaattttactaatacataaaaccatttcttatcctctatcccatgaatttgagatagacttatatatgaactttggaaagtggtggaatgtcagattccaaactaaataagttactttattgagtgaattctaatttctctaaaatgaagggatccaaacgccccgtaaaagaaaatgaaaactaacccttagttccactttataccatagcaatctgctggcgaagtgttcagtagcttgttctatttattcaatctgctggccacctgttcagtagatggttgaggtttagtgttgagactttattccaagacaagtgctctgccactgaatgaacgcatcataatgaacttgtccaaagtgtccggacaatcgaagcacatcctcgtcattgtccctgtcgggcgtatcatttcatcgattgaaaagtgtgaactga

SEQ ID NO: 63368 - DNA, 3332 bp, Zea Mays
ttcgcctcggtgtccatctccaagcgcctcgcctctcctgtccttgtcttgcccttcgtcgcctcggcgcggccgccatccgtcgctcgggcgggggcctcggcgcgctcgtgttttacgtcacttccttctctatatactacgtttcgatttcgaggcgggtcggcttcttcttcaccggttgatttgttccgctgctttgcgcctccgtgctctcgcagatcccttggggccgtctcgcctccgcgcgacgccggcagcgagctgagtttggtttcgccgggttgctcggtttgcggtttattcttcccgcgattttagtttttgcgtcgatcctgtttcgtcctcgccttctcagcgtgtgggttgcaggattttgggtccgatccggtcttaggcgttcgtcatggcgtcgtgtggcgaggagatggaggcaggtcagtcttctgtcagatccggcggttcattggttatcgagagattagttgaagggtgtaggtttgcttatggttcattcctcgttttggttcattcctcgtttttcgttttgatgtcaccatattggtgtgaagattgccaccggacttttactataaggttgttgatccttcattggagatgctgctggctggatctgcaggggcaacaaagttttggaagtagattgaggcgttgactggactgatgttcatagtatcgggagaagatcgttcggatatatatatttacctaaatcgctcatctgttagttcatactcattttttgtccgctgcaattcttaattgcttaaattggggctggtggttttctccagcaactcgattgaatggatggatgggtcggaggcgagtttgatcctgcttctccttgtgcaatcaggagttcggaactgtttagagttccttgcgtttgttcactaaccatcctctctcctgtcttccttcaaaaattggcattataagcttgattacccttcattggaaattctgcttgctggatctgcaggggcagaagagttttggaactagattgaggcgttaactggactgatgttcatagtatcgggagaagatcgttcggatatatctacctaaatcgctcttctactattggttcatatttaatttctgtccgctgcaatttttagttaattatattggggctgatggttttctccagcaacaagattattatatggatggatggatggatggtgttcaagcgccttgcctgtcctgtcttgccctttgtcccttcgtcgcctcgggcctcggcgtgctcgcattttccattacttcgtttcgattttgagccgggtatcatcttcacctgttgttttgttccgctgctttgcgcctccgtgctcccgcagatccctttgggccgtttcgcctccgcgcgacgctgggagcgagctgagtatggtttggctgggttgttcagtttgcggtgtattcttcctgcaattctagttttcgtgttgattcggtatcgtcctcgacttctcagcgtgtgggttgcaggattgggtccgatcggtgttgtgagagttcgtcatgatggcgtgtggcgaggagatacaggcagatgcacacaagctgagatagaatttccaacaattggtgttgtctccagagcccatccttgttccactggccatttggttcgccttggatttgaaggttcattaagtatatccttgagccaaaatagaaaaaaaaaatcatagaagagctctttggtatccagagaaaaccctccgagtagtgtgcaactgtgcattaatgtgaagtttgataacttggactgacatgttgttttcatgctctgcggtagtttgcgctaactactctgactattccagttcccttgttttgtttgagacatcttaatattcttcaatctaaccagagttcacctaaaacttttgctcatatcagccatttattttggatccagttgtctgatttaagttgatggatgtttggttggatttctgcagttggagctaaggttcactattattgttgatttcgggtttaaggatattctgaaaacaatggttcctaatagaagattaactatggcatgttttggtttgagtccggccattccatgatttttattagagctgatcttgtggcaattgagcatcttctgcctaggccaaattggatggattcctagttttattggcaaacataactgtggcatgttttgagtccgatcatgcaatgatttttattggagcatcttctgccaaatagatggaagactcactagttttgttggacgaaattaactggaagcttgtgatgttttacaattggcacacgttgaatgttcagtcctgtgactaaataaaatactctagatacctgctcctgctcgtactaggtttacttattgattgttgcagcgaagttatttactgttttttacgtagcgtctttgttgtagaatacttcgtttggcacaaaaaccggttacgttgtttgtttctttttataatgctgagaacatgatattttttttgttgggtattatatgtgttctgattatttgtttgtttgtttgtttgcggtttaacactgcctttgccggtcccaagcccggatgcgaaaatgtggagggaactgcaggttgcttagtcgcacaatctccttcacattttttcaagagagatctatttttctaaggctccgtttggatcattggaattgaatttcattctaataatagtaatttaggcatatcaattaagaaattttggatttatacaaaatatatttgtatactattattaacaagatataagagatatttatgtgttacatttttacaatagaggagtgagacgaagagtgtcatgtaagttaaagagtagaaacaaattttactaatacataaaaccatttcttatcctctatcccatgaatttgagatagacttatatatgaactttggaaagtggtggaatgtcagattccaaactaaataagttactttattgagtgaattctaatttctctaaaatgaagggatccaaacgccccgtaaaagaaaatgaaaactaacccttagttccactttataccatagcaatctgctggcgaagtgttcagtagcttgttctatttattcaatctgctggccacctgttcagtagatggttgaggtttagtgttgagactttattccaagacaagtgctctgccactgaatgaacgcatcataatgaacttgtccaaagtgtccggacaatcgaagcacatcctcgtcattgtccctgtcgggcgtatcatttcatcgattgaaaagtgtgaactga

SEQ ID NO: 63369 - DNA, 4430 bp, Zea Mays
cttcgcctcggtgtccatctccaagcgcctcgcctctcctgtccttgtcttgcccttcgtcgcctcggcgcggccgccatccgtcgctcgggcgggggcctcggcgcgctcgtgttttacgtcacttccttctctatatactacgtttcgatttcgaggcgggtcggcttcttcttcaccggttgatttgttccgctgctttgcgcctccgtgctctcgcagatcccttggggccgtctcgcctccgcgcgacgccggcagcgagctgagtttggtttcgccgggttgctcggtttgcggtttattcttcccgcgattttagtttttgcgtcgatcctgtttcgtcctcgccttctcagcgtgtgggttgcaggattttgggtccgatccggtcttaggcgttcgtcatggcgtcgtgtggcgaggagatggaggcaggtcagtcttctgtcagatccggcggttcattggttatcgagagattagttgaagggtgtaggtttgcttatggttcattcctcgttttggttcattcctcgtttttcgttttgatgtcaccatattggtgtgaagattgccaccggacttttactataaggttgttgatccttcattggagatgctgctggctggatctgcaggggcaacaaagttttggaagtagattgaggcgttgactggactgatgttcatagtatcgggagaagatcgttcggatatatatatttacctaaatcgctcatctgttagttcatactcattttttgtccgctgcaattcttaattgcttaaattggggctggtggttttctccagcaactcgattgaatggatggatgggtcggaggcgagtttgatcctgcttctccttgtgcaatcaggagttcggaactgtttagagttccttgcgtttgttcactaaccatcctctctcctgtcttccttcaaaaattggcattataagcttgattacccttcattggaaattctgcttgctggatctgcaggggcagaagagttttggaactagattgaggcgttaactggactgatgttcatagtatcgggagaagatcgttcggatatatctacctaaatcgctcttctactattggttcatatttaatttctgtccgctgcaatttttagttaattatattggggctgatggttttctccagcaacaagattattatatggatggatggatggatggtgttcaagcgccttgcctgtcctgtcttgccctttgtcccttcgtcgcctcgggcctcggcgtgctcgcattttccattacttcgtttcgattttgagccgggtatcatcttcacctgttgttttgttccgctgctttgcgcctccgtgctcccgcagatccctttgggccgtttcgcctccgcgcgacgctgggagcgagctgagtatggtttggctgggttgttcagtttgcggtgtattcttcctgcaattctagttttcgtgttgattcggtatcgtcctcgacttctcagcgtgtgggttgcaggattgggtccgatcggtgttgtgagagttcgtcatgatggcgtgtggcgaggagatacaggcagtcgtcctgacttcagaagcagaagaaagggtccagcgctggttacggagatattagttgaagggttgaggttttcttatggttcattcattgtttttcgtttgatgtcgtcatattggtgtgaagatcgcaaccggacttactataagcttgtttgcacttcattggaaatgctgctggctggatctgcgggggcaacagagttttggaagttgattgaggtgttgactggaccggtgtatcaggaaaagatcgttgggatatacataccaaaattgcttttgtattggggcaacatagttttcgaagtagattgtggcattgactggattgatgccatagaccatagtaccgggagaagattgttaggatacatctacctagtcgtaaatcgctcttctattggtttatggtttcccttcgttagtaaatctgcagttttaggagacaccactagagttcgtcctcatagatacaaaaggacattgctggttatggagaggtcagttgaaggctggaggtttgactatgttcgttgtttttttatatgttatatatggctgttctgatgtcacttaatggtgggtgaagtttgccaccggactaatttgaagtttgattgcccttaattagaaaaatgtggttagctggatcaggtgatgttttggaggaatagaggtagatttaagcattttggaggtggattgaagctttgactggactccaagttcattgcatctggagaacatcgtttggctctgcctctcttttattggtgctcctaaatttcttgttccttacatttgggatggcggttctctacttctgtttctgcatgagttagattctgtttctgcatgagcaataagttctgaattgttcaggattcccttcgtttgctgtcaatgttcttcgaaaattttactgtcaatgttcttctgaaaagttagctgtccgtttctgcagatgcacacaagctgagatagaatttccaacaattggtgttgtctccagagcccatccttgttccactggccatttggttcgccttggatttgaaggttcattaagtatatccttgagccaaaatagaaaaaaaaaatcatagaagagctctttggtatccagagaaaaccctccgagtagtgtgcaactgtgcattaatgtgaagtttgataacttggactgacatgttgttttcatgctctgcggtagtttgcgctaactactctgactattccagttcccttgttttgtttgagacatcttaatattcttcaatctaaccagagttcacctaaaacttttgctcatatcagccatttattttggatccagttgtctgatttaagttgatggatgtttggttggatttctgcagttggagctaaggtgcgggttgctagttagacatgagttctagacatttcccactatggagtcttccttccagtgataaataattctttgcgctaactttatttgaagctgtccttaacctatatgcctcatatgatggtgcaggttcactattattgttgatttcgggtttaaggatattctgaaaacaatggttcctaatagaagattaactatggcatgttttggtttgagtccggccattccatgatttttattagagctgatcttgtggcaattgagcatcttctgcctaggccaaattggatggattcctagttttattggcaaacataactgtggcatgttttgagtccgatcatgcaatgatttttattggagcatcttctgccaaatagatggaagactcactagttttgttggacgaaattaactggaagcttgtgatgttttacaattggcacacgttgaatgttcagtcctgtgactaaataaaatactctagatacctgctcctgctcgtactaggtttacttattgattgttgcagcgaagttatttactgttttttacgtagcgtctttgttgtagaatacttcgtttggcacaaaaaccggttacgttgtttgtttctttttataatgctgagaacatgatattttttttgttgggtattatatgtgttctgattatttgtttgtttgtttgtttgcggtttaacactgcctttgccggtcccaagcccggatgcgaaaatgtggagggaactgcaggttgcttagtcgcacaatctccttcacattttttcaagagagatctatttttctaaggctccgtttggatcattggaattgaatttcattctaataatagtaatttaggcatatcaattaagaaattttggatttatacaaaatatatttgtatactattattaacaagatataagagatatttatgtgttacatttttacaatagaggagtgagacgaagagtgtcatgtaagttaaagagtagaaacaaattttactaatacataaaaccatttcttatcctctatcccatgaatttgagatagacttatatatgaactttggaaagtggtggaatgtcagattccaaactaaataagttactttattgagtgaattctaatttctctaaaatgaagggatccaaacgccccgtaaaagaaaatgaaaactaacccttagttccactttataccatagcaatctgctggcgaagtgttcagtagcttgttctatttattcaatctgctggccacctgttcagtagatggttgaggtttagtgttgagactttattccaagacaagtgctctgccactgaatgaacgcatcataatgaacttgtccaaagtgtccggacaatcgaagcacatcctcgtcattgtccctgtcgggcgtatcatttcatcgattgaaaagtgtgaactga

SEQ ID NO: 63370 - DNA, 4647 bp, Zea Mays
tcttccccttgcgctctggttttctctctttgcgccgctgttcaggcgcctcgcctctcctatccttgtcttgccctgtgtcccttcgtcgcctcggcgcgctcgcccttcgttcatcgggcttccgcgcgctcgcgtttttcattattccttctctgtaccccgtttcgatttcgagcggggtcagtttcttcttcaccggttgatttgttctgctgctttgcgtctccgtgctctcgcagatcccttgtagccgctttgcctccgcgcgacgccgggagcgagccgagtttggtttggccgggttgttcggtttgcggtttactctttctgcgattatagttttctggtggatcctgttttgttctcgacttctcagcgtgtgggttgcaggattgggtccgattcggtgttgggatttgttcgtcatggcgtcttgtggcgaggaggtgcaggcaggtcagtcttctgtcagatccggcggttcattggttttgtcactggacatggattcggtggtttcaggctccaatgtcttctggtgtggtaccatcagaatcagatagcgtcgtcgtagtttgcacaccaggaccaggtgaattcgagaccttgggtccattcttattttaacggctgatctcgcttgtggcctttcgggtgttcgtcctaacttcagaagtagaaggaagggtccttgctggttatggagagattagttgaagggaaggaggtttgcttatgattcattccttgtttttccttttgatatcaccatattggcgtgaagattgccaccgggctctataagatagtttaccctccattggaaatgctgctgactggatctgcagaggcaacagagttctgtaagtagattgaggcgttgactggaccgaatttcttagtatcgggagaagatcgttcggatattggttcgctgcaattcttattttcttatattggggctggtagttttctccagcaattcgattatatggatggatgggtcggaggcgtttgtcactaaccatcctctctcctgtcttgcttcgaaaattggcatgataagcttgattacccttcattggaaattctgcttgctggatctgcagtggcgaaggagttttggaagtagatggaggcgttaactggactgatgttcatagatggatccgctttttcgggagattactttctatactctccatttcgattttgagtcgggtcggtatcttcccttgttgattagttccgctgctttgcgcctccgtgctcgcagataccttgggctgtttcgcctctgcgcgacgacgtgaggcgggagcgtgacgagtttggtttggctgggctgttcggtttgcggtttagtcttcctgcgattctagttttcgtgtggatcctgtttcgtcctcgacttctcagtgtgtggattgcaggtttgggtacgatccggtattgggaattcgtcgtggcgtcgggtggcgaggagttgggaggcaggctcaaatgtctccgggtgtggtaccaccagaaccttcgatccattcttactttaacggcagagaagaaagggtccttgctggttacagggagaggtttgcttatggttcattccttgtttttggttttgatgttgtcatattggtgtgaagatcgccaccggacttactataagcttctttacccttcattggaaatgctgctggctggatcttcaggggcaaccgagttttggaagtagattgaggcattgattggaccgcaatattatatggatgaatggatgggttggaggcgagtttgatcgatctggcttacgcttgtgcaatcagaagttcggaaatgttcagagttccttgtgtttgttcactaaccaccccctctcctgtcatttttctttgaaaattggcattataatcttgattacccttcattggaaatgctgcttaccggatctgtaagggcaagaagtagatttgaggcgttgactggactgatgcccatagtaccgggtgaagattgtcaggatatatctacctaaatcgctcttctattggtttatacacatttctgtccgctgcaattcttaaatgttttaaattggggctggttgttttctccagcatctcctgcaatcagaagttctgaactgttcagagttccttgtttgttcactaaccatcctttgtcaatcttctttgaaaattagctttcctcataggcttccatttgttagtaaatctgcgcacttttaggagactcggagttcgtcctagatgcaaaagtacctggctggttatggagaggtcagctgaaggctggaggtttgactttgtttttgatatgtcaatcactggtgggtgaagattgccaccggattaatttgaagcttgatcgcccttaattagaaaaatgttattagctggatcaggtggtgttttggaggtagatttaaacattttggaggtgtttttgaagtttattgcatctggagaacatcgtttggctctacctctcttttattggtactcttaaatttcttgttccttacatttgggatggtgattctctacttgtacagcaactggattgtatggacggaggagcctgaattagattctgtttctgcatgagcaataagttataaactgttcaggattcccttggtttgctgtcaaggttgttcgaaacttttgctgtcaatggtcttaaaaatttacttccctcgtaggcttttgatgttctggtactggatgtgcagttttgggaggcattgctacagagatatgacttccagctgaaattgttgcccattgatacacgctttatcctgttcctatgatatttgatgaatgttcatgctgtttgtgttctcagttgtcactatcaaataggtagttatccgagggtggtctcattgattgcagatctctaggtgataactgggtatgaaggaaccagtttgcatctattcagacctacaaccttcaacttgcattgtgtttgttcagtgtcttgtaccttgaagtagataatgattagggtcattattgcaggtcttactgatatttttttttgcttgggcttgtcatcgtggattatgtgttggaggatgttgacaattggaaatccatgtagcaaataaatgattttggaactgggggcagacattggaggtggattttcctcaattggagatattggcaaattggaaaaaattgtgacttgacctgtgctgcaaaaacctttaaacaaggaggcttctaattcatctctatgaacagtcctctccagttactttttgaaccagtaactttttcaagtttgtgcagatgcacacagaagctgagagagaatttccaacaattgttgtctccagagtccatccttgttccactggccatttggttcgccttggatttgaagatgtctgataagttgatggatgtttggttggatttctgcagttggagctaaggtgtggattgctagttagacattctgagttctagacatttccatctatggagtcttccttccagtgataaattattctatgcactaactttatttttaagctgtctttaacctatatgccatcatacgatggtgcaggttcactattattcttgatttaagatttttaaaacaattggttcctagtaggatgttttacctgagcgtatgaccgtatgttcatattttatagtccaaaattctcgatttctctgttagggcccatactaatgttagtctagttcttggattgcttctgattgtactttggtataacccccttactcaatatggccattctttatcaaattcatcatattgcacagttcctttcagtaatatattaggcattagatattattatcagcaaatgctacttgctaaccgtattcctttttgagttgtaatatgtgaaatctgagagatcgatcttgtggcaccgttagttttgttggttatcattagattgattgcctggaacaaatggaacacctcctcagtctggtttgtgacgttggcccccttgcctttttagaacattgttcatttgttctgtaatttcctcactctggactttccatctgacgcatcttatcctttgtggaacaataaccaagaaagattctgctgcttctgttcctgccaaaagtaaatctgtctgaacaaacttgtttggctgaactattgttgcccttgattacatatgtgactgtcttggggatgcaactgtggagtctttgagatggaactgtcctttgtggaacaataaccaagaaagattctgcttcttctgttcctgccaaaagtatatctgtcacaaacttgtttggctgaactattgttgcccttgaatacacaagcctatgtgactgtcttggggatgcaactgtggagtccttgagatgaaactggatttacacaaaagtaaatcctttgtggactagcagtagttgcatatacatggatgggttgaagtttagccatcctggttcatattcatgtagtgcagttcatattcatgttgatatgcaatacaggatcttgaacaataattttattggagctggttgttgtggcaatggagcatcttctacctaggccaaatgagatggagtctgtggcatgttttgg

SEQ ID NO: 63371 - DNA, 6385 bp, Zea Mays
tcttccccttgcgctctggttttctctctttgcgccgctgttcaggcgcctcgcctctcctatccttgtcttgccctgtgtcccttcgtcgcctcggcgcgctcgcccttcgttcatcgggcttccgcgcgctcgcgtttttcattattccttctctgtaccccgtttcgatttcgagcggggtcagtttcttcttcaccggttgatttgttctgctgctttgcgtctccgtgctctcgcagatcccttgtagccgctttgcctccgcgcgacgccgggagcgagccgagtttggtttggccgggttgttcggtttgcggtttactctttctgcgattatagttttctggtggatcctgttttgttctcgacttctcagcgtgtgggttgcaggattgggtccgattcggtgttgggatttgttcgtcatggcgtcttgtggcgaggaggtgcaggcaggtcagtcttctgtcagatccggcggttcattggttttgtcactggacatggattcggtggtttcaggctccaatgtcttctggtgtggtaccatcagaatcagatagcgtcgtcgtagtttgcacaccaggaccaggtgaattcgagaccttgggtccattcttattttaacggctgatctcgcttgtggcctttcgggtgttcgtcctaacttcagaagtagaaggaagggtccttgctggttatggagagattagttgaagggaaggaggtttgcttatgattcattccttgtttttccttttgatatcaccatattggcgtgaagattgccaccgggctctataagatagtttaccctccattggaaatgctgctgactggatctgcagaggcaacagagttctgtaagtagattgaggcgttgactggaccgaatttcttagtatcgggagaagatcgttcggatattggttcgctgcaattcttattttcttatattggggctggtagttttctccagcaattcgattatatggatggatgggtcggaggcgtttgtcactaaccatcctctctcctgtcttgcttcgaaaattggcatgataagcttgattacccttcattggaaattctgcttgctggatctgcagtggcgaaggagttttggaagtagatggaggcgttaactggactgatgttcatagatggatccgctttttcgggagattactttctatactctccatttcgattttgagtcgggtcggtatcttcccttgttgattagttccgctgctttgcgcctccgtgctcgcagataccttgggctgtttcgcctctgcgcgacgacgtgaggcgggagcgtgacgagtttggtttggctgggctgttcggtttgcggtttgggtacgatccggtattgggaattcgtcgtggcgtcgggtggcgaggagttgggaggcaggctcaaatgtctccgggtgtggtaccatcagaatcagatagtgtcgtcggagcctgcacatcagaagcagaaggaagggtccttgctggttatggagagattagttgaatgttggaggggcaacagagctttggaagtagattgaggcgttggctggactgatgcccatagtaccgggtgaagattgtcaggatatatctacccaaatcgctgttctattggttcatactcattttttgtccgctgcagttattaatttcttatattggggctggttgtccatcttattgggataagatcgttcaaatatatctacccaaatcgctcttctattggttcatactcatattttgtctgctgcaactattaatttcttatattggggctggtggctttttccagcagttcagttatatggatggatggatgaatgggttgtaggcgagtttggtcctgcttatgcttgtgcaatcaggagttcggaattgttcaagttccttgtggacaacagagttttggaagtagattggtgtgttgactggactggcattcatatatcgagagaagattgttcggacacgatcatgtggatggatggatggtgttcaagtgccttgcctctcctgtcttgcccttgccttgggccttggcgtgctcgcattttccgttacttccttttttatactctgtttcgattttgagccgggacattatcttcttcacctgttgatttgttctgttgctttgcgcctccgtgctctcgcagatccctttgggctgtttcacctccgcacgacaccaggagtgagccgagtttggtttggccgggttattcagtttattctttattatgcaattctagtttttgagtctattttgtagtcctcgacttcccaatgtgtgggttgcaggattgggtccgatcagtggagaattcatcatgatgacatgttgcgaggagatggaggcaggtcagtcttctgtcagatccggcggttcattgattttgtcgattggacatggattggtggtttcaggctcaaatgtctccgggtgtggtaccaccagaaccttcgatccattcttactttaacggcagagaagaaagggtccttgctggttacagggagaggggcaaccgagttttggaagtagattgaggcattgattggaccgcaatattatatggatgaatggatgggttggaggcgagtttgatcgatctggcttacgcttgtgcaatcagaagttcggaaatgttcagagttccttgtgtttgttcactaaccaccccctctcctgtcatttttctttgaaaattggcattataatcttgattacccttcattggaaatgctgcttaccggatctgtaagggcaagaagtagatttgaggcgttgactggactgatgcccatagtaccgggtgaagattgtcaggatatatctacctaaatcgctcttctattggtttatacacatttctgtccgctgcaattcttaaatgttttaaattggggctggttgttttctccagcatctcctgcaatcagaagttctgaactgttcagagttccttgtttgttcactaaccatcctttgtcaatcttctttgaaaattagctttcctcataggcttccatttgttagtaaatctgcgcacttttaggagactcggagttcgtcctagatgcaaaagtacctggctggttatggagaggtcagctgaaggctggaggtttgactttgtttttgatatgtcaatcactggtgggtgaagattgccaccggattaatttgaagcttgatcgcccttaattagaaaaatgttattagctggatcaggtggtgttttggaggtagatttaaacattttggaggtgtttttgaagtttattgcatctggagaacatcgtttggctctacctctcttttattggtactcttaaatttcttgttccttacatttgggatggtgattctctacttgtacagcaactggattgtatggacggaggagcctgaattagattctgtttctgcatgagcaataagttataaactgttcaggattcccttggtttgctgtcaaggttgttcgaaacttttgctgtcaatggtcttaaaaatttacttccctcgtaggcttttgatgttctggtactggatgtgcagttttgggaggcattgctacagagatatgacttccagctgaaattgttgcccattgatacacgctttatcctgttcctatgatatttgatgaatgttcatgctgtttgtgttctcagttgtcactatcaaataggtagttatccgagggtggtctcattgattgcagatctctaggtgataactgggtatgaaggaaccagtttgcatctattcagacctacaaccttcaacttgcattgtgtttgttcagtgtcttgtaccttgaagtagataatgattagggtcattattgcaggtcttactgatatttttttttgcttgggcttgtcatcgtggattatgtgttggaggtactaacttattcttgtatatgaaccatgatacttgtgagactgcttcgaacctgttacatggtgacttgagagctattgtaccagccctgcttcaaactcgtgacatggtgacttgagacctctctcgcatttgtaccaggccagtcctttatgaaccagaatactacgttaatattcagatacttctaatttaatctgcagtggtagaaggtaatgatcatgttttaacttcagagattcaactggagatcgctagaactacagtactacaacttacatttaatcaagcttgtttctgctttatcatgctatgctctgactgaagcattaattcttgtgctgctggtattctgtgttctgcagaccatttagctcaaataattggtagttcaactgtcataatgttcggtttgggatttctatctgtggatgcttcgtctggcttatctatgcttttaggtgcttcatctggcttatctatgtttttgcgctctcgctgttgcatgtgttgcaggatgttgacaattggaaatccatgtagcaaataaatgattttggaactgggggcagacattggaggtggattttcctcaattggagatattggcaaattggaaaaaattgtgacttgacctgtgctgcaaaaacctttaaacaaggaggcttctaattcatctctatgaacagtcctctccagttactttttgaaccagtaactttttcaagtttgtgcagatgcacacagaagctgagagagaatttccaacaattgttgtctccagagtccatccttgttccactggccatttggttcgccttggatttgaaggttcattaagtctatctatccttgaaccaaaatagaaaaaaaatcatagaagagttctttggtaaatataaattgtgcactaataattttgcaagttgcatctatggataccttcacttttggtatccagagaaaacctgtgcattaaatgtgaagcttgatgacttggactgacctgttgtttgcatgctctgcggtagttagatgattcacatgatcacaaccacggcgatgctgtgcagagtttgctctaactactctaactattgactgcacatcaccttccggctcacttgtttgagacacatcttataatattcttcaatctaaccagagctcacctaatacttctgctcatatcagccatttttttggatccagatgtctgataagttgatggatgtttggttggatttctgcagttggagctaaggtgtggattgctagttagacattctgagttctagacatttccatctatggagtcttccttccagtgataaattattctatgcactaactttatttttaagctgtctttaacctatatgccatcatacgatggtgcaggttcactattattcttgatttaagatttttaaaacaattggttcctagtaggatgttttacctgagcgtatgaccgtatgttcatattttatagtccaaaattctcgatttctctgttagggcccatactaatgttagtctagttcttggattgcttctgattgtactttggtataacccccttactcaatatggccattctttatcaaattcatcatattgcacagttcctttcagtaatatattaggcattagatattattatcagcaaatgctacttgctaaccgtattcctttttgagttgtaatatgtgaaatctgagagatcgatcttgtggcaccgttagttttgttggttatcattagattgattgcctggaacaaatggaacacctcctcagtctggtttgtgacgttggcccccttgcctttttagaacattgttcatttgttctgtaatttcctcactctggactttccatctgacgcatcttatcctttgtggaacaataaccaagaaagattctgctgcttctgttcctgccaaaagtaaatctgtctgaacaaacttgtttggctgaactattgttgcccttgattacatatgtgactgtcttggggatgcaactgtggagtctttgagatggaactgtcctttgtggaacaataaccaagaaagattctgcttcttctgttcctgccaaaagtatatctgtcacaaacttgtttggctgaactattgttgcccttgaatacacaagcctatgtgactgtcttggggatgcaactgtggagtccttgagatgaaactggatttacacaaaagtaaatcctttgtggactagcagtagttgcatatacatggatgggttgaagtttagccatcctggttcatattcatgtagtgcagttcatattcatgttgatatgcaatacaggatcttgaacaataattttattggagctggttgttgtggcaatggagcatcttctacctaggccaaatgagatggagtctgtggcatgttttgg

SEQ ID NO: 63372 - DNA, 5254 bp, Zea Mays
tcttccccttgcgctctggttttctctctttgcgccgctgttcaggcgcctcgcctctcctatccttgtcttgccctgtgtcccttcgtcgcctcggcgcgctcgcccttcgttcatcgggcttccgcgcgctcgcgtttttcattattccttctctgtaccccgtttcgatttcgagcggggtcagtttcttcttcaccggttgatttgttctgctgctttgcgtctccgtgctctcgcagatcccttgtagccgctttgcctccgcgcgacgccgggagcgagccgagtttggtttggccgggttgttcggtttgcggtttactctttctgcgattatagttttctggtggatcctgttttgttctcgacttctcagcgtgtgggttgcaggattgggtccgattcggtgttgggatttgttcgtcatggcgtcttgtggcgaggaggtgcaggcaggctccaatgtcttctggtgtggtaccatcagaatcagatagcgtcgtcgtagtttgcacaccaggaccaggtgaattcgagaccttgggtccattcttattttaacggctgatctcgcttgtggcctttcgggtgttcgtcctaacttcagaagtagaaggaagggtccttgctggttatggagagattagttgaagggaaggaggtttgcttatgattcattccttgtttttccttttgatatcaccatattggcgtgaagattgccaccgggctctataagatagtttaccctccattggaaatgctgctgactggatctgcagaggcaacagagttctgtaagtagattgaggcgttgactggaccgaatttcttagtatcgggagaagatcgttcggatattggttcgctgcaattcttattttcttatattggggctggtagttttctccagcaattcgattatatggatggatgggtcggaggcgtttgtcactaaccatcctctctcctgtcttgcttcgaaaattggcatgataagcttgattacccttcattggaaattctgcttgctggatctgcagtggcgaaggagttttggaagtagatggaggcgttaactggactgatgttcatagatggatccgctttttcgggagattactttctatactctccatttcgattttgagtcgggtcggtatcttcccttgttgattagttccgctgctttgcgcctccgtgctcgcagataccttgggctgtttcgcctctgcgcgacgacgtgaggcgggagcgtgacgagtttggtttggctgggctgttcggtttgcggtttgggtacgatccggtattgggaattcgtcgtggcgtcgggtggcgaggagttgggaggcaggctcaaatgtctccgggtgtggtaccatcagaatcagatagtgtcgtcggagcctgcacatcaggtggattcgagatcttgggtccattcttattttaatggctgatcttgcttgtggccttttgggtgttcttactttagaagcagaaggaagggtccttgctggttatggagagattagttgaatgttggaggggcaacagagctttggaagtagattgaggcgttggctggactgatgcccatagtaccgggtgaagattgtcaggatatatctacccaaatcgctgttctattgcagttcagttatatggatggatggatgaatgggttgtaggcgagtttggtcctgcttatgcttgtgcaatcaggagttcggaattgttcaagttccttgtggacaacagagttttggaagtagattggtgtgttgactggactggcattcatatatcgagagaagattgttcggacacgatcatgtggatggatggatggtgttcaagtgccttgcctctcctgtcttgcccttgccttgggccttggcgtgctcgcattttccatccctttgggctgtttcacctccgcacgacaccaggagtgagccgagtttggattgggtccgatcagtggagaattcatcatgatgacatgttgcgaggagatggaggcaggtcagtcttctgtcagatccggcggttcattgattttgtcgattggacatggattggtggtttcaggctcaaatgtctccgggtgtggtaccaccagaaccttcgatccattcttactttaacggcagagaagaaagggtccttgctggttacagggagaggggcaaccgagttttggaagtagattgaggcattgattggaccgcaatattatatggatgaatggatgggttggaggcgagtttgatcgatctggcttacgcttgtgcaatcagaagttcggaaatgttcagagttccttgtgtttgttcactaaccaccccctctcctgtcatttttctttgaaaattggcattataatcttgattacccttcattggaaatgctgcttaccggatctgtaagggcaagaagtagatttgaggcgttgactggactgatgcccatagtaccgggtgaagattgtcaggatatatctacctaaatcgctcttctattggtttatacacatttctgtccgctgcaattcttaaatgttttaaattggggctggttgttttctccagcatctcctgcaatcagaagttctgaactgttcagagttccttgtttgttcactaaccatcctttgtcaatcttctttgaaaattagctttcctcataggcttccatttgttagtaaatctgcgcacttttaggagactcggagttcgtcctagatgcaaaagtacctggctggttatggagaggtcagctgaaggctggaggtttgactttgtttttgatatgtcaatcactggtgggtgaagattgccaccggattaatttgaagcttgatcgcccttaattagaaaaatgttattagctggatcaggtggtgttttggaggtagatttaaacattttggaggtgtttttgaagtttattgcatctggagaacatcgtttggctctacctctcttttattggtactcttaaatttcttgttccttacatttgggatggtgattctctacttgtacagcaactggattgtatggacggaggagcctgaattagattctgtttctgcatgagcaataagttataaactgttcaggattcccttggtttgctgtcaagttttgggaggcattgctacagagatatgacttccagctgaaattgttgcccattgatacacgctttatcctgttcctatgatatttgatgaatgttcatgctgtttgtgttctcagttgtcactatcaaataggtagttatccgagggtggtctcattgattgcagatctctaggtgataactgggtatgaaggaaccagtttgcatctattcagacctacaaccttcaacttgcattgtgtttgttcagtgtcttgtaccttgaagtagataatgattagggtcattattgcaggtcttactgatatttttttttgcttgggcttgtcatcgtggattatgtgttggaggtactaacttattcttgtatatgaaccatgatacttgtgagactgcttcgaacctgttacatggtgacttgagagctattgtaccagccctgcttcaaactcgtgacatggtgacttgagacctctctcgcatttgtaccaggccagtcctttatgaaccagaatactacgttaatattcagatacttctaatttaatctgcagtggtagaaggatgttgacaattggaaatccatgtagcaaataaatgattttggaactgggggcagtaaagcaaggtttgagacctggatttattgggtactgtagacattggaggtggattttcctcaattggagatattggcaaattggaaaaaattgtgacttgacctgtgctgcaaaaacctttaaacaaggaggcttctaattcatctctatgaacagtcctctccagttactttttgaaccagtaactttttcaagtttgtgcagatgcacacagaagctgagagagaatttccaacaattgttgtctccagagtccatccttgttccactggccatttggttcgccttggatttgaagttggagctaaggtgtggattgctagttagacattctgagttctagacatttccatctatggagtcttccttccagtgataaattattctatgcactaactttatttttaagctgtctttaacctatatgccatcatacgatggtgcaggttcactattattcttgatttaagatttttaaaacaattggttcctagtaggatgttttacctgagcgtatgaccgtatgttcatattttatagtccaaaattctcgatttctctgttagggcccatactaatgttagtctagttcttggattgcttctgattgtactttggtataacccccttactcaatatggccattctttatcaaattcatcatattgcacagttcctttcagtaatatattaggcattagatattattatcagcaaatgctacttgctaaccgtattcctttttgagttgtaatatgtgaaatctgagagatcgatcttgtggcaccgttagttttgttggttatcattagattgattgcctggaacaaatggaacacctcctcagtctggtttgtgacgttggcccccttgcctttttagaacattgttcatttgttctgtaatttcctcactctggactttccatctgacgcatcttatcctttgtggaacaataaccaagaaagattctgctgcttctgttcctgccaaaagtaaatctgtctgaacaaacttgtttggctgaactattgttgcccttgattacatatgtgactgtcttggggatgcaactgtggagtctttgagatggaactgtcctttgtggaacaataaccaagaaagattctgcttcttctgttcctgccaaaagtatatctgtcacaaacttgtttggctgaactattgttgcccttgaatacacaagcctatgtgactgtcttggggatgcaactgtggagtccttgagatgaaactggatttacacaaaagtaaatcctttgtggactagcagtagttgcatatacatggatgggttgaagtttagccatcctggttcatattcatgtagtgcagttcatattcatgttgatatgcaatacaggatcttgaacaataattttattggagctggttgttgtggcaatggagcatcttctacctaggccaaatgagatggagtctgtggcatgttttgg

SEQ ID NO: 63373 - DNA, 3987 bp, Zea Mays
tcttccccttgcgctctggttttctctctttgcgccgctgttcaggcgcctcgcctctcctatccttgtcttgccctgtgtcccttcgtcgcctcggcgcgctcgcccttcgttcatcgggcttccgcgcgctcgcgtttttcattattccttctctgtaccccgtttcgatttcgagcggggtcagtttcttcttcaccggttgatttgttctgctgctttgcgtctccgtgctctcgcagatcccttgtagccgctttgcctccgcgcgacgccgggagcgagccgagtttggtttggccgggttgttcggtttgcggtttactctttctgcgattatagttttctggtggatcctgttttgttctcgacttctcagcgtgtgggttgcaggattgggtccgattcggtgttgggatttgttcgtcatggcgtcttgtggcgaggaggtgcaggcaggctccaatgtcttctggtgtggtaccatcagaatcagatagcgtcgtcgtagtttgcacaccaggaccaggtgaattcgagaccttgggtccattcttattttaacggctgatctcgcttgtggcctttcgggtgttcgtcctaacttcagaagtagaaggaagggtccttgctggttatggagagattagttgaagggaaggaggtttgcttatgattcattccttgtttttccttttgatatcaccatattggcgtgaagattgccaccgggctctataagatagtttaccctccattggaaatgctgctgactggatctgcagaggcaacagagttctgtaagtagattgaggcgttgactggaccgaatttcttagtatcgggagaagatcgttcggatattggttcgctgcaattcttattttcttatattggggctggtagttttctccagcaattcgattatatggatggatgggtcggaggcgtttgtcactaaccatcctctctcctgtcttgcttcgaaaattggcatgataagcttgattacccttcattggaaattctgcttgctggatctgcagtggcgaaggagttttggaagtagatggaggcgttaactggactgatgttcatagatggatccgctttttcgggagattactttctatactctccatttcgattttgagtcgggtcggtatcttcccttgttgattagttccgctgctttgcgcctccgtgctcgcagataccttgggctgtttcgcctctgcgcgacgacgtgaggcgggagcgtgacgagtttggtttggctgggctgttcggtttgcggtttgggtacgatccggtattgggaattcgtcgtggcgtcgggtggcgaggagttgggaggcaggctcaaatgtctccgggtgtggtaccatcagaatcagatagtgtcgtcggagcctgcacatcaggtggattcgagatcttgggtccattcttattttaatggctgatcttgcttgtggccttttgggtgttcttactttagaagcagaaggaagggtccttgctggttatggagagattagttgaatgttggaggggcaacagagctttggaagtagattgaggcgttggctggactgatgcccatagtaccgggtgaagattgtcaggatatatctacccaaatcgctgttctattgcagttcagttatatggatggatggatgaatgggttgtaggcgagtttggtcctgcttatgcttgtgcaatcaggagttcggaattgttcaagttccttgtggacaacagagttttggaagtagattggtgtgttgactggactggcattcatatatcgagagaagattgttcggacacgatcatgtggatggatggatggtgttcaagtgccttgcctctcctgtcttgcccttgccttgggccttggcgtgctcgcattttccatccctttgggctgtttcacctccgcacgacaccaggagtgagccgagtttggattgggtccgatcagtggagaattcatcatgatgacatgttgcgaggagatggaggcaggtcagtcttctgtcagatccggcggttcattgattttgtcgattggacatggattggtggtttcaggctcaaatgtctccgggtgtggtaccaccagaaccttcgatccattcttactttaacggcagagaagaaagggtccttgctggttacagggagaggggcaaccgagttttggaagtagattgaggcattgattggaccgcaatattatatggatgaatggatgggttggaggcgagtttgatcgatctggcttacgcttgtgcaatcagaagttcggaaatgttcagagttccttgtgtttgttcactaaccaccccctctcctgtcatttttctttgaaaattggcattataatcttgattacccttcattggaaatgctgcttaccggatctgtaagggcaagaagtagatttgaggcgttgactggactgatgcccatagtaccgggtgaagattgtcaggatatatctacctaaatcgctcttctattggtttatacacatttctgtccgctgcaattcttaaatgttttaaattggggctggttgttttctccagcatctcctgcaatcagaagttctgaactgttcagagttccttgtttgttcactaaccatcctttgtcaatcttctttgaaaattagctttcctcataggcttccatttgttagtaaatctgcgcacttttaggagactcggagttcgtcctagatgcaaaagtacctggctggttatggagaggtcagctgaaggctggaggtttgactttgtttttgatatgtcaatcactggtgggtgaagattgccaccggattaatttgaagcttgatcgcccttaattagaaaaatgttattagctggatcaggtggtgttttggaggtagatttaaacattttggaggtgtttttgaagtttattgcatctggagaacatcgtttggctctacctctcttttattggtactcttaaatttcttgttccttacatttgggatggtgattctctacttgtacagcaactggattgtatggacggaggagcctgaattagattctgtttctgcatgagcaataagttataaactgttcaggattcccttggtttgctgtcaagttttgggaggcattgctacagagatatgacttccagctgaaattgttgcccattgatacacgctttatcctgttcctatgatatttgatgaatgttcatgctgtttgtgttctcagttgtcactatcaaataggtagttatccgagggtggtctcattgattgcagatctctaggtgataactgggtcttactgatatttttttttgcttgggcttgtcatcgtggattatgtgttggaggtactaacttattcttgtatatgaaccatgatacttgtgagactgcttcgaacctgttacatggtgacttgagagctattgtaccagccctgcttcaaactcgtgacatggtgacttgagacctctctcgcatttgtaccaggatgttgacaattggaaatccatgtagcaaataaatgattttggaactgggggcagtaaagcaaggtttgagacctggatttattgggtactgtagacattggaggtggattttcctcaattggagatattggcaaattggaaaaaattgtgacttgacctgtgctgcaaaaacctttaaacaaggaggcttctaattcatctctatgaacagtcctctccagttactttttgaaccagtaactttttcaagtttgtgcagatgcacacagaagctgagagagaatttccaacaattgttgtctccagagtccatccttgttccactggccatttggttcgccttggatttgaaggatcttgaacaataattttattggagctggttgttgtggcaatggagcatcttctacctaggccaaatgagatggagtctgtggcatgttttgg

SEQ ID NO: 63374 - DNA, 6658 bp, Zea Mays
tcttccccttgcgctctggttttctctctttgcgccgctgttcaggcgcctcgcctctcctatccttgtcttgccctgtgtcccttcgtcgcctcggcgcgctcgcccttcgttcatcgggcttccgcgcgctcgcgtttttcattattccttctctgtaccccgtttcgatttcgagcggggtcagtttcttcttcaccggttgatttgttctgctgctttgcgtctccgtgctctcgcagatcccttgtagccgctttgcctccgcgcgacgccgggagcgagccgagtttggtttggccgggttgttcggtttgcggtttactctttctgcgattatagttttctggtggatcctgttttgttctcgacttctcagcgtgtgggttgcaggattgggtccgattcggtgttgggatttgttcgtcatggcgtcttgtggcgaggaggtgcaggcaggctccaatgtcttctggtgtggtaccatcagaatcagatagcgtcgtcgtagtttgcacaccaggaccaggtgaattcgagaccttgggtccattcttattttaacggctgatctcgcttgtggcctttcgggtgttcgtcctaacttcagaagtagaaggaagggtccttgctggttatggagagattagttgaagggaaggaggtttgcttatgattcattccttgtttttccttttgatatcaccatattggcgtgaagattgccaccgggctctataagatagtttaccctccattggaaatgctgctgactggatctgcagaggcaacagagttcttggcgaaggagttttggaagtagatggaggcgttaactggactgatgttcatagatggatccgctttttcgggagattactttctatactctccatttcgattttgagtcgggtcggtatcttcccttgttgattagttccgctgctttgcgcctccgtgctcgcagataccttgggctgtttcgcctctgcgcgacgacgtgaggcgggagcgtgacgagtttggtttggctgggctgttcggtttgcggtttagtcttcctgcgattctagttttcgtgtggatcctgtttcgtcctcgacttctcagtgtgtggattgcaggtttgggtacgatccggtattgggaattcgtcgtggcgtcgggtggcgaggagttgggaggcaggctcaaatgtctccgggtgtggtaccatcagaatcagatagtgtcgtcggagcctgcacatcagaaggaagggtccttgctggttatggagagattagttgaatgttggaggtttgcttatggttcatggccatggttcattcctcgtttttcattttgatgacatcatattggtgtgaagatcgccactggacttgctataagcttgtttacccttcattggaaatgctgttggctggatctgcaggggcaacagagctttggaagtagattgaggcgttggctggactgatgcccatagtaccgggtgaagattgtcaggatatatctacccaaatcgctgttctattggttcatactcattttttgtccgctgcagttattaatttcttatattggggctggttgtccatcttattgggataagatcgttcaaatatatctacccaaatcgctcttctattggttcatactcatattttgtctgctgcaactattaatttcttatattggggctggtggctttttccagcagttcagttatatggatggatggatgaatgggttgtaggcgagtttggtcctgcttatgcttgtgcaatcaggagttcggaattgttcaagttccttgtggacaacagagttttggaagtagattggtgtgttgactggactggcattcatatatcgagagaagattgttcggacacgatcatgtggatggatggatggtgttcaagtgccttgcctctcctgtcttgcccttgccttgggccttggcgtgctcgcattttccgttacttccttttttatactctgtttcgattttgagccgggacattatcttcttcacctgttgatttgttctgttgctttgcgcctccgtgctctcgcagatccctttgggctgtttcacctccgcacgacaccaggagtgagccgagtttggtttggccgggttattcagtttattctttattatgcaattctagtttttgagtctattttgtagtcctcgacttcccaatgtgtgggttgcaggattgggtccgatcagtggagaattcatcatgatgacatgttgcgaggagatggaggcaggtcagtcttctgtcagatccggcggttcattgattttgtcgattggacatggattggtggtttcaggctcaaatgtctccgggtgtggtaccaccagaaccttcgatccattcttactttaacggcagagaagaaagggtccttgctggttacagggagaggtttgcttatggttcattccttgtttttggttttgatgttgtcatattggtgtgaagatcgccaccggacttactataagcttctttacccttcattggaaatgctgctggctggatcttcaggggcaaccgagttttggaagtagattgaggcattgattggaccggtatattgggagaagatcgtcgcgatatacatacctaaatcacttttgtattggttcatcttcagtttttgtccgctgcaattcttaatttcttatattggggctggtggttttttccagcaatattatatggatgaatggatgggttggaggcgagtttgatcgatctggcttacgcttgtgcaatcagaagttcggaaatgttcagagttccttgtgtttgttcactaaccaccccctctcctgtcatttttctttgaaaattggcattataatcttgattacccttcattggaaatgctgcttaccggatctgtaagggcaagaagtagatttgaggcgttgactggactgatgcccatagtaccgggtgaagattgtcaggatatatctacctaaatcgctcttctattggtttatacacatttctgtccgctgcaattcttaaatgttttaaattggggctggttgttttctccagcatctcctgcaatcagaagttctgaactgttcagagttccttgtttgttcactaaccatcctttgtcaatcttctttgaaaattagctttcctcataggcttccatttgttagtaaatctgcgcacttttaggagactcggagttcgtcctagatgcaaaagtacctggctggttatggagaggtcagctgaaggctggaggtttgactttgtttttgatatgtcaatcactggtgggtgaagattgccaccggattaatttgaagcttgatcgcccttaattagaaaaatgttattagctggatcaggtggtgttttggaggtagatttaaacattttggaggtgtttttgaagtttattgcatctggagaacatcgtttggctctacctctcttttattggtactcttaaatttcttgttccttacatttgggatggtgattctctacttgtacagcaactggattgtatggacggaggagcctgaattagattctgtttctgcatgagcaataagttataaactgttcaggattcccttggtttgctgtcaaggttgttcgaaacttttgctgtcaatggtcttaaaaatttacttccctcgtaggcttttgatgttctggtactggatgtgcagttttgggaggcattgctacagagatatgacttccagctgaaattgttgcccattgatacacgctttatcctgttcctatgatatttgatgaatgttcatgctgtttgtgttctcagttgtcactatcaaataggtagttatccgagggtggtctcattgattgcagatctctaggtgataactgggtatgaaggaaccagtttgcatctattcagacctacaaccttcaacttgcattgtgtttgttcagtgtcttgtaccttgaagtagataatgattagggtcattattgcaggtcttactgatatttttttttgcttgggcttgtcatcgtggattatgtgttggaggtactaacttattcttgtatatgaaccatgatacttgtgagactgcttcgaacctgttacatggtgacttgagagctattgtaccagccctgcttcaaactcgtgacatggtgacttgagacctctctcgcatttgtaccaggccagtcctttatgaaccagaatactacgttaatattcagatacttctaatttaatctgcagtggtagaaggtaatgatcatgttttaacttcagagattcaactggagatcgctagaactacagtactacaacttacatttaatcaagcttgtttctgctttatcatgctatgctctgactgaagcattaattcttgtgctgctggtattctgtgttctgcagaccatttagctcaaataattggtagttcaactgtcataatgttcggtttgggatttctatctgtggatgcttcgtctggcttatctatgcttttaggtgcttcatctggcttatctatgtttttgcgctctcgctgttgcatgtgttgcaggatgttgacaattggaaatccatgtagcaaataaatgattttggaactgggggcaggtcagagtctagagcatgttatgttggttttgtcacttgtttttggtgatttcagatctgaatggctgacattctgtctctccatcgatatttaatagtaaagcaaggtttgagacctggatttattgggtactgtagacattggaggtggattttcctcaattggagatattggcaaattggaaaaaattgtgacttgacctgtgctgcaaaaacctttaaacaaggaggcttctaattcatctctatgaacagtcctctccagttactttttgaaccagtaactttttcaagtttgtgcagatgcacacagaagctgagagagaatttccaacaattgttgtctccagagtccatccttgttccactggccatttggttcgccttggatttgaaggttcattaagtctatctatccttgaaccaaaatagaaaaaaaatcatagaagagttctttggtaaatataaattgtgcactaataattttgcaagttgcatctatggataccttcacttttggtatccagagaaaacctgtgcattaaatgtgaagcttgatgacttggactgacctgttgtttgcatgctctgcggtagttagatgattcacatgatcacaaccacggcgatgctgtgcagagtttgctctaactactctaactattgactgcacatcaccttccggctcacttgtttgagacacatcttataatattcttcaatctaaccagagctcacctaatacttctgctcatatcagccatttttttggatccagatgtctgataagttgatggatgtttggttggatttctgcagttggagctaaggtgtggattgctagttagacattctgagttctagacatttccatctatggagtcttccttccagtgataaattattctatgcactaactttatttttaagctgtctttaacctatatgccatcatacgatggtgcaggttcactattattcttgatttaagatttttaaaacaattggttcctagtaggatgttttacctgagcgtatgaccgtatgttcatattttatagtccaaaattctcgatttctctgttagggcccatactaatgttagtctagttcttggattgcttctgattgtactttggtataacccccttactcaatatggccattctttatcaaattcatcatattgcacagttcctttcagtaatatattaggcattagatattattatcagcaaatgctacttgctaaccgtattcctttttgagttgtaatatgtgaaatctgagagatcgatcttgtggcaccgttagttttgttggttatcattagattgattgcctggaacaaatggaacacctcctcagtctggtttgtgacgttggcccccttgcctttttagaacattgttcatttgttctgtaatttcctcactctggactttccatctgacgcatcttatcctttgtggaacaataaccaagaaagattctgctgcttctgttcctgccaaaagtaaatctgtctgaacaaacttgtttggctgaactattgttgcccttgattacatatgtgactgtcttggggatgcaactgtggagtctttgagatggaactgtcctttgtggaacaataaccaagaaagattctgcttcttctgttcctgccaaaagtatatctgtcacaaacttgtttggctgaactattgttgcccttgaatacacaagcctatgtgactgtcttggggatgcaactgtggagtccttgagatgaaactggatttacacaaaagtaaatcctttgtggactagcagtagttgcatatacatggatgggttgaagtttagccatcctggttcatattcatgtagtgcagttcatattcatgttgatatgcaatacaggatcttgaacaataattttattggagctggttgttgtggcaatggagcatcttctacctaggccaaatgagatggagtctgtggcatgttttgg

SEQ ID NO: 63375 - DNA, 6145 bp, Zea Mays
tcttccccttgcgctctggttttctctctttgcgccgctgttcaggcgcctcgcctctcctatccttgtcttgccctgtgtcccttcgtcgcctcggcgcgctcgcccttcgttcatcgggcttccgcgcgctcgcgtttttcattattccttctctgtaccccgtttcgatttcgagcggggtcagtttcttcttcaccggttgatttgttctgctgctttgcgtctccgtgctctcgcagatcccttgtagccgctttgcctccgcgcgacgccgggagcgagccgagtttggtttggccgggttgttcggtttgcggtttactctttctgcgattatagttttctggtggatcctgttttgttctcgacttctcagcgtgtgggttgcaggattgggtccgattcggtgttgggatttgttcgtcatggcgtcttgtggcgaggaggtgcaggcaggtcagtcttctgtcagatccggcggttcattggttttgtcactggacatggattcggtggtttcaggctccaatgtcttctggtgtggtaccatcagaatcagatagcgtcgtcgtagtttgcacaccaggaccaggtgaattcgagaccttgggtccattcttattttaacggctgatctcgcttgtggcctttcgggtgttcgtcctaacttcagaagtagaaggaagggtccttgctggttatggagagattagttgaagggaaggaggtttgcttatgattcattccttgtttttccttttgatatcaccatattggcgtgaagattgccaccgggctctataagatagtttaccctccattggaaatgctgctgactggatctgcagaggcaacagagttcttggcgaaggagttttggaagtagatggaggcgttaactggactgatgttcatagatggatccgctttttcgggagattactttctatactctccatttcgattttgagtcgggtcggtatcttcccttgttgattagttccgctgctttgcgcctccgtgctcgcagataccttgggctgtttcgcctctgcgcgacgacgtgaggcgggagcgtgacgagtttggtttggctgggctgttcggtttgcggtttgggtacgatccggtattgggaattcgtcgtggcgtcgggtggcgaggagttgggaggcaggctcaaatgtctccgggtgtggtaccatcagaatcagatagtgtcgtcggagcctgcacatcaggtggattcgagatcttgggtccattcttattttaatggctgatcttgcttgtggccttttgggtgttcttactttagaagcagaaggaagggtccttgctggttatggagagattagttgaatgttggaggtttgcttatggttcatggccatggttcattcctcgtttttcattttgatgacatcatattggtgtgaagatcgccactggacttgctataagcttgtttacccttcattggaaatgctgttggctggatctgcaggggcaacagagctttggaagtagattgaggcgttggctggactgatgcccatagtaccgggtgaagattgtcaggatatatctacccaaatcgctgttctattggttcatactcattttttgtccgctgcagttattaatttcttatattggggctggttgtccatcttattgggataagatcgttcaaatatatctacccaaatcgctcttctattggttcatactcatattttgtctgctgcaactattaatttcttatattggggctggtggctttttccagcagttcagttatatggatggatggatgaatgggttgtaggcgagtttggtcctgcttatgcttgtgcaatcaggagttcggaattgttcaagttccttgtggacaacagagttttggaagtagattggtgtgttgactggactggcattcatatatcgagagaagattgttcggacacgatcatgtggatggatggatggtgttcaagtgccttgcctctcctgtcttgcccttgccttgggccttggcgtgctcgcattttccgttacttccttttttatactctgtttcgattttgagccgggacattatcttcttcacctgttgatttgttctgttgctttgcgcctccgtgctctcgcagatccctttgggctgtttcacctccgcacgacaccaggagtgagccgagtttggtttggccgggttattcagtttattctttattatgcaattctagtttttgagtctattttgtagtcctcgacttcccaatgtgtgggttgcaggattgggtccgatcagtggagaattcatcatgatgacatgttgcgaggagatggaggcaggtcagtcttctgtcagatccggcggttcattgattttgtcgattggacatggattggtggtttcaggctcaaatgtctccgggtgtggtaccaccagaaccttcgatccattcttactttaacggcagagaagaaagggtccttgctggttacagggagaggtttgcttatggttcattccttgtttttggttttgatgttgtcatattggtgtgaagatcgccaccggacttactataagcttctttacccttcattggaaatgctgctggctggatcttcaggggcaaccgagttttggaagtagattgaggcattgattggaccggtatattgggagaagatcgtcgcgatatacatacctaaatcacttttgtattggttcatcttcagtttttgtccgctgcaattcttaatttcttatattggggctggtggttttttccagcaatattatatggatgaatggatgggttggaggcgagtttgatcgatctggcttacgcttgtgcaatcagaagttcggaaatgttcagagttccttgtgtttgttcactaaccaccccctctcctgtcatttttctttgaaaattggcattataatcttgattacccttcattggaaatgctgcttaccggatctgtaagggcaagaagtagatttgaggcgttgactggactgatgcccatagtaccgggtgaagattgtcaggatatatctacctaaatcgctcttctattggtttatacacatttctgtccgctgcaattcttaaatgttttaaattggggctggttgttttctccagcatctcctgcaatcagaagttctgaactgttcagagttccttgtttgttcactaaccatcctttgtcaatcttctttgaaaattagctttcctcataggcttccatttgttagtaaatctgcgcacttttaggagactcggagttcgtcctagatgcaaaagtacctggctggttatggagaggtcagctgaaggctggaggtttgactttgtttttgatatgtcaatcactggtgggtgaagattgccaccggattaatttgaagcttgatcgcccttaattagaaaaatgttattagctggatcaggtggtgttttggaggtagatttaaacattttggaggtgtttttgaagtttattgcatctggagaacatcgtttggctctacctctcttttattggtactcttaaatttcttgttccttacatttgggatggtgattctctacttgtacagcaactggattgtatggacggaggagcctgaattagattctgtttctgcatgagcaataagttataaactgttcaggattcccttggtttgctgtcaaggttgttcgaaacttttgctgtcaatggtcttaaaaatttacttccctcgtaggcttttgatgttctggtactggatgtgcagttttgggaggcattgctacagagatatgacttccagctgaaattgttgcccattgatacacgctttatcctgttcctatgatatttgatgaatgttcatgctgtttgtgttctcagttgtcactatcaaataggtagttatccgagggtggtctcattgattgcagatctctaggtgataactgggtcttactgatatttttttttgcttgggcttgtcatcgtggattatgtgttggaggtactaacttattcttgtatatgaaccatgatacttgtgagactgcttcgaacctgttacatggtgacttgagagctattgtaccagccctgcttcaaactcgtgacatggtgacttgagacctctctcgcatttgtaccaggatgttgacaattggaaatccatgtagcaaataaatgattttggaactgggggcagcaaggtttgagacctggatttattgggtactgtagacattggaggtggattttcctcaattggagatattggcaaattggaaaaaattgtgacttgacctgtgctgcaaaaacctttaaacaaggaggcttctaattcatctctatgaacagtcctctccagttactttttgaaccagtaactttttcaagtttgtgcagatgcacacagaagctgagagagaatttccaacaattgttgtctccagagtccatccttgttccactggccatttggttcgccttggatttgaaggttcattaagtctatctatccttgaaccaaaatagaaaaaaaatcatagaagagttctttggtaaatataaattgtgcactaataattttgcaagttgcatctatggataccttcacttttggtatccagagaaaacctgtgcattaaatgtgaagcttgatgacttggactgacctgttgtttgcatgctctgcggtagttagatgattcacatgatcacaaccacggcgatgctgtgcagagtttgctctaactactctaactattgactgcacatcaccttccggctcacttgtttgagacacatcttataatattcttcaatctaaccagagctcacctaatacttctgctcatatcagccatttttttggatccagatgtctgataagttgatggatgtttggttggatttctgcagttggagctaaggtgtggattgctagttagacattctgagttctagacatttccatctatggagtcttccttccagtgataaattattctatgcactaactttatttttaagctgtctttaacctatatgccatcatacgatggtgcaggttcactattattcttgatttaagatttttaaaacaattggttcctagtaggatgttttacctgagcgtatgaccgtatgttcatattttatagtccaaaattctcgatttctctgttagggcccatactaatgttagtctagttcttggattgcttctgattgtactttggtataacccccttactcaatatggccattctttatcaaattcatcatattgcacagttcctttcagtaatatattaggcattagatattattatcagcaaatgctacttgctaaccgtattcctttttgagttgtaatatgtgaaatctgagagatcgatcttgtggcaccgttagttttgttggttatcattagattgattgcctggaacaaatggaacacctcctcagtctggtttgtgacgttggcccccttgcctttttagaacattgttcatttgttctgtaatttcctcactctggactttccatctgacgcatcttatcctttgtggaacaataaccaagaaagattctgctgcttctgttcctgccaaaagtaaatctgtctgaacaaacttgtttggctgaactattgttgcccttgattacatatgtgactgtcttggggatgcaactgtggagtctttgagatggaactgtcctttgtggaacaataaccaagaaagattctgcttcttctgttcctgccaaaagtatatctgtcacaaacttgtttggctgaactattgttgcccttgaatacacaagcctatgtgactgtcttggggatgcaactgtggagtccttgagatgaaactggatttacacaaaagtaaatcctttgtggactagcagtagttgcatatacatggatgggttgaagtttagccatcctggttcatattcatgtagtgcagttcatattcatgttgatatgcaatacaggatcttgaacaataattttattggagctggttgttgtggcaatggagcatcttctacctaggccaaatgagatggagtctgtggcatgttttgg

SEQ ID NO: 63376 - DNA, 4924 bp, Zea Mays
tcttccccttgcgctctggttttctctctttgcgccgctgttcaggcgcctcgcctctcctatccttgtcttgccctgtgtcccttcgtcgcctcggcgcgctcgcccttcgttcatcgggcttccgcgcgctcgcgtttttcattattccttctctgtaccccgtttcgatttcgagcggggtcagtttcttcttcaccggttgatttgttctgctgctttgcgtctccgtgctctcgcagatcccttgtagccgctttgcctccgcgcgacgccgggagcgagccgagtttggtttggccgggttgttcggattgggtccgattcggtgttgggatttgttcgtcatggcgtcttgtggcgaggaggtgcaggcaggctccaatgtcttctggtgtggtaccatcagaatcagatagcgtcgtcgtagtttgcacaccaggaccaggtgaattcgagaccttgggtccattcttattttaacggctgatctcgcttgtggcctttcgggtgttcgtcctaacttcagaagtagaaggaagggtccttgctggttatggagagattagttgaagggaaggaggtttgcttatgattcattccttgtttttccttttgatatcaccatattggcgtgaagattgccaccgggctctataagatagtttaccctccattggaaatgctgctgactggatctgcagaggcaacagagttctgtaagtagattgaggcgttgactggaccgaatttcttagtatcgggagaagatcgttcggatattggttcgctgcaattcttattttcttatattggggctggtagttttctccagcaattcgattatatggatggatgggtcggaggcgtttgtcactaaccatcctctctcctgtcttgcttcgaaaattggcatgataagcttgattacccttcattggaaattctgcttgctggatctgcagtggcgaaggagttttggaagtagatggaggcgttaactggactgatgttcatagatggatccgctttttcgggagattactttctatactctccatttcgattttgagtcgggtcggtatcttcccttgttgattagttccgctgctttgcgcctccgtgctcgcagataccttgggctgtttcgcctctgcgcgacgacgtgaggcgggagcgtgacgagtttggtttggctgggctgttcggtttgcggtttgggtacgatccggtattgggaattcgtcgtggcgtcgggtggcgaggagttgggaggcaggctcaaatgtctccgggtgtggtaccatcagaatcagatagtgtcgtcggagcctgcacatcaggtggattcgagatcttgggtccattcttattttaatggctgatcttgcttgtggccttttgggtgttcttactttagaagcagaaggaagggtccttgctggttatggagagattagttgaatgttggaggggcaacagagctttggaagtagattgaggcgttggctggactgatgcccatagtaccgggtgaagattgtcaggatatatctacccaaatcgctgttctattgcagttcagttatatggatggatggatgaatgggttgtaggcgagtttggtcctgcttatgcttgtgcaatcaggagttcggaattgttcaagttccttgtggacaacagagttttggaagtagattggtgtgttgactggactggcattcatatatcgagagaagattgttcggacacgatcatgtggatggatggatggtgttcaagtgccttgcctctcctgtcttgcccttgccttgggccttggcgtgctcgcattttccatccctttgggctgtttcacctccgcacgacaccaggagtgagccgagtttggattgggtccgatcagtggagaattcatcatgatgacatgttgcgaggagatggaggcaggtcagtcttctgtcagatccggcggttcattgattttgtcgattggacatggattggtggtttcaggctcaaatgtctccgggtgtggtaccaccagaaccttcgatccattcttactttaacggcagagaagaaagggtccttgctggttacagggagaggggcaaccgagttttggaagtagattgaggcattgattggaccgcaatattatatggatgaatggatgggttggaggcgagtttgatcgatctggcttacgcttgtgcaatcagaagttcggaaatgttcagagttccttgtgtttgttcactaaccaccccctctcctgtcatttttctttgaaaattggcattataatcttgattacccttcattggaaatgctgcttaccggatctgtaagggcaagaagtagatttgaggcgttgactggactgatgcccatagtaccgggtgaagattgtcaggatatatctacctaaatcgctcttctattggtttatacacatttctgtccgctgcaattcttaaatgttttaaattggggctggttgttttctccagcatctcctgcaatcagaagttctgaactgttcagagttccttgtttgttcactaaccatcctttgtcaatcttctttgaaaattagctttcctcataggcttccatttgttagtaaatctgcgcacttttaggagactcggagttcgtcctagatgcaaaagtacctggctggttatggagaggtcagctgaaggctggaggtttgactttgtttttgatatgtcaatcactggtgggtgaagattgccaccggattaatttgaagcttgatcgcccttaattagaaaaatgttattagctggatcaggtggtgttttggaggtagatttaaacattttggaggtgtttttgaagtttattgcatctggagaacatcgtttggctctacctctcttttattggtactcttaaatttcttgttccttacatttgggatggtgattctctacttgtacagcaactggattgtatggacggaggagcctgaattagattctgtttctgcatgagcaataagttataaactgttcaggattcccttggtttgctgtcaagttttgggaggcattgctacagagatatgacttccagctgaaattgttgcccattgatacacgctttatcctgttcctatgatatttgatgaatgttcatgctgtttgtgttctcagttgtcactatcaaataggtagttatccgagggtggtctcattgattgcagatctctaggtgataactgggtcttactgatatttttttttgcttgggcttgtcatcgtggattatgtgttggaggtactaacttattcttgtatatgaaccatgatacttgtgagactgcttcgaacctgttacatggtgacttgagagctattgtaccagccctgcttcaaactcgtgacatggtgacttgagacctctctcgcatttgtaccaggccagtcctttatgaaccagaatactacgttaatattcagatacttctaatttaatctgcagtggtagaaggatgttgacaattggaaatccatgtagcaaataaatgattttggaactgggggcaggtcagagtctagagcatgttatgttggttttgtcacttgtttttggtgatttcagatctgaatggctgacattctgtctctccatcgatatttaatagtaaagcaaggtttgagacctggatttattgggtactgtagacattggaggtggattttcctcaattggagatattggcaaattggaaaaaattgtgacttgacctgtgctgcaaaaacctttaaacaaggaggcttctaattcatctctatgaacagtcctctccagttactttttgaaccagtaactttttcaagtttgtgcagatgcacacagaagctgagagagaatttccaacaattgttgtctccagagtccatccttgttccactggccatttggttcgccttggatttgaaggttcattaagtctatctatccttgaaccaaaatagaaaaaaaatcatagaagagttctttggtaaatataaattgtgcactaataattttgcaagttgcatctatggataccttcacttttggtatccagagaaaacctgtgcattaaatgtgaagcttgatgacttggactgacctgttgtttgcatgctctgcggtagttagatgattcacatgatcacaaccacggcgatgctgtgcagagtttgctctaactactctaactattgactgcacatcaccttccggctcacttgtttgagacacatcttataatattcttcaatctaaccagagctcacctaatacttctgctcatatcagccatttttttggatccagatgtctgataagttgatggatgtttggttggatttctgcagttggagctaagattctgctgcttctgttcctgccaaaagtaaatctgtctgaacaaacttgtttggctgaactattgttgcccttgattacatatgtgactgtcttggggatgcaactgtggagtctttgagatggaactgtcctttgtggaacaataaccaagaaagattctgcttcttctgttcctgccaaaagtatatctgtcacaaacttgtttggctgaactattgttgcccttgaatacacaagcctatgtgactgtcttggggatgcaactgtggagtccttgagatgaaactggatttacacaaaagtaaatcctttgtggactagcagtagttgcatatacatggatgggttgaagtttagccatcctggttcatattcatgtagtgcagttcatattcatgttgatatgcaatacaggatcttgaacaataattttattggagctggttgttgtggcaatggagcatcttctacctaggccaaatgagatggagtctgtggcatgttttgg

SEQ ID NO: 63377 - DNA, 6595 bp, Zea Mays
tcttccccttgcgctctggttttctctctttgcgccgctgttcaggcgcctcgcctctcctatccttgtcttgccctgtgtcccttcgtcgcctcggcgcgctcgcccttcgttcatcgggcttccgcgcgctcgcgtttttcattattccttctctgtaccccgtttcgatttcgagcggggtcagtttcttcttcaccggttgatttgttctgctgctttgcgtctccgtgctctcgcagatcccttgtagccgctttgcctccgcgcgacgccgggagcgagccgagtttggtttggccgggttgttcggtttgcggtttactctttctgcgattatagttttctggtggatcctgttttgttctcgacttctcagcgtgtgggttgcaggattgggtccgattcggtgttgggatttgttcgtcatggcgtcttgtggcgaggaggtgcaggcaggtcagtcttctgtcagatccggcggttcattggttttgtcactggacatggattcggtggtttcaggctccaatgtcttctggtgtggtaccatcagaatcagatagcgtcgtcgtagtttgcacaccaggaccaggtgaattcgagaccttgggtccattcttattttaacggctgatctcgcttgtggcctttcgggtgttcgtcctaacttcagaagtagaaggaagggtccttgctggttatggagagattagttgaagggaaggaggtttgcttatgattcattccttgtttttccttttgatatcaccatattggcgtgaagattgccaccgggctctataagatagtttaccctccattggaaatgctgctgactggatctgcagaggcaacagagttctgtaagtagattgaggcgttgactggaccgaatttcttagtatcgggagaagatcgttcggatattggttcgctgcaattcttattttcttatattggggctggtagttttctccagcaattcgattatatggatggatgggtcggaggcgtttgtcactaaccatcctctctcctgtcttgcttcgaaaattggcatgataagcttgattacccttcattggaaattctgcttgctggatctgcagtggcgaaggagttttggaagtagatggaggcgttaactggactgatgttcatagatggatccgctttttcgggagattactttctatactctccatttcgattttgagtcgggtcggtatcttcccttgttgattagttccgctgctttgcgcctccgtgctcgcagataccttgggctgtttcgcctctgcgcgacgacgtgaggcgggagcgtgacgagtttggtttggctgggctgttcggtttgcggtttagtcttcctgcgattctagttttcgtgtggatcctgtttcgtcctcgacttctcagtgtgtggattgcaggtttgggtacgatccggtattgggaattcgtcgtggcgtcgggtggcgaggagttgggaggcaggctcaaatgtctccgggtgtggtaccatcagaatcagatagtgtcgtcggagcctgcacatcaggggcaacagagctttggaagtagattgaggcgttggctggactgatgcccatagtaccgggtgaagattgtcaggatatatctacccaaatcgctgttctattggttcatactcattttttgtccgctgcagttattaatttcttatattggggctggttgtccatcttattgggataagatcgttcaaatatatctacccaaatcgctcttctattggttcatactcatattttgtctgctgcaactattaatttcttatattggggctggtggctttttccagcagttcagttatatggatggatggatgaatgggttgtaggcgagtttggtcctgcttatgcttgtgcaatcaggagttcggaattgttcaagttccttgtggacaacagagttttggaagtagattggtgtgttgactggactggcattcatatatcgagagaagattgttcggacacgatcatgtggatggatggatggtgttcaagtgccttgcctctcctgtcttgcccttgccttgggccttggcgtgctcgcattttccgttacttccttttttatactctgtttcgattttgagccgggacattatcttcttcacctgttgatttgttctgttgctttgcgcctccgtgctctcgcagatccctttgggctgtttcacctccgcacgacaccaggagtgagccgagtttggtttggccgggttattcagtttattctttattatgcaattctagtttttgagtctattttgtagtcctcgacttcccaatgtgtgggttgcaggattgggtccgatcagtggagaattcatcatgatgacatgttgcgaggagatggaggcaggtcagtcttctgtcagatccggcggttcattgattttgtcgattggacatggattggtggtttcaggctcaaatgtctccgggtgtggtaccaccagaaccttcgatccattcttactttaacggcagagaagaaagggtccttgctggttacagggagaggtttgcttatggttcattccttgtttttggttttgatgttgtcatattggtgtgaagatcgccaccggacttactataagcttctttacccttcattggaaatgctgctggctggatcttcaggggcaaccgagttttggaagtagattgaggcattgattggaccggtatattgggagaagatcgtcgcgatatacatacctaaatcacttttgtattggttcatcttcagtttttgtccgctgcaattcttaatttcttatattggggctggtggttttttccagcaatattatatggatgaatggatgggttggaggcgagtttgatcgatctggcttacgcttgtgcaatcagaagttcggaaatgttcagagttccttgtgtttgttcactaaccaccccctctcctgtcatttttctttgaaaattggcattataatcttgattacccttcattggaaatgctgcttaccggatctgtaagggcaagaagtagatttgaggcgttgactggactgatgcccatagtaccgggtgaagattgtcaggatatatctacctaaatcgctcttctattggtttatacacatttctgtccgctgcaattcttaaatgttttaaattggggctggttgttttctccagcatctcctgcaatcagaagttctgaactgttcagagttccttgtttgttcactaaccatcctttgtcaatcttctttgaaaattagctttcctcataggcttccatttgttagtaaatctgcgcacttttaggagactcggagttcgtcctagatgcaaaagtacctggctggttatggagaggtcagctgaaggctggaggtttgactttgtttttgatatgtcaatcactggtgggtgaagattgccaccggattaatttgaagcttgatcgcccttaattagaaaaatgttattagctggatcaggtggtgttttggaggtagatttaaacattttggaggtgtttttgaagtttattgcatctggagaacatcgtttggctctacctctcttttattggtactcttaaatttcttgttccttacatttgggatggtgattctctacttgtacagcaactggattgtatggacggaggagcctgaattagattctgtttctgcatgagcaataagttataaactgttcaggattcccttggtttgctgtcaagttttgggaggcattgctacagagatatgacttccagctgaaattgttgcccattgatacacgctttatcctgttcctatgatatttgatgaatgttcatgctgtttgtgttctcagttgtcactatcaaataggtagttatccgagggtggtctcattgattgcagatctctaggtgataactgggtcttactgatatttttttttgcttgggcttgtcatcgtggattatgtgttggaggtactaacttattcttgtatatgaaccatgatacttgtgagactgcttcgaacctgttacatggtgacttgagagctattgtaccagccctgcttcaaactcgtgacatggtgacttgagacctctctcgcatttgtaccaggccagtcctttatgaaccagaatactacgttaatattcagatacttctaatttaatctgcagtggtagaaggtaatgatcatgttttaacttcagagattcaactggagatcgctagaactacagtactacaacttacatttaatcaagcttgtttctgctttatcatgctatgctctgactgaagcattaattcttgtgctgctggtattctgtgttctgcagaccatttagctcaaataattggtagttcaactgtcataatgttcggtttgggatttctatctgtggatgcttcgtctggcttatctatgcttttaggtgcttcatctggcttatctatgtttttgcgctctcgctgttgcatgtgttgcaggatgttgacaattggaaatccatgtagcaaataaatgattttggaactgggggcaggtcagagtctagagcatgttatgttggttttgtcacttgtttttggtgatttcagatctgaatggctgacattctgtctctccatcgatatttaatagtaaagcaaggtttgagacctggatttattgggtactgtagacattggaggtggattttcctcaattggagatattggcaaattggaaaaaattgtgacttgacctgtgctgcaaaaacctttaaacaaggaggcttctaattcatctctatgaacagtcctctccagttactttttgaaccagtaactttttcaagtttgtgcagatgcacacagaagctgagagagaatttccaacaattgttgtctccagagtccatccttgttccactggccatttggttcgccttggatttgaaggttcattaagtctatctatccttgaaccaaaatagaaaaaaaatcatagaagagttctttggtaaatataaattgtgcactaataattttgcaagttgcatctatggataccttcacttttggtatccagagaaaacctgtgcattaaatgtgaagcttgatgacttggactgacctgttgtttgcatgctctgcggtagttagatgattcacatgatcacaaccacggcgatgctgtgcagagtttgctctaactactctaactattgactgcacatcaccttccggctcacttgtttgagacacatcttataatattcttcaatctaaccagagctcacctaatacttctgctcatatcagccatttttttggatccagatgtctgataagttgatggatgtttggttggatttctgcagttggagctaaggtgtggattgctagttagacattctgagttctagacatttccatctatggagtcttccttccagtgataaattattctatgcactaactttatttttaagctgtctttaacctatatgccatcatacgatggtgcaggttcactattattcttgatttaagatttttaaaacaattggttcctagtaggatgttttacctgagcgtatgaccgtatgttcatattttatagtccaaaattctcgatttctctgttagggcccatactaatgttagtctagttcttggattgcttctgattgtactttggtataacccccttactcaatatggccattctttatcaaattcatcatattgcacagttcctttcagtaatatattaggcattagatattattatcagcaaatgctacttgctaaccgtattcctttttgagttgtaatatgtgaaatctgagagatcgatcttgtggcaccgttagttttgttggttatcattagattgattgcctggaacaaatggaacacctcctcagtctggtttgtgacgttggcccccttgcctttttagaacattgttcatttgttctgtaatttcctcactctggactttccatctgacgcatcttatcctttgtggaacaataaccaagaaagattctgctgcttctgttcctgccaaaagtaaatctgtctgaacaaacttgtttggctgaactattgttgcccttgattacatatgtgactgtcttggggatgcaactgtggagtctttgagatggaactgtcctttgtggaacaataaccaagaaagattctgcttcttctgttcctgccaaaagtatatctgtcacaaacttgtttggctgaactattgttgcccttgaatacacaagcctatgtgactgtcttggggatgcaactgtggagtccttgagatgaaactggatttacacaaaagtaaatcctttgtggactagcagtagttgcatatacatggatgggttgaagtttagccatcctggttcatattcatgtagtgcagttcatattcatgttgatatgcaatacaggatcttgaacaataattttattggagctggttgttgtggcaatggagcatcttctacctaggccaaatgagatggagtctgtggcatgttttgg

SEQ ID NO: 63378 - DNA, 6431 bp, Zea Mays
tcttccccttgcgctctggttttctctctttgcgccgctgttcaggcgcctcgcctctcctatccttgtcttgccctgtgtcccttcgtcgcctcggcgcgctcgcccttcgttcatcgggcttccgcgcgctcgcgtttttcattattccttctctgtaccccgtttcgatttcgagcggggtcagtttcttcttcaccggttgatttgttctgctgctttgcgtctccgtgctctcgcagatcccttgtagccgctttgcctccgcgcgacgccgggagcgagccgagtttggtttggccgggttgttcggtttgcggtttactctttctgcgattatagttttctggtggatcctgttttgttctcgacttctcagcgtgtgggttgcaggattgggtccgattcggtgttgggatttgttcgtcatggcgtcttgtggcgaggaggtgcaggcaggtcagtcttctgtcagatccggcggttcattggttttgtcactggacatggattcggtggtttcaggctccaatgtcttctggtgtggtaccatcagaatcagatagcgtcgtcgtagtttgcacaccaggaccaggtgaattcgagaccttgggtccattcttattttaacggctgatctcgcttgtggcctttcgggtgttcgtcctaacttcagaagtagaaggaagggtccttgctggttatggagagattagttgaagggaaggaggtttgcttatgattcattccttgtttttccttttgatatcaccatattggcgtgaagattgccaccgggctctataagatagtttaccctccattggaaatgctgctgactggatctgcagaggcaacagagttctgtaagtagattgaggcgttgactggaccgaatttcttagtatcgggagaagatcgttcggatattggttcgctgcaattcttattttcttatattggggctggtagttttctccagcaattcgattatatggatggatgggtcggaggcgtttgtcactaaccatcctctctcctgtcttgcttcgaaaattggcatgataagcttgattacccttcattggaaattctgcttgctggatctgcagtggcgaaggagttttggaagtagatggaggcgttaactggactgatgttcatagatggatccgctttttcgggagattactttctatactctccatttcgattttgagtcgggtcggtatcttcccttgttgattagttccgctgctttgcgcctccgtgctcgcagataccttgggctgtttcgcctctgcgcgacgacgtgaggcgggagcgtgacgagtttggtttggctgggctgttcggtttgcggtttgggtacgatccggtattgggaattcgtcgtggcgtcgggtggcgaggagttgggaggcaggtcagtcttctgtcagatccggcggttcattggttttgtcacttggatatggattcggtggtttcaggctcaaatgtctccgggtgtggtaccatcagaatcagatagtgtcgtcggagcctgcacatcaggtggattcgagatcttgggtccattcttattttaatggctgatcttgcttgtggccttttgggtgttcttactttagaagcagaaggaagggtccttgctggttatggagagattagttgaatgttggaggtttgcttatggttcatggccatggttcattcctcgtttttcattttgatgacatcatattggtgtgaagatcgccactggacttgctataagcttgtttacccttcattggaaatgctgttggctggatctgcaggggcaacagagctttggaagtagattgaggcgttggctggactgatgcccatagtaccggttcagttatatggatggatggatgaatgggttgtaggcgagtttggtcctgcttatgcttgtgcaatcaggagttcggaattgttcaagttccttgtgtttgttcacttacccatcctccctcatgctgttttccgaaaattggcattgtagctagattacacttcattggagatgctgcatgttggatctgcagggacaacagagttttggaagtagattggtgtgttgactggactggcattcatatatcgagagaagattgttcggacacgatcatgtggatggatggatggtgttcaagtgccttgcctctcctgtcttgcccttgccttgggccttggcgtgctcgcattttccgttacttccttttttatactctgtttcgattttgagccgggacattatcttcttcacctgttgatttgttctgttgctttgcgcctccgtgctctcgcagatccctttgggctgtttcacctccgcacgacaccaggagtgagccgagtttggtttggccgggttattcagtttattctttattatgcaattctagtttttgagtctattttgtagtcctcgacttcccaatgtgtgggttgcaggattgggtccgatcagtggagaattcatcatgatgacatgttgcgaggagatggaggcaggtcagtcttctgtcagatccggcggttcattgattttgtcgattggacatggattggtggtttcaggctcaaatgtctccgggtgtggtaccaccagaaccttcgatccattcttactttaacggcagagaagaaagggtccttgctggttacagggagaggtttgcttatggttcattccttgtttttggttttgatgttgtcatattggtgtgaagatcgccaccggacttactataagcttctttacccttcattggaaatgctgctggctggatcttcaggggcaaccgagttttggaagtagattgaggcattgattggaccggtatattgggagaagatcgtcgcgatatacatacctaaatcacttttgtattggttcatcttcagtttttgtccgctgcaattcttaatttcttatattggggctggtggttttttccagcaatattatatggatgaatggatgggttggaggcgagtttgatcgatctggcttacgcttgtgcaatcagaagttcggaaatgttcagagttccttgtgtttgttcactaaccaccccctctcctgtcatttttctttgaaaattggcattataatcttgattacccttcattggaaatgctgcttaccggatctgtaagggcaagaagtagatttgaggcgttgactggactgatgcccatagtaccgggtgaagattgtcaggatatatctacctaaatcgctcttctattggtttatacacatttctgtccgctgcaattcttaaatgttttaaattggggctggttgttttctccagcatctcctgcaatcagaagttctgaactgttcagagttccttgtttgttcactaaccatcctttgtcaatcttctttgaaaattagctttcctcataggcttccatttgttagtaaatctgcgcacttttaggagactcggagttcgtcctagatgcaaaagtacctggctggttatggagaggtcagctgaaggctggaggtttgactttgtttttgatatgtcaatcactggtgggtgaagattgccaccggattaatttgaagcttgatcgcccttaattagaaaaatgttattagctggatcaggtggtgttttggaggtagatttaaacattttggaggtgtttttgaagtttattgcatctggagaacatcgtttggctctacctctcttttattggtactcttaaatttcttgttccttacatttgggatggtgattctctacttgtacagcaactggattgtatggacggaggagcctgaattagattctgtttctgcatgagcaataagttataaactgttcaggattcccttggtttgctgtcaaggttgttcgaaacttttgctgtcaatggtcttaaaaatttacttccctcgtaggcttttgatgttctggtactggatgtgcagttttgggaggcattgctacagagatatgacttccagctgaaattgttgcccattgatacacgctttatcctgttcctatgatatttgatgaatgttcatgctgtttgtgttctcagttgtcactatcaaataggtagttatccgagggtggtctcattgattgcagatctctaggtgataactgggtcttactgatatttttttttgcttgggcttgtcatcgtggattatgtgttggaggtactaacttattcttgtatatgaaccatgatacttgtgagactgcttcgaacctgttacatggtgacttgagagctattgtaccagccctgcttcaaactcgtgacatggtgacttgagacctctctcgcatttgtaccaggatgttgacaattggaaatccatgtagcaaataaatgattttggaactgggggcaggtcagagtctagagcatgttatgttggttttgtcacttgtttttggtgatttcagatctgaatggctgacattctgtctctccatcgatatttaatagtaaagcaaggtttgagacctggatttattgggtactgtagacattggaggtggattttcctcaattggagatattggcaaattggaaaaaattgtgacttgacctgtgctgcaaaaacctttaaacaaggaggcttctaattcatctctatgaacagtcctctccagttactttttgaaccagtaactttttcaagtttgtgcagatgcacacagaagctgagagagaatttccaacaattgttgtctccagagtccatccttgttccactggccatttggttcgccttggatttgaaggttcattaagtctatctatccttgaaccaaaatagaaaaaaaatcatagaagagttctttggtaaatataaattgtgcactaataattttgcaagttgcatctatggataccttcacttttggtatccagagaaaacctgtgcattaaatgtgaagcttgatgacttggactgacctgttgtttgcatgctctgcggtagttagatgattcacatgatcacaaccacggcgatgctgtgcagagtttgctctaactactctaactattgactgcacatcaccttccggctcacttgtttgagacacatcttataatattcttcaatctaaccagagctcacctaatacttctgctcatatcagccatttttttggatccagatgtctgataagttgatggatgtttggttggatttctgcagttggagctaaggtgtggattgctagttagacattctgagttctagacatttccatctatggagtcttccttccagtgataaattattctatgcactaactttatttttaagctgtctttaacctatatgccatcatacgatggtgcaggttcactattattcttgatttaagatttttaaaacaattggttcctagtaggatgttttacctgagcgtatgaccgtatgttcatattttatagtccaaaattctcgatttctctgttagggcccatactaatgttagtctagttcttggattgcttctgattgtactttggtataacccccttactcaatatggccattctttatcaaattcatcatattgcacagttcctttcagtaatatattaggcattagatattattatcagcaaatgctacttgctaaccgtattcctttttgagttgtaatatgtgaaatctgagagatcgatcttgtggcaccgttagttttgttggttatcattagattgattgcctggaacaaatggaacacctcctcagtctggtttgtgacgttggcccccttgcctttttagaacattgttcatttgttctgtaatttcctcactctggactttccatctgacgcatcttatcctttgtggaacaataaccaagaaagattctgctgcttctgttcctgccaaaagtaaatctgtctgaacaaacttgtttggctgaactattgttgcccttgattacatatgtgactgtcttggggatgcaactgtggagtctttgagatggaactgtcctttgtggaacaataaccaagaaagattctgcttcttctgttcctgccaaaagtatatctgtcacaaacttgtttggctgaactattgttgcccttgaatacacaagcctatgtgactgtcttggggatgcaactgtggagtccttgagatgaaactggatttacacaaaagtaaatcctttgtggactagcagtagttgcatatacatggatgggttgaagtttagccatcctggttcatattcatgtagtgcagttcatattcatgttgatatgcaatacaggatcttgaacaataattttattggagctggttgttgtggcaatggagcatcttctacctaggccaaatgagatggagtctgtggcatgttttgg

SEQ ID NO: 63379 - DNA, 6315 bp, Zea Mays
cccctccactccaccgcctctccccgcccataaatagcgcccaccggaccggacgacgtcttccccttgcgctctggttttctctctttgcgccgctgttcaggcgcctcgcctctcctatccttgtcttgccctgtgtcccttcgtcgcctcggcgcgctcgcccttcgttcatcgggcttccgcgcgctcgcgtttttcattattccttctctgtaccccgtttcgatttcgagcggggtcagtttcttcttcaccggttgatttgttctgctgctttgcgtctccgtgctctcgcagatcccttgtagccgctttgcctccgcgcgacgccgggagcgagccgagtttggtttggccgggttgttcggtttgcggtttactctttctgcgattatagttttctggtggatcctgttttgttctcgacttctcagcgtgtgggttgcaggattgggtccgattcggtgttgggatttgttcgtcatggcgtcttgtggcgaggaggtgcaggcaggctccaatgtcttctggtgtggtaccatcagaatcagatagcgtcgtcgtagtttgcacaccaggaccagtggcgaaggagttttggaagtagatggaggcgttaactggactgatgttcatagatggatccgctttttcgggagattactttctatactctccatttcgattttgagtcgggtcggtatcttcccttgttgattagttccgctgctttgcgcctccgtgctcgcagataccttgggctgtttcgcctctgcgcgacgacgtgaggcgggagcgtgacgagtttggtttggctgggctgttcggtttgcggtttagtcttcctgcgattctagttttcgtgtggatcctgtttcgtcctcgacttctcagtgtgtggattgcaggtttgggtacgatccggtattgggaattcgtcgtggcgtcgggtggcgaggagttgggaggcaggctcaaatgtctccgggtgtggtaccatcagaatcagatagtgtcgtcggagcctgcacatcagaagcagaaggaagggtccttgctggttatggagagattagttgaatgttggaggggcaacagagctttggaagtagattgaggcgttggctggactgatgcccatagtaccgggtgaagattgtcaggatatatctacccaaatcgctgttctattggttcatactcattttttgtccgctgcagttattaatttcttatattggggctggttgtccatcttattgggataagatcgttcaaatatatctacccaaatcgctcttctattggttcatactcatattttgtctgctgcaactattaatttcttatattggggctggtggctttttccagcagttcagttatatggatggatggatgaatgggttgtaggcgagtttggtcctgcttatgcttgtgcaatcaggagttcggaattgttcaagttccttgtggacaacagagttttggaagtagattggtgtgttgactggactggcattcatatatcgagagaagattgttcggacacgatcatgtggatggatggatggtgttcaagtgccttgcctctcctgtcttgcccttgccttgggccttggcgtgctcgcattttccgttacttccttttttatactctgtttcgattttgagccgggacattatcttcttcacctgttgatttgttctgttgctttgcgcctccgtgctctcgcagatccctttgggctgtttcacctccgcacgacaccaggagtgagccgagtttggtttggccgggttattcagtttattctttattatgcaattctagtttttgagtctattttgtagtcctcgacttcccaatgtgtgggttgcaggattgggtccgatcagtggagaattcatcatgatgacatgttgcgaggagatggaggcaggtcagtcttctgtcagatccggcggttcattgattttgtcgattggacatggattggtggtttcaggctcaaatgtctccgggtgtggtaccaccagaaccttcgatccattcttactttaacggcagagaagaaagggtccttgctggttacagggagaggtttgcttatggttcattccttgtttttggttttgatgttgtcatattggtgtgaagatcgccaccggacttactataagcttctttacccttcattggaaatgctgctggctggatcttcaggggcaaccgagttttggaagtagattgaggcattgattggaccggtatattgggagaagatcgtcgcgatatacatacctaaatcacttttgtattggttcatcttcagtttttgtccgctgcaattcttaatttcttatattggggctggtggttttttccagcaatattatatggatgaatggatgggttggaggcgagtttgatcgatctggcttacgcttgtgcaatcagaagttcggaaatgttcagagttccttgtgtttgttcactaaccaccccctctcctgtcatttttctttgaaaattggcattataatcttgattacccttcattggaaatgctgcttaccggatctgtaagggcaagaagtagatttgaggcgttgactggactgatgcccatagtaccgggtgaagattgtcaggatatatctacctaaatcgctcttctattggtttatacacatttctgtccgctgcaattcttaaatgttttaaattggggctggttgttttctccagcatctcctgcaatcagaagttctgaactgttcagagttccttgtttgttcactaaccatcctttgtcaatcttctttgaaaattagctttcctcataggcttccatttgttagtaaatctgcgcacttttaggagactcggagttcgtcctagatgcaaaagtacctggctggttatggagaggtcagctgaaggctggaggtttgactttgtttttgatatgtcaatcactggtgggtgaagattgccaccggattaatttgaagcttgatcgcccttaattagaaaaatgttattagctggatcaggtggtgttttggaggtagatttaaacattttggaggtgtttttgaagtttattgcatctggagaacatcgtttggctctacctctcttttattggtactcttaaatttcttgttccttacatttgggatggtgattctctacttgtacagcaactggattgtatggacggaggagcctgaattagattctgtttctgcatgagcaataagttataaactgttcaggattcccttggtttgctgtcaaggttgttcgaaacttttgctgtcaatggtcttaaaaatttacttccctcgtaggcttttgatgttctggtactggatgtgcagttttgggaggcattgctacagagatatgacttccagctgaaattgttgcccattgatacacgctttatcctgttcctatgatatttgatgaatgttcatgctgtttgtgttctcagttgtcactatcaaataggtagttatccgagggtggtctcattgattgcagatctctaggtgataactgggtatgaaggaaccagtttgcatctattcagacctacaaccttcaacttgcattgtgtttgttcagtgtcttgtaccttgaagtagataatgattagggtcattattgcaggtcttactgatatttttttttgcttgggcttgtcatcgtggattatgtgttggaggtactaacttattcttgtatatgaaccatgatacttgtgagactgcttcgaacctgttacatggtgacttgagagctattgtaccagccctgcttcaaactcgtgacatggtgacttgagacctctctcgcatttgtaccaggccagtcctttatgaaccagaatactacgttaatattcagatacttctaatttaatctgcagtggtagaaggtaatgatcatgttttaacttcagagattcaactggagatcgctagaactacagtactacaacttacatttaatcaagcttgtttctgctttatcatgctatgctctgactgaagcattaattcttgtgctgctggtattctgtgttctgcagaccatttagctcaaataattggtagttcaactgtcataatgttcggtttgggatttctatctgtggatgcttcgtctggcttatctatgcttttaggtgcttcatctggcttatctatgtttttgcgctctcgctgttgcatgtgttgcaggatgttgacaattggaaatccatgtagcaaataaatgattttggaactgggggcaggtcagagtctagagcatgttatgttggttttgtcacttgtttttggtgatttcagatctgaatggctgacattctgtctctccatcgatatttaatagtaaagcaaggtttgagacctggatttattgggtactgtagacattggaggtggattttcctcaattggagatattggcaaattggaaaaaattgtgacttgacctgtgctgcaaaaacctttaaacaaggaggcttctaattcatctctatgaacagtcctctccagttactttttgaaccagtaactttttcaagtttgtgcagatgcacacagaagctgagagagaatttccaacaattgttgtctccagagtccatccttgttccactggccatttggttcgccttggatttgaaggttcattaagtctatctatccttgaaccaaaatagaaaaaaaatcatagaagagttctttggtaaatataaattgtgcactaataattttgcaagttgcatctatggataccttcacttttggtatccagagaaaacctgtgcattaaatgtgaagcttgatgacttggactgacctgttgtttgcatgctctgcggtagttagatgattcacatgatcacaaccacggcgatgctgtgcagagtttgctctaactactctaactattgactgcacatcaccttccggctcacttgtttgagacacatcttataatattcttcaatctaaccagagctcacctaatacttctgctcatatcagccatttttttggatccagatgtctgataagttgatggatgtttggttggatttctgcagttggagctaaggtgtggattgctagttagacattctgagttctagacatttccatctatggagtcttccttccagtgataaattattctatgcactaactttatttttaagctgtctttaacctatatgccatcatacgatggtgcaggttcactattattcttgatttaagatttttaaaacaattggttcctagtaggatgttttacctgagcgtatgaccgtatgttcatattttatagtccaaaattctcgatttctctgttagggcccatactaatgttagtctagttcttggattgcttctgattgtactttggtataacccccttactcaatatggccattctttatcaaattcatcatattgcacagttcctttcagtaatatattaggcattagatattattatcagcaaatgctacttgctaaccgtattcctttttgagttgtaatatgtgaaatctgagagatcgatcttgtggcaccgttagttttgttggttatcattagattgattgcctggaacaaatggaacacctcctcagtctggtttgtgacgttggcccccttgcctttttagaacattgttcatttgttctgtaatttcctcactctggactttccatctgacgcatcttatcctttgtggaacaataaccaagaaagattctgctgcttctgttcctgccaaaagtaaatctgtctgaacaaacttgtttggctgaactattgttgcccttgattacatatgtgactgtcttggggatgcaactgtggagtctttgagatggaactgtcctttgtggaacaataaccaagaaagattctgcttcttctgttcctgccaaaagtatatctgtcacaaacttgtttggctgaactattgttgcccttgaatacacaagcctatgtgactgtcttggggatgcaactgtggagtccttgagatgaaactggatttacacaaaagtaaatcctttgtggactagcagtagttgcatatacatggatgggttgaagtttagccatcctggttcatattcatgtagtgcagttcatattcatgttgatatgcaatacaggatcttgaacaataattttattggagctggttgttgtggcaatggagcatcttctacctaggccaaatgagatggagtctgtggcatgttttgg

SEQ ID NO: 63380 - DNA, 6123 bp, Zea Mays
cccctccactccaccgcctctccccgcccataaatagcgcccaccggaccggacgacgtcttccccttgcgctctggttttctctctttgcgccgctgttcaggcgcctcgcctctcctatccttgtcttgccctgtgtcccttcgtcgcctcggcgcgctcgcccttcgttcatcgggcttccgcgcgctcgcgtttttcattattccttctctgtaccccgtttcgatttcgagcggggtcagtttcttcttcaccggttgatttgttctgctgctttgcgtctccgtgctctcgcagatcccttgtagccgctttgcctccgcgcgacgccgggagcgagccgagtttggtttggccgggttgttcggtttgcggtttactctttctgcgattatagttttctggtggatcctgttttgttctcgacttctcagcgtgtgggttgcaggattgggtccgattcggtgttgggatttgttcgtcatggcgtcttgtggcgaggaggtgcaggcaggtcagtcttctgtcagatccggcggttcattggttttgtcactggacatggattcggtggtttcaggctccaatgtcttctggtgtggtaccatcagaatcagatagcgtcgtcgtagtttgcacaccaggaccagtggcgaaggagttttggaagtagatggaggcgttaactggactgatgttcatagatggatccgctttttcgggagattactttctatactctccatttcgattttgagtcgggtcggtatcttcccttgttgattagttccgctgctttgcgcctccgtgctcgcagataccttgggctgtttcgcctctgcgcgacgacgtgaggcgggagcgtgacgagtttggtttggctgggctgttcggtttgcggtttgggtacgatccggtattgggaattcgtcgtggcgtcgggtggcgaggagttgggaggcaggctcaaatgtctccgggtgtggtaccatcagaatcagatagtgtcgtcggagcctgcacatcaggtggattcgagatcttgggtccattcttattttaatggctgatcttgcttgtggccttttgggtgttcttactttagaagcagaaggaagggtccttgctggttatggagagattagttgaatgttggaggtttgcttatggttcatggccatggttcattcctcgtttttcattttgatgacatcatattggtgtgaagatcgccactggacttgctataagcttgtttacccttcattggaaatgctgttggctggatctgcaggggcaacagagctttggaagtagattgaggcgttggctggactgatgcccatagtaccgggtgaagattgtcaggatatatctacccaaatcgctgttctattggttcatactcattttttgtccgctgcagttattaatttcttatattggggctggttgtccatcttattgggataagatcgttcaaatatatctacccaaatcgctcttctattggttcatactcatattttgtctgctgcaactattaatttcttatattggggctggtggctttttccagcagttcagttatatggatggatggatgaatgggttgtaggcgagtttggtcctgcttatgcttgtgcaatcaggagttcggaattgttcaagttccttgtgtttgttcacttacccatcctccctcatgctgttttccgaaaattggcattgtagctagattacacttcattggagatgctgcatgttggatctgcagggacaacagagttttggaagtagattggtgtgttgactggactggcattcatatatcgagagaagattgttcggacacgatcatgtggatggatggatggtgttcaagtgccttgcctctcctgtcttgcccttgccttgggccttggcgtgctcgcattttccgttacttccttttttatactctgtttcgattttgagccgggacattatcttcttcacctgttgatttgttctgttgctttgcgcctccgtgctctcgcagatccctttgggctgtttcacctccgcacgacaccaggagtgagccgagtttggtttggccgggttattcagtttattctttattatgcaattctagtttttgagtctattttgtagtcctcgacttcccaatgtgtgggttgcaggattgggtccgatcagtggagaattcatcatgatgacatgttgcgaggagatggaggcaggtcagtcttctgtcagatccggcggttcattgattttgtcgattggacatggattggtggtttcaggctcaaatgtctccgggtgtggtaccaccagaaccttcgatccattcttactttaacggcagagaagaaagggtccttgctggttacagggagaggtttgcttatggttcattccttgtttttggttttgatgttgtcatattggtgtgaagatcgccaccggacttactataagcttctttacccttcattggaaatgctgctggctggatcttcaggggcaaccgagttttggaagtagattgaggcattgattggaccgcaatattatatggatgaatggatgggttggaggcgagtttgatcgatctggcttacgcttgtgcaatcagaagttcggaaatgttcagagttccttgtgtttgttcactaaccaccccctctcctgtcatttttctttgaaaattggcattataatcttgattacccttcattggaaatgctgcttaccggatctgtaagggcaagaagtagatttgaggcgttgactggactgatgcccatagtaccgggtgaagattgtcaggatatatctacctaaatcgctcttctattggtttatacacatttctgtccgctgcaattcttaaatgttttaaattggggctggttgttttctccagcatctcctgcaatcagaagttctgaactgttcagagttccttgtttgttcactaaccatcctttgtcaatcttctttgaaaattagctttcctcataggcttccatttgttagtaaatctgcgcacttttaggagactcggagttcgtcctagatgcaaaagtacctggctggttatggagaggtcagctgaaggctggaggtttgactttgtttttgatatgtcaatcactggtgggtgaagattgccaccggattaatttgaagcttgatcgcccttaattagaaaaatgttattagctggatcaggtggtgttttggaggtagatttaaacattttggaggtgtttttgaagtttattgcatctggagaacatcgtttggctctacctctcttttattggtactcttaaatttcttgttccttacatttgggatggtgattctctacttgtacagcaactggattgtatggacggaggagcctgaattagattctgtttctgcatgagcaataagttataaactgttcaggattcccttggtttgctgtcaaggttgttcgaaacttttgctgtcaatggtcttaaaaatttacttccctcgtaggcttttgatgttctggtactggatgtgcagttttgggaggcattgctacagagatatgacttccagctgaaattgttgcccattgatacacgctttatcctgttcctatgatatttgatgaatgttcatgctgtttgtgttctcagttgtcactatcaaataggtagttatccgagggtggtctcattgattgcagatctctaggtgataactgggtatgaaggaaccagtttgcatctattcagacctacaaccttcaacttgcattgtgtttgttcagtgtcttgtaccttgaagtagataatgattagggtcattattgcaggtcttactgatatttttttttgcttgggcttgtcatcgtggattatgtgttggaggtactaacttattcttgtatatgaaccatgatacttgtgagactgcttcgaacctgttacatggtgacttgagagctattgtaccagccctgcttcaaactcgtgacatggtgacttgagacctctctcgcatttgtaccaggatgttgacaattggaaatccatgtagcaaataaatgattttggaactgggggcaggtcagagtctagagcatgttatgttggttttgtcacttgtttttggtgatttcagatctgaatggctgacattctgtctctccatcgatatttaatagtaaagcaaggtttgagacctggatttattgggtactgtagacattggaggtggattttcctcaattggagatattggcaaattggaaaaaattgtgacttgacctgtgctgcaaaaacctttaaacaaggaggcttctaattcatctctatgaacagtcctctccagttactttttgaaccagtaactttttcaagtttgtgcagatgcacacagaagctgagagagaatttccaacaattgttgtctccagagtccatccttgttccactggccatttggttcgccttggatttgaaggttcattaagtctatctatccttgaaccaaaatagaaaaaaaatcatagaagagttctttggtaaatataaattgtgcactaataattttgcaagttgcatctatggataccttcacttttggtatccagagaaaacctgtgcattaaatgtgaagcttgatgacttggactgacctgttgtttgcatgctctgcggtagttagatgattcacatgatcacaaccacggcgatgctgtgcagagtttgctctaactactctaactattgactgcacatcaccttccggctcacttgtttgagacacatcttataatattcttcaatctaaccagagctcacctaatacttctgctcatatcagccatttttttggatccagatgtctgataagttgatggatgtttggttggatttctgcagttggagctaaggtgtggattgctagttagacattctgagttctagacatttccatctatggagtcttccttccagtgataaattattctatgcactaactttatttttaagctgtctttaacctatatgccatcatacgatggtgcaggttcactattattcttgatttaagatttttaaaacaattggttcctagtaggatgttttacctgagcgtatgaccgtatgttcatattttatagtccaaaattctcgatttctctgttagggcccatactaatgttagtctagttcttggattgcttctgattgtactttggtataacccccttactcaatatggccattctttatcaaattcatcatattgcacagttcctttcagtaatatattaggcattagatattattatcagcaaatgctacttgctaaccgtattcctttttgagttgtaatatgtgaaatctgagagatcgatcttgtggcaccgttagttttgttggttatcattagattgattgcctggaacaaatggaacacctcctcagtctggtttgtgacgttggcccccttgcctttttagaacattgttcatttgttctgtaatttcctcactctggactttccatctgacgcatcttatcctttgtggaacaataaccaagaaagattctgctgcttctgttcctgccaaaagtaaatctgtctgaacaaacttgtttggctgaactattgttgcccttgattacatatgtgactgtcttggggatgcaactgtggagtctttgagatggaactgtcctttgtggaacaataaccaagaaagattctgcttcttctgttcctgccaaaagtatatctgtcacaaacttgtttggctgaactattgttgcccttgaatacacaagcctatgtgactgtcttggggatgcaactgtggagtccttgagatgaaactggatttacacaaaagtaaatcctttgtggactagcagtagttgcatatacatggatgggttgaagtttagccatcctggttcatattcatgtagtgcagttcatattcatgttgatatgcaatacaggatcttgaacaataattttattggagctggttgttgtggcaatggagcatcttctacctaggccaaatgagatggagtctgtggcatgttttgg

SEQ ID NO: 63381 - DNA, 6194 bp, Zea Mays
cgacgcgttgctgagacgccaaccacgaaccatccggaaccgacctaccgcggccgacccgttcaaagcataccagatacgactaattcaggcatattcgccgccgtccactcgttcgtgcaagccccacgcgagtacgcgaccccagctttgccgtgcggctaacgtccccgcgcacgccagcgcagaggcggggtgggggagagccgtgtccgcctgggattcctctccgggctccggctggcgcgaggcctgcccctccactccaccgcctctccccgcccataaatagcgcccaccggaccggacgacgtcttccccttgcgctctggttttctctctttgcgccgctgttcaggcgcctcgcctctcctatccttgtcttgccctgtgtcccttcgtcgcctcggcgcgctcgcccttcgttcatcgggcttccgcgcgctcgcgtttttcattattccttctctgtaccccgtttcgatttcgagcggggtcagtttcttcttcaccggttgatttgttctgctgctttgcgtctccgtgctctcgcagatcccttgtagccgctttgcctccgcgcgacgccgggagcgagccgagtttggtttggccgggttgttcggtttgcggtttactctttctgcgattatagttttctggtggatcctgttttgttctcgacttctcagcgtgtgggttgcaggattgggtccgattcggtgttgggatttgttcgtcatggcgtcttgtggcgaggaggtgcaggcaggtcagtcttctgtcagatccggcggttcattggttttgtcactggacatggattcggtggtttcaggctccaatgtcttctggtgtggtaccatcagaatcagatagcgtcgtcgtagtttgcacaccaggaccaggtgaattcgagaccttgggtccattcttattttaacggctgatctcgcttgtggcctttcgggtgttcgtcctaacttcagaagtagaaggaagggtccttgctggttatggagagattagttgaagggaaggaggtttgcttatgattcattccttgtttttccttttgatatcaccatattggcgtgaagattgccaccgggctctataagatagtttaccctccattggaaatgctgctgactggatctgcagaggcaacagagttctgtaagtagattgaggcgttgactggaccgaatttcttagtatcgggagaagatcgttcggatattggttcgctgcaattcttattttcttatattggggctggtagttttctccagcaattcgattatatggatggatgggtcggaggcgtttgtcactaaccatcctctctcctgtcttgcttcgaaaattggcatgataagcttgattacccttcattggaaattctgcttgctggatctgcagtggcgaaggagttttggaagtagatggaggcgttaactggactgatgttcatagatggatccgctttttcgggagattactttctatactctccatttcgattttgagtcgggtcggtatcttcccttgttgattagttccgctgctttgcgcctccgtgctcgcagataccttgggctgtttcgcctctgcgcgacgacgtgaggcgggagcgtgacgagtttggtttggctgggctgttcggtttgcggtttgggtacgatccggtattgggaattcgtcgtggcgtcgggtggcgaggagttgggaggcaggctcaaatgtctccgggtgtggtaccatcagaatcagatagtgtcgtcggagcctgcacatcagaagcagaaggaagggtccttgctggttatggagagattagttgaatgttggaggggcaacagagctttggaagtagattgaggcgttggctggactgatgcccatagtaccgggtgaagattgtcaggatatatctacccaaatcgctgttctattgcagttcagttatatggatggatggatgaatgggttgtaggcgagtttggtcctgcttatgcttgtgcaatcaggagttcggaattgttcaagttccttgtggacaacagagttttggaagtagattggtgtgttgactggactggcattcatatatcgagagaagattgttcggacacgatcatgtggatggatggatggtgttcaagtgccttgcctctcctgtcttgcccttgccttgggccttggcgtgctcgcattttccatccctttgggctgtttcacctccgcacgacaccaggagtgagccgagtttggtttggccgggttattcagtttattctttattatgcaattctagtttttgagtctattttgtagtcctcgacttcccaatgtgtgggttgcaggattgggtccgatcagtggagaattcatcatgatgacatgttgcgaggagatggaggcaggtcagtcttctgtcagatccggcggttcattgattttgtcgattggacatggattggtggtttcaggctcaaatgtctccgggtgtggtaccaccagaaccttcgatccattcttactttaacggcagagaagaaagggtccttgctggttacagggagaggggcaaccgagttttggaagtagattgaggcattgattggaccgcaatattatatggatgaatggatgggttggaggcgagtttgatcgatctggcttacgcttgtgcaatcagaagttcggaaatgttcagagttccttgtgtttgttcactaaccaccccctctcctgtcatttttctttgaaaattggcattataatcttgattacccttcattggaaatgctgcttaccggatctgtaagggcaagaagtagatttgaggcgttgactggactgatgcccatagtaccgggtgaagattgtcaggatatatctacctaaatcgctcttctattggtttatacacatttctgtccgctgcaattcttaaatgttttaaattggggctggttgttttctccagcatctcctgcaatcagaagttctgaactgttcagagttccttgtttgttcactaaccatcctttgtcaatcttctttgaaaattagctttcctcataggcttccatttgttagtaaatctgcgcacttttaggagactcggagttcgtcctagatgcaaaagtacctggctggttatggagaggtcagctgaaggctggaggtttgactttgtttttgatatgtcaatcactggtgggtgaagattgccaccggattaatttgaagcttgatcgcccttaattagaaaaatgttattagctggatcaggtggtgttttggaggtagatttaaacattttggaggtgtttttgaagtttattgcatctggagaacatcgtttggctctacctctcttttattggtactcttaaatttcttgttccttacatttgggatggtgattctctacttgtacagcaactggattgtatggacggaggagcctgaattagattctgtttctgcatgagcaataagttataaactgttcaggattcccttggtttgctgtcaaggttgttcgaaacttttgctgtcaatggtcttaaaaatttacttccctcgtaggcttttgatgttctggtactggatgtgcagttttgggaggcattgctacagagatatgacttccagctgaaattgttgcccattgatacacgctttatcctgttcctatgatatttgatgaatgttcatgctgtttgtgttctcagttgtcactatcaaataggtagttatccgagggtggtctcattgattgcagatctctaggtgataactgggtcttactgatatttttttttgcttgggcttgtcatcgtggattatgtgttggaggtactaacttattcttgtatatgaaccatgatacttgtgagactgcttcgaacctgttacatggtgacttgagagctattgtaccagccctgcttcaaactcgtgacatggtgacttgagacctctctcgcatttgtaccaggccagtcctttatgaaccagaatactacgttaatattcagatacttctaatttaatctgcagtggtagaagaccatttagctcaaataattggtagttcaactgtcataatgttcggtttgggatttctatctgtggatgcttcgtctggcttatctatgcttttaggtgcttcatctggcttatctatgtttttgcgctctcgctgttgcatgtgttgcaggatgttgacaattggaaatccatgtagcaaataaatgattttggaactgggggcagtaaagcaaggtttgagacctggatttattgggtactgtagacattggaggtggattttcctcaattggagatattggcaaattggaaaaaattgtgacttgacctgtgctgcaaaaacctttaaacaaggaggcttctaattcatctctatgaacagtcctctccagttactttttgaaccagtaactttttcaagtttgtgcagatgcacacagaagctgagagagaatttccaacaattgttgtctccagagtccatccttgttccactggccatttggttcgccttggatttgaaggttcattaagtctatctatccttgaaccaaaatagaaaaaaaatcatagaagagttctttggtaaatataaattgtgcactaataattttgcaagttgcatctatggataccttcacttttggtatccagagaaaacctgtgcattaaatgtgaagcttgatgacttggactgacctgttgtttgcatgctctgcggtagttagatgattcacatgatcacaaccacggcgatgctgtgcagagtttgctctaactactctaactattgactgcacatcaccttccggctcacttgtttgagacacatcttataatattcttcaatctaaccagagctcacctaatacttctgctcatatcagccatttttttggatccagatgtctgataagttgatggatgtttggttggatttctgcagttggagctaaggtgtggattgctagttagacattctgagttctagacatttccatctatggagtcttccttccagtgataaattattctatgcactaactttatttttaagctgtctttaacctatatgccatcatacgatggtgcaggttcactattattcttgatttaagatttttaaaacaattggttcctagtaggatgttttacctgagcgtatgaccgtatgttcatattttatagtccaaaattctcgatttctctgttagggcccatactaatgttagtctagttcttggattgcttctgattgtactttggtataacccccttactcaatatggccattctttatcaaattcatcatattgcacagttcctttcagtaatatattaggcattagatattattatcagcaaatgctacttgctaaccgtattcctttttgagttgtaatatgtgaaatctgagagatcgatcttgtggcaccgttagttttgttggttatcattagattgattgcctggaacaaatggaacacctcctcagtctggtttgtgacgttggcccccttgcctttttagaacattgttcatttgttctgtaatttcctcactctggactttccatctgacgcatcttatcctttgtggaacaataaccaagaaagattctgctgcttctgttcctgccaaaagtaaatctgtctgaacaaacttgtttggctgaactattgttgcccttgattacatatgtgactgtcttggggatgcaactgtggagtctttgagatggaactgtcctttgtggaacaataaccaagaaagattctgcttcttctgttcctgccaaaagtatatctgtcacaaacttgtttggctgaactattgttgcccttgaatacacaagcctatgtgactgtcttggggatgcaactgtggagtccttgagatgaaactggatttacacaaaagtaaatcctttgtggactagcagtagttgcatatacatggatgggttgaagtttagccatcctggttcatattcatgtagtgcagttcatattcatgttgatatgcaatacaggatcttgaacaataattttattggagctggttgttgtggcaatggagcatcttctacctaggccaaatgagatggagtctgtggcatgttttgg

SEQ ID NO: 63382 - DNA, 6238 bp, Zea Mays
tcttccccttgcgctctggttttctctctttgcgccgctgttcaggcgcctcgcctctcctatccttgtcttgccctgtgtcccttcgtcgcctcggcgcgctcgcccttcgttcatcgggcttccgcgcgctcgcgtttttcattattccttctctgtaccccgtttcgatttcgagcggggtcagtttcttcttcaccggttgatttgttctgctgctttgcgtctccgtgctctcgcagatcccttgtagccgctttgcctccgcgcgacgccgggagcgagccgagtttggtttggccgggttgttcggtttgcggtttactctttctgcgattatagttttctggtggatcctgttttgttctcgacttctcagcgtgtgggttgcaggattgggtccgattcggtgttgggatttgttcgtcatggcgtcttgtggcgaggaggtgcaggcaggtcagtcttctgtcagatccggcggttcattggttttgtcactggacatggattcggtggtttcaggctccaatgtcttctggtgtggtaccatcagaatcagatagcgtcgtcgtagtttgcacaccaggaccaggtgaattcgagaccttgggtccattcttattttaacggctgatctcgcttgtggcctttcgggtgttcgtcctaacttcagaagtagaaggaagggtccttgctggttatggagagattagttgaagggaaggaggtttgcttatgattcattccttgtttttccttttgatatcaccatattggcgtgaagattgccaccgggctctataagatagtttaccctccattggaaatgctgctgactggatctgcagaggcaacagagttctgtaagtagattgaggcgttgactggaccgaatttcttagtatcgggagaagatcgttcggatattggttcgctgcaattcttattttcttatattggggctggtagttttctccagcaattcgattatatggatggatgggtcggaggcgtttgtcactaaccatcctctctcctgtcttgcttcgaaaattggcatgataagcttgattacccttcattggaaattctgcttgctggatctgcagtggcgaaggagttttggaagtagatggaggcgttaactggactgatgttcatagatggatccgctttttcgggagattactttctatactctccatttcgattttgagtcgggtcggtatcttcccttgttgattagttccgctgctttgcgcctccgtgctcgcagataccttgggctgtttcgcctctgcgcgacgacgtgaggcgggagcgtgacgagtttggtttggctgggctgttcggtttgcggtttagtcttcctgcgattctagttttcgtgtggatcctgtttcgtcctcgacttctcagtgtgtggattgcaggtttgggtacgatccggtattgggaattcgtcgtggcgtcgggtggcgaggagttgggaggcaggtcagtcttctgtcagatccggcggttcattggttttgtcacttggatatggattcggtggtttcaggctcaaatgtctccgggtgtggtaccatcagaatcagatagtgtcgtcggagcctgcacatcaggtggattcgagatcttgggtccattcttattttaatggctgatcttgcttgtggccttttgggtgttcttactttagaagcagaaggaagggtccttgctggttatggagagattagttgaatgttggaggtttgcttatggttcatggccatggttcattcctcgtttttcattttgatgacatcatattggtgtgaagatcgccactggacttgctataagcttgtttacccttcattggaaatgctgttggctggatctgcaggggcaacagagctttggaagtagattgaggcgttggctggactgatgcccatagtaccgggtgaagattgtcaggatatatctacccaaatcgctgttctattggttcatactcattttttgtccgctgcagttattaatttcttatattggggctggttgtccatcttattgggataagatcgttcaaatatatctacccaaatcgctcttctattggttcatactcatattttgtctgctgcaactattaatttcttatattggggctggtggctttttccagcagttcagttatatggatggatggatgaatgggttgtaggcgagtttggtcctgcttatgcttgtgcaatcaggagttcggaattgttcaagttccttgtggacaacagagttttggaagtagattggtgtgttgactggactggcattcatatatcgagagaagattgttcggacacgatcatgtggatggatggatggtgttcaagtgccttgcctctcctgtcttgcccttgccttgggccttggcgtgctcgcattttccgttacttccttttttatactctgtttcgattttgagccgggacattatcttcttcacctgttgatttgttctgttgctttgcgcctccgtgctctcgcagatccctttgggctgtttcacctccgcacgacaccaggagtgagccgagtttggtttggccgggttattcagtttattctttattatgcaattctagtttttgagtctattttgtagtcctcgacttcccaatgtgtgggttgcaggattgggtccgatcagtggagaattcatcatgatgacatgttgcgaggagatggaggcaggctcaaatgtctccgggtgtggtaccaccagaaccttcgatccattcttactttaacggcagagaagaaagggtccttgctggttacagggagaggtttgcttatggttcattccttgtttttggttttgatgttgtcatattggtgtgaagatcgccaccggacttactataagcttctttacccttcattggaaatgctgctggctggatcttcaggggcaaccgagttttggaagtagattgaggcattgattggaccggtatattgggagaagatcgtcgcgatatacatacctaaatcacttttgtattggttcatcttcagtttttgtccgctgcaattcttaatttcttatattggggctggtggttttttccagcaatattatatggatgaatggatgggttggaggcgagtttgatcgatctggcttacgcttgtgcaatcagaagttcggaaatgttcagagttccttgtgtttgttcactaaccaccccctctcctgtcatttttctttgaaaattggcattataatcttgattacccttcattggaaatgctgcttaccggatctgtaagggcaagaagtagatttgaggcgttgactggactgatgcccatagtaccgggtgaagattgtcaggatatatctacctaaatcgctcttctattggtttatacacatttctgtccgctgcaattcttaaatgttttaaattggggctggttgttttctccagcatctcctgcaatcagaagttctgaactgttcagagttccttgtttgttcactaaccatcctttgtcaatcttctttgaaaattagctttcctcataggcttccatttgttagtaaatctgcgcacttttaggagactcggagttcgtcctagatgcaaaagtacctggctggttatggagaggtcagctgaaggctggaggtttgactttgtttttgatatgtcaatcactggtgggtgaagattgccaccggattaatttgaagcttgatcgcccttaattagaaaaatgttattagctggatcaggtggtgttttggaggtagatttaaacattttggaggtgtttttgaagtttattgcatctggagaacatcgtttggctctacctctcttttattggtactcttaaatttcttgttccttacatttgggatggtgattctctacttgtacagcaactggattgtatggacggaggagcctgaattagattctgtttctgcatgagcaataagttataaactgttcaggattcccttggtttgctgtcaaggttgttcgaaacttttgctgtcaatggtcttaaaaatttacttccctcgtaggcttttgatgttctggtactggatgtgcagttttgggaggcattgctacagagatatgacttccagctgaaattgttgcccattgatacacgctttatcctgttcctatgatatttgatgaatgttcatgctgtttgtgttctcagttgtcactatcaaataggtagttatccgagggtggtctcattgattgcagatctctaggtgataactgggtatgaaggaaccagtttgcatctattcagacctacaaccttcaacttgcattgtgtttgttcagtgtcttgtaccttgaagtagataatgattagggtcattattgcaggtcttactgatatttttttttgcttgggcttgtcatcgtggattatgtgttggaggatgttgacaattggaaatccatgtagcaaataaatgattttggaactgggggcagacattggaggtggattttcctcaattggagatattggcaaattggaaaaaattgtgacttgacctgtgctgcaaaaacctttaaacaaggaggcttctaattcatctctatgaacagtcctctccagttactttttgaaccagtaactttttcaagtttgtgcagatgcacacagaagctgagagagaatttccaacaattgttgtctccagagtccatccttgttccactggccatttggttcgccttggatttgaaggttcattaagtctatctatccttgaaccaaaatagaaaaaaaatcatagaagagttctttggtaaatataaattgtgcactaataattttgcaagttgcatctatggataccttcacttttggtatccagagaaaacctgtgcattaaatgtgaagcttgatgacttggactgacctgttgtttgcatgctctgcggtagttagatgattcacatgatcacaaccacggcgatgctgtgcagagtttgctctaactactctaactattgactgcacatcaccttccggctcacttgtttgagacacatcttataatattcttcaatctaaccagagctcacctaatacttctgctcatatcagccatttttttggatccagatgtctgataagttgatggatgtttggttggatttctgcagttggagctaaggtgtggattgctagttagacattctgagttctagacatttccatctatggagtcttccttccagtgataaattattctatgcactaactttatttttaagctgtctttaacctatatgccatcatacgatggtgcaggttcactattattcttgatttaagatttttaaaacaattggttcctagtaggatgttttacctgagcgtatgaccgtatgttcatattttatagtccaaaattctcgatttctctgttagggcccatactaatgttagtctagttcttggattgcttctgattgtactttggtataacccccttactcaatatggccattctttatcaaattcatcatattgcacagttcctttcagtaatatattaggcattagatattattatcagcaaatgctacttgctaaccgtattcctttttgagttgtaatatgtgaaatctgagagatcgatcttgtggcaccgttagttttgttggttatcattagattgattgcctggaacaaatggaacacctcctcagtctggtttgtgacgttggcccccttgcctttttagaacattgttcatttgttctgtaatttcctcactctggactttccatctgacgcatcttatcctttgtggaacaataaccaagaaagattctgctgcttctgttcctgccaaaagtaaatctgtctgaacaaacttgtttggctgaactattgttgcccttgattacatatgtgactgtcttggggatgcaactgtggagtctttgagatggaactgtcctttgtggaacaataaccaagaaagattctgcttcttctgttcctgccaaaagtatatctgtcacaaacttgtttggctgaactattgttgcccttgaatacacaagcctatgtgactgtcttggggatgcaactgtggagtccttgagatgaaactggatttacacaaaagtaaatcctttgtggactagcagtagttgcatatacatggatgggt

SEQ ID NO: 63383 - DNA, 3089 bp, Zea Mays
tcttccccttgcgctctggttttctctctttgcgccgctgttcaggcgcctcgcctctcctatccttgtcttgccctgtgtcccttcgtcgcctcggcgcgctcgcccttcgttcatcgggcttccgcgcgctcgcgtttttcattattccttctctgtaccccgtttcgatttcgagcggggtcagtttcttcttcaccggttgatttgttctgctgctttgcgtctccgtgctctcgcagatcccttgtagccgctttgcctccgcgcgacgccgggagcgagccgagtttggtttggccgggttgttcggtttgcggtttactctttctgcgattatagttttctggtggatcctgttttgttctcgacttctcagcgtgtgggttgcaggattgggtccgattcggtgttgggatttgttcgtcatggcgtcttgtggcgaggaggtgcaggcaggtcagtcttctgtcagatccggcggttcattggttttgtcactggacatggattcggtggtttcaggctccaatgtcttctggtgtggtaccatcagaatcagatagcgtcgtcgtagtttgcacaccaggaccaggtgaattcgagaccttgggtccattcttattttaacggctgatctcgcttgtggcctttcgggtgttcgtcctaacttcagaagtagaaggaagggtccttgctggttatggagagattagttgaagggaaggaggtttgcttatgattcattccttgtttttccttttgatatcaccatattggcgtgaagattgccaccgggctctataagatagtttaccctccattggaaatgctgctgactggatctgcagaggcaacagagttctgtaagtagattgaggcgttgactggaccgaatttcttagtatcgggagaagatcgttcggatattggttcgctgcaattcttattttcttatattggggctggtagttttctccagcaattcgattatatggatggatgggtcggaggcgtttgtcactaaccatcctctctcctgtcttgcttcgaaaattggcatgataagcttgattacccttcattggaaattctgcttgctggatctgcagtggcgaaggagttttggaagtagatggaggcgttaactggactgatgttcatagatggatccgctttttcgggagattactttctatactctccatttcgattttgagtcgggtcggtatcttcccttgttgattagttccgctgctttgcgcctccgtgctcgcagataccttgggctgtttcgcctctgcgcgacgacgtgaggcgggagcgtgacgagtttggtttggctgggctgttcggtttgcggtttgggtacgatccggtattgggaattcgtcgtggcgtcgggtggcgaggagttgggaggcaggtcagtcttctgtcagatccggcggttcattggttttgtcacttggatatggattcggtggtttcaggctcaaatgtctccgggtgtggtaccatcagaatcagatagtgtcgtcggagcctgcacatcaggtggattcgagatcttgggtccattcttattttaatggctgatcttgcttgtggccttttgggtgttcttactttagaagcagaaggaagggtccttgctggttatggagagattagttgaatgttggaggtttgcttatggttcatggccatggttcattcctcgtttttcattttgatgacatcatattggtgtgaagatcgccactggacttgctataagcttgtttacccttcattggaaatgctgttggctggatctgcaggggcaacagagctttggaagtagattgaggcgttggctggactgatgcccatagtaccgggtgaagattgtcaggatatatctacccaaatcgctgttctattggttcatactcattttttgtccgctgcagttattaatttcttatattggggctggttgtccatcttattgggataagatcgttcaaatatatctacccaaatcgctcttctattggttcatactcatattttgtctgctgcaactattaatttcttatattggggctggtggctttttccagcagttcagttatatggatggatggatgaatgggttgtaggcgagtttggtcctgcttatgcttgtgcaatcaggagttcggaattgttcaagttccttgtgtttgttcacttacccatcctccctcatgctgttttccgaaaattggcattgtagctagattacacttcattggagatgctgcatgttggatctgcagggacaacagagttttggaagtagattggtgtgttgactggactggcattcatatatcgagagaagattgttcggacacgatcatgtggatggatggatggtgttcaagtgccttgcctctcctgtcttgcccttgccttgggccttggcgtgctcgcattttccgttacttccttttttatactctgtttcgattttgagccgggacattatcttcttcacctgttgatttgttctgttgctttgcgcctccgtgctctcgcagatccctttgggctgtttcacctccgcacgacaccaggagtgagccgagtttggtttggccgggttattcagtttattctttattatgcaattctagtttttgagtctattttgtagtcctcgacttcccaatgtgtgggttgcaggattgggtccgatcagtggagaattcatcatgatgacatgttgcgaggagatggaggcaggtcagtcttctgtcagatccggcggttcattgattttgtcgattggacatggattggtggtttcaggctcaaatgtctccgggtgtggtaccaccagaaccttcgatccattcttactttaacggcagagaagaaagggtccttgctggttacagggagaggtttgcttatggttcattccttgtttttggttttgatgttgtcatattggtgtgaagatcgccaccggacttactataagcttctttacccttcattggaaatgctgctggctggatcttcaggggcaaccgagttttggaagtagattgagg

SEQ ID NO: 63384 - DNA, 2958 bp, Zea Mays
atggcgtccgcggccgcccctccaacctccctctccctcgcggcccgcgcggccaccagggcagccgccgccgccgccgccccgctgcgcaggggaggcctcgccacggcgtgccagccggcacggtctctggctttcgcggcgggcgacgcgcggctcgcggtccacgtcgcgtcgcgatgccggcaggcgttctccgggcgtggcacgcgggccatggccaccatggcgaagaagagcgtaggggaactcacggaggccgacctcgaggggaagcgcgtcttcgtgcgcgccgacctcaacgtgccgctcgacgagaaccagaacatcaccgacgacacccgcatccgggccgccatccccaccatccagtacatcctcagcaagggcgccaaggtcatcctctcaagccacttgggtcgccctaagggttttacacccaagtttagcttagctccccttgtaggacggttgtctgagcttcttggcattcaggtgcaaaaagccgacgatgttattggccctgaagttgagaagctggtggcggccttgcccaacggtggggttctgctgcttgagaacgtaagattctacaaggaagaggagaagaatgacccagagtttgcacagaagcttgcctccctagcagatctttatgttaacgatgcatttggaacagcccacagggcgcatgcatcgaccgagggagttaccaagtttttgcagccttctgttgcagggttccttctgcagaaggaactcgactaccttgtcggagctgtttcaagccctaaacgcccttttgctgccatcgtgggtggttcaaaggtgtcatccaagatcggggttattgagtccctgttggagaagtgtgatatccttctcttgggtggtggtatgatcttcacgttttacaaggcacaaggtctccctgttggtgcttcattggtcgaggaagacaaactcgagcttgcaacgtctctacttgcaaaggctaaggaaaagggtgtctcccttatgctgccaaccgatgttgtcattgctgacaagtttgcccctgatgctaacagccagattgttccagcatctgcaattcctgatggttggatgggcctggatattggcccagattctgtcgcttcattcaacgcagccctggatacaaccaagacggtcatctggaacgggcccatgggtgtcttcgaatttgacaagttcgctgtaggaaccgaggctgtggcaaagaagctggcagaactcagcggcaagggcgtcacaactatcatcggaggcggagactccgtcgccgccgtcgagaaggtgggagttgctgacgttatgagccacatttccacgggaggtggcgctagcctggaattgttggaaggaaaggagcttccgggagttgttgcgttgaatgaagccgccactgtgaccgtatgaagcatgctttcattttgtttcgtcttcgtcttcacgtgccgttgtatacttgctacattctcgcttgcacttgcacctcctcagccgctcgcccgaaatgtaagagaccaatgttttatagagctaatggaaatcgtttgaacaacgacgaccctaatagtatgtgatttaccgagtgatctttcctcggtaacgtaactagtgatataaaaaacattcaaaggcaatcttggctattcactttgtgcaccaggactagcttcgctgagcaaggtgtgaattttcttttgttcttttctttgccagagaagcaaactctagcgtgcgctgatgccccgtgggaagctagatgtcacgttacggaggtctgctaccgaaaatttctggaccttggcattgtaaaatttctctcttgtctcaggcactagctggaaaattttcgctttagttcctctatttgagctaatggaaatcgccgttgatgccctcttcgccgcccggacgagtggtcttcatcgtgcccacaatcgctgtctcgactccccccgatcgccatctaataagcaggacgctgtgctgagctgccggtctctgttgtcaagaacctgtaaccatttaattgcaagggaaaataacagaggatcaattccgatgctttgcagacctgttggctgttggtccaccctgtgttgcatatacaccaggccagggcgctcggaacatgggcaagtagtatcggctccactgacatattgcaactctgtggccactcatcagcaggcgattaaaagagacagcaaaccatgctggactacacattccgcagacatccaacacaattgagagctatacgacagacagcatagaaccgacatcctcatgttcatacacagaatgttatgtgtcacacaaaacactgtgacaaagaaagttcatacgcagggcagctctccagacacacgtggcagaaaacaaggttttctgaaggctggagctgggctacagaagaggaaagcgtgatcactgctccgccacatctgccagtttggttccaccatcagctttctcccccttccaccctagtccaggatgcgacggcgccgctttctcgccctcgaaaccacgggcatcccgcagcgaggcctcaaaatcggtggaatcaattgccgtcgggaggaggctgccaatgtcatccttcgctccgaacccgccagcccgtatgacgtcctccgtagagatggcagcttccatgttcacatgagctgctgcatggccattcaacggaccggtgttcgtgtttccatcgtctgaatctggaaacgtgttcaagggctcctggccttggctcggaacactgtttgtcactgcgtctgggttcttttgttgggcttgctgttcgttgctaaagctctttccatccatgcctgccgggttgatgagcaggctcaggaggaagattcaggaacttacctctgctccgctgcgatctacgcttcgactatggaatcgtttctc

SEQ ID NO: 63385 - DNA, 554 bp, Zea Mays
ctggttacacaagccaaaaaagtgtgaagtggaatcaaaatgggaactgggtgcagactgcctcaaaggatcagattattaaggtacgtggcttgtgctttttatttttctatcttcttcaaagaattttcggattacagtgtgcactctataaccaggattctatactatctatggagatggcccaatccatccttatgatcaaatgatcgataagtttgttttctgatgccagtaaattattgattttggtccatttgctaattcattttgcaactgtatgacattagatccatgaaagagcagcaatccttctgaggggacgtcgctggttagatagttattacagtatcaagatttttatatgttcctttacatattttaaggttcacaaattgatacaggttttatatgtagcagttcatttgttcactgtaaccatacatgtaaaccataagcaaatgtaacataggagattgttatataaagagacttttgcagccactttgatgttttgttttatgcttctttttgtgaaaaattattgtggtgct

SEQ ID NO: 63386 - DNA, 1283 bp, Zea Mays
cgcgtgtggcacgtaggccggacccgattttttcttcaatcaagctctgagcgtctcctctcttgcctgttgtccacttccctctcatcctctcgacctcgcttcctccctcccatcgtgccctgccttttcctcacgacctcgccgccacgctcgcgtctcgccgctgattgcggtcccccatggagtcgttgttccatcgtcttcctgtatttgtgctgctgatatgtgtaacttgtgtttctccaggtgaaggcggtcgagcacgcgaccgagatggaggcgacggtggctgccgcggaggccgaggaggaggaggctgctgctgcggcttcgacgccgcagcggtctgggaggaaacggccccgcgcgattgggagtgggcgcatagcactcgcctcgtctcgctgtcggctgccgctggtgatcctgctccctgtggcattggccctagccagcaggcaggcagtcggccagggacggatggacggagacgacggatggaagccgcagccactagccagccacaccgcagaccgcgcatgcaggagaaagaagcggtgtttgcatggactgggattgccgacttgactgcggattgacggggacaggtgggagccagaaccgcccgaggaccctcttctcctcggccaagtgacccacaccgcaactggaaccctcttctcctcatccgacgacagtggtggccactgctccggccaggcatagcataggcagcctgtagcttcttctacgcctagccatggcctggcaacctgctactcaagagctcctcctggttacacaagccaaaaaagaatggtagtgtgaagtggaatcaaaatgggaactgggtgcagactgcctcaaaggatcagattattaaggattctatactatctatggagatggcccaatccatccttatgatcaaatgatcgataagtttgttttctgatgccagtaaattattgattttggtccatttgctaattcattttgcaactgtatgacattagatccatgaaagagcagcaatccttctgaggggacgtcgctggttagatagttattacagtatcaagatttttatatgttcctttacatattttaaggttcacaaattgatacaggttttatatgtagcagttcatttgttcactgtaaccatacatgtaaaccataagcaaatgtaacataggagattgttatataaagagacttttgcagccactttgatgttttgttttatgcttctttttgtgaaaaattattgtggtgct

SEQ ID NO: 63387 - DNA, 1721 bp, Zea Mays
cgcttgccgccgtagcgtaacgtgccgtgtcgtagtcacgtctgtcccacctggcgttttactttgtcgtccagcccggcgcgacgcccctctacatttgtgatgactacgggctgagcggtgcggcgggcggctttatctgctggcgcgcgccgacgatgcggttggagagatacgatcccgtgtgacgacgacgcgaggcgcggggggacaggaggtgccgtgccgcgccgagcggaaagagagagagagaggtggcgtccagtcagtcagtccagcagccagcgcttaccctcggcgggtggtccacgtgcctgtgcgcgcgcacgcgggcggcgacgggggatggttggcgccgcgcagacagcggctcggtacgcacggatcgtgatgcgtcctcgagcggggccccacgccgcccgtgacgtgctccctcccacaacaggccaggccctacgcgcccgcggtgggcccacccagcggcggctttgatgccttttgtttttgtttacggaatgggatcatgctcctttttttattaccctgctctcaagccctacgagcgcaatgccgcctagccgcccacgccttggacgtgaagcatttttttttcttgatcgaagccgccggtcccctctccccaggttgagcaattttccactccaccgtgggggagcggaagcgaaagcagtcctcctgccgaatcgtaacgcagccacgctaaaagacgagggacggcggcggcgcggtcagtcaaaccgctccctggcagcgccttgccgctccgcaaggcccggcccgctctccccattgttgccgccctttttaaccaccagtacaccacctcctcctcccaccgctattaaagtcccgtccgcggctccgccctcctctgtgtcttccttccacctgaaaacccaacccacacgctcgcgcctccgcgaagaaaaacaccgaggcccatggcgccgagaacgtcagagagagcgatgacatcggcggccgcgggtaccgcggcgccaaggccaagaccaacttctccttccctgcgtgcctgccgctcgccgccgcggacgtggccggcgcctgccggagcggcaacagcagcagcaccaccaccaccaccaccgtcgactccttcggcggcgacgtgcaggcgccgcccatgcaggccatgccgctcccaccgtccttctgcgccaccggcgccgtacgcttccctttcagcagctaccccgtgacgcacccgtattacttcttcgggcaggcggcagcagggtgccatatgctgaagctgccaccgacgacggtgactgtggctcagagcgactcagactcctcgtcggtcgaggatctgtcgccgtcgccgtcgccgtcgccgccggccgccgtgtcagcgacgagatccgccacgtttgatctcgacctcaactgcccaccgccggccgaggcggaggcatagtcgcggagttttgctgaatgactgcctgtagtttcttcctttctttcgtcttttatccgtagagagaatcggtaggcttaggacccctttgtattcacacggtgtcacggccacacctccgaactctggtactctgatatttagagtgaaactacgaacacgtggtttaaatggttcaaagttaactctatatggtttatagtcatgagaaacggctaaaaaattctgcagctaacagaaactatttatttcctgttct

SEQ ID NO: 63388 - DNA, 3834 bp, Zea Mays
gtcaattcagtgcatatctcaggtttttgtggagtgactgttgctgagaagagaccaatgatgcaatctcgtgatgttgataaatatttgaacaaagctgacaacattaaccatgtgctcatgaactctggcgacatttctaaaattggtggtcactgcctgcatggtacacatggtttggggactcggctagattctgatgctcagagctcatcccctggagaaaatatgaacaacaaaatcagaaggcccatcgaaatatgtacctttgatgctcaaggtcggtgcaagaaaggaaagagttgcatctctcttcatgaaagggagggatttggttctgcaaagactggtctgctcgcaccagctggttctggaaatcatagaggtatgagcttcctaactagggcaatctgtgagcaacaacttgctataacagagccaacttcttattgctccctgctgtgcataggttctgaaggaggttctcaagtacaacatatatctgacttgaaagtgcatcagttcaaggattcagagggtttgtcaaaagatgaaatgtgtcggaatcttatttatgcatttggcaaagataatcagatgtcggtacatcttgctggtaaacacagctctcccattcctggggtttcacaaaggatgcccgtcagcattggtcattcattggctcagaatccattagttcatgagaagaacaacaaacgtttcatgggacaccatattgatgtggctgctgaaaactatttggatgctggaggtacctatccaagattagatggaggtatttttcagtttgacatagacaaggaaagcagtgttagtgattcccatgtctcaagaacttacctttcagattatccatataaatcatttggcttgtctatttcatctgatcctctccagctcagtgagaagctgtcagcatatggtggagtgacaaatactattcctaacatacatcagaaagaacatcactcatgccatgcttcatacagctcacatagcttaacaggatccagaaatccttgctttgctacctctgaacatactttcggtagcccatctcttctagcaacttctcatctgggaatacagtcccatcatctgttcacatctgatattgagaaggctgatctccatagatgccttgatgttggaaagggctatggtacttctagttctggacccgcattgcttgtgagcagtaaacctgaaccttctatgacgccagttgggccccactctccaattaagaatgaggtctgggaaacatcagtgccttttgtaccttcttttagttttcctgatagcacaacagcttcagaaagtcaatatgatccatttgttgactatgttgaacctcctaaagttgggaatacaaataatctcaagccctccactatatcctgcaacattacaagtcagcatacagatcagtacgcagttactgataaatccttgaattgcaatgacaaattgaccaggaatataactgccaaaggatcaaatgaacctgcttactttattgctcctgatagaggatgcagctctagcctggatgatactatcaaggtgaaagcttgtgacagaaaaaaggatgcagttgattacaatgagaaaacaagggatttccgttttcatttggcagaacatataaaggagttggtcaaaccaatatggaaaaaaggtaatctgagtaaagatgctcataaactggtagtgagaaaatctgtcgagaaggttgtggactccattgagccaaatcaagtaccaactactgaagagttgattacgaagtacatagccacatgtggaccaaagatagaaaaacttgtgaaggcatatgttgataggcacagtacatgtcatccaaccatcaaatacagcagctctgagatgggagcttgagcttaatggtgatgacagcttgaaccttctgtcctaccaatctggttaaccttcatttgtaggcccaacaagttaatattgttcatacaaacatgtatgtccatgacttcttgaggcaagtagtcagcgaagttccagatattggtgcatctgatgttattgctgatgataagcttggcaaaggacgtatatctatcctgtagttgataaggttcttacatgtcaaaataatcttctacgaagtgttaataaatgctgaattgtcatcaggaaagctggagatggaagcgaggaggaattaaagaggacaataaacaaagcagaaaaccatacaggcaatgacaggttgtgcgaggggttgtgtacttgtgtgagaggctgccgcggacgtgtggaacttagcgggtgttgtcatagttcataaacaattcgtggagaaccaatctagcaagctagtagcctaaaagtggagatagccgatgaggtcttaagatgcaactgaagcaaaagaggctactacatcaaggagcagttcaaccactcatttgatggcatagtccatttgatgaggtcttagatgcaactgaacccactccaaggggtttgctcaggaacattgacttgaatttagatccaactgatgaagaagatgagattacagtgccaccccaagcccagtcgatccagcgactagttccgttgcagccactgcgggaccatctgttgcactttctgggtgcttgggaactgcctgacatgaacaatatggagatgggccctgtccagtttgctttgtaaaaaaaatacagattggagagaatgggtattatgacaatcaagactagctctgcccttatagctttcagagtggataagtaggatagcaggacagttgtaggttcatcttaactctttagagattctcatgtatcatgtgtatcatagccgccaaagctgcagatgcagcttataatgtgccagaggtttaaggttggctggctagttgactgtaacgttccgaagctagattcgctcaacacgtagtgctttggcatgtagtaccagttgtacttgtacactcctgtctccagttgctctccagtttaatgttaattatatgcttatgcttcattggatagttgaggaagatcttgctggatgcatgtatggcaaataaaaagcaagaaagagtttcagattacttatcacagctcattccatgacaggagtcaatattttcatatatgatagacctgcgaaaagattgcgagccttcagggataacgcgtcatcatactgggagatgatacctttatttcctgaaacatggttatccaagcacaaggaaaaagttccagcagtgattgcgactcgccagctcaaggtgactgcggaatccaagatgggatcgatgcttctacagctgcttgaagttgttccacaccgcccccaccttggccttgcacagcttctttccgctgccggcatccacctcgacagtaaaatgcatggtcctggcatcacgttctgcacatatattatacatgggatgcatcagtggtggctccaacgatatcaactaggtttatgcagagtgacatgtctttcggtcttgctgttgtgctccgtgaccgtgactgaagcacgcgagctcaatggcctcgaggtcgctctcacacccagtgggtgcgttttggacgtcgtccaccatcccacaggccgttctcgtctcggccatggctgctggagcctgtggagagggagaaaagctgtgcagagggagaaagaggaagctgcggcgagacgagacagacgacgacagacactcctgagtcctgcttgtagtagtagagcaccaacaacgggctattgcataccatcaatgggcaggtctcctaatctagaagtgaa

SEQ ID NO: 63389 - DNA, 2153 bp, Zea Mays
ctctagcctacccaacttgcttggaactaatgctctgtttggttgcttcttgcttgtcttaggaactagccatgcgaggcctaagtcagcccagtcctgaggcctggcctggttggagcaagcattttgctcagtggtttttgtggagtgactgttgctgagaagagaccaatgatgcaatctcgtgatgttgataaatatttgaacaaagctgacaacattaaccatgtgctcatgaactctggcgacatttctaaaattggtggtcactgcctgcatggtacacatggtttggggactcggctagattctgatgctcagagttcatacaaacatgtatgtccatgacttcttgaggcaagtagtcagcgaagttccagatattggtgcatctgatgttattgctgatgataagcttggcaaaggacgtatatctatcctgtagttgataaggttcttacatgtcaaaataatcttctacgaagtgttaataaatgctgaattgtcatcaggaaagctggagatggaagcgaggaggaattaaagaggacaataaacaaagcagaaaaccatacaggcaatgacaggttgtgcgaggggttgtgtacttgtgtgagaggctgccgcggacgtgtggaacttagcgggtgttgtcatagttcataaacaattcgtggagaaccaatctagcaagctagtagcctaaaagtggagatagccgatgaggtcttaagatgcaactgaagcaaaagaggctactacatcaaggagcagttcaaccactcatttgatggcatagtccatttgatgaggtcttagatgcaactgaacccactccaaggggtttgctcaggaacattgacttgaatttagatccaactgatgaagaagatgagattacagtgccaccccaagcccagtcgatccagcgactagttccgttgcagccactgcgggaccatctgttgcactttctgggtgcttgggaactgcctgacatgaacaatatggagatgggccctgtccagtttgctttgtaaaaaaaatacagattggagagaatgggtattatgacaatcaagactagctctgcccttatagctttcagagtggataagtaggatagcaggacagttgtaggttcatcttaactctttagagattctcatgtatcatgtgtatcatagccgccaaagctgcagatgcagcttataatgtgccagaggtttaaggttggctggctagttgactgtaacgttccgaagctagattcgctcaacacgtagtgctttggcatgtagtaccagttgtacttgtacactcctgtctccagttgctctccagtttaatgttaattatatgcttatgcttcattggatagttgaggaagatcttgctggatgcatgtatggcaaataaaaagcaagaaagagtttcagattacttatcacagctcattccatgacaggagtcaatattttcatatatgatagacctgcgaaaagattgcgagccttcagggataacgcgtcatcatactgggagatgatacctttatttcctgaaacatggttatccaagcacaaggaaaaagttccagcagtgattgcgactcgccagctcaaggtgactgcggaatccaagatgggatcgatgcttctacagctgcttgaagttgttccacaccgcccccaccttggccttgcacagcttctttccgctgccggcatccacctcgacagtaaaatgcatggtcctggcatcacgttctgcacatatattatacatgggatgcatcagtggtggctccaacgatatcaactaggtttatgcagagtgacatgtctttcggtcttgctgttgtgctccgtgaccgtgactgaagcacgcgagctcaatggcctcgaggtcgctctcacacccagtgggtgcgttttggacgtcgtccaccatcccacaggccgttctcgtctcggccatggctgctggagcctgtggagagggagaaaagctgtgcagagggagaaagaggaagctgcggcgagacgagacagacgacgacagacactcctgagtcctgcttgtagtagtagagcaccaacaacgggctattgcataccatcaatgggcaggtctcctaatctagaagtgaa

SEQ ID NO: 63390 - DNA, 3741 bp, Zea Mays
atggagcagaggttgggggcaacgtatcagtggtggtcatggagtcacagtaagagctgtgaatcggtggagcggaaggggcgggagtggctggatgaggcaggacttgcctctggattacagcttgtattggatatgttggtgactgtgggagaacctgagcttggttcaagccgcggacctgtgtcatggggcgtggcaggtttttgtggagtgactgttgctgagaagagaccaatgatgcaatctcgtgatgttgataaatatttgaacaaagctgacaacattaaccatgtgctcatgaactctggcgacatttctaaaattggtggtcactgcctgcatggtacacatggtttggggactcggctagattctgatgctcagagctcatcccctggagaaaatatgaacaacaaaatcagaaggcccatcgaaatatgtacctttgatgctcaaggtcggtgcaagaaaggaaagagttgcatctctcttcatgaaagggagggatttggttctgcaaagactggtctgctcgcaccagctggttctggaaatcatagaggttctgaaggaggttctcaagtacaacatatatctgacttgaaagtgcatcagttcaaggattcagagggtttgtcaaaagatgaaatgtgtcggaatcttatttatgcatttggcaaagataatcagatgtcggtacatcttgctggtaaacacagctctcccattcctggggtttcacaaaggatgcccgtcagcattggtcattcattggctcagaatccattagttcatgagaagaacaacaaacgtttcatgggacaccatattgatgtggctgctgaaaactatttggatgctggaggtacctatccaagattagatggaggtatttttcagtttgacatagacaaggaaagcagtgttagtgattcccatgtctcaagaacttacctttcagattatccatataaatcatttggcttgtctatttcatctgatcctctccagctcagtgagaagctgtcagcatatggtggagtgacaaatactattcctaacatacatcagaaagaacatcactcatgccatgcttcatacagctcacatagcttaacaggatccagaaatccttgctttgctacctctgaacatactttcggtagcccatctcttctagcaacttctcatctgggaatacagtcccatcatctgttcacatctgatattgagaaggctgatctccatagatgccttgatgttggaaagggctatggtacttctagttctggacccgcattgcttgtgagcagtaaacctgaaccttctatgacgccagttgggccccactctccaattaagaatgaggtctgggaaacatcagtgccttttgtaccttcttttagttttcctgatagcacaacagcttcagaaagtcaatatgatccatttgttgactatgttgaacctcctaaagttgggaatacaaataatctcaagccctccactatatcctgcaacattacaagtcagcatacagatcagtacgcagttactgataaatccttgaattgcaatgacaaattgaccaggaatataactgccaaaggatcaaatgaacctgcttactttattgctcctgatagaggatgcagctctagcctggatgatactatcaaggtgaaagcttgtgacagaaaaaaggatgcagttgattacaatgagaaaacaagggatttccgttttcatttggcagaacatataaaggagttggtcaaaccaatatggaaaaaaggtaatctgagtaaagatgctcataaactggtagtgagaaaatctgtcgagaaggttgtggactccattgagccaaatcaagtaccaactactgaagagttgattacgaagtacatagccacatgtggaccaaagatagaaaaacttgtgaaggcatatgttgataggcacagtacatgtcatccaaccatcaaatacagcagctctgagatgggagcttgagcttaatggtgatgacagcttgaaccttctgtcctaccaatctggttaaccttcatttgtaggcccaacaagttaatattggaaagctggagatggaagcgaggaggaattaaagaggacaataaacaaagcagaaaaccatacaggcaatgacaggttgtgcgaggggttgtgtacttgtgtgagaggctgccgcggacgtgtggaacttagcgggtgttgtcatagttcataaacaattcgtggagaaccaatctagcaagctagtagcctaaaagtggagatagccgatgaggtcttaagatgcaactgaagcaaaagaggctactacatcaaggagcagttcaaccactcatttgatggcatagtccatttgatgaggtcttagatgcaactgaacccactccaaggggtttgctcaggaacattgacttgaatttagatccaactgatgaagaagatgagattacagtgccaccccaagcccagtcgatccagcgactagttccgttgcagccactgcgggaccatctgttgcactttctgggtgcttgggaactgcctgacatgaacaatatggagatgggccctgtccagtttgctttgtaaaaaaaatacagattggagagaatgggtattatgacaatcaagactagctctgcccttatagctttcagagtggataagtaggatagcaggacagttgtaggttcatcttaactctttagagattctcatgtatcatgtgtatcatagccgccaaagctgcagatgcagcttataatgtgccagaggtttaaggttggctggctagttgactgtaacgttccgaagctagattcgctcaacacgtagtgctttggcatgtagtaccagttgtacttgtacactcctgtctccagttgctctccagtttaatgttaattatatgcttatgcttcattggatagttgaggaagatcttgctggatgcatgtatggcaaataaaaagcaagaaagagtttcagattacttatcacagctcattccatgacaggagtcaatattttcatatatgatagacctgcgaaaagattgcgagccttcagggataacgcgtcatcatactgggagatgatacctttatttcctgaaacatggttatccaagcacaaggaaaaagttccagcagtgattgcgactcgccagctcaaggtgactgcggaatccaagatgggatcgatgcttctacagctgcttgaagttgttccacaccgcccccaccttggccttgcacagcttctttccgctgccggcatccacctcgacagtaaaatgcatggtcctggcatcacgttctgcacatatattatacatgggatgcatcagtggtggctccaacgatatcaactaggtttatgcagagtgacatgtctttcggtcttgctgttgtgctccgtgaccgtgactgaagcacgcgagctcaatggcctcgaggtcgctctcacacccagtgggtgcgttttggacgtcgtccaccatcccacaggccgttctcgtctcggccatggctgctggagcctgtggagagggagaaaagctgtgcagagggagaaagaggaagctgcggcgagacgagacagacgacgacagacactcctgagtcctgcttgtagtagtagagcaccaacaacgggctattgcataccatcaatgggcaggtctcctaatctagaagtgaa

SEQ ID NO: 63391 - DNA, 8350 bp, Zea Mays
atggagcagaggttgggggcaacgtatcagtggtggtcatggagtcacagtaagagctgtgaatcggtggagcggaaggggcgggagtggctggatgaggcaggacttgcctctggattacagcttgtattggatatgttggtgactgtgggagaacctgagcttggttcaagccgcggacctgtgtcatggggcgtggcaggtttttgtggagtgactgttgctgagaagagaccaatgatgcaatctcgtgatgttgataaatatttgaacaaagctgacaacattaaccatgtgctcatgaactctggcgacatttctaaaattggtggtcactgcctgcatggtacacatggtttggggactcggctagattctgatgctcagagctcatcccctggagaaaatatgaacaacaaaatcagaaggcccatcgaaatatgtacctttgatgctcaaggtcggtgcaagaaaggaaagagttgcatctctcttcatgaaagggagggatttggttctgcaaagactggtctgctcgcaccagctggttctggaaatcatagaggttctgaaggaggttctcaagtacaacatatatctgacttgaaagtgcatcagttcaaggattcagagggtttgtcaaaagatgaaatgtgtcggaatcttatttatgcatttggcaaagataatcagatgtcggtacatcttgctggtaaacacagctctcccattcctggggtttcacaaaggatgcccgtcagcattggtcattcattggctcagaatccattagttcatgagaagaacaacaaacgtttcatgggacaccatattgatgtggctgctgaaaactatttggatgctggaggtacctatccaagattagatggaggtatttttcagtttgacatagacaaggaaagcagtgttagtgattcccatgtctcaagaacttacctttcagattatccatataaatcatttggcttgtctatttcatctgatcctctccagctcagtgagaagctgtcagcatatggtggagtgacaaatactattcctaacatacatcagaaagaacatcactcatgccatgcttcatacagctcacatagcttaacaggatccagaaatccttgctttgctacctctgaacatactttcggtagcccatctcttctagcaacttctcatctgggaatacagtcccatcatctgttcacatctgatattgagaaggctgatctccatagatgccttgatgttggaaagggctatggtacttctagttctggacccgcattgcttgtgagcagtaaacctgaaccttctatgacgccagttgggccccactctccaattaagaatgaggtctgggaaacatcagtgccttttgtaccttcttttagttttcctgatagcacaacagcttcagaaagtcaatatgatccatttgttgactatgttgaacctcctaaagttgggaatacaaataatctcaagccctccactatatcctgcaacattacaagtcagcatacagatcagtacgcagttactgataaatccttgaattgcaatgacaaattgaccaggaatataactgccaaaggatcaaatgaacctgcttactttattgctcctgatagaggatgcagctctagcctggatgatactatcaaggtgaaagcttgtgacagaaaaaaggatgcagttgattacaatgagaaaacaagggatttccgttttcatttggcagaacatataaaggagttggtcaaaccaatatggaaaaaaggtaatctgagtaaagatgctcataaactggtagtgagaaaatctgtcgagaaggttgtggactccattgagccaaatcaagtaccaactactgaagagttgattacgaagtacatagccacatgtggaccaaagatagaaaaacttgtgaagaggcatatgttgataggcacagtacatgtcatccaaccatcaaatacagcagctctgagatgggagcttgagcttaatggtgatgacagcttgaaccttctgtcctaccaatctggttaaccttcatttgtaggcccaacaagttaatattgttcatacaaacatgtatgtccatgacttcttgaggcaagtagtcagcgaagttccagatattggtgcatctgatgttattgctgatgataagcttggcaaaggacgtatatctatcctgtagttgataaggttcttacatgtcaaaataatcttctacgaagtgttaataaatgctgaattgtcatcaggaaagctggagatggaagcgaggaggaattaaagaggacaataaacgtaagtcactattatccataactccatgtttttgtgaacgggtccttaactccatgtggatgttccatatttcacaattctcatgcatctttaataataatttggtggaaaagtatccaatttgacccccaaagtttcactgctgaactttcagatcagccatttcaacctcataactttctcttcttctaactcaaacctgtccttcctcccatatggcatgctacattgcgcgccttgtcacccatggacatccattgctatttcatcacacatgaaatatcaattttgtccttgttctgctcagtttctaagggaatggctacccaataatatctcaatccagtcaactatgcacattcttaccgagaaatttggaactgtgtcattatgaaacatgggctccaccaaattgccatcaaatgagtgggtttcacttaggtgccattaaaatgatggcgtacacgctataatgccttttggctatttaacaaaaactgaaatagctttaatttaattataggagatgatctgactagtttgcccctctctgccttttcacggtcttctctttctgtcctggtgaccgcctccattctttccctgtgaccatgcactttttctctttttctttccagcgttgtactcaacgttatcctgcaagcataaaacatgtgaattcacgagagcatacggcgtgaggagcgaaaaaaatctcaaggtcacctacatgtagttgcacattgcctagctatggatacttcacgtctggacacaggaggatacacgcaggagatccgttttttccccaaccagtgacaagatctgcgggaacgtggatggccacgcagacacaggctgctctcctaggatgaaatgcggcaggccggactgctcgctcccgctgctgtcgttggagctgcacaccaccggtcatgggggaagaagcgtggtcaccagaagggaaagagaaggccattgaaaaccagagagggccaaaacagtcatatcatctcctataagctataactaaattaaagtcatttcagtttttgttaaatagccaaaagacattataacgcttatgtcattgtttataatggcacctgagcgaaacccacccatttaatggcaatcctgcgaagcccacatttcatgatggcacaattccaaatttctcattcttacctacttttttaccttttacccttttttgttcctttttactgttatctttactttctcttccgatgctcttgctttttttgttggattgtcgataattctactcacttattacataatctatccatagataaccttttatagctgccgggggcgtcgattaatcatgggctgtagattgcagtgtacattcctttatggcagttagttctccacagggggctttccatcttgggtttgccccctcttgcttccaaattaggccttggtattggagcaaaataagggtaaaaggaacgtcttttccatgatgacccaacaaaggatgacaactttgaggctgattaggcatgttgtaccgaggttatgttggagcaaaagaaaaaggaaacctaaatgactagattggtcagtttgaaagtttcaaggatggacaaagtggtcttattcgactaataataatttaaagtggcaggcctgatgcagcggtagagcctaccgtctgtaaccggaaggtcccgggttcgagccccagcctctgcatattatgcgggtaacgcttggcgcttaaagatacccttccccagaccccgcacagtgcgggaagcctacgacactgggtacgccctttatctgtcagaacttaatttccctttgttatgtaccttccatatttcactttttatctttttaaccgataaatttgtaggggagacccttatagtggtatatattaaataaaaaggaggaactgcacaataaagaaagtatagaagcaaaagcagacagaaggaaaaaagaaaataaagaagcaattataaagaacaagccataaggaaattgccaagcgaacgtccgagttcattctaagcatctggagcttcaacctgctactgaagcaaaacctttaagacgtaaaggatggaacaaaatctctgaatataacaacattcctctgcttccaaatctcccaggccgtaatagctagaatttccatgaagaactttttcgtgaattgatccctcgctgatatgatcatttcaaagaaattcaaacaatgatccctgtgaataccaacgtgattccagcaggctgtactgaatggacattcaaataaaacatgataggtgcctaggtggtttcctcacaattaatgtcccaaagcacataggttaatcatcatttgtaactttacacctcgttttttgaagaatattttttgagttgattctgtctctataggtcagccaaatggacaccttgatctttttactcactttagacttccagatccacatgaaaggaggtgggcaaatggattggaagtttagtctgtagaccttgcttgaacggaaattgctgtttcctcaagaatagatccatttgtccttgccatgcatgttgttttgaactgaaataattgtctcatagaacttgagatattcttcagtggcttccatagaaagaggtgcatgaaaattttcttggaagtccatgttgcccagaaactgagcaagaaagcagtttttctttttgacaaacgagcatagacatatgaaatccgatttgaaaagagagttattccagacaacatcccatagtaaaaaaaaggtttctcatcacctgccatcagcatagcaatacctctatagtaatctcccagtctaaaaatatctttccactagaacgagtctctttcagaggagcaatgaggaatctgccatgagttatagcgagtattccagatagggaacttctaatcgatcataaaacttatgaagatgtttcattagcaaagcaatattctgtatttttaaggttaataaccccagaccacccttgtccttgggggtggtaaccttatcccaagaaatcattggcttactatttgcattaatatcattctctttccataaacaatctcttctggctctatcaatagagttgatgactaagctggaagcttgattgtgcacatggtgtatgtaggaagcgtagaaaatgtggaatttactatagtcagtctccaagccattgatagccacatgctggtcataattggtcttctttctattttactcaacagaggtaagaaatccttaattctgggcttaataatccccatttgtagactgagatatgtaaagggaatagagccaacttggcaaccaaagactagccaattgagctgttttggtggcttccagattgatgggtaagaggcatgatttgctataattcaccttgagcatggtagtgtttgtgaatgagcgaagaatttctttcagacaaaacatatgctcaataggaagggataaaaccctaagatgggtagccttactaatgatgtattggagaagctcagttgcaatcacaaagagcaagggagataaaggatccccctgcctaacacctcttttgcaaagaattttttttcccagaaacaccatttaaaagaacagtagaggattcagaatttaaggttgaactgacccaacgaatccacctgacgggaaaacccaactgattgagtatagcaataatgacactatgctccactgtattaaaagctttatcaaaatttgagaacaaccacttcctttctagaaagatggcactgatgtaagtattcatagcaccaagcaagacacaatcctgtatggttctgtttttaataaaatcatattgatttttgtgcacaattcgttgaatcacaggcttcagcctattcaccaatagctttgtgattaatttgatggctatactgagaagagagattggcctaaaatcattcaccctaacagggttgttcacctttgggatgagagcgatgaaagaggtgttaattccatccagattaatgttaccatcataaaaatcatgacaaagtttataaaaatcaattttgatgatgtgtctcagaaactttccattaaatccattaaggactggagctttgtcaaaaggcatgttttgaacaattttatcaatctccttatggctatgataatcccgttttctattgagcctaaggtcccttttggtttgaggtcccttttgaacaatgttaagaggcattttggtcttcttataagtcatttaatgcgttttgaatatttttagtccctaaaactaaacagggttgggactaaactttagtccatagactaaaggaaccaaacaggccctatgacttttgagctctttttgctgattaagtttcttgtgtgcagaaagcagaaaaccatacaggcaatgacaggttgtgcgaggggttgtgtacttgtgtgagaggctgccgcggacgtgtggaacttagcgggtgttgtcatagttcataaacaattcgtggagaaccaatctagcaagctagtagcctaaaagtggagatagccgatgaggtcttaagatgcaactgaagcaaaagaggctactacatcaaggagcagttcaaccactcatttgatggcatagtccatttgatgaggtcttagatgcaactgaacccactccaaggggtttgctcaggaacattgacttgaatttagatccaactgatgaagaagatgagattacagtgccaccccaagcccagtcgatccagcgactagttccgttgcagccactgcgggaccatctgttgcactttctgggtgcttgggaactgcctgacatgaacaatatggagatgggccctgtccagtttgctttgtaaaaaaaatacagattggagagaatgggtattatgacaatcaagactagctctgcccttatagctttcagagtggataagtaggatagcaggacagttgtaggttcatcttaactctttagagattctcatgtatcatgtgtatcatagccgccaaagctgcagatgcagcttataatgtgccagaggtttaaggttggctggctagttgactgtaacgttccgaagctagattcgctcaacacgtagtgctttggcatgtagtaccagttgtacttgtacactcctgtctccagttgctctccagtttaatgttaattatatgcttatgcttcattggatagttgaggaagatcttgctggatgcatgtatggcaaataaaaagcaagaaagagtttcagattacttatcacagctcattccatgacaggagtcaatattttcatatatgatagacctgcgaaaagattgcgagccttcagggataacgcgtcatcatactgggagatgatacctttatttcctgaaacatggttatccaagcacaaggaaaaagttccagcagtgattgcgactcgccagctcaaggtgactgcggaatccaagatgggatcgatgcttctacagctgcttgaagttgttccacaccgcccccaccttggccttgcacagcttctttccgctgccggcatccacctcgacagtaaaatgcatggtcctggcatcacgttctgcacatatattatacatgggatgcatcagtggtggctccaacgatatcaactaggtttatgcagagtgacatgtctttcggtcttgctgttgtgctccgtgaccgtgactgaagcacgcgagctcaatggcctcgaggtcgctctcacacccagtgggtgcgttttggacgtcgtccaccatcccacaggccgttctcgtctcggccatggctgctggagcctgtggagagggagaaaagctgtgcagagggagaaagaggaagctgcggcgagacgagacagacgacgacagacactcctgagtcctgcttgtagtagtagagcaccaacaacgggctattgcataccatcaatgggcaggtctcctaatctagaagtgaa

SEQ ID NO: 63392 - DNA, 3941 bp, Zea Mays
atggagcagaggttgggggcaacgtatcagtggtggtcatggagtcacagtaagagctgtgaatcggtggagcggaaggggcgggagtggctggatgaggcaggacttgcctctggattacagcttgtattggatatgttggtgactgtgggagaacctgagcttggttcaagccgcggacctgtgtcatggggcgtggcaggtttttgtggagtgactgttgctgagaagagaccaatgatgcaatctcgtgatgttgataaatatttgaacaaagctgacaacattaaccatgtgctcatgaactctggcgacatttctaaaattggtggtcactgcctgcatggtacacatggtttggggactcggctagattctgatgctcagagctcatcccctggagaaaatatgaacaacaaaatcagaaggcccatcgaaatatgtacctttgatgctcaaggtcggtgcaagaaaggaaagagttgcatctctcttcatgaaagggagggatttggttctgcaaagactggtctgctcgcaccagctggttctggaaatcatagaggtatgagcttcctaactagggcaatctgtgagcaacaacttgctataacagagccaacttcttattgctccctgctgtgcataggttctgaaggaggttctcaagtacaacatatatctgacttgaaagtgcatcagttcaaggattcagagggtttgtcaaaagatgaaatgtgtcggaatcttatttatgcatttggcaaagataatcagatgtcggtacatcttgctggtaaacacagctctcccattcctggggtttcacaaaggatgcccgtcagcattggtcattcattggctcagaatccattagttcatgagaagaacaacaaacgtttcatgggacaccatattgatgtggctgctgaaaactatttggatgctggaggtacctatccaagattagatggaggtatttttcagtttgacatagacaaggaaagcagtgttagtgattcccatgtctcaagaacttacctttcagattatccatataaatcatttggcttgtctatttcatctgatcctctccagctcagtgagaagctgtcagcatatggtggagtgacaaatactattcctaacatacatcagaaagaacatcactcatgccatgcttcatacagctcacatagcttaacaggatccagaaatccttgctttgctacctctgaacatactttcggtagcccatctcttctagcaacttctcatctgggaatacagtcccatcatctgttcacatctgatattgagaaggctgatctccatagatgccttgatgttggaaagggctatggtacttctagttctggacccgcattgcttgtgagcagtaaacctgaaccttctatgacgccagttgggccccactctccaattaagaatgaggtctgggaaacatcagtgccttttgtaccttcttttagttttcctgatagcacaacagcttcagaaagtcaatatgatccatttgttgactatgttgaacctcctaaagttgggaatacaaataatctcaagccctccactatatcctgcaacattacaagtcagcatacagatcagtacgcagttactgataaatccttgaattgcaatgacaaattgaccaggaatataactgccaaaggatcaaatgaacctgcttactttattgctcctgatagaggatgcagctctagcctggatgatactatcaaggtgaaagcttgtgacagaaaaaaggatgcagttgattacaatgagaaaacaagggatttccgttttcatttggcagaacatataaaggagttggtcaaaccaatatggaaaaaaggtaatctgagtaaagatgctcataaactggtagtgagaaaatctgtcgagaaggttgtggactccattgagccaaatcaagtaccaactactgaagagttgattacgaagtacatagccacatgtggaccaaagatagaaaaacttgtgaaggcatatgttgataggcacagtacatgtcatccaaccatcaaatacagcagctctgagatgggagcttgagcttaatgttcatacaaacatgtatgtccatgacttcttgaggcaagtagtcagcgaagttccagatattggtgcatctgatgttattgctgatgataagcttggcaaaggacgtatatctatcctgtagttgataaggttcttacatgtcaaaataatcttctacgaagtgttaataaatgctgaattgtcatcaggaaagctggagatggaagcgaggaggaattaaagaggacaataaacaaagcagaaaaccatacaggcaatgacaggttgtgcgaggggttgtgtacttgtgtgagaggctgccgcggacgtgtggaacttagcgggtgttgtcatagttcataaacaattcgtggagaaccaatctagcaagctagtagcctaaaagtggagatagccgatgaggtcttaagatgcaactgaagcaaaagaggctactacatcaaggagcagttcaaccactcatttgatggcatagtccatttgatgaggtcttagatgcaactgaacccactccaaggggtttgctcaggaacattgacttgaatttagatccaactgatgaagaagatgagattacagtgccaccccaagcccagtcgatccagcgactagttccgttgcagccactgcgggaccatctgttgcactttctgggtgcttgggaactgcctgacatgaacaatatggagatgggccctgtccagtttgctttgtaaaaaaaatacagattggagagaatgggtattatgacaatcaagactagctctgcccttatagctttcagagtggataagtaggatagcaggacagttgtaggttcatcttaactctttagagattctcatgtatcatgtgtatcatagccgccaaagctgcagatgcagcttataatgtgccagaggtttaaggttggctggctagttgactgtaacgttccgaagctagattcgctcaacacgtagtgctttggcatgtagtaccagttgtacttgtacactcctgtctccagttgctctccagtttaatgttaattatatgcttatgcttcattggatagttgaggaagatcttgctggatgcatgtatggcaaataaaaagcaagaaagagtttcagattacttatcacagctcattccatgacaggagtcaatattttcatatatgatagacctgcgaaaagattgcgagccttcagggataacgcgtcatcatactgggagatgatacctttatttcctgaaacatggttatccaagcacaaggaaaaagttccagcagtgattgcgactcgccagctcaaggtgactgcggaatccaagatgggatcgatgcttctacagctgcttgaagttgttccacaccgcccccaccttggccttgcacagcttctttccgctgccggcatccacctcgacagtaaaatgcatggtcctggcatcacgttctgcacatatattatacatgggatgcatcagtggtggctccaacgatatcaactaggtttatgcagagtgacatgtctttcggtcttgctgttgtgctccgtgaccgtgactgaagcacgcgagctcaatggcctcgaggtcgctctcacacccagtgggtgcgttttggacgtcgtccaccatcccacaggccgttctcgtctcggccatggctgctggagcctgtggagagggagaaaagctgtgcagagggagaaagaggaagctgcggcgagacgagacagacgacgacagacactcctgagtcctgcttgtagtagtagagcaccaacaacgggctattgcataccatcaatgggcaggtctcctaatctagaagtgaa

SEQ ID NO: 63393 - DNA, 6845 bp, Zea Mays
cattaatcgacgaggtagaccaatagaggtcagaggttcggattggtgggtggaggttggacatcagaggctgatggagcagaggttgggggcaacgtatcagtggtggtcatggagtcacagtaagagctgtgaatcggtggagcggaaggggcgggagtggctggatgaggcaggacttgcctctggattacagcttgtattggatatgttggtgactgtgggagaacctgagcttggttcaagccgcggacctgtgtcatggggcgtggcaggtttttgtggagtgactgttgctgagaagagaccaatgatgcaatctcgtgatgttgataaatatttgaacaaagctgacaacattaaccatgtgctcatgaactctggcgacatttctaaaattggtggtcactgcctgcatggtacacatggtttggggactcggctagattctgatgctcagagctcatcccctggagaaaatatgaacaacaaaatcagaaggcccatcgaaatatgtacctttgatgctcaaggtcggtgcaagaaaggaaagagttgcatctctcttcatgaaagggagggatttggttctgcaaagactggtctgctcgcaccagctggttctggaaatcatagaggtatgagcttcctaactagggcaatctgtgagcaacaacttgctataacagagccaacttcttattgctccctgctgtgcataggttctgaaggaggttctcaagtacaacatatatctgacttgaaagtgcatcagttcaaggattcagagggtttgtcaaaagatgaaatgtgtcggaatcttatttatgcatttggcaaagataatcagatgtcggtacatcttgctggtaaacacagctctcccattcctggggtttcacaaaggatgcccgtcagcattggtcattcattggctcagaatccattagttcatgagaagaacaacaaacgtttcatgggacaccatattgatgtggctgctgaaaactatttggatgctggaggtacctatccaagattagatggaggtatttttcagtttgacatagacaaggaaagcagtgttagtgattcccatgtctcaagaacttacctttcagattatccatataaatcatttggcttgtctatttcatctgatcctctccagctcagtgagaagctgtcagcatatggtggagtgacaaatactattcctaacatacatcagaaagaacatcactcatgccatgcttcatacagctcacatagcttaacaggatccagaaatccttgctttgctacctctgaacatactttcggtagcccatctcttctagcaacttctcatctgggaatacagtcccatcatctgttcacatctgatattgagaaggctgatctccatagatgccttgatgttggaaagggctatggtacttctagttctggacccgcattgcttgtgagcagtaaacctgaaccttctatgacgccagttgggccccactctccaattaagaatgaggtctgggaaacatcagtgccttttgtaccttcttttagttttcctgatagcacaacagcttcagaaagtcaatatgatccatttgttgactatgttgaacctcctaaagttgggaatacaaataatctcaagccctccactatatcctgcaacattacaagtcagcatacagatcagtacgcagttactgataaatccttgaattgcaatgacaaattgaccaggaatataactgccaaaggatcaaatgaacctgcttactttattgctcctgatagaggatgcagctctagcctggatgatactatcaaggtgaaagcttgtgacagaaaaaaggatgcagttgattacaatgagaaaacaagggatttccgttttcatttggcagaacatataaaggagttggtcaaaccaatatggaaaaaaggtaatctgagtaaagatgctcataaactggtagtgagaaaatctgtcgagaaggttgtggactccattgagccaaatcaagtaccaactactgaagagttgattacgaagtacatagccacatgtggaccaaagatagaaaaacttgtgaaggcatatgttgataggcacagtacatgtcatccaaccatcaaatacagcagctctgagatgggagcttgagcttaatggtgatgacagcttgaaccttctgtcctaccaatctggttaaccttcatttgtaggcccaacaagttaatattgttcatacaaacatgtatgtccatgacttcttgaggcaagtagtcagcgaagttccagatattggtgcatctgatgttattgctgatgataagcttggcaaaggacgtatatctatcctgtagttgataaggttcttacatgtcaaaataatcttctacgaagtgttaataaatgctgaattgtcatcaggaaagctggagatggaagcgaggaggaattaaagaggacaataaacgcctgatgcagcggtagagcctaccgtctgtaaccggaaggtcccgggttcgagccccagcctctgcatattatgcgggtaacgcttggcgcttaaagatacccttccccagaccccgcacagtgcgggaagcctacgacactgggtacgccctttatctgtcagaacttaatttccctttgttatgtaccttccatatttcactttttatctttttaaccgataaatttgtaggggagacccttatagtggtatatattaaataaaaaggaggaactgcacaataaagaaagtatagaagcaaaagcagacagaaggaaaaaagaaaataaagaagcaattataaagaacaagccataaggaaattgccaagcgaacgtccgagttcattctaagcatctggagcttcaacctgctactgaagcaaaacctttaagacgtaaaggatggaacaaaatctctgaatataacaacattcctctgcttccaaatctcccaggccgtaatagctagaatttccatgaagaactttttcgtgaattgatccctcgctgatatgatcatttcaaagaaattcaaacaatgatccctgtgaataccaacgtgattccagcaggctgtactgaatggacattcaaataaaacatgataggtgcctaggtggtttcctcacaattaatgtcccaaagcacataggttaatcatcatttgtaactttacacctcgttttttgaagaatattttttgagttgattctgtctctataggtcagccaaatggacaccttgatctttttactcactttagacttccagatccacatgaaaggaggtgggcaaatggattggaagtttagtctgtagaccttgcttgaacggaaattgctgtttcctcaagaatagatccatttgtccttgccatgcatgttgttttgaactgaaataattgtctcatagaacttgagatattcttcagtggcttccatagaaagaggtgcatgaaaattttcttggaagtccatgttgcccagaaactgagcaagaaagcagtttttctttttgacaaacgagcatagacatatgaaatccgatttgaaaagagagttattccagacaacatcccatagtaaaaaaaaggtttctcatcacctgccatcagcatagcaatacctctatagtaatctcccagtctaaaaatatctttccactagaacgagtctctttcagaggagcaatgaggaatctgccatgagttatagcgagtattccagatagggaacttctaatcgatcataaaacttatgaagatgtttcattagcaaagcaatattctgtatttttaaggttaataaccccagaccacccttgtccttgggggtggtaaccttatcccaagaaatcattggcttactatttgcattaatatcattctctttccataaacaatctcttctggctctatcaatagagttgatgactaagctggaagcttgattgtgcacatggtgtatgtaggaagcgtagaaaatgtggaatttactatagtcagtctccaagccattgatagccacatgctggtcataattggtcttctttctattttactcaacagaggtaagaaatccttaattctgggcttaataatccccatttgtagactgagatatgtaaagggaatagagccaacttggcaaccaaagactagccaattgagctgttttggtggcttccagattgatgggtaagaggcatgatttgctataattcaccttgagcatggtagtgtttgtgaatgagcgaagaatttctttcagacaaaacatatgctcaataggaagggataaaaccctaagatgggtagccttactaatgatgtattggagaagctcagttgcaatcacaaagagcaagggagataaaggatccccctgcctaacacctcttttgcaaagaattttttttcccagaaacaccatttaaaagaacagtagaggattcagaatttaaggttgaactgacccaacgaatccacctgacgggaaaacccaactgattgagtatagcaataatgacactatgctccactgtattaaaagctttatcaaaatttgagaacaaccacttcctttctagaaagatggcactgatgtaagtattcatagcaccaagcaagacacaatcctgtatggttctgtttttaataaaatcatattgatttttgtgcacaattcgttgaatcacaggcttcagcctattcaccaatagctttgtgattaatttgatggctatactgagaagagagattggcctaaaatcattcaccctaacagggttgttcacctttgggatgagagcgatgaaagaggtgttaattccatccagattaatgttaccatcataaaaatcatgacaaagtttataaaaatcaattttgatgatgtgtctcagaaactttccattaaatccattaaggactggagctttgtcaaaaggcatgttttgaacaattttatcaatctccttatggctatgataatcccgttttctattgagcctaaggtcccttttggtttgaggtcccttttgaacaatgttaagaggcattttggtcttcttataagtcatttaatgcgttttgaatatttttagtccctaaaactaaacagggttgggactaaactttagtccatagactaaaggaaccaaacaggccctatgacttttgagctctttttgctgattaagtttcttgtgtgcagaaagcagaaaaccatacaggcaatgacaggttgtgcgaggggttgtgtacttgtgtgagaggctgccgcggacgtgtggaacttagcgggtgttgtcatagttcataaacaattcgtggagaaccaatctagcaagctagtagcctaaaagtggagatagccgatgaggtcttaagatgcaactgaagcaaaagaggctactacatcaaggagcagttcaaccactcatttgatggcatagtccatttgatgaggtcttagatgcaactgaacccactccaaggggtttgctcaggaacattgacttgaatttagatccaactgatgaagaagatgagattacagtgccaccccaagcccagtcgatccagcgactagttccgttgcagccactgcgggaccatctgttgcactttctgggtgcttgggaactgcctgacatgaacaatatggagatgggccctgtccagtttgctttgtaaaaaaaatacagattggagagaatgggtattatgacaatcaagactagctctgcccttatagctttcagagtggataagtaggatagcaggacagttgtaggttcatcttaactctttagagattctcatgtatcatgtgtatcatagccgccaaagctgcagatgcagcttataatgtgccagaggtttaaggttggctggctagttgactgtaacgttccgaagctagattcgctcaacacgtagtgctttggcatgtagtaccagttgtacttgtacactcctgtctccagttgctctccagtttaatgttaattatatgcttatgcttcattggatagttgaggaagatcttgctggatgcatgtatggcaaataaaaagcaagaaagagtttcagattacttatcacagctcattccatgacaggagtcaatattttcatatatgatagacctgcgaaaagattgcgagccttcagggataacgcgtcatcatactgggagatgatacctttatttcctgaaacatggttatccaagcacaaggaaaaagttccagcagtgattgcgactcgccagctcaaggtgactgcggaatccaagatgggatcgatgcttctacagctgcttgaagttgttccacaccgcccccaccttggccttgcacagcttctttccgctgccggcatccacctcgacagtaaaatgcatggtcctggcatcacgttctgcacatatattatacatgggatgcatcagtggtggctccaacgatatcaactaggtttatgcagagtgacatgtctttcggtcttgctgttgtgctccgtgaccgtgactgaagcacgcgagctcaatggcctcgaggtcgctctcacacccagtgggtgcgttttggacgtcgtccaccatcccacaggccgttctcgtctcggccatggctgctggagcctgtggagagggagaaaagctgtgcagagggagaaagaggaagctgcggcgagacgagacagacgacgacagacactcctgagtcctgcttgtagtagtagagcaccaacaacgggctattgcataccatcaatgggcaggtctcctaatctagaagtgaa

SEQ ID NO: 63394 - DNA, 4141 bp, Zea Mays
cattaatcgacgaggtagaccaatagaggtcagaggttcggattggtgggtggaggttggacatcagaggctgatggagcagaggttgggggcaacgtatcagtggtggtcatggagtcacagtaagagctgtgaatcggtggagcggaaggggcgggagtggctggatgaggcaggacttgcctctggattacagcttgtattggatatgttggtgactgtgggagaacctgagcttggttcaagccgcggacctgtgtcatggggcgtggcaggtttttgtggagtgactgttgctgagaagagaccaatgatgcaatctcgtgatgttgataaatatttgaacaaagctgacaacattaaccatgtgctcatgaactctggcgacatttctaaaattggtggtcactgcctgcatggtacacatggtttggggactcggctagattctgatgctcagagctcatcccctggagaaaatatgaacaacaaaatcagaaggcccatcgaaatatgtacctttgatgctcaaggtcggtgcaagaaaggaaagagttgcatctctcttcatgaaagggagggatttggttctgcaaagactggtctgctcgcaccagctggttctggaaatcatagaggttctgaaggaggttctcaagtacaacatatatctgacttgaaagtgcatcagttcaaggattcagagggtttgtcaaaagatgaaatgtgtcggaatcttatttatgcatttggcaaagataatcagatgtcggtacatcttgctggtaaacacagctctcccattcctggggtttcacaaaggatgcccgtcagcattggtcattcattggctcagaatccattagttcatgagaagaacaacaaacgtttcatgggacaccatattgatgtggctgctgaaaactatttggatgctggaggtacctatccaagattagatggaggtatttttcagtttgacatagacaaggaaagcagtgttagtgattcccatgtctcaagaacttacctttcagattatccatataaatcatttggcttgtctatttcatctgatcctctccagctcagtgagaagctgtcagcatatggtggagtgacaaatactattcctaacatacatcagaaagaacatcactcatgccatgcttcatacagctcacatagcttaacaggatccagaaatccttgctttgctacctctgaacatactttcggtagcccatctcttctagcaacttctcatctgggaatacagtcccatcatctgttcacatctgatattgagaaggctgatctccatagatgccttgatgttggaaagggctatggtacttctagttctggacccgcattgcttgtgagcagtaaacctgaaccttctatgacgccagttgggccccactctccaattaagaatgaggtctgggaaacatcagtgccttttgtaccttcttttagttttcctgatagcacaacagcttcagaaagtcaatatgatccatttgttgactatgttgaacctcctaaagttgggaatacaaataatctcaagccctccactatatcctgcaacattacaagtcagcatacagatcagtacgcagttactgataaatccttgaattgcaatgacaaattgaccaggaatataactgccaaaggatcaaatgaacctgcttactttattgctcctgatagaggatgcagctctagcctggatgatactatcaaggtgaaagcttgtgacagaaaaaaggatgcagttgattacaatgagaaaacaagggatttccgttttcatttggcagaacatataaaggagttggtcaaaccaatatggaaaaaaggtaatctgagtaaagatgctcataaactggtagtgagaaaatctgtcgagaaggttgtggactccattgagccaaatcaagtaccaactactgaagagttgattacgaagtacatagccacatgtggaccaaagatagaaaaacttgtgaaggcatatgttgataggcacagtacatgtcatccaaccatcaaatacagcagctctgagatgggagcttgagcttaatggtgatgacagcttgaaccttctgtcctaccaatctggttaaccttcatttgtaggcccaacaagttaatattgttcatacaaacatgtatgtccatgacttcttgaggcaagtagtcagcgaagttccagatattggtgcatctgatgttattgctgatgataagcttggcaaaggacgtatatctatcctgtagttgataaggttcttacatgtcaaaataatcttctacgaagtgttaataaatgctgaattgtcatcaggaaagctggagatggaagcgaggaggaattaaagaggacaataaacgcctgatgcagcggtagagcctaccgtctgtaaccggaaggtcccgggttcgagccccagcctctgcatattatgcgggtaacgcttggcgcttaaagatacccttccccagaccccgcacagtgcgggaagcctacgacactggaaaaccatacaggcaatgacaggttgtgcgaggggttgtgtacttgtgtgagaggctgccgcggacgtgtggaacttagcgggtgttgtcatagttcataaacaattcgtggagaaccaatctagcaagctagtagcctaaaagtggagatagccgatgaggtcttaagatgcaactgaagcaaaagaggctactacatcaaggagcagttcaaccactcatttgatggcatagtccatttgatgaggtcttagatgcaactgaacccactccaaggggtttgctcaggaacattgacttgaatttagatccaactgatgaagaagatgagattacagtgccaccccaagcccagtcgatccagcgactagttccgttgcagccactgcgggaccatctgttgcactttctgggtgcttgggaactgcctgacatgaacaatatggagatgggccctgtccagtttgctttgtaaaaaaaatacagattggagagaatgggtattatgacaatcaagactagctctgcccttatagctttcagagtggataagtaggatagcaggacagttgtaggttcatcttaactctttagagattctcatgtatcatgtgtatcatagccgccaaagctgcagatgcagcttataatgtgccagaggtttaaggttggctggctagttgactgtaacgttccgaagctagattcgctcaacacgtagtgctttggcatgtagtaccagttgtacttgtacactcctgtctccagttgctctccagtttaatgttaattatatgcttatgcttcattggatagttgaggaagatcttgctggatgcatgtatggcaaataaaaagcaagaaagagtttcagattacttatcacagctcattccatgacaggagtcaatattttcatatatgatagacctgcgaaaagattgcgagccttcagggataacgcgtcatcatactgggagatgatacctttatttcctgaaacatggttatccaagcacaaggaaaaagttccagcagtgattgcgactcgccagctcaaggtgactgcggaatccaagatgggatcgatgcttctacagctgcttgaagttgttccacaccgcccccaccttggccttgcacagcttctttccgctgccggcatccacctcgacagtaaaatgcatggtcctggcatcacgttctgcacatatattatacatgggatgcatcagtggtggctccaacgatatcaactaggtttatgcagagtgacatgtctttcggtcttgctgttgtgctccgtgaccgtgactgaagcacgcgagctcaatggcctcgaggtcgctctcacacccagtgggtgcgttttggacgtcgtccaccatcccacaggccgttctcgtctcggccatggctgctggagcctgtggagagggagaaaagctgtgcagagggagaaagaggaagctgcggcgagacgagacagacgacgacagacactcctgagtcctgcttgtagtagtagagcaccaacaacgggctattgcataccatcaatgggcaggtctcctaatctagaagtgaa

SEQ ID NO: 63395 - DNA, 4148 bp, Zea Mays
cattaatcgacgaggtagaccaatagaggtcagaggttcggattggtgggtggaggttggacatcagaggctgatggagcagaggttgggggcaacgtatcagtggtggtcatggagtcacagtaagagctgtgaatcggtggagcggaaggggcgggagtggctggatgaggcaggacttgcctctggattacagcttgtattggatatgttggtgactgtgggagaacctgagcttggttcaagccgcggacctgtgtcatggggcgtggcaggtttttgtggagtgactgttgctgagaagagaccaatgatgcaatctcgtgatgttgataaatatttgaacaaagctgacaacattaaccatgtgctcatgaactctggcgacatttctaaaattggtggtcactgcctgcatggtacacatggtttggggactcggctagattctgatgctcagagctcatcccctggagaaaatatgaacaacaaaatcagaaggcccatcgaaatatgtacctttgatgctcaaggtcggtgcaagaaaggaaagagttgcatctctcttcatgaaagggagggatttggttctgcaaagactggtctgctcgcaccagctggttctggaaatcatagaggtatgagcttcctaactagggcaatctgtgagcaacaacttgctataacagagccaacttcttattgctccctgctgtgcataggttctgaaggaggttctcaagtacaacatatatctgacttgaaagtgcatcagttcaaggattcagagggtttgtcaaaagatgaaatgtgtcggaatcttatttatgcatttggcaaagataatcagatgtcggtacatcttgctggtaaacacagctctcccattcctggggtttcacaaaggatgcccgtcagcattggtcattcattggctcagaatccattagttcatgagaagaacaacaaacgtttcatgggacaccatattgatgtggctgctgaaaactatttggatgctggaggtacctatccaagattagatggaggtatttttcagtttgacatagacaaggaaagcagtgttagtgattcccatgtctcaagaacttacctttcagattatccatataaatcatttggcttgtctatttcatctgatcctctccagctcagtgagaagctgtcagcatatggtggagtgacaaatactattcctaacatacatcagaaagaacatcactcatgccatgcttcatacagctcacatagcttaacaggatccagaaatccttgctttgctacctctgaacatactttcggtagcccatctcttctagcaacttctcatctgggaatacagtcccatcatctgttcacatctgatattgagaaggctgatctccatagatgccttgatgttggaaagggctatggtacttctagttctggacccgcattgcttgtgagcagtaaacctgaaccttctatgacgccagttgggccccactctccaattaagaatgaggtctgggaaacatcagtgccttttgtaccttcttttagttttcctgatagcacaacagcttcagaaagtcaatatgatccatttgttgactatgttgaacctcctaaagttgggaatacaaataatctcaagccctccactatatcctgcaacattacaagtcagcatacagatcagtacgcagttactgataaatccttgaattgcaatgacaaattgaccaggaatataactgccaaaggatcaaatgaacctgcttactttattgctcctgatagaggatgcagctctagcctggatgatactatcaaggtgaaagcttgtgacagaaaaaaggatgcagttgattacaatgagaaaacaagggatttccgttttcatttggcagaacatataaaggagttggtcaaaccaatatggaaaaaaggtaatctgagtaaagatgctcataaactggtagtgagaaaatctgtcgagaaggttgtggactccattgagccaaatcaagtaccaactactgaagagttgattacgaagtacatagccacatgtggaccaaagatagaaaaacttgtgaaggcatatgttgataggcacagtacatgtcatccaaccatcaaatacagcagctctgagatgggagcttgagcttaatggtgatgacagcttgaaccttctgtcctaccaatctggttaaccttcatttgtaggcccaacaagttaatattgttcatacaaacatgtatgtccatgacttcttgaggcaagtagtcagcgaagttccagatattggtgcatctgatgttattgctgatgataagcttggcaaaggacgaaagctggagatggaagcgaggaggaattaaagaggacaataaacgcctgatgcagcggtagagcctaccgtctgtaaccggaaggtcccgggttcgagccccagcctctgcatattatgcgggtaacgcttggcgcttaaagatacccttccccagaccccgcacagtgcgggaagcctacgacactggaaagcagaaaaccatacaggcaatgacaggttgtgcgaggggttgtgtacttgtgtgagaggctgccgcggacgtgtggaacttagcgggtgttgtcatagttcataaacaattcgtggagaaccaatctagcaagctagtagcctaaaagtggagatagccgatgaggtcttaagatgcaactgaagcaaaagaggctactacatcaaggagcagttcaaccactcatttgatggcatagtccatttgatgaggtcttagatgcaactgaacccactccaaggggtttgctcaggaacattgacttgaatttagatccaactgatgaagaagatgagattacagtgccaccccaagcccagtcgatccagcgactagttccgttgcagccactgcgggaccatctgttgcactttctgggtgcttgggaactgcctgacatgaacaatatggagatgggccctgtccagtttgctttgtaaaaaaaatacagattggagagaatgggtattatgacaatcaagactagctctgcccttatagctttcagagtggataagtaggatagcaggacagttgtaggttcatcttaactctttagagattctcatgtatcatgtgtatcatagccgccaaagctgcagatgcagcttataatgtgccagaggtttaaggttggctggctagttgactgtaacgttccgaagctagattcgctcaacacgtagtgctttggcatgtagtaccagttgtacttgtacactcctgtctccagttgctctccagtttaatgttaattatatgcttatgcttcattggatagttgaggaagatcttgctggatgcatgtatggcaaataaaaagcaagaaagagtttcagattacttatcacagctcattccatgacaggagtcaatattttcatatatgatagacctgcgaaaagattgcgagccttcagggataacgcgtcatcatactgggagatgatacctttatttcctgaaacatggttatccaagcacaaggaaaaagttccagcagtgattgcgactcgccagctcaaggtgactgcggaatccaagatgggatcgatgcttctacagctgcttgaagttgttccacaccgcccccaccttggccttgcacagcttctttccgctgccggcatccacctcgacagtaaaatgcatggtcctggcatcacgttctgcacatatattatacatgggatgcatcagtggtggctccaacgatatcaactaggtttatgcagagtgacatgtctttcggtcttgctgttgtgctccgtgaccgtgactgaagcacgcgagctcaatggcctcgaggtcgctctcacacccagtgggtgcgttttggacgtcgtccaccatcccacaggccgttctcgtctcggccatggctgctggagcctgtggagagggagaaaagctgtgcagagggagaaagaggaagctgcggcgagacgagacagacgacgacagacactcctgagtcctgcttgtagtagtagagcaccaacaacgggctattgcataccatcaatgggcaggtctcctaatctagaagtgaa

SEQ ID NO: 63396 - DNA, 2463 bp, Zea Mays
atggagcagaggttgggggcaacgtatcagtggtggtcatggagtcacagtaagagctgtgaatcggtggagcggaaggggcgggagtggctggatgaggcaggacttgcctctggattacagcttgtattggatatgttggtgactggtttttgtggagtgactgttgctgagaagagaccaatgatgcaatctcgtgatgttgataaatatttgaacaaagctgacaacattaaccatgtgctcatgaactctggcgacatttctaaaattggtggtcactgcctgcatggtacacatggtttggggactcggctagattctgatgctcagagctcatcccctggagaaaatatgaacaacaaaatcagaaggcccatcgaaatatgtacctttgatgctcaaggtcggtgcaagaaaggaaagagttgcatctctcttcatgaaagggagggatttggttctgcaaagactggtctgctcgcaccagctggttctggaaatcatagaggtatgagcttcctaactagggcaatctgtgagcaacaacttgctataacagagccaacttcttattgctccctgctgtgcataggttctgaaggaggttctcaagtacaacatatatctgacttgaaagtgcatcagttcaaggattcagagggtttgtcaaaagatgaaatgtgtcggaatcttatttatgcatttggcaaagataatcagatgtcggtacatcttgctggtaaacacagctctcccattcctggggtttcacaaaggatgcccgtcagcattggtcattcattggctcagaatccattagttcatgagaagaacaacaaacgtttcatgggacaccatattgatgtggctgctgaaaactatttggatgctggaggtacctatccaagattagatggaggtatttttcagtttgacatagacaaggaaagcagtgttagtgattcccatgtctcaagaacttacctttcagattatccatataaatcatttggcttgtctatttcatctgatcctctccagctcagtgagaagctgtcagcatatggtggagtgacaaatactattcctaacatacatcagaaagaacatcactcatgccatgcttcatacagctcacatagcttaacaggatccagaaatccttgctttgctacctctgaacatactttcggtagcccatctcttctagcaacttctcatctgggaatacagtcccatcatctgttcacatctgatattgagaaggctgatctccatagatgccttgatgttggaaagggctatggtacttctagttctggacccgcattgcttgtgagcagtaaacctgaaccttctatgacgccagttgggccccactctccaattaagaatgaggtctgggaaacatcagtgccttttgtaccttcttttagttttcctgatagcacaacagcttcagaaagtcaatatgatccatttgttgactatgttgaacctcctaaagttgggaatacaaataatctcaagccctccactatatcctgcaacattacaagtcagcatacagatcagtacgcagttactgataaatccttgaattgcaatgacaaattgaccaggaatataactgccaaaggatcaaatgaacctgcttactttattgctcctgatagaggatgcagctctagcctggatgatactatcaaggtgaaagcttgtgacagaaaaaaggatgcagttgattacaatgagaaaacaagggatttccgttttcatttggcagaacatataaaggagttggtcaaaccaatatggaaaaaaggtaatctgagtaaagatgctcataaactggtagtgagaaaatctgtcgagaaggttgtggactccattgagccaaatcaagtaccaactactgaagagttgattacgaagtacatagccacatgtggaccaaagatagaaaaacttgtgaaggcatatgttgataggcacagtacatgtcatccaaccatcaaatacagcagctctgagatgggagcttgagcttaatggtgatgacagcttgaaccttctgtcctaccaatctggttaaccttcatttgtaggcccaacaagttaatattgttcatacaaacatgtatgtccatgacttcttgaggcaagtagtcagcgaagttccagatattggtgcatctgatgttattgctgatgataagcttggcaaaggacgtatatctatcctgtagttgataaggttcttacatgtcaaaataatcttctacgaagtgttaataaatgctgaattgtcatcaggaaagctggagatggaagcgaggaggaattaaagaggacaataaacgcctgatgcagcggtagagcctaccgtctgtaaccggaaggtcccgggttcgagccccagcctctgcatattatgcgggtaacgcttggcgcttaaag

SEQ ID NO: 63397 - DNA, 2328 bp, Zea Mays
atggagcagaggttgggggcaacgtatcagtggtggtcatggagtcacagtaagagctgtgaatcggtggagcggaaggggcgggagtggctggatgaggcaggacttgcctctggattacagcttgtattggatatgttggtgactgtgggagaacctgagcttggttcaagccgcggacctgtgtcatggggcgtggcaggtttttgtggagtgactgttgctgagaagagaccaatgatgcaatctcgtgatgttgataaatatttgaacaaagctgacaacattaaccatgtgctcatgaactctggcgacatttctaaaattggtggtcactgcctgcatggtacacatggtttggggactcggctagattctgatgctcagagctcatcccctggagaaaatatgaacaacaaaatcagaaggcccatcgaaatatgtacctttgatgctcaaggtcggtgcaagaaaggaaagagttgcatctctcttcatgaaagggagggatttggttctgcaaagactggtctgctcgcaccagctggttctggaaatcatagaggtatgagcttcctaactagggcaatctgtgagcaacaacttgctataacagagccaacttcttattgctccctgctgtgcataggttctgaaggaggttctcaagtacaacatatatctgacttgaaagtgcatcagttcaaggattcagagggtttgtcaaaagatgaaatgtgtcggaatcttatttatgcatttggcaaagataatcagatgtcggtacatcttgctggtaaacacagctctcccattcctggggtttcacaaaggatgcccgtcagcattggtcattcattggctcagaatccattagttcatgagaagaacaacaaacgtttcatgggacaccatattgatgtggctgctgaaaactatttggatgctggaggtacctatccaagattagatggaggtatttttcagtttgacatagacaaggaaagcagtgttagtgattcccatgtctcaagaacttacctttcagattatccatataaatcatttggcttgtctatttcatctgatcctctccagctcagtgagaagctgtcagcatatggtggagtgacaaatactattcctaacatacatcagaaagaacatcactcatgccatgcttcatacagctcacatagcttaacaggatccagaaatccttgctttgctacctctgaacatactttcggtagcccatctcttctagcaacttctcatctgggaatacagtcccatcatctgttcacatctgatattgagaaggctgatctccatagatgccttgatgttggaaagggctatggtacttctagttctggacccgcattgcttgtgagcagtaaacctgaaccttctatgacgccagttgggccccactctccaattaagaatgaggtctgggaaacatcagtgccttttgtaccttcttttagttttcctgatagcacaacagcttcagaaagtcaatatgatccatttgttgactatgttgaacctcctaaagttgggaatacaaataatctcaagccctccactatatcctgcaacattacaagtcagcatacagatcagtacgcagttactgataaatccttgaattgcaatgacaaattgaccaggaatataactgccaaaggatcaaatgaacctgcttactttattgctcctgatagaggatgcagctctagcctggatgatactatcaaggtgaaagcttgtgacagaaaaaaggatgcagttgattacaatgagaaaacaagggatttccgttttcatttggcagaacatataaaggagttggtcaaaccaatatggaaaaaaggtaatctgagtaaagatgctcataaactggtagtgagaaaatctgtcgagaaggttgtggactccattgagccaaatcaagtaccaactactgaagagttgattacgaagtacatagccacatgtggaccaaagatagaaaaacttgtgaaggcatatgttgataggcacagtacatgtcatccaaccatcaaatacagcagctctgagatgggagcttgagcttaatggtgatgacagcttgaaccttctgtcctaccaatctggttaaccttcatttgtaggcccaacaagttaatattggaaagctggagatggaagcgaggaggaattaaagaggacaataaacgcctgatgcagcggtagagcctaccgtctgtaaccggaaggtcccgggttcgagccccagcctctgcatattatgcgggtaacgcttggcgcttaaag

SEQ ID NO: 63398 - DNA, 2379 bp, Zea Mays
atggagcagaggttgggggcaacgtatcagtggtggtcatggagtcacagtaagagctgtgaatcggtggagcggaaggggcgggagtggctggatgaggcaggacttgcctctggattacagcttgtattggatatgttggtgactgtgggagaacctgagcttggttcaagccgcggacctgtgtcatggggcgtggcaggtttttgtggagtgactgttgctgagaagagaccaatgatgcaatctcgtgatgttgataaatatttgaacaaagctgacaacattaaccatgtgctcatgaactctggcgacatttctaaaattggtggtcactgcctgcatggtacacatggtttggggactcggctagattctgatgctcagagctcatcccctggagaaaatatgaacaacaaaatcagaaggcccatcgaaatatgtacctttgatgctcaaggtcggtgcaagaaaggaaagagttgcatctctcttcatgaaagggagggatttggttctgcaaagactggtctgctcgcaccagctggttctggaaatcatagaggttctgaaggaggttctcaagtacaacatatatctgacttgaaagtgcatcagttcaaggattcagagggtttgtcaaaagatgaaatgtgtcggaatcttatttatgcatttggcaaagataatcagatgtcggtacatcttgctggtaaacacagctctcccattcctggggtttcacaaaggatgcccgtcagcattggtcattcattggctcagaatccattagttcatgagaagaacaacaaacgtttcatgggacaccatattgatgtggctgctgaaaactatttggatgctggaggtacctatccaagattagatggaggtatttttcagtttgacatagacaaggaaagcagtgttagtgattcccatgtctcaagaacttacctttcagattatccatataaatcatttggcttgtctatttcatctgatcctctccagctcagtgagaagctgtcagcatatggtggagtgacaaatactattcctaacatacatcagaaagaacatcactcatgccatgcttcatacagctcacatagcttaacaggatccagaaatccttgctttgctacctctgaacatactttcggtagcccatctcttctagcaacttctcatctgggaatacagtcccatcatctgttcacatctgatattgagaaggctgatctccatagatgccttgatgttggaaagggctatggtacttctagttctggacccgcattgcttgtgagcagtaaacctgaaccttctatgacgccagttgggccccactctccaattaagaatgaggtctgggaaacatcagtgccttttgtaccttcttttagttttcctgatagcacaacagcttcagaaagtcaatatgatccatttgttgactatgttgaacctcctaaagttgggaatacaaataatctcaagccctccactatatcctgcaacattacaagtcagcatacagatcagtacgcagttactgataaatccttgaattgcaatgacaaattgaccaggaatataactgccaaaggatcaaatgaacctgcttactttattgctcctgatagaggatgcagctctagcctggatgatactatcaaggtgaaagcttgtgacagaaaaaaggatgcagttgattacaatgagaaaacaagggatttccgttttcatttggcagaacatataaaggagttggtcaaaccaatatggaaaaaaggtaatctgagtaaagatgctcataaactggtagtgagaaaatctgtcgagaaggttgtggactccattgagccaaatcaagtaccaactactgaagagttgattacgaagtacatagccacatgtggaccaaagatagaaaaacttgtgaaggcatatgttgataggcacagtacatgtcatccaaccatcaaatacagcagctctgagatgggagcttgagcttaatggtgatgacagcttgaaccttctgtcctaccaatctggttaaccttcatttgtaggcccaacaagttaatattggaaagctggagatggaagcgaggaggaattaaagaggacaataaacataaccttttatagctgccgggggcgtcgattaatcatgggctgtagattgcagtgtacattcctttatggcagttagttctccacagggggctttccatcttgggtttgccccctcttgcttccaaattaggccttggtattggagcaaaataagggtaaaaggaacgtcttttccatgatgacccaacaaaggatgacaactttgaggctgattaggcatgttgtaccgag

SEQ ID NO: 63399 - DNA, 2457 bp, Zea Mays
tcagaggttcggattggtgggtggaggttggacatcagaggctgatggagcagaggttgggggcaacgtatcagtggtggtcatggagtcacagtaagagctgtgaatcggtggagcggaaggggcgggagtggctggatgaggcaggacttgcctctggattacagcttgtattggatatgttggtgactgtgggagaacctgagcttggttcaagccgcggacctgtgtcatggggcgtggcaggtttttgtggagtgactgttgctgagaagagaccaatgatgcaatctcgtgatgttgataaatatttgaacaaagctgacaacattaaccatgtgctcatgaactctggcgacatttctaaaattggtggtcactgcctgcatggtacacatggtttggggactcggctagattctgatgctcagagctcatcccctggagaaaatatgaacaacaaaatcagaaggcccatcgaaatatgtacctttgatgctcaaggtcggtgcaagaaaggaaagagttgcatctctcttcatgaaagggagggatttggttctgcaaagactggtctgctcgcaccagctggttctggaaatcatagaggttctgaaggaggttctcaagtacaacatatatctgacttgaaagtgcatcagttcaaggattcagagggtttgtcaaaagatgaaatgtgtcggaatcttatttatgcatttggcaaagataatcagatgtcggtacatcttgctggtaaacacagctctcccattcctggggtttcacaaaggatgcccgtcagcattggtcattcattggctcagaatccattagttcatgagaagaacaacaaacgtttcatgggacaccatattgatgtggctgctgaaaactatttggatgctggaggtacctatccaagattagatggaggtatttttcagtttgacatagacaaggaaagcagtgttagtgattcccatgtctcaagaacttacctttcagattatccatataaatcatttggcttgtctatttcatctgatcctctccagctcagtgagaagctgtcagcatatggtggagtgacaaatactattcctaacatacatcagaaagaacatcactcatgccatgcttcatacagctcacatagcttaacaggatccagaaatccttgctttgctacctctgaacatactttcggtagcccatctcttctagcaacttctcatctgggaatacagtcccatcatctgttcacatctgatattgagaaggctgatctccatagatgccttgatgttggaaagggctatggtacttctagttctggacccgcattgcttgtgagcagtaaacctgaaccttctatgacgccagttgggccccactctccaattaagaatgaggtctgggaaacatcagtgccttttgtaccttcttttagttttcctgatagcacaacagcttcagaaagtcaatatgatccatttgttgactatgttgaacctcctaaagttgggaatacaaataatctcaagccctccactatatcctgcaacattacaagtcagcatacagatcagtacgcagttactgataaatccttgaattgcaatgacaaattgaccaggaatataactgccaaaggatcaaatgaacctgcttactttattgctcctgatagaggatgcagctctagcctggatgatactatcaaggtgaaagcttgtgacagaaaaaaggatgcagttgattacaatgagaaaacaagggatttccgttttcatttggcagaacatataaaggagttggtcaaaccaatatggaaaaaaggtaatctgagtaaagatgctcataaactggtagtgagaaaatctgtcgagaaggttgtggactccattgagccaaatcaagtaccaactactgaagagttgattacgaagtacatagccacatgtggaccaaagatagaaaaacttgtgaaggcatatgttgataggcacagtacatgtcatccaaccatcaaatacagcagctctgagatgggagcttgagcttaatggtgatgacagcttgaaccttctgtcctaccaatctggttaaccttcatttgtaggcccaacaagttaatattgttcatacaaacatgtatgtccatgacttcttgaggaaagctggagatggaagcgaggaggaattaaagaggacaataaacataaccttttatagctgccgggggcgtcgattaatcatgggctgtagattgcagtgtacattcctttatggcagttagttctccacagggggctttccatcttgggtttgccccctcttgcttccaaattaggccttggtattggagcaaaataagggtaaaaggaacgtcttttccatgatgacccaacaaaggatgacaactttgaggctgattaggcatgttgtaccgag

SEQ ID NO: 63400 - DNA, 2634 bp, Zea Mays
atccttattacgagtagaaggacaagtctggtgcagtggtgagacctgcctcactgagtcgccaggttgtggttcgaagcagcctcttgcatttgcagggaaagtcttgctttggttgatctcttctgcagaccccactcacgtgggagccttcggcactgggtctgccttttttatttagtgatctgcatatgtacactgcactcagcagaagaaagtacacttctgtcttgtagtaacataacatttgtaggttttggttagtcttcacccacgcatacatgatcaaccagcagcctggtttcttctttaggttgatgtcccaacagctgctgtttctgctttatccttattgagacatgacgattcattcatcagaaggccaacttgggatgtaggctggtcattggctgatgctaatcagaaacagatcttccctcgagtctaacaggaataattcatctttggagtcagtagactcattgatgttggccaagtctgccacaagaattgctattctaggaatttcaacctccaatttaaatgatgcaagacgtatcaatgtttcagtgatgcaacaacgaggggaccctttgcttatagtaggatctccatttggcctcatgtcacccttccatttcttcaacagtgtatcagttggtgctgttgcaaattgccttcctccatgcactgcaaggagctcattactgatggctgacatgcactgtctccctggcatggaaggcgctccagtgtttgaccaaaattcttgcctcgtggggctgctgatgaacccattaacacagaaaggcagcaatatagaagtccagctcgtgattacatgggatgcaatatgcacggaatggaacagcaaaaaactggaggaaattgaacgacccccaagaaaactacctaatgacaaaaatacagatagtaaatctatggaattacggcatgtatataactatgtgagggttttctcttctacggacaacaaaactaatcagcattgcatatcaccccgttcgctcagagaggctatatctgcagttgttcttgtcacggttggtgatacgtcttgggcttcaggtattgttctgaacaaaaggggtttagttctgacaaatgctcatctcttggaaccttggagatttggaagaacttcaccttcagatttacaagcctcgttcgctggagaacatctcaatgctggagaaaacaaatcattgcaaccacaacaaggcaaaatttccaatgaagatgctgtcaagcataaggtttcgtcatttaacttgggtttcaaaagagggaagagaatatctgttcgtttggaccatgaagagagacagatatggtgcaatgctagtgtggttttcatctcaaagggtccacttgatgttgcattgcttcaaatagaaaaggttccagttgaattaaatacaatcagaccagaatttgtttgtccaacagcagggtcgcctgtttatgttgttgggcatggcctttttggaccccgatcaggcctacactcttctctatactcgggggttgtgtcaaaggttgtccaaatcccagcaaatcaactttctcatctggcccgtgctgaggctgacaatatggacataccagtaatgcttcagacaacagcagcagttcatccaggagccagtggcggcgttcttgttaatacacatgggctaatggttgggataataacaagtaatgctaagcatggtggtggaagcacaatacctcatctgaatttcagcatcccctgcaaattactggttgcagtcttcgagtattcagcaaatggaaacctcgtggttttggagcagttggacaaaccaaatgaagtgctctcatcagtttgggcattggcaccatcatcatccccatttgtcaggagctccccagaaaaaggcaaagaggaaaaggtcttggagttctctaagtttcttagtgacaagcaacaagctctgaaatctaacgtagatctgaaggaactatttaggtacaagactcccagcaaaatatagagtgcgtccactagaattcatacaaggaaaatgtttgttcccagaattttgtatgagacgtttgatcccagaaatccccagtacaaaatgagttatcagagcacagtgccttttttttacagatggttaaggcataagcatcttttcttcgagtgtcaggtagcgcgggctatatggcatactgttcaaatcgctacaatttttaccctccctctagtgtcgtgaatatgtttaggtcatagctagggggattggtaaagatttaaaattgttagctcttttaggggcagcagcagtttgttgggccatttgacattgcgtttcaaagaaaatatgtgacaaactctttacaggttcttcgtttggttattcactggctccgttcctaggttgtgctacagaagcctatctttcaggagttggttttggctacctgacaacgtttggagcaaatggtcaggttgttttttacctaggctcgcgggtggcaatctagtcttaggattgatttctactagagttattaggttgttagtcttctttagactgtgtgcatctagcgcgatgtagaagttttgttgtcaagaaagttgtg

SEQ ID NO: 63401 - DNA, 2636 bp, Zea Mays
atccttattacgagtagaaggacaagtctggtgcagtggtgagacctgcctcactgagtcgccaggttgtggttcgaagcagcctcttgcatttgcagggaaagtcttgctttggttgatctcttctgcagaccccactcacgtgggagccttcggcactgggtctgccttttttatttagtgatctgcatatgtacactgcactcagcagaagaaagtacacttctgtcttgtagtaacataacatttgtaggttttggttagtcttcacccacgcatacatgatcaaccagcagcctggtttcttctttaggttgatgtcccaacagctgctgtttctgctttatccttattgagacatgacgattcattcatcagaaggccaacttgggatgtaggctggtcattggctgatgctaatcagaaacaggtctctttgttcatcgaatcaaagaataattcatctttggagtcagtagactcattgatgttggccaagtctgccacaagaattgctattctaggaatttcaacctccaatttaaatgatgcaagacgtatcaatgtttcagtgatgcaacaacgaggggaccctttgcttatagtaggatctccatttggcctcatgtcacccttccatttcttcaacagtgtatcagttggtgctgttgcaaattgccttcctccatgcactgcaaggagctcattactgatggctgacatgcactgtctccctggcatggaaggcgctccagtgtttgaccaaaattcttgcctcgtggggctgctgatgaacccattaacacagaaaggcagcaatatagaagtccagctcgtgattacatgggatgcaatatgcacggaatggaacagcaaaaaactggaggaaattgaacgacccccaagaaaactacctaatgacaaaaatacagatagtaaatctatggaattacggcatgtatataactatgtgagggttttctcttctacggacaacaaaactaatcagcattgcatatcaccccgttcgctcagagaggctatatctgcagttgttcttgtcacggttggtgatacgtcttgggcttcaggtattgttctgaacaaaaggggtttagttctgacaaatgctcatctcttggaaccttggagatttggaagaacttcaccttcagatttacaagcctcgttcgctggagaacatctcaatgctggagaaaacaaatcattgcaaccacaacaaggcaaaatttccaatgaagatgctgtcaagcataaggtttcgtcatttaacttgggtttcaaaagagggaagagaatatctgttcgtttggaccatgaagagagacagatatggtgcaatgctagtgtggttttcatctcaaagggtccacttgatgttgcattgcttcaaatagaaaaggttccagttgaattaaatacaatcagaccagaatttgtttgtccaacagcagggtcgcctgtttatgttgttgggcatggcctttttggaccccgatcaggcctacactcttctctatactcgggggttgtgtcaaaggttgtccaaatcccagcaaatcaactttctcatctggcccgtgctgaggctgacaatatggacataccagtaatgcttcagacaacagcagcagttcatccaggagccagtggcggcgttcttgttaatacacatgggctaatggttgggataataacaagtaatgctaagcatggtggtggaagcacaatacctcatctgaatttcagcatcccctgcaaattactggttgcagtcttcgagtattcagcaaatggaaacctcgtggttttggagcagttggacaaaccaaatgaagtgctctcatcagtttgggcattggcaccatcatcatccccatttgtcaggagctccccagaaaaaggcaaagaggaaaaggtcttggagttctctaagtttcttagtgacaagcaacaagctctgaaatctaacgtagatctgaaggaactatttaggtacaagactcccagcaaaatatagagtgcgtccactagaattcatacaaggaaaatgtttgttcccagaattttgtatgagacgtttgatcccagaaatccccagtacaaaatgagttatcagagcacagtgccttttttttacagatggttaaggcataagcatcttttcttcgagtgtcaggtagcgcgggctatatggcatactgttcaaatcgctacaatttttaccctccctctagtgtcgtgaatatgtttaggtcatagctagggggattggtaaagatttaaaattgttagctcttttaggggcagcagcagtttgttgggccatttgacattgcgtttcaaagaaaatatgtgacaaactctttacaggttcttcgtttggttattcactggctccgttcctaggttgtgctacagaagcctatctttcaggagttggttttggctacctgacaacgtttggagcaaatggtcaggttgttttttacctaggctcgcgggtggcaatctagtcttaggattgatttctactagagttattaggttgttagtcttctttagactgtgtgcatctagcgcgatgtagaagttttgttgtcaagaaagttgtg

SEQ ID NO: 63402 - DNA, 2651 bp, Zea Mays
atccttattacgagtagaaggacaagtctggtgcagtggtgagacctgcctcactgagtcgccaggttgtggttcgaagcagcctcttgcatttgcagggaaagtcttgctttggttgatctcttctgcagaccccactcacgtgggagccttcggcactgggtctgccttttttatttagtgatctgcatatgtacactgcactcagcagaagaaagtacacttctgtcttgtagtaacataacatttgtaggttttggttagtcttcacccacgcatacatgatcaaccagcagcctggtttcttctttaggttgatgtcccaacagctgctgtttctgctttatccttattgagacatgacgattcattcatcagaaggccaacttgggatgtaggctggtcattggctgatgctaatcagaaacaggttgaaaatgacagcagatcttccctcgagtctaacaggaataattcatctttggagtcagtagactcattgatgttggccaagtctgccacaagaattgctattctaggaatttcaacctccaatttaaatgatgcaagacgtatcaatgtttcagtgatgcaacaacgaggggaccctttgcttatagtaggatctccatttggcctcatgtcacccttccatttcttcaacagtgtatcagttggtgctgttgcaaattgccttcctccatgcactgcaaggagctcattactgatggctgacatgcactgtctccctggcatggaaggcgctccagtgtttgaccaaaattcttgcctcgtggggctgctgatgaacccattaacacagaaaggcagcaatatagaagtccagctcgtgattacatgggatgcaatatgcacggaatggaacagcaaaaaactggaggaaattgaacgacccccaagaaaactacctaatgacaaaaatacagatagtaaatctatggaattacggcatgtatataactatgtgagggttttctcttctacggacaacaaaactaatcagcattgcatatcaccccgttcgctcagagaggctatatctgcagttgttcttgtcacggttggtgatacgtcttgggcttcaggtattgttctgaacaaaaggggtttagttctgacaaatgctcatctcttggaaccttggagatttggaagaacttcaccttcagatttacaagcctcgttcgctggagaacatctcaatgctggagaaaacaaatcattgcaaccacaacaaggcaaaatttccaatgaagatgctgtcaagcataaggtttcgtcatttaacttgggtttcaaaagagggaagagaatatctgttcgtttggaccatgaagagagacagatatggtgcaatgctagtgtggttttcatctcaaagggtccacttgatgttgcattgcttcaaatagaaaaggttccagttgaattaaatacaatcagaccagaatttgtttgtccaacagcagggtcgcctgtttatgttgttgggcatggcctttttggaccccgatcaggcctacactcttctctatactcgggggttgtgtcaaaggttgtccaaatcccagcaaatcaactttctcatctggcccgtgctgaggctgacaatatggacataccagtaatgcttcagacaacagcagcagttcatccaggagccagtggcggcgttcttgttaatacacatgggctaatggttgggataataacaagtaatgctaagcatggtggtggaagcacaatacctcatctgaatttcagcatcccctgcaaattactggttgcagtcttcgagtattcagcaaatggaaacctcgtggttttggagcagttggacaaaccaaatgaagtgctctcatcagtttgggcattggcaccatcatcatccccatttgtcaggagctccccagaaaaaggcaaagaggaaaaggtcttggagttctctaagtttcttagtgacaagcaacaagctctgaaatctaacgtagatctgaaggaactatttaggtacaagactcccagcaaaatatagagtgcgtccactagaattcatacaaggaaaatgtttgttcccagaattttgtatgagacgtttgatcccagaaatccccagtacaaaatgagttatcagagcacagtgccttttttttacagatggttaaggcataagcatcttttcttcgagtgtcaggtagcgcgggctatatggcatactgttcaaatcgctacaatttttaccctccctctagtgtcgtgaatatgtttaggtcatagctagggggattggtaaagatttaaaattgttagctcttttaggggcagcagcagtttgttgggccatttgacattgcgtttcaaagaaaatatgtgacaaactctttacaggttcttcgtttggttattcactggctccgttcctaggttgtgctacagaagcctatctttcaggagttggttttggctacctgacaacgtttggagcaaatggtcaggttgttttttacctaggctcgcgggtggcaatctagtcttaggattgatttctactagagttattaggttgttagtcttctttagactgtgtgcatctagcgcgatgtagaagttttgttgtcaagaaagttgtg

SEQ ID NO: 63403 - DNA, 2642 bp, Zea Mays
atccaaacagctttcaaggagaagcgtacagtccctgctatacagctctcgtcggggtcttctcccccttcggcccttcccccctccctgcgcgccatggaggcccaggagatcgccgctgcagcgcgccacttctgcgccatggaccccaaggccgtgaagatgcgccgccacgcctttcattttcaccattcggggtcgaccacgctctcggcgtcggctctgctcctgccgcggggcgctttagcggagccgccgctacttctcgaccatatctgctcggcccacgggcacgcggcaggagacgtcgcgctcacggctgcttccctcgtcgagccgttcctggtcgcggagcagcgcaataactccggcgaggagcttcagccgaggttggttccggagacgcgtcttgatgtgtttgttgagtatgagttggggaatgctcaagatgggaagtctggacctccgcggtggcttccagctcgactgcttgccatggttgatgtcccaacagctgctgtttctgctttatccttattgagacatgacgattcattcatcagaaggccaacttgggatgtaggctggtcattggctgatgctaatcagaaacaggttgaaaatgacagcagatcttccctcgagtctaacaggaataattcatctttggagtcagtagactcattgatgttggccaagtctgccacaagaattgctattctaggaatttcaacctccaatttaaatgatgcaagacgtatcaatgtttcagtgatgcaacaacgaggggaccctttgcttatagtaggatctccatttggcctcatgtcacccttccatttcttcaacagtgtatcagttggtgctgttgcaaattgccttcctccatgcactgcaaggagctcattactgatggctgacatgcactgtctccctggcatggaaggcgctccagtgtttgaccaaaattcttgcctcgtggggctgctgatgaacccattaacacagaaaggcagcaatatagaagtccagctcgtgattacatgggatgcaatatgcacggaatggaacagcaaaaaactggaggaaattgaacgacccccaagaaaactacctaatgacaaaaatacagatagtaaatctatggaattacggcatgtatataactatgtgagggttttctcttctacggacaacaaaactaatcagcattgcatatcaccccgttcgctcagagaggctatatctgcagttgttcttgtcacggttggtgatacgtcttgggcttcaggtattgttctgaacaaaaggggtttagttctgacaaatgctcatctcttggaaccttggagatttggaagaacttcaccttcagatttacaagcctcgttcgctggagaacatctcaatgctggagaaaacaaatcattgcaaccacaacaaggcaaaatttccaatgaagatgctgtcaagcataaggtttcgtcatttaacttgggtttcaaaagagggaagagaatatctgttcgtttggaccatgaagagagacagatatggtgcaatgctagtgtggttttcatctcaaagggtccacttgatgttgcattgcttcaaatagaaaaggttccagttgaattaaatacaatcagaccagaatttgtttgtccaacagcagggtcgcctgtttatgttgttgggcatggcctttttggaccccgatcaggcctacactcttctctatactcgggggttgtgtcaaaggttgtccaaatcccagcaaatcaactttctcatctggcccgtgctgaggctgacaatatggacataccagtaatgcttcagacaacagcagcagttcatccaggagccagtggcggcgttcttgttaatacacatgggctaatggttgggataataacaagtaatgctaagcatggtggtggaagcacaatacctcatctgaatttcagcatcccctgcaaattactggttgcagtcttcgagtattcagcaaatggaaacctcgtggttttggagcagttggacaaaccaaatgaagtgctctcatcagtttgggcattggcaccatcatcatccccatttgtcaggagctccccagaaaaaggcaaagaggaaaaggtcttggagttctctaagtttcttagtgacaagcaacaagctctgaaatctaacgtagatctgaaggaactatttaggtacaagactcccagcaaaatatagagtgcgtccactagaattcatacaaggaaaatgtttgttcccagaattttgtatgagacgtttgatcccagaaatccccagtacaaaatgagttatcagagcacagtgccttttttttacagatggttaaggcataagcatcttttcttcgagtgtcaggttcttcgtttggttattcactggctccgttcctaggttgtgctacagaagcctatctttcaggagttggttttggctacctgacaacgtttggagcaaatggtcaggttgttttttacctaggctcgcgggtggcaatctagtcttaggattgatttctactagagttattaggttgttagtcttctttagactgtgtgcatctagcgcgatgtagaagttttgttgtcaagaaagttgtg

SEQ ID NO: 63404 - DNA, 2816 bp, Zea Mays
atccaaacagctttcaaggagaagcgtacagtccctgctatacagctctcgtcggggtcttctcccccttcggcccttcccccctccctgcgcgccatggaggcccaggagatcgccgctgcagcgcgccacttctgcgccatggttcgaatcgtcggtccggaccccaaggccgtgaagatgcgccgccacgcctttcattttcaccattcggggtcgaccacgctctcggcgtcggctctgctcctgccgcggggcgctttagcggagccgccgctacttctcgaccatatctgctcggcccacgggcacgcggcaggagacgtcgcgctcacggctgcttccctcgtcgagccgttcctggtcgcggagcagcgcaataactccggcgaggagcttcagccgaggttggttccggagacgcgtcttgatgtgtttgttgagtatgagttggggaatgctcaagatgggaagtctggacctccgcggtggcttccagctcgactgcttgccatggttgatgtcccaacagctgctgtttctgctttatccttattgagacatgacgattcattcatcagaaggccaacttgggatgtaggctggtcattggctgatgctaatcagaaacaggaataattcatctttggagtcagtagactcattgatgttggccaagtctgccacaagaattgctattctaggaatttcaacctccaatttaaatgatgcaagacgtatcaatgtttcagtgatgcaacaacgaggggaccctttgcttatagtaggatctccatttggcctcatgtcacccttccatttcttcaacagtgtatcagttggtgctgttgcaaattgccttcctccatgcactgcaaggagctcattactgatggctgacatgcactgtctccctggcatggaaggcgctccagtgtttgaccaaaattcttgcctcgtggggctgctgatgaacccattaacacagaaaggcagcaatatagaagtccagctcgtgattacatgggatgcaatatgcacggaatggaacagcaaaaaactggaggaaattgaacgacccccaagaaaactacctaatgacaaaaatacagatagtaaatctatggaattacggcatgtatataactatgtgagggttttctcttctacggacaacaaaactaatcagcattgcatatcaccccgttcgctcagagaggctatatctgcagttgttcttgtcacggttggtgatacgtcttgggcttcaggtattgttctgaacaaaaggggtttagttctgacaaatgctcatctcttggaaccttggagatttggaagaacttcaccttcagatttacaagcctcgttcgctggagaacatctcaatgctggagaaaacaaatcattgcaaccacaacaaggcaaaatttccaatgaagatgctgtcaagcataaggtttcgtcatttaacttgggtttcaaaagagggaagagaatatctgttcgtttggaccatgaagagagacagatatggtgcaatgctagtgtggttttcatctcaaagggtccacttgatgttgcattgcttcaaatagaaaaggttccagttgaattaaatacaatcagaccagaatttgtttgtccaacagcagggtcgcctgtttatgttgttgggcatggcctttttggaccccgatcaggcctacactcttctctatactcgggggttgtgtcaaaggttgtccaaatcccagcaaatcaactttctcatctggcccgtgctgaggctgacaatatggacataccagtaatgcttcagacaacagcagcagttcatccaggagccagtggcggcgttcttgttaatacacatgggctaatggttgggataataacaagtaatgctaagcatggtggtggaagcacaatacctcatctgaatttcagcatcccctgcaaattactggttgcagtcttcgagtattcagcaaatggaaacctcgtggttttggagcagttggacaaaccaaatgaagtgctctcatcagtttgggcattggcaccatcatcatccccatttgtcaggagctccccagaaaaaggcaaagaggaaaaggtcttggagttctctaagtttcttagtgacaagcaacaagctctgaaatctaacgtagatctgaaggaactatttaggtacaagactcccagcaaaatatagagtgcgtccactagaattcatacaaggaaaatgtttgttcccagaattttgtatgagacgtttgatcccagaaatccccagtacaaaatgagttatcagagcacagtgccttttttttacagatggttaaggcataagcatcttttcttcgagtgtcaggtagcgcgggctatatggcatactgttcaaatcgctacaatttttaccctccctctagtgtcgtgaatatgtttaggtcatagctagggggattggtaaagatttaaaattgttagctcttttaggggcagcagcagtttgttgggccatttgacattgcgtttcaaagaaaatatgtgacaaactctttacaggttcttcgtttggttattcactggctccgttcctaggttgtgctacagaagcctatctttcaggagttggttttggctacctgacaacgtttggagcaaatggtcaggttgttttttacctaggctcgcgggtggcaatctagtcttaggattgatttctactagagttattaggttgttagtcttctttagactgtgtgcatctagcgcgatgtagaagttttgttgtcaagaaagttgtg

SEQ ID NO: 63405 - DNA, 2681 bp, Zea Mays
atccaaacagctttcaaggagaagcgtacagtccctgctatacagctctcgtcggggtcttctcccccttcggcccttcccccctccctgcgcgccatggaggcccaggagatcgccgctgcagcgcgccacttctgcgccatggaccccaaggccgtgaagatgcgccgccacgcctttcattttcaccattcggggtcgaccacgctctcggcgtcggctctgctcctgccgcggggcgctttagcggagccgccgctacttctcgaccatatctgctcggcccacgggcacgcggcaggagacgtcgcgctcacggctgcttccctcgtcgagccgttcctggtcgcggagcagcgcaataactccggcgaggagcttcagccgaggttggttccggagacgcgtcttgatgtgtttgttgagtatgagttggggaatgctcaagatgggaagtctggacctccgcggtggcttccagctcgactgcttgccatggaataattcatctttggagtcagtagactcattgatgttggccaagtctgccacaagaattgctattctaggaatttcaacctccaatttaaatgatgcaagacgtatcaatgtttcagtgatgcaacaacgaggggaccctttgcttatagtaggatctccatttggcctcatgtcacccttccatttcttcaacagtgtatcagttggtgctgttgcaaattgccttcctccatgcactgcaaggagctcattactgatggctgacatgcactgtctccctggcatggaaggcgctccagtgtttgaccaaaattcttgcctcgtggggctgctgatgaacccattaacacagaaaggcagcaatatagaagtccagctcgtgattacatgggatgcaatatgcacggaatggaacagcaaaaaactggaggaaattgaacgacccccaagaaaactacctaatgacaaaaatacagatagtaaatctatggaattacggcatgtatataactatgtgagggttttctcttctacggacaacaaaactaatcagcattgcatatcaccccgttcgctcagagaggctatatctgcagttgttcttgtcacggttggtgatacgtcttgggcttcaggtattgttctgaacaaaaggggtttagttctgacaaatgctcatctcttggaaccttggagatttggaagaacttcaccttcagatttacaagcctcgttcgctggagaacatctcaatgctggagaaaacaaatcattgcaaccacaacaaggcaaaatttccaatgaagatgctgtcaagcataaggtttcgtcatttaacttgggtttcaaaagagggaagagaatatctgttcgtttggaccatgaagagagacagatatggtgcaatgctagtgtggttttcatctcaaagggtccacttgatgttgcattgcttcaaatagaaaaggttccagttgaattaaatacaatcagaccagaatttgtttgtccaacagcagggtcgcctgtttatgttgttgggcatggcctttttggaccccgatcaggcctacactcttctctatactcgggggttgtgtcaaaggttgtccaaatcccagcaaatcaactttctcatctggcccgtgctgaggctgacaatatggacataccagtaatgcttcagacaacagcagcagttcatccaggagccagtggcggcgttcttgttaatacacatgggctaatggttgggataataacaagtaatgctaagcatggtggtggaagcacaatacctcatctgaatttcagcatcccctgcaaattactggttgcagtcttcgagtattcagcaaatggaaacctcgtggttttggagcagttggacaaaccaaatgaagtgctctcatcagtttgggcattggcaccatcatcatccccatttgtcaggagctccccagaaaaaggcaaagaggaaaaggtcttggagttctctaagtttcttagtgacaagcaacaagctctgaaatctaacgtagatctgaaggaactatttaggtacaagactcccagcaaaatatagagtgcgtccactagaattcatacaaggaaaatgtttgttcccagaattttgtatgagacgtttgatcccagaaatccccagtacaaaatgagttatcagagcacagtgccttttttttacagatggttaaggcataagcatcttttcttcgagtgtcaggtagcgcgggctatatggcatactgttcaaatcgctacaatttttaccctccctctagtgtcgtgaatatgtttaggtcatagctagggggattggtaaagatttaaaattgttagctcttttaggggcagcagcagtttgttgggccatttgacattgcgtttcaaagaaaatatgtgacaaactctttacaggttcttcgtttggttattcactggctccgttcctaggttgtgctacagaagcctatctttcaggagttggttttggctacctgacaacgtttggagcaaatggtcaggttgttttttacctaggctcgcgggtggcaatctagtcttaggattgatttctactagagttattaggttgttagtcttctttagactgtgtgcatctagcgcgatgtagaagttttgttgtcaagaaagttgtg

SEQ ID NO: 63406 - DNA, 2839 bp, Zea Mays
atccaaacagctttcaaggagaagcgtacagtccctgctatacagctctcgtcggggtcttctcccccttcggcccttcccccctccctgcgcgccatggaggcccaggagatcgccgctgcagcgcgccacttctgcgccatggttcgaatcgtcggtccggaccccaaggccgtgaagatgcgccgccacgcctttcattttcaccattcggggtcgaccacgctctcggcgtcggctctgctcctgccgcggggcgctttagcggagccgccgctacttctcgaccatatctgctcggcccacgggcacgcggcaggagacgtcgcgctcacggctgcttccctcgtcgagccgttcctggtcgcggagcagcgcaataactccggcgaggagcttcagccgaggttggttccggagacgcgtcttgatgtgtttgttgagtatgagttggggaatgctcaagatgggaagtctggacctccgcggtggcttccagctcgactgcttgccatggttgatgtcccaacagctgctgtttctgctttatccttattgagacatgacgattcattcatcagaaggccaacttgggatgtaggctggtcattggctgatgctaatcagaaacaggtctctttgttcatcgaatcaaagaataattcatctttggagtcagtagactcattgatgttggccaagtctgccacaagaattgctattctaggaatttcaacctccaatttaaatgatgcaagacgtatcaatgtttcagtgatgcaacaacgaggggaccctttgcttatagtaggatctccatttggcctcatgtcacccttccatttcttcaacagtgtatcagttggtgctgttgcaaattgccttcctccatgcactgcaaggagctcattactgatggctgacatgcactgtctccctggcatggaaggcgctccagtgtttgaccaaaattcttgcctcgtggggctgctgatgaacccattaacacagaaaggcagcaatatagaagtccagctcgtgattacatgggatgcaatatgcacggaatggaacagcaaaaaactggaggaaattgaacgacccccaagaaaactacctaatgacaaaaatacagatagtaaatctatggaattacggcatgtatataactatgtgagggttttctcttctacggacaacaaaactaatcagcattgcatatcaccccgttcgctcagagaggctatatctgcagttgttcttgtcacggttggtgatacgtcttgggcttcaggtattgttctgaacaaaaggggtttagttctgacaaatgctcatctcttggaaccttggagatttggaagaacttcaccttcagatttacaagcctcgttcgctggagaacatctcaatgctggagaaaacaaatcattgcaaccacaacaaggcaaaatttccaatgaagatgctgtcaagcataaggtttcgtcatttaacttgggtttcaaaagagggaagagaatatctgttcgtttggaccatgaagagagacagatatggtgcaatgctagtgtggttttcatctcaaagggtccacttgatgttgcattgcttcaaatagaaaaggttccagttgaattaaatacaatcagaccagaatttgtttgtccaacagcagggtcgcctgtttatgttgttgggcatggcctttttggaccccgatcaggcctacactcttctctatactcgggggttgtgtcaaaggttgtccaaatcccagcaaatcaactttctcatctggcccgtgctgaggctgacaatatggacataccagtaatgcttcagacaacagcagcagttcatccaggagccagtggcggcgttcttgttaatacacatgggctaatggttgggataataacaagtaatgctaagcatggtggtggaagcacaatacctcatctgaatttcagcatcccctgcaaattactggttgcagtcttcgagtattcagcaaatggaaacctcgtggttttggagcagttggacaaaccaaatgaagtgctctcatcagtttgggcattggcaccatcatcatccccatttgtcaggagctccccagaaaaaggcaaagaggaaaaggtcttggagttctctaagtttcttagtgacaagcaacaagctctgaaatctaacgtagatctgaaggaactatttaggtacaagactcccagcaaaatatagagtgcgtccactagaattcatacaaggaaaatgtttgttcccagaattttgtatgagacgtttgatcccagaaatccccagtacaaaatgagttatcagagcacagtgccttttttttacagatggttaaggcataagcatcttttcttcgagtgtcaggtagcgcgggctatatggcatactgttcaaatcgctacaatttttaccctccctctagtgtcgtgaatatgtttaggtcatagctagggggattggtaaagatttaaaattgttagctcttttaggggcagcagcagtttgttgggccatttgacattgcgtttcaaagaaaatatgtgacaaactctttacaggttcttcgtttggttattcactggctccgttcctaggttgtgctacagaagcctatctttcaggagttggttttggctacctgacaacgtttggagcaaatggtcaggttgttttttacctaggctcgcgggtggcaatctagtcttaggattgatttctactagagttattaggttgttagtcttctttagactgtgtgcatctagcgcgatgtagaagttttgttgtcaagaaagttgtg

SEQ ID NO: 63407 - DNA, 2780 bp, Zea Mays
atccaaacagctttcaaggagaagcgtacagtccctgctatacagctctcgtcggggtcttctcccccttcggcccttcccccctccctgcgcgccatggaggcccaggagatcgccgctgcagcgcgccacttctgcgccatggaccccaaggccgtgaagatgcgccgccacgcctttcattttcaccattcggggtcgaccacgctctcggcgtcggctctgctcctgccgcggggcgctttagcggagccgccgctacttctcgaccatatctgctcggcccacgggcacgcggcaggagacgtcgcgctcacggctgcttccctcgtcgagccgttcctggtcgcggagcagcgcaataactccggcgaggagcttcagccgaggttggttccggagacgcgtcttgatgtgtttgttgagtatgagttggggaatgctcaagatgggaagtctggacctccgcggtggcttccagctcgactgcttgccatggttgatgtcccaacagctgctgtttctgctttatccttattgagacatgacgattcattcatcagaaggccaacttgggatgtaggctggtcattggctgatgctaatcagaaacaggtctctttgttcatcgaatcaaagaataattcatctttggagtcagtagactcattgatgttggccaagtctgccacaagaattgctattctaggaatttcaacctccaatttaaatgatgcaagacgtatcaatgtttcagtgatgcaacaacgaggggaccctttgcttatagtaggatctccatttggcctcatgtcacccttccatttcttcaacagtgtatcagttggtgctgttgcaaattgccttcctccatgcactgcaaggagctcattactgatggctgacatgcactgtctccctggcatggaaggcgctccagtgtttgaccaaaattcttgcctcgtggggctgctgatgaacccattaacacagaaaggcagcaatatagaagtccagcaaaaaactggaggaaattgaacgacccccaagaaaactacctaatgacaaaaatacagatagtaaatctatggaattacggcatgtatataactatgtgagggttttctcttctacggacaacaaaactaatcagcattgcatatcaccccgttcgctcagagaggctatatctgcagttgttcttgtcacggttggtgatacgtcttgggcttcaggtattgttctgaacaaaaggggtttagttctgacaaatgctcatctcttggaaccttggagatttggaagaacttcaccttcagatttacaagcctcgttcgctggagaacatctcaatgctggagaaaacaaatcattgcaaccacaacaaggcaaaatttccaatgaagatgctgtcaagcataaggtttcgtcatttaacttgggtttcaaaagagggaagagaatatctgttcgtttggaccatgaagagagacagatatggtgcaatgctagtgtggttttcatctcaaagggtccacttgatgttgcattgcttcaaatagaaaaggttccagttgaattaaatacaatcagaccagaatttgtttgtccaacagcagggtcgcctgtttatgttgttgggcatggcctttttggaccccgatcaggcctacactcttctctatactcgggggttgtgtcaaaggttgtccaaatcccagcaaatcaactttctcatctggcccgtgctgaggctgacaatatggacataccagtaatgcttcagacaacagcagcagttcatccaggagccagtggcggcgttcttgttaatacacatgggctaatggttgggataataacaagtaatgctaagcatggtggtggaagcacaatacctcatctgaatttcagcatcccctgcaaattactggttgcagtcttcgagtattcagcaaatggaaacctcgtggttttggagcagttggacaaaccaaatgaagtgctctcatcagtttgggcattggcaccatcatcatccccatttgtcaggagctccccagaaaaaggcaaagaggaaaaggtcttggagttctctaagtttcttagtgacaagcaacaagctctgaaatctaacgtagatctgaaggaactatttaggtacaagactcccagcaaaatatagagtgcgtccactagaattcatacaaggaaaatgtttgttcccagaattttgtatgagacgtttgatcccagaaatccccagtacaaaatgagttatcagagcacagtgccttttttttacagatggttaaggcataagcatcttttcttcgagtgtcaggtagcgcgggctatatggcatactgttcaaatcgctacaatttttaccctccctctagtgtcgtgaatatgtttaggtcatagctagggggattggtaaagatttaaaattgttagctcttttaggggcagcagcagtttgttgggccatttgacattgcgtttcaaagaaaatatgtgacaaactctttacaggttcttcgtttggttattcactggctccgttcctaggttgtgctacagaagcctatctttcaggagttggttttggctacctgacaacgtttggagcaaatggtcaggttgttttttacctaggctcgcgggtggcaatctagtcttaggattgatttctactagagttattaggttgttagtcttctttagactgtgtgcatctagcgcgatgtagaagttttgttgtcaagaaagttgtg

SEQ ID NO: 63408 - DNA, 1537 bp, Zea Mays
ttataggcaaacagagtgtgcttttattaagttggcaataacccatacaagccatacacgtacgatggccgtgcataataataatgatacgaaaacacaacttgcatcaagcaaggcacacttgacaatagcaaatactacttatgttcttatataagtaagcaatgactagtaactgtcgatgcttcaagctccccaatatgtggaggcacacaatatagggcacaagcatttacaggtcccttagaacccgtgaatcttgatgttctctttcttcgcaatcccagcctaccaagacaagtaataattgcacgatcagtattaacagattgaacatctatcggtatggtaaaacagtattcagctggccaggtctgaagattctgaatacctgaactaggaaagtagcaacattcttgcgctggtcaccttggagctgaatgacctgcagcggacaaacagatcagtatatccaccaaccggcagataccatttttacaagcttgaaatgcattgttctcgtatcttacctggcctagctctgggtcctgaactacagtaccattgcagcagaattccttcttcagatccttgaggatcttgttatagctgaactctttcttcagaccctggactgtagtcagactctttctgccgttgcgctgctggatgcgcacatgcacataatccttcgttccaggaccagcaccagagtcctcagcatttgcctcagcaaacggatctatcaaagatgatgccataccatcagatgcaaacagaacactaataagcatgttcaagatgaacttcgtgtgtatgatgttatcaatctattcagtaatactcttcaggaagctggaagatgctatgtattatgtaaaaccacaatataaaaaaaaacatggcatcatgaattgagaagtagccataccaaaggcagatggaagctggacgtcgagatcagacatgaaacttggttgttgaggttttgtaggcaccgagctgatcaagcttttgatttgttgttcttatgcagaagcttctgaagactacgacccgagatccgttggtttacaccagagcagattcgcggcgagaaacgatcaaacccctccagatccccaaatcctagggctgcgaacgatacgacgaattgaatccaggaggggccaaaccgcaaaatccgggatcttctgaagactacgatccgagatccgttggtttacaccaaagcagattcacggcgagaaacgatcaaacccctccagacccccaaatcctagggctgcgaacgagaagacgaattgaattggaaggaggggaaaggggactgcgctcacctctcgctttcctggaggaggcgtggagcgcacgcggttggaggcgaaggcggatgaaaaacgagaggggctgacgggctgtcttctgtctggcttgcgcccctccgacgggttggttggctttataggcgtgtggtgcatataattaggtgcgcgaaccgccgttccgatggaaaaaactggctatggaggctctc

SEQ ID NO: 63409 - DNA, 1401 bp, Zea Mays
ttataggcaaacagagtgtgcttttattaagttggcaataacccatacaagccatacacgtacgatggccgtgcataataataatgatacgaaaacacaacttgcatcaagcaaggcacacttgacaatagcaaatactacttatgttcttatataagtaagcaatgactagtaactgtcgatgcttcaagctccccaatatgtggaggcacacaatatagggcacaagcatttacaggtcccttagaacccgtgaatcttgatgttctctttcttcgcaatcccagcctaccaagacaagtaataattgcacgatcagtattaacagattgaacatctatcggtatggtaaaacagtattcagctggccaggtctgaagattctgaatacctgaactaggaaagtagcaacattcttgcgctggtcaccttggagctgaatgacctgcagcggacaaacagatcagtatatccaccaaccggcagataccatttttacaagcttgaaatgcattgttctcgtatcttacctggcctagctctgggtcctgaactacagtaccattgcagcagaattccttcttcagatccttgaggatcttgttatagctgaactctttcttcagaccctggactgtagtcagactctttctgccgttgcgctgctggatgcgcacatgcacataatccttcgttccaggaccagcaccagagtcctcagcatttgcctcagcaaacggatctatcaaagatgatgccataccatcagatgcaaacagaacactaataagcatgttcaagatgaacttcgtgtgtatgatgttatcaatctattcagtaatactcttcaggaagctggaagatgctatgtattatgtaaaaccacaatataaaaaaaaacatggcatcatgaattgagaagtagccataccaaaggcagatggaagctggacgtcgagatcagacatgaaacttggttgttgaggttttgtaggcaccgagctgatcaagcttttgatttgttgttcttatgcagaagcgcaaaatccgggatcttctgaagactacgatccgagatccgttggtttacaccaaagcagattcacggcgagaaacgatcaaacccctccagacccccaaatcctagggctgcgaacgagaagacgaattgaattggaaggaggggaaaggggactgcgctcacctctcgctttcctggaggaggcgtggagcgcacgcggttggaggcgaaggcggatgaaaaacgagaggggctgacgggctgtcttctgtctggcttgcgcccctccgacgggttggttggctttataggcgtgtggtgcatataattaggtgcgcgaaccgccgttccgatggaaaaaactggctatggaggctctc

SEQ ID NO: 63410 - DNA, 1950 bp, Zea Mays
gcggccgcgtccgcgaggaggatcgccgcgacgctggggcggggcgcatccgccgccgcgggagcccgggaaagcgcatcgacggttggagcctagcccaaggcatctgcatactcctgatcgttgcaattactacaaagcggtccttgagggcaggacaggaactaagcctcttggcaatggcatcattcgtgagctgctgacgaagaaatctctcaactcaaagaagagcttaggcaggcccgcaaccggattcatgagcttgaagctgagagccgatctgctaagaagaagcttgaccacttggtgaagaatctcgctgaggaaaaggcttcctggaggagcagggagcatgataaggtccgaagcatcttagatgctgttaaaggggatctgagccgagagaggaagaatcgacaaagggccgaagccatgaactcggagttgatggatgagttctctgagctgaagtcactggcaaaacgatatcttcaagactatgaaaaggaaaagaaggccagggaactgatggaggaggtgtgcgatgagttagcgaaggagattgcggacgacaaagctgaggttgaagctttgaagaaagagtcgatgaaggtaagagatgaggtggaggaagaaaggaagatgctacagatggcagaggtttggcgtgaagagagggtacagatgaagcttgttgatgctaagctgacactggacagcaagtactcacagctgtgcgagcttcagactaacctggaggccttcctaagtttccaccgaagcagcagtgtagacaaggaaacaacgagagatggtgaaaggctcagggaagcaattagctcaatgaagctccacggcaaagagttctcgtacaaaccgccgcctccttcggaggacatctttgccgtgtttgaggaactcaggcagagagaagaagtcagtgagaaggaaattggacagtgcaatggagatactcctatgagccgtgcaacaaagatccatacagtgagccctgaaactgacatctttctggggaaaacagcaaagagatatcccactcgaccttgcgccagagacgaggatgatggtgacagtggatgggagaccgtcagccacgcagaggagcaaggctctagcaattcgcccgatgggagcgaaccatcggtaaacggtttctgtggaggaaacggcgcgtcagcaagtggaaccgactgggaagaagataactgtgagaagtgcagatcaagtagcggcatcaccggtatctgttcgacagctggagagaggcacccgaagaaggcgtcgtcttttgcccgactgtggagatcatcaaacggcgacggcgggaggagaacaggttccgagttactgaatggtaggctctcaagcagcaggatgcccgatgccgctctttcccctgatctcaagaacggtgaggcgtgccaagtctcaccgggtgttggggaatggagtccggacctgctgaaccctcatgtggtccgtgctatgaaagggcgcgtcgaatggccccagccccagggcacccaaaagcgcagcctgaagtccaaactcgtgaacgcaaggaccaatggacgtaaggtacagctgcaccaagcgctaggacagatgatatagtatggcatgctcgttcatactagtcgtcgtcagaaagaacaccatggtctttgcctggtgagggaggtatctgaagcggacacctttgcctgttgagggaggtatctgatgcggcattggtcctccatcgagtgttatagctcgctgcccttgtagttgtagagcatttagctcgcttagaaaaatagtgacctccgatgctccgtgtaatcaaatgtaacagcagtattatttacggtatattattttttccccggacgttactcaatagtgctattagcttcttgcgtccctttgtgcggtttctctttcttt

SEQ ID NO: 63411 - DNA, 1953 bp, Zea Mays
gcggccgcgtccgcgaggaggatcgccgcgacgctggggcggggcgcatccgccgccgcgggagcccgggaaagcgcatcgacggttggagcctagcccaaggcatctgcatactcctgatcgttgcaattactacaaagcggtccttgagggcaggacaggaactaagcctcttggcaatggcatcattcgtgagcagctgctgacgaagaaatctctcaactcaaagaagagcttaggcaggcccgcaaccggattcatgagcttgaagctgagagccgatctgctaagaagaagcttgaccacttggtgaagaatctcgctgaggaaaaggcttcctggaggagcagggagcatgataaggtccgaagcatcttagatgctgttaaaggggatctgagccgagagaggaagaatcgacaaagggccgaagccatgaactcggagttgatggatgagttctctgagctgaagtcactggcaaaacgatatcttcaagactatgaaaaggaaaagaaggccagggaactgatggaggaggtgtgcgatgagttagcgaaggagattgcggacgacaaagctgaggttgaagctttgaagaaagagtcgatgaaggtaagagatgaggtggaggaagaaaggaagatgctacagatggcagaggtttggcgtgaagagagggtacagatgaagcttgttgatgctaagctgacactggacagcaagtactcacagctgtgcgagcttcagactaacctggaggccttcctaagtttccaccgaagcagcagtgtagacaaggaaacaacgagagatggtgaaaggctcagggaagcaattagctcaatgaagctccacggcaaagagttctcgtacaaaccgccgcctccttcggaggacatctttgccgtgtttgaggaactcaggcagagagaagaagtcagtgagaaggaaattggacagtgcaatggagatactcctatgagccgtgcaacaaagatccatacagtgagccctgaaactgacatctttctggggaaaacagcaaagagatatcccactcgaccttgcgccagagacgaggatgatggtgacagtggatgggagaccgtcagccacgcagaggagcaaggctctagcaattcgcccgatgggagcgaaccatcggtaaacggtttctgtggaggaaacggcgcgtcagcaagtggaaccgactgggaagaagataactgtgagaagtgcagatcaagtagcggcatcaccggtatctgttcgacagctggagagaggcacccgaagaaggcgtcgtcttttgcccgactgtggagatcatcaaacggcgacggcgggaggagaacaggttccgagttactgaatggtaggctctcaagcagcaggatgcccgatgccgctctttcccctgatctcaagaacggtgaggcgtgccaagtctcaccgggtgttggggaatggagtccggacctgctgaaccctcatgtggtccgtgctatgaaagggcgcgtcgaatggccccagccccagggcacccaaaagcgcagcctgaagtccaaactcgtgaacgcaaggaccaatggacgtaaggtacagctgcaccaagcgctaggacagatgatatagtatggcatgctcgttcatactagtcgtcgtcagaaagaacaccatggtctttgcctggtgagggaggtatctgaagcggacacctttgcctgttgagggaggtatctgatgcggcattggtcctccatcgagtgttatagctcgctgcccttgtagttgtagagcatttagctcgcttagaaaaatagtgacctccgatgctccgtgtaatcaaatgtaacagcagtattatttacggtatattattttttccccggacgttactcaatagtgctattagcttcttgcgtccctttgtgcggtttctctttcttt

SEQ ID NO: 63412 - DNA, 1030 bp, Zea Mays
gcacgtactagcacactttgccatcccagctagacgcgcgtccatgccagatttttatccacgtgaggggtcgttaacgtgaagtgttacattaccaacacgaacagtgactttacaagtctttccaaaaatctgttctacaaagctccaaatcatcatcgccacatacttccttcctgccggccggcatcgagctagctttttcaattaacagtgtgcgttttcccacctcaactgcctttctccctataaaaaaaccccctcgtcgatcaccaccaaagaacacagtaactagcagctagcacatcaaacaagtggcgacagacaaagatttgtgagggtgatccgcgctgagaagagatggctaagatcgccgcggcggcggcggcggcgctgtgcttcgcggccctggtggccgtggccgtctgccaaggcgaggtcgagcggcagaggctcagggacctgcagtgctggcaggaggtccaggagagcccgctcgacgcccgccgccgcagggaggaggaggaggacaggggggctactactacccctgcagccggccaggagagggatacggctacggtcagggtggccagcggcagatgtatccaccgtgtcgtcccggcaccaccggcggcgggccaaggatcggccgcgtgaggcttacgaaggcccgggagtacgccgcggggttgccgatgatgtgccggctgtcggagccccaggagtgcagcatcttctccggcggcgaccagtactagctaccatggttaaagcgagtcggcgcgaggtgcaagacgcagcatgtgtactgtgcgcgtgcaaatccagaatgacgtagctctgacgtgggctcgcaatattgtcgcgtgttcgttacaataatgataataactatgaggaataaatatgggaatgttgccagatagtactggcgccggttcttcataatgagcttatgtacaaactagatattatgttaatcttccaaacactagatacgtctaataaaatcattcatacaattaac

SEQ ID NO: 63413 - DNA, 998 bp, Zea Mays
cacagacacaaagacaggcgcacgtactagcacactttgccatcccagctagacgcgcgtccatgccagatttttatccacgtgaggggtcgttaacgtgaagtgttacattaccaacacgaacagtgactttacaagtctttccaaaaatctgttctacaaagctccaaatcatcatcgccacatacttccttcctgccggccggcatcgagctagctttttcaattaacagtgtgcgttttcccacctcaactgcctttctccctataaaaaaaccccctcgtcgatcaccaccaaagaacacagtaactagcagctagcacatcaaacaagtggcgacagacaaagatttgtgagggtgatccgcgctgagaagagatggctaagatcgccgcggcggcggcggcggcgctgtgcttcgcggccctggtggccgtggccgtctgccaaggcgaggtcgagcggcagaggctcagggacctgcagtgctggcaggaggtccaggagagcccgctcgacgcgtgccgccaggagagggatacggctacggtcagggtggccagcggcagatgtatccaccgtgtcgtcccggcaccaccggcggcgggccaaggatcggccgcgtgaggcttacgaaggcccgggagtacgccgcggggttgccgatgatgtgccggctgtcggagccccaggagtgcagcatcttctccggcggcgaccagtactagctaccatggttaaagcgagtcggcgcgaggtgcaagacgcagcatgtgtactgtgcgcgtgcaaatccagaatgacgtagctctgacgtgggctcgcaatattgtcgcgtgttcgttacaataatgataataactatgaggaataaatatgggaatgttgccagatagtactggcgccggttcttcataatgagcttatgtacaaactagatattatgttaatcttccaaacactagatacgtctaataaaatcattcatacaattaac

SEQ ID NO: 63414 - DNA, 945 bp, Zea Mays
gttcttcctctatctactcatcatcaataattttgttgagtggtggattttggctgttttcttggagctctgtatgagcagggttgcaattttgacaccacaaaaccttcaggttcctactatgaatgaaatgattgacatgtggaagaaaaataagatgaacacttttggaattatctacagctggtttcttgcaaaggttgctagccaacttgaggtgttacctggagctgagttccgggtggcatttgaggaagcaatgagctacggtggcaaagttatcctaggagaccgccctgtccagatcactttgaggaggacctgggggaaaatgtcactatggcacagggcaaaatttctgtactacatcattttccagtctgtatttttaccaagcccagaggaactgaataagatgttaaaggacatggatgatgttgacatgctaacacttgttattcaagagatgagcaaggcatttcctagtttgatggacacacttctacatgagcgagatatgtatatgtcttcaacgttgttgaagtcggccagggaatattcttcagtggttgcagttgtgggaaaggggcatgtttctggaataaagaaaaattggcaacagccaattcaggtaaactgcttattagaattacctgatgctaaccaaggtccttcaaagctgaagattttggcatccattggagcattaaccggagtaataatagcatccggaatatatgtatggggtagaaagtaacagacgtgagtgcaatgtgttcaatgagcctttaaatctcgaaaaaaagtatttagtttatttacctataatctgtttcatttgttctaaatataaatagatgtaatttctgaaattgaaattaaacaaatgaaaggacaggtgcagcagataaatgaaacatgttttttcctctcatggtatgcctt

SEQ ID NO: 63415 - DNA, 1021 bp, Zea Mays
tctctactccaaaactttaaggtgtagcggagtctattgttttctcatattggataaatatcttcaaactccatatctaggaatcatgtgatcaagtgaaggccatcatcaactacctcaaacctcaggctgttttcttggagctctgtatgagcagggttgcaattttgacaccacaaaaccttcaggttcctactatgaatgaaatgattgacatgtggaagaaaaataagatgaacacttttggaattatctacagctggtttcttgcaaaggttgctagccaacttgaggtgttacctggagctgagttccgggtggcatttgaggaagcaatgagctacggtggcaaagttatcctaggagaccgccctgtccagatcactttgaggaggacctgggggaaaatgtcactatggcacagggcaaaatttctgtactacatcattttccagtctgtatttttaccaagcccagaggaactgaataagatgttaaaggacatggatgatgttgacatgctaacacttgttattcaagagatgagcaaggcatttcctagtttgatggacacacttctacatgagcgagatatgtatatgtcttcaacgttgttgaagtcggccagggaatattcttcagtggttgcagttgtgggaaaggggcatgtttctggaataaagaaaaattggcaacagccaattcaggtaaactgcttattagaattacctgatgctaaccaaggtccttcaaagctgaagattttggcatccattggagcattaaccggagtaataatagcatccggaatatatgtatggggtagaaagtaacagacgtgagtgcaatgtgttcaatgagcctttaaatctcgaaaaaaagtatttagtttatttacctataatctgtttcatttgttctaaatataaatagatgtaatttctgaaattgaaattaaacaaatgaaaggacaggtgcagcagataaatgaaacatgttttttcctctcatggtatgcctt

SEQ ID NO: 63416 - DNA, 1483 bp, Zea Mays
cgcaatcccgccccaaatcgacgcccgacgccgcatgatccgtgcacctcgactgctcgccgcgcacgcgccatcgccaatccgccaccgcctatccctagccccgatctctactatctaccgccgccttccttggtcgccgcgcgcggccttcctcgccgcccaagccccaatctcgacgacgcgcctcgcgtcgtcgtcccgcctcgtccctcttctcgccctgccgatggatccggccgctcccgagcctgtccccgcacccgccaccgacaccgatgccgagaccaatggttacgaggatgcctctgaattcgaggacgcggaggctgggggcgagggcgctggggccgggaccgagaccgggaccgggaccgggtccgggtccggaacgatgccggcgggcggtgtagcggagatgaaggagctgcccgaggagcttgccaagggggtggtgtgcctcgaatgcgagacatcggccgaagcggcggtgtcgggtgttggcgggacctgccgcgtctacgtcgtcggcaccgctcatgtgtcgcaggaatcatgtgatcaagtgaaggccatcatcaactacctcaaacctcaggctgttttcttggagctctgtatgagcagggttgcaattttgacaccacaaaaccttcaggttcctactatgaatgaaatgattgacatgtggaagaaaaataagatgaacacttttggaattatctacagctggtttcttgcaaagccaacttgaggtgttacctggagctgagttccgggtggcatttgaggaagcaatgagctacggtggcaaagttatcctaggagaccgccctgtccagatcactttgaggaggacctgggggaaaatgtcactatggcacagggcaaaatttctgtactacatcattttccagtctgtatttttaccaagcccagaggaactgaataagatgttaaaggacatggatgatgttgacatgctaacacttgttattcaagagatgagcaaggcatttcctagtttgatggacacacttctacatgagcgagatatgtatatgtcttcaacgttgttgaagtcggccagggaatattcttcagtggttgcagttgtgggaaaggggcatgtttctggaataaagaaaaattggcaacagccaattcaggtaaactgcttattagaattacctgatgctaaccaaggtccttcaaagctgaagattttggcatccattggagcattaaccggagtaataatagcatccggaatatatgtatggggtagaaagtaacagacgtgagtgcaatgtgttcaatgagcctttaaatctcgaaaaaaagtatttagtttatttacctataatctgtttcatttgttctaaatataaatagatgtaatttctgaaattgaaattaaacaaatgaaaggacaggtgcagcagataaatgaaacatgttttttcctctcatggtatgcctt

SEQ ID NO: 63417 - DNA, 1753 bp, Zea Mays
gcgaggtctcgcaatcccgccccaaatcgacgcccgacgccgcatgatccgtgcacctcgactgctcgccgcgcacgcgccatcgccaatccgccaccgcctatccctagccccgatctctactatctaccgccgccttccttggtcgccgcgcgcggccttcctcgccgcccaagccccaatctcgacgacgcgcctcgcgtcgtcgtcccgcctcgtccctcttctcgccctgccgatggatccggccgctcccgagcctgtccccgcacccgccaccgacaccgatgccgagaccaatggttacgaggatgcctctgaattcgaggacgcggaggctgggggcgagggcgctggggccgggaccgagaccgggaccgggaccgggtccgggtccggaacgatgccggcgggcggtgtagcggagatgaaggagctgcccgaggagcttgccaagggggtggtgtgcctcgaatgcgagacatcggccgaagcggcggtgtcgggtgttggcgggacctgccgcgtctacgtcgtcggcaccgctcatgtgtcgcaggaatcatgtgatcaagtgaaggccatcatcaactacctcaaacctcaggctgttttcttggagctctgtatgagcagggttgcaattttgacaccacaaaaccttcaggtatctgcacatttgtaagatgaataccaacccttcttatttgtaattcctaatataaagttgggcaaaacaataaactataatgttatgccttatgggtggtgtagaggttcggaggttttctcgacctgtgtgagaagattttcttcatataatacctaggggctgtcttacgtcgagttttataatgttatgccttgtggtgtctggattgctgaaccatcgcagaagaaggataatatgtgcttgtcaggttcctactatgaatgaaatgattgacatgtggaagaaaaataagatgaacacttttggaattatctacagctggtttcttgcaaaggttgctagccaacttgaggtgttacctggagctgagttccgggtggcatttgaggaagcaatgagctacggtggcaaagttatcctaggagaccgccctgtccagatcactttgaggaggacctgggggaaaatgtcactatggcacagggcaaaatttctgtactacatcattttccagtctgtatttttaccaagcccagaggaactgaataagatgttaaaggacatggatgatgttgacatgctaacacttgttattcaagagatgagcaaggcatttcctagtttgatggacacacttctacatgagcgagatatgtatatgtcttcaacgttgttgaagtcggccagggaatattcttcagtggttgcagttgtgggaaaggggcatgtttctggaataaagaaaaattggcaacagccaattcaggtaaactgcttattagaattacctgatgctaaccaaggtccttcaaagctgaagattttggcatccattggagcattaaccggagtaataatagcatccggaatatatgtatggggtagaaagtaacagacgtgagtgcaatgtgttcaatgagcctttaaatctcgaaaaaaagtatttagtttatttacctataatctgtttcatttgttctaaatataaatagatgtaatttctgaaattgaaattaaacaaatgaaaggacaggtgcagcagataaatgaaacatgttttttcctctcatggtatgcctt

SEQ ID NO: 63418 - DNA, 1957 bp, Zea Mays
ggcgaggtctcgcaatcccgccccaaatcgacgcccgacgccgcatgatccgtgcacctcgactgctcgccgcgcacgcgccatcgccaatccgccaccgcctatccctagccccgatctctactatctaccgccgccttccttggtcgccgcgcgcggccttcctcgccgcccaagccccaatctcgacgacgcgcctcgcgtcgtcgtcccgcctcgtccctcttctcgccctgccgatggatccggccgctcccgagcctgtccccgcacccgccaccgacaccgatgccgagaccaatggttacgaggatgcctctgaattcgaggacgcggaggctgggggcgagggcgctggggccgggaccgagaccgggaccgggaccgggtccgggtccggaacgatgccggcgggcggtgtagcggagatgaaggagctgcccgaggagcttgccaagggggtggtgtgcctcgaatgcgagacatcggccgaagcggcggtgtcgggtgttggcgggacctgccgcgtctacgtcgtcggcaccgctcatgtgtcgcaggaatcatgtgatcaagtgaaggccatcatcaactacctcaaacctcaggctgttttcttggagctctgtatgagcagggttgcaattttgacaccacaaaaccttcaggtatctgcacatttgtaagatgaataccaacccttcttatttgtaattcctaatataaagttgggcaaaacaataaactataatgttatgccttatgggtggtgtagaggttcggaggttttctcgacctgtgtgagaagattttcttcatataatacctaggggctgtcttacgtcgagttttataatgttatgccttgtggtgtctggattgctgaaccatcgcagaagaaggataatatgtgcttgtcaggcgagtattgattttattgtatctagtaaaggtttttcgggggttacttataactaaaagtatatagccttaaaggacataccgtgctacttttaagaacattttgagtcttactaatggcataaaccaaatagaagatgcataccttttatttctagagtataatgaaatcatccagttcatcttctaacctgttcccacaggttcctactatgaatgaaatgattgacatgtggaagaaaaataagatgaacacttttggaattatctacagctggtttcttgcaaaggttgctagccaacttgaggtgttacctggagctgagttccgggtggcatttgaggaagcaatgagctacggtggcaaagttatcctaggagaccgccctgtccagatcactttgaggaggacctgggggaaaatgtcactatggcacagggcaaaatttctgtactacatcattttccagtctgtatttttaccaagcccagaggaactgaataagatgttaaaggacatggatgatgttgacatgctaacacttgttattcaagagatgagcaaggcatttcctagtttgatggacacacttctacatgagcgagatatgtatatgtcttcaacgttgttgaagtcggccagggaatattcttcagtggttgcagttgtgggaaaggggcatgtttctggaataaagaaaaattggcaacagccaattcaggtaaactgcttattagaattacctgatgctaaccaaggtccttcaaagctgaagattttggcatccattggagcattaaccggagtaataatagcatccggaatatatgtatggggtagaaagtaacagacgtgagtgcaatgtgttcaatgagcctttaaatctcgaaaaaaagtatttagtttatttacctataatctgtttcatttgttctaaatataaatagatgtaatttctgaaattgaaattaaacaaatgaaaggacaggtgcagcagataaatgaaacatgttttttcctctcatggtatgcctt

SEQ ID NO: 63419 - DNA, 994 bp, Zea Mays
atgtggataacaccttatcttctcttgcacagttgcactgacccttcccgcgccaatggcctcgaacaacctcctcaaccttcctcctttcaagatcgcgctcaaccccccgcccccgccactcccgacgcgcccatcggtcttcttggcaccgcgtcagatcccaccctgccgctctctactccgcagcaagccaccgccgcggcaaggcgtccgatcatccacgtctccgcagctagacactgccaacaccccgtcgccgccgtcttcgaggcaggaggccgtcgcccaggcacggtcctgcctcgccacggcgctgcagaagccgctcaacagctcgatcccgctcaagaggcagcggcagccgcggttccgcgcggagatccccgtagtcgacgaatcgccgggctccctcgcgcgcctcgcgttcgacgtgctctcgggcggagcaggggcgtcgaggaagggcgcgccggcgaggctgctgctcatctggccctcggccgaggcgctgtccgtggccttgagggagttcgaggaccagggggactcggcgacggcgcacgcccgactgggctcgatggcgccggacgcgctgggcgcctgcgatgccgcggtgttcctggccaccgggccggcgcaggtggagcaggtgaaggccgccgccgcggcgctggagcccaggccggtggtgctgttcaacccgtcgtggagcttcgacgaggagggagacggggagaaattcggcgccggcgcgaggggcttcgtggggtccttcgacgtggtctactccttcacggggctggaggtgcggggcctgctgagcaagaagaggggcgtgctgctgcggtgcgccgaggccgggcggttcggtggcgagggctgggtgctcatggtggagaatgacggcggccgcgtcggacgggcaggagttcaaggtccgtgtcgcggcttaagaagcggccgacgatcggcgaggtggaagtctcttgct

SEQ ID NO: 63420 - DNA, 730 bp, Zea Mays
ttcacgggttcacccataaaactcacacgtctaccaccacccgagcgggcccgaactccgtcacaacacgcaaaaccctaacccaatctcgtttcccacgtctctcgctcccagtcccagatgggtctcttctcgtggtggaggggagggcgacgcggcggcgccccgccggaccagcaagcctcggcggttgcgggggtcgtggggaccgacgtggcagcttctggcacccacggggcggtggaggtgcggcggcagcggcaggctgcggacgcgacggtgttcgaattcgggtccgcggcggagtctggcgccgctgtgacgctcgccggctactgccccgtatctgatgagctcgagccgtgccgctgggagcttgtcccggccgctgttgatggcgcgccgcagttccgcatcgtgttctgagcgtgagacatctcggatggtaccgaatttcataggtataaagatgtggtgtttgggggtgtactggtaaccaagcattcagctaaaataaaacttgtgatgtggttgatgagcttctgattagatatggatggtcatatatgctcactttgtctggatggattcttttatgattacagatgaactaattcgtcactacagacaaacagtaatgtaagagcgctaaaatttatggatgagttatagcatgatcgaaaaaaaatgcttggtagatgcagtggacatgagagagagtttcttaaaa

SEQ ID NO: 63421 - DNA, 406 bp, Zea Mays
ctccttccacctggatacagaccgagacgggggaatgaaacaaatccgtcctttttttttttgacctagctaaactactatcggtcttggtgatcgtctccaaacactctttcctctccgctggcagttctggctacgcgcgctttcaccacggtccacgatgatcggtgtggattacggtgtgccagtgtgccacacgcaaacgcaaggaatatttctcctgaaaaagccatttttttaaaaccgaaaaaggaaacattgctgtaaatgataactgcgtgtccaacagcaagagttagcattagctctaagcaaataaatatgatgaagaaagactagtctagacattatggtaaaaaaactattctagacatggaactgtgagacagaaatgcctcatgaagta

SEQ ID NO: 63422 - DNA, 1750 bp, Zea Mays
cagacacttgcgttgcgtcttgccagcattgccacagcctacatccgcccgccctaccagtaccatagcactccgcttcgttcctcctccatggcgacgaagcccttcttcctctggggggacacgcacgccacctccaccgcggccccggactccgacgacgtcggggtcttcaggtcgagcgctacgcaggcgacggccgcgggggacgcgccggagcttggcgccgcggcggcggtggcgcggccgcgtctgcgccgggcggacgctgcttccgggcccagcgggaagaagaagcagcaggcgggcgccggcggtggtgtcggggccaacaagaagccgcagcgcgggctcggcgtggcggagctcgagcggctccgctgcgggggtgacccgctgctcgagctctccaccgtggtcggggatcctgccgccgccgcgcagggccacccgatgctccactacccccaccgccacccgcactccgcgttcgaagccgccggcgcgcgctactgctcgcagctgctagccccggcgccgccgggaggaccagtctgcgcgctccactcgcccccggcggcggccgggtgccagagggcgcccgtggcgccggagcagcagtacttcagggaccggtggacgagccgcgtcgggggtttcacctcgtctggcggtggagctgaccaccagccccagtgccagtcccagtcccagctgctgccgccggcgacactggaaccagagcacccttcaagccaaagcaccatctggcgtcccgctgtgtcctcctcctcctcctgcctccacaccggccaccgctgtggcatctgctccaggaggatgagagcattggcagagaacaacggaggagcactggcgctggcgccggcgccgacgcctccagactactccatctacgaccttgccacagccatggccaccgctcgccagggagacgcgcccttggccgagccgcccgcgaagaaggaggtgagggagatcgagttcttcccggcggcaagcgcgcaccaccgcgctggcggcggcggcggcggccgagtctcggtccccgacgagccggcggagctcgcagcgtccttctcttccccgtacggcgccgccagccacaccgcaccgcagcttgacctctcactgagactgtagtagcggggctcgatcgtatcgttatgcctgatccacaatgtagggttctctaggcttatgttgctgcttttatgtcggtcatcatgcatggatgtgccatctagatcgctgggttttgagttttagacacacttggtagtagttgttgctgttctttctacttattattcgctgatgaaatgccgccctatttgtgaacactggagatccatcagaatcagataactgcgtgcggatggcgttgtaattctgtatgatactggctgtgtggacttcttttcccttgtccttttgagttgctctcattttgtttttagcgcgccactcctaattttgctctgttgcatgcttacctgcagtattactaccagtacaagggtcaagtgtgcacaaaaaatataccctcagtattatttccataaaatatcatcaatggttaagaagatattgcaaaaacattacacgggatgtttagtttcctgtatatattagcatgtccaatacagtactagttattaacacgctagatttaggctctgttaaagcaacatagtatttaagaatctagtttctagaaacttgtttg

SEQ ID NO: 63423 - DNA, 2294 bp, Zea Mays
atgttctgcctcctcccatcacgcgtccgcgtccgcagctctgccccaccgcgcctccgccgccgcaatccgcgcccgcatcccaccatccccgtgcggctccttcgccgtgatgctcgcccacgcatgatagaaggcacacccgcatctcgattcccgccaccacaatctttgccccttgctgacttcgatggaaggcgtaccgctcgctctcacctgcctgtgccccgcgacgcccacccctccccattgctggggccaggcaaggatcatttccaccgtcgcaaaccaccgatcccgcaaaacggcgccgccatcctgctcgtccctaaccaccgcctacagatggattcccctcccccactgcgcacaacagatggctccgcgcatctcgtgaacacagcgggccgccggcggataagcacgcagcagctcaccatgcctgggtcgccaacaaacccgcccctctccttctcatccccacctgccagtgtaggagaagaggacggaggttagcagatctcgtcgcgctggtggagatgaccgaagccgcggagtgcgaggaggagcgggacctgtttgccgatgcataggccagcgaggtgtatgattgttagcatccggacggtgtggccgcggggctcgagctgctgaattcgatctgcgcggtgcacaggtcagcgaggtgtatgattgttagcatcggtgcggtgtcgtagctggtggaattgttgccgaagctagcgacggagtgtgtcgagccggctttggacatcttggatgccctgtctgcggttccagaggggaggatggttcttaaggattgtctgcagacgatacccaatgctgtccggttgctgatgagagtttcagaggcatgcactcgacgagctctgtcgatgttgtggccggtgtgtcggatggctccggaagaatgcgcacctgctgcagtggaggctgggttggcggcgaagcttcagcttgtcatccaaagtggttgtgcgctggagctgaagcagaaggcgtcggagctgctcaagctgtgccgcctcaactacaccgacaccccctccatctccaagtgcaaactcacaaggacaattcagtgagatatgcaaatgatgctggtctgatctgatttggttcgatgatgcgtggtttgtcgattgaccttgctgagtttagagttccgaggaaatggaattggcaaattgacgaatgatggcaagactggtggttaccacaacaattttcggggagacaagaagcgatgcagcctaatgactagcaagttagatggcaagcaggcggggtgtacatgcaaattgttgagaatttgatcagctcaataagcacatgaggttgggtgctcaacttcgtatcagcagaggaaaacatacattgtggaaataaattaattatggtctcagattcaagatatgacagatacttgtagaagtggcaatggtattacagaagccattcatttcgttgaatggggtgagaaaggaggacgtcagtttcttactcctgctggaattttaacatttaacagaaatagcatgagcggtaagttattatttttccggtctccctagagatgaatgaagaagcttttgacatccgatgtatatcttttaatctaacctgcaaactcaggtgtcctgaatgatatggggctagactcactgtattggttatgtcttatatttatatttgactgtattagttgatgagggcttgcctcagattgaggttacattcgacatcgatgctaatggaattgtgaccgtctcagccaaagataaggctacgaggaaggatcagatcgatcttcgggtgggctgtctgaggctgacatctagaagatggtgcaagaagctaaactgcgtgcctagaagaatcaggaacggaaaagccctcatcatctaatctaattcgtttgtccattattttgctgagaagtccatccctcgataagtgttcccttcatgagtttataacaccaactccaacatactcactcacctctttcagtctgttcaaagcattgcttgccaattaacagagtaacgatttattatctgcaaatttaaatcatgttagatatataccgttgcaacgcacgggcctctaactagtatataattatatatatttgtgtggataagaccttcatatcgaatttcgcaccggacccctgaaaagccaggaacggccctgagactcatcgaccatcgttcgcgccggcggatgcgcaccaagagtgtttgcggggccttgcggttttgaag

SEQ ID NO: 63424 - DNA, 2225 bp, Zea Mays
catgttctgcctcctcccatcacgcgtccgcgtccgcagctctgccccaccgcgcctccgccgccgcaatccgcgcccgcatcccaccatccccgtgcggctccttcgccgtgatgctcgcccacgcatgatagaaggcacacccgcatctcgattcccgccaccacaatctttgccccttgctgacttcgatggaaggcgtaccgctcgctctcacctgcctgtgccccgcgacgcccacccctccccattgctggggccaggcaaggatcatttccaccgtcgcaaaccaccgatcccgcaaaacggcgccgccatcctgctcgtccctaaccaccgcctacagatggattcccctcccccactgcgcacaacagatggctccgcgcatctcgtgaacacagcgggccgccggcggataagcacgcagcagctcaccatgcctgggtcgccaacaaacccgcccctctccttctcatccccacctgccagtgtaggagaagaggacggaggttagcagatctcgtcgcgctggtggagatgaccgaagccgcggagtgcgaggaggagcgggacctgtttgccgatgcataggccagcgaggtgtatgattgttagcatccggacggtgtggccgcggggctcgagctgctgaattcgatctgcgcggtgcacaggtcagcgaggtgtatgattgttagcatcggtgcggtgtcgtagctggtggaattgttgccgaagctagcgacggagtgtgtcgagccggctttggacatcttggatgccctgtctgcggttccagaggggaggatggttcttaaggattgtctgcagacgatacccaatgctgtccggttgctgatgagagtttcagaggcatgcactcgacgagctctgtcgatgttgtggccggtgtgtcggatggctccggaagaatgcgcacctgctgcagtggaggctgggttggcggcgaagcttcagcttgtcatccaaagtggttgtgcgctggagctgaagcagaaggcgtcggagctgctcaagctgtgccgcctcaactacaccgacaccccctccatctccaagtgcaaactcacaaggacaattcagtgagatatgcaaatgatgctggtctgatctgatttggttcgatgatgcgtggtttgtcgattgaccttgctgagtttagagttccgaggaaatggaattggcaaattgacgaatgatggcaagactggtggttaccacaacaattttcggggagacaagaagcgatgcagcctaatgactagcaagttagatggcaagcaggcggggtgtacatgcaaattgttgagaatttgatcagctcaataagcacatgaggttgggtgatgacagatacttgtagaagtggcaatggtattacagaagccattcatttcgttgaatggggtgagaaaggaggacgtcagtttcttactcctgctggaattttaacatttaacagaaatagcatgagcggtaagttattatttttccggtctccctagagatgaatgaagaagcttttgacatccgatgtatatcttttaatctaacctgcaaactcaggtgtcctgaatgatatggggctagactcactgtattggttatgtcttatatttatatttgactgtattagttgatgagggcttgcctcagattgaggttacattcgacatcgatgctaatggaattgtgaccgtctcagccaaagataaggctacgaggaaggatcagatcgatcttcgggtgggctgtctgaggctgacatctagaagatggtgcaagaagctaaactgcgtgcctagaagaatcaggaacggaaaagccctcatcatctaatctaattcgtttgtccattattttgctgagaagtccatccctcgataagtgttcccttcatgagtttataacaccaactccaacatactcactcacctctttcagtctgttcaaagcattgcttgccaattaacagagtaacgatttattatctgcaaatttaaatcatgttagatatataccgttgcaacgcacgggcctctaactagtatataattatatatatttgtgtggataagaccttcatatcgaatttcgcaccggacccctgaaaagccaggaacggccctgagactcatcgaccatcgttcgcgccggcggatgcgcaccaagagtgtttgcggggccttgcggttttgaag

SEQ ID NO: 63425 - DNA, 2060 bp, Zea Mays
gtcaaatatttgataatatatctctactactacttaagatagtattgtaggcgttcacagtcgacatgttctgcctcctcccatcacgcgtccgcgtccgcagctctgccccaccgcgcctccgccgccgcaatccgcgcccgcatcccaccatccccgtgcggctccttcgccgtgatgctcgcccacgcatgatagaaggcacacccgcatctcgattcccgccaccacaatctttgccccttgctgacttcgatggaaggcgtaccgctcgctctcacctgcctgtgccccgcgacgcccacccctccccattgctggggccaggcaaggatcatttccaccgtcgcaaaccaccgatcccgcaaaacggcgccgccatcctgctcgtccctaaccaccgcctacagatggattcccctcccccactgcgcacaacagatggctccgcgcatctcgtgaacacagcgggccgccggcggataagcacgcagcagctcaccatgcctgggtcgccaacaaacccgcccctctccttctcatccccacctgccagtgtaggagaagaggacggaggttagcagatctcgtcgcgctggtggagatgaccgaagccgcggagtgcgaggaggagcgggacctgtttgccgatgcataggccagcgaggtgtatgattgttagcatccggacggtgtggccgcggggctcgagctgctgaattcgatctgcgcggtgcacaggtcagcgaggtgtatgattgttagcatcggtgcggtgtcgtagctggtggaattgttgccgaagctagcgacggagtgtgtcgagccggctttggacatcttggatgccctgtctgcggttccagaggggaggatggttcttaaggattgtctgcagacgatacccaatgctgtccggttgctgatgagagtttcagaggcatgcactcgacgagctctgtcgatgttgtggccggtgtgtcggatggctccggaagaatgcgcacctgctgcagtggaggctgggttggcggcgaagcttcagcttgtcatccaaagtggttgtgcgctggagctgaagcagaaggcgtcggagctgctcaagctgtgccgcctcaactacaccgacaccccctccatctccaagtgcaaactcacaaggacaattcagtgagatatgcaaatgatgctggtctgatctgatttggttcgatgatgcgtggtttgtcgattgaccttgctgagtttagagttccgaggaaatggaattggcaaattgacgaatgatggcaagactggtggttaccacaacaattttcggggagacaagaagcgatgcagcctaatgactagcaagttagatggcaagcaggcggggtgtacatgcaaattgttgagaatttgatcagctcaataagcacatgaggttgggtgatgacagatacttgtagaagtggcaatggtattacagaagccattcatttcgttgaatggggtgagaaaggaggacgtcagtttcttactcctgctggaattttaacatttaacagaaatagcatgagcgccaaagataaggctacgaggaaggatcagatcgatcttcgggtgggctgtctgaggctgacatctagaagatggtgcaagaagctaaactgcgtgcctagaagaatcaggaacggaaaagccctcatcatctaatctaattcgtttgtccattattttgctgagaagtccatccctcgataagtgttcccttcatgagtttataacaccaactccaacatactcactcacctctttcagtctgttcaaagcattgcttgccaattaacagagtaacgatttattatctgcaaatttaaatcatgttagatatataccgttgcaacgcacgggcctctaactagtatataattatatatatttgtgtggataagaccttcatatcgaatttcgcaccggacccctgaaaagccaggaacggccctgagactcatcgaccatcgttcgcgccggcggatgcgcaccaagagtgtttgcggggccttgcggttttgaag

SEQ ID NO: 63426 - DNA, 2208 bp, Zea Mays
ttttatatgtcaaatatttgataatatatctctactactacttaagatagtattgtaggcgttcacagtcgacatgttctgcctcctcccatcacgcgtccgcgtccgcagctctgccccaccgcgcctccgccgccgcaatccgcgcccgcatcccaccatccccgtgcggctccttcgccgtgatgctcgcccacgcatgatagaaggcacacccgcatctcgattcccgccaccacaatctttgccccttgctgacttcgatggaaggcgtaccgctcgctctcacctgcctgtgccccgcgacgcccacccctccccattgctggggccaggcaaggatcatttccaccgtcgcaaaccaccgatcccgcaaaacggcgccgccatcctgctcgtccctaaccaccgcctacagatggattcccctcccccactgcgcacaacagatggctccgcgcatctcgtgaacacagcgggccgccggcggataagcacgcagcagctcaccatgcctgggtcgccaacaaacccgcccctctccttctcatccccacctgccagtgtaggagaagaggacggaggttagcagatctcgtcgcgctggtggagatgaccgaagccgcggagtgcgaggaggagcgggacctgtttgccgatgcataggccagcgaggtgtatgattgttagcatccggacggtgtggccgcggggctcgagctgctgaattcgatctgcgcggtgcacaggtcagcgaggtgtatgattgttagcatcggtgcggtgtcgtagctggtggaattgttgccgaagctagcgacggagtgtgtcgagccggctttggacatcttggatgccctgtctgcggttccagaggggaggatggttcttaaggattgtctgcagacgatacccaatgctgtccggttgctgatgagagtttcagaggcatgcactcgacgagctctgtcgatgttgtggccggtgtgtcggatggctccggaagaatgcgcacctgctgcagtggaggctgggttggcggcgaagcttcagcttgtcatccaaagtggttgtgcgctggagctgaagcagaaggcgtcggagctgctcaagctgtgccgcctcaactacaccgacaccccctccatctccaagtgcaaactcacaaggacaattcagtgagatatgcaaatgatgctggtctgatctgatttggttcgatgatgcgtggtttgtcgattgaccttgctgagtttagagttccgaggaaatggaattggcaaattgacgaatgatggcaagactggtggttaccacaacaattttcggggagacaagaagcgatgcagcctaatgactagcaagttagatggcaagcaggcggggtgtacatgcaaattgttgagaatttgatcagctcaataagcacatgaggttgggtggtgtcctgaatgatatggggctagactcactgtattggttatgtagacaacacccatatcggcatataagctcaacttcgtatcagcagaggaaaacatacattgtggaaataaattaattatggtctcagattcaagatatgacagatacttgtagaagtggcaatggtattacagaagccattcatttcgttgaatggggtgagaaaggaggacgtcagtttcttactcctgctggaattttaacatttaacagaaatagcatgagcgccaaagataaggctacgaggaaggatcagatcgatcttcgggtgggctgtctgaggctgacatctagaagatggtgcaagaagctaaactgcgtgcctagaagaatcaggaacggaaaagccctcatcatctaatctaattcgtttgtccattattttgctgagaagtccatccctcgataagtgttcccttcatgagtttataacaccaactccaacatactcactcacctctttcagtctgttcaaagcattgcttgccaattaacagagtaacgatttattatctgcaaatttaaatcatgttagatatataccgttgcaacgcacgggcctctaactagtatataattatatatatttgtgtggataagaccttcatatcgaatttcgcaccggacccctgaaaagccaggaacggccctgagactcatcgaccatcgttcgcgccggcggatgcgcaccaagagtgtttgcggggccttgcggttttgaag

SEQ ID NO: 63427 - DNA, 3233 bp, Zea Mays
ctcctgttccgaagttgcccgagtccgccgctccactcctccgtgattccatccatcggtctgacccgctaggtgctagtgccggcagcccgccactcctccgctcgcccgggtcctgacgctctcatccactgcagtcgccggcaccgcttgcagccgcagccgccggaagcttgttgtagctcgctagctaaacggtcagagccgagctggctccgtacccacgcagccacgcttactccgatcctccaaaatcgcggcgccactaatctaaagccctaaacccatgacgcagccgccgcaccacctccctctccatcgccagtaccccagcctcgcctccgtcgcctatggggcgacagcctaagccgcccgcgtccccatccccaccgccgtgcccgccctcggactcggacccggacccaggcagcggcttcgaccccatcgaggagtggctcgtggacttcgacccggccatgtcgagcgagctagaggcaaagggccccgaactcgctgagcaagcggcggcggttccgcttacgctggagacggcggcgcaaaagagcttcgagctcgagtttggtgtgaaggaccagaaggtcgaggtggtgagcagcgaattggacgggctgcttgccccggatcagcttctggtgtctgggatcggcgatttggccgtgagagaggatattccagaggaagcggttgctatgaagatggctgccacaccgcctgcagctgctgatactgatatgaataccactgtatccgttgaagtggaatcggaaggtggcaaagaagggcaggaggcaccggccgcacctgctgatgctgagatgatgaataccatggtgtccgtggaagtggaagctcaaggtggcaaggaagggcaggagagcagcgatgaagagtcggaatcagagagtagcgaggatgatgacgagctgtcatccagcgaggattcctcaagcagcgaggacgagaaagagcagggggtcaacaaggatgaggaatcaagtgaagcctcaagcagcgaagaggaagggctggaagttaggaggcatggtggtaaggctgataacctgcagagcctcctcgaggaaggcgagttgatgatggggagcgatgtggagaatgaggaacaaaagggaggcaccaagtccaaatatgaagcagaggtatttgagttgcagtatcctatgagttgcgtcttcttttgatacttattaggtttggttttcttgctacgatactgtgttaatcatttgtgaatgggttgtcactatgattctagatagtgcaattacatttaaacaagttttattatgcagttaattttcaagaatagcctattgtttgaatccaaattaaggttatgcttatgatgttaaattggttctaacagatactcttattttttttgctaccaggatctacaaaacgacataagcagttttcaacgttcttatttatttgcttacatttgtatttgtatgcatcttctaatgtcgatatacaccacaggttcttccaccagtcccaaaaattgaaatacagttggaaccacatcatcagactcttccagtagggactatttcagctataatgggtgaaagagtaattgttgaaggttcagtccaacacaaccccctgaatgagggttcaattctctggataacagaaagtaggatgccgcttggtatagttgatgagttgtttggacctgttaagaacccgtactaccttgtgcggtacaactctgaggaagaggtacctgctgggatcagtgcaggaaccgatgtctgttttgtagcggagtttgcagaccacatcctgaatatgaaggagctctatgcaaaaggctatgatgaatctgattctgtagacaaagatgcagaagatttacctgatttctctgatgatgaaaaggaggctgagtacaaacggtcattacgtcaagcaaaaaggcagactgatagacagcacgagcctatgaagacttcttgttacatgaagggatcacagcctagaggtagcggaatacggaagcccatgccgccaaggaacctggatacatcaacacgaggtcatcagccacaacctcattttcgccgctcagatatggctcctgcaggtactgaaaatacagcacgttcattgggtcctcaaaatgcacctatgattgctccaacaatgttgcagcctggcccaatgaaccctgctgtgccaccacctgttcctcttgcaaatcagatgggtggctgcttcatgaacctggcacagcagcagctcttaccgcagcagcctaatatggtttggcctggtggatttccacagcctcctcttcccaacatgggggtagatggagctgcactcgccgccaacatcatgcagaacctcctcgcaggagccagccaattccagcatcagtttcagaacctgaacttcagtggcgcaggagccaaccagttcccgcagcagtttcagaaccagaacttcagtggcggcacaggagccaaccagttcccgcagcagtttcagaaccagaacttgagtggcccagggaccaaccaattccagcagcagtttccgaaccagaacttcagtggcttcccaaaccaaatgcccatgccctttcttcagaccatgcaccagaccggaatgcctgcaaatccaatgccgttcggtggcagaccaccagcgaaccctccatctggtccagcgtctattgcccctatggggcaaggcaactttggtcagcctccaaatccacaaggatttacgattccggcgccacccggtgaagatgggaaacaaggctcgcctccgcagttcagttccaggcagtttcatcaagggagctcgtcatcctttggccggggaaggacgcagcaccgcggtggccggcattcctatggcagaggtggcagaggcggccggcaccccagataggtatctggagcgttgcccccggtgtagattcagtatgagtgttccagtcataatcgagacactaaagattatgtaataccagaagtatgtttcttgtaatgttgcttgctgagtggattggacatcccgtcgaatgacagcgtgttgtaatacacttcctgcgcccagtatgcgtatctctggctccatgtcaccatgatctagtggaaagaggataatttttcttctcatgcaaaggaaattggagtgcaaagaaactcttctatttataatggtgtgac

SEQ ID NO: 63428 - DNA, 2856 bp, Zea Mays
ctcctgttccgaagttgcccgagtccgccgctccactcctccgtgattccatccatcggtctgacccgctaggtgctagtgccggcagcccgccactcctccgctcgcccgggtcctgacgctctcatccactgcagtcgccggcaccgcttgcagccgcagccgccggaagcttgttgtagctcgctagctaaacggtcagagccgagctggctccgtacccacgcagccacgcttactccgatcctccaaaatcgcggcgccactaatctaaagccctaaacccatgacgcagccgccgcaccacctccctctccatcgccagtaccccagcctcgcctccgtcgcctatggggcgacagcctaagccgcccgcgtccccatccccaccgccgtgcccgccctcggactcggacccggacccaggcagcggcttcgaccccatcgaggagtggctcgtggacttcgacccggccatgtcgagcgagctagaggcaaagggccccgaactcgctgagcaagcggcggcggttccgcttacgctggagacggcggcgcaaaagagcttcgagctcgagtttggtgtgaaggaccagaaggtcgaggtggtgagcagcgaattggacgggctgcttgccccggatcagcttctggtgtctgggatcggcgatttggccgtgagagaggatattccagaggaagcggttgctatgaagatggctgccacaccgcctgcagctgctgatactgatatgaataccactgtatccgttgaagtggaatcggaaggtggcaaagaagggcaggaggcaccggccgcacctgctgatgctgagatgatgaataccatggtgtccgtggaagtggaagctcaaggtggcaaggaagggcaggagagcagcgatgaagagtcggaatcagagagtagcgaggatgatgacgagctgtcatccagcgaggattcctcaagcagcgaggacgagaaagagcagggggtcaacaaggatgaggaatcaagtgaagcctcaagcagcgaagaggaagggctggaagttaggaggcatggtggtaaggcgagttgatgatggggagcgatgtggagaatgaggaacaaaagggaggcaccaagtccaaatatgaagcagaggttcttccaccagtcccaaaaattgaaatacagttggaaccacatcatcagactcttccagtagggactatttcagctataatgggtgaaagagtaattgttgaaggttcagtccaacacaaccccctgaatgagggttcaattctctggataacagaaagtaggatgccgcttggtatagttgatgagttgtttggacctgttaagaacccgtactaccttgtgcggtacaactctgaggaagaggtacctgctgggatcagtgcaggaaccgatgtctgttttgtagcggagtttgcagaccacatcctgaatatgaaggagctctatgcaaaaggctatgatgaatctgattctgtagacaaagatgcagaagatttacctgatttctctgatgatgaaaaggaggctgagtacaaacggtcattacgtcaagcaaaaaggcagactgatagacagcacgagcctatgaagacttcttgttacatgaagggatcacagcctagaggtagcggaatacggaagcccatgccgccaaggaacctggatacatcaacacgaggtcatcagccacaacctcattttcgccgctcagatatggctcctgcaggtactgaaaatacagcacgttcattgggtcctcaaaatgcacctatgattgctccaacaatgttgcagcctggcccaatgaaccctgctgtgccaccacctgttcctcttgcaaatcagatgggtggctgcttcatgaacctggcacagcagcagctcttaccgcagcagcctaatatggtttggcctggtggatttccacagcctcctcttcccaacatgggggtagatggagctgcactcgccgccaacatcatgcagaacctcctcgcaggagccagccaattccagcatcagtttcagaacctgaacttcagtggcgcaggagccaaccagttcccgcagcagtttcagaaccagaacttcagtggcggcacaggagccaaccagttcccgcagcagtttcagaaccagaacttgagtggcccagggaccaaccaattccagcagcagtttccgaaccagaacttcagtggcttcccaaaccaaatgcccatgccctttcttcagaccatgcaccagaccggaatgcctgcaaatccaatgccgttcggtggcagaccaccagcgaaccctccatctggtccagcgtctattgcccctatggggcaaggcaactttggtcagcctccaaatccacaaggatttacgattccggcgccacccggtgaagatgggaaacaaggctcgcctccgcagttcagttccaggcagtttcatcaagggagctcgtcatcctttggccggggaaggacgcagcaccgcggtggccggcattcctatggcagaggtggcagaggcggccggcaccccagataggtatctggagcgttgcccccggtgtagattcagtatgagtgttccagtcataatcgagacactaaagattatgtaataccagaagtatgtttcttgtaatgttgcttgctgagtggattggacatcccgtcgaatgacagcgtgttgtaatacacttcctgcgcccagtatgcgtatctctggctccatgtcaccatgatctagtggaaagaggataatttttcttctcatgcaaaggaaattggagtgcaaagaaactcttctatttataatggtgtgac

SEQ ID NO: 63429 - DNA, 3027 bp, Zea Mays
cgagcgcgccgccagccctcctgttccgaagttgcccgagtccgccgctccactcctccgtgattccatccatcggtctgacccgctaggtgctagtgccggcagcccgccactcctccgctcgcccgggtcctgacgctctcatccactgcagtcgccggcaccgcttgcagccgcagccgccggaagcttgttgtagctcgctagctaaacggtcagagccgagctggctccgtacccacgcagccacgcttactccgatcctccaaaatcgcggcgccactaatctaaagccctaaacccatgacgcagccgccgcaccacctccctctccatcgccagtaccccagcctcgcctccgtcgcctatggggcgacagcctaagccgcccgcgtccccatccccaccgccgtgcccgccctcggactcggacccggacccaggcagcggcttcgaccccatcgaggagtggctcgtggacttcgacccggccatgtcgagcgagctagaggcaaagggccccgaactcgctgagcaagcggcggcggttccgcttacgctggagacggcggcgcaaaagagcttcgagctcgagtttggtgtgaaggaccagaaggtcgaggtggtgagcagcgaattggacgggctgcttgccccggatcagcttctggtgtctgggatcggcgatttggccgtgagagaggatattccagaggaagcggttgctatgaagatggctgccacaccgcctgcagctgctgatactgatatgaataccactgtatccgttgaagtggaatcggaaggtggcaaagaagggcaggaggcaccggccgcacctgctgatgctgagatgatgaataccatggtgtccgtggaagtggaagctcaaggtggcaaggaagggcaggagagcagcgatgaagagtcggaatcagagagtagcgaggatgatgacgagctgtcatccagcgaggattcctcaagcagcgaggacgagaaagagcagggggtcaacaaggatgaggaatcaagtgaagcctcaagcagcgaagaggaagggctggaagttaggaggcatggtggtaaggctgataacctgcagagcctcctcgaggaaggcgagttgatgatggggagcgatgtggagaatgaggaacaaaagggaggcaccaagtccaaatatgaagcagaggttcttccaccagtcccaaaaattgaaatacagttggaaccacatcatcagactcttccagtagggactatttcagcttgatggattaaactactctattccggacatcaaacaaatagtgaggagaagattagggaggttttccccaaaccaaacaccccccatatagttgctaaaagcagcgggacttttttgtggaagataatgggtgaaagagtaattgttgaaggttcagtccaacacaaccccctgaatgagggttcaattctctggataacagaaagtaggatgccgcttggtatagttgatgagttgtttggacctgttaagaacccgtactaccttgtgcggtacaactctgaggaagaggtacctgctgggatcagtgcaggaaccgatgtctgttttgtagcggagtttgcagaccacatcctgaatatgaaggagctctatgcaaaaggctatgatgaatctgattctgtagacaaagatgcagaagatttacctgatttctctgatgatgaaaaggaggctgagtacaaacggtcattacgtcaagcaaaaaggcagactgatagacagcacgagcctatgaagacttcttgttacatgaagggatcacagcctagaggtagcggaatacggaagcccatgccgccaaggaacctggatacatcaacacgaggtcatcagccacaacctcattttcgccgctcagatatggctcctgcaggtactgaaaatacagcacgttcattgggtcctcaaaatgcacctatgattgctccaacaatgttgcagcctggcccaatgaaccctgctgtgccaccacctgttcctcttgcaaatcagatgggtggctgcttcatgaacctggcacagcagcagctcttaccgcagcagcctaatatggtttggcctggtggatttccacagcctcctcttcccaacatgggggtagatggagctgcactcgccgccaacatcatgcagaacctcctcgcaggagccagccaattccagcatcagtttcagaacctgaacttcagtggcgcaggagccaaccagttcccgcagcagtttcagaaccagaacttcagtggcggcacaggagccaaccagttcccgcagcagtttcagaaccagaacttgagtggcccagggaccaaccaattccagcagcagtttccgaaccagaacttcagtggcttcccaaaccaaatgcccatgccctttcttcagaccatgcaccagaccggaatgcctgcaaatccaatgccgttcggtggcagaccaccagcgaaccctccatctggtccagcgtctattgcccctatggggcaaggcaactttggtcagcctccaaatccacaaggatttacgattccggcgccacccggtgaagatgggaaacaaggctcgcctccgcagttcagttccaggcagtttcatcaagggagctcgtcatcctttggccggggaaggacgcagcaccgcggtggccggcattcctatggcagaggtggcagaggcggccggcaccccagataggtatctggagcgttgcccccggtgtagattcagtatgagtgttccagtcataatcgagacactaaagattatgtaataccagaagtatgtttcttgtaatgttgcttgctgagtggattggacatcccgtcgaatgacagcgtgttgtaatacacttcctgcgcccagtatgcgtatctctggctccatgtcaccatgatctagtggaaagaggataatttttcttctcatgcaaaggaaattggagtgcaaagaaactcttctatttataatggtgtgac

SEQ ID NO: 63430 - DNA, 1991 bp, Zea Mays
cccttcctgcacagtacagtggtacttgaagtcgaaggcagcgcagcaggtacgccaggacgccattagcagcggttggccaccagcccaccacccgacgccggaggcccggaggaggaggcggcgatggcggggaagcacgggcgcaacggcttcgacgacgacaacgtcaaccctttcgcgggaggaagtgttccacctgccaccaattctcgtctctcacctctatcacatgaaccggctgatttctacaatgtggacattcctctcgactcatcaaaggatctgaagaaaaaggagaaagaactccaggctatggaggctgagctaaacaaaagagaacgggtgtgttggctttcagtctttctgctccttttgccagttatagcagttctgacaaataagatgcaagttcatgtttcacaaactgctatatgtacaatttgtctcttgtacttaatatgttgccaaagcattcctagtactcgaatatttcatatgataggcttatcttgctttgcatattacttgtattgattaagaaaaatcttccttctgcatacaattgcattgagacggccatgttgctttctatttattgtttgttgatcttttagggatattttgatgttttttctgagatattggggtattctgagtcaatgaaggaaatgtcgtttttgctgcttctcatgtgtttgagactttgaatccatgttccatctgtttatttactttgtacacaattctttatttaaaatgttgatatgattcttttttattcatcttcattggcgtaggaattgaaaaggaaggaagaggcggcatcccgagctggcgttgtgatagaagagaaaaactggcctccctttttccccctcatccaccacgacatttccaatgaaatacctatccatctacaaaggatgcagtaccttgcattctcatcattcttgggattgatagcgtgtctcttttggaatgtcatagcaactacaacagcatggattaaaggggaaggtgttatgatctggctgcttgccattatctacttcatatctggtgcgcctggggcttatgtgttatggtatcgacctctttataatgcaatgagaactgagagcgctttgaagtttgggtggtttttcctattttacatgattcatataatattctgtgtgtgggcagctgtggctcctccattccctttcaaaggaaaatctttggctgggattttaccagcaattgatgtcataagcaagaatgctattgtcgggatattttacttcgttggatttggcttgttctgccttgaatcacttctgagcatcggtgtcattcagcaagtctacatgtatttccgtggaagtggaaaagctgcagagatgaaacgtgaggcagcacgtagtgctctaagttcagccttctgatgaacatagggcggtctgattagagcagtagatggataagggaagggaacgagatgtgccaattaagccacgcggtcttgtacatcactgcagtacgtggatttggatcgctgaaagcgtacagctgatcgtctttttgctcttctgtaaaatatgaacaatcatcatatggtccggatgcgtcagggtgttggtttcatttcttgccatggtttagatgtggttgatagggaaaacggtgaagtatttttttggagcagcgaatataatgtatcttcatcgtacttttacatgtgagtgtaatagcttatttcttgtggtaggaatacagctttgctgtgttttcgggaatgacatttgttgtgtaaggttattcacaatggctatttcataacactctttccaatactgccacattatcaagagtgtcatgaaactaagaataaaaaaatgtctcttaatacaaaatttcacttcactatttcataaattagcatactaattaaatgctgtaactaaatagccaataaaaatcagtaaaacatgtgaagataaaacaaa

SEQ ID NO: 63431 - DNA, 2230 bp, Zea Mays
cgaatccctgacgcatcggcccaccgatgccatcgccaatacaacgtcgagcatttcccgtggaccacgtccacgcgagtgatctccactggcataccccgcctgcgaagaaggacgcttctgaagttaagcgaagcaaggttgagataatcaaggaaaagagcaacttcctccggtaccctttgaacgaggagttggtctcagaggccccaaatatcaacgagagtgctgttcagctgatcaagtttcatggaagctaccagcaaactgaccgagatgtccgtgggcagaagaattactcgtttatgctccggacaaagaacccttgtgggaaagttccaaaccaactttatttagctatggatacactagctgatgagtttggcatcggaacactccgcctgacgaccaggcagacattccagttgcacggtgttcttaagaagaacttgaagactgttctaagcactgtcataaagaatatgggctcaacattgggtgcttgtggcgatctcaacaggaatgtacttgctcctgcagcgccttttgtcaaaaaagatatcctttttgctcaacaaacagcagagaacattgcagcactccttacaccacagtccggggcttattatgacctgtgggtggatggcgagaagataatgtcagctgaagagcctcctgaggtgacaaaagcccgcaatgacaactcgcatggaacgaacttccctgactctccggaaccaatctatggcacccagtatctaccaaggaagttcaaggttgcagttaccgcggctggtgataactctgttgatattctgaccaatgacatcggtgttgttgttgtttcagatgatgcaggagaacctattggctttaacatctatgttggtggtggcatgggaaggacacaccgagtggaaactacattccctcggctggctgatccattgggttatgttccaaaagaagatatattatatgctataaaggccatcgtcgtcacacagagggaaaatggaagaagggatgaccgcaagtatagtaggatgaagtatttgattgaccgttggggaatagataggtttcgggctgaagttgaaaaatattacgggaagaagtttgaaagtttccgaccattgccagagtggcagtttaacagctaccttggctggcaagaacagggtgatgggaaattattctatggagtgcatgttgataatggtcgtgttggtgggcaagcaaagaaaactctacgagagataattgagaagtataatttggatgttagtattaccccaaaccaaaatcttattttatgtgggattgatcaagcgtggagagaacccataactacagctcttgcacaagctggcctgctggaaccgaaggatgtcgaccccctgaatttaactgccatggcatgccctgccttgccactgtgccctttggcacaaacagaagctgaacgggggatcttacccattcttaaacgaattagagcagtcttcaataaggttggtatcaaggattcggagtctgtggttgtgaggataactggatgccctaatggatgcgctagaccatatatggcagagcttggttttgttggtgatggcccaaaaagttaccagatctggctgggtggaacaccaaaccagagtacgctagcagaatcatttatggacaaagtgaagcttgatgacatcgagaaggttttggaacctctctttacctattggaatggcacacgccaggaaggcgaatcttttggaagcttcacaaaccgaacaggattcgacaaattgaaagaggtagtgaataagtgggcagagtcaccatcagccgcatgaagatttcgctttcgttggataaaatcccaggctcgcagcacaattttggccacgggattaattatatgacgaaggaaatccagataagccgagaaatggaaaaaggaagactcgggttgtgagttgctatgtttgttgggttgagtgatcgaatttttttgtgtgtgctctcaaggagacctctgtgaacttgaataaactccacacggagttgtgccaaattagaccgaggcgtccgtgaacttgaatcagttcctcgggatgttgtgcctgagaataaatcccaccgaggcgtctgtgaacttaattcaattcgtcaggaagctgtgccttagaataaattcgacgggtgtccaattttcttgtcattctagcgagat

SEQ ID NO: 63432 - DNA, 2224 bp, Zea Mays
tcactttgtgttcgtgtggtgcggctgcgggcgcggaaagggaaagcgaggaaggagaggggaatccacctttgggcagcgaaaaagacgtccagcctgcgaagaaggacgcttctgaagttaagcgaagcaaggttgagataatcaaggaaaagagcaacttcctccggtaccctttgaacgaggagttggtctcagaggccccaaatatcaacgagagtgctgttcagctgatcaagtttcatggaagctaccagcaaactgaccgagatgtccgtgggcagaagaattactcgtttatgctccggacaaagaacccttgtgggaaagttccaaaccaactttatttagctatggatacactagctgatgagtttggcatcggaacactccgcctgacgaccaggcagacattccagttgcacggtgttcttaagaagaacttgaagactgttctaagcactgtcataaagaatatgggctcaacattgggtgcttgtggcgatctcaacaggaatgtacttgctcctgcagcgccttttgtcaaaaaagatatcctttttgctcaacaaacagcagagaacattgcagcactccttacaccacagtccggggcttattatgacctgtgggtggatggcgagaagataatgtcagctgaagagcctcctgaggtgacaaaagcccgcaatgacaactcgcatggaacgaacttccctgactctccggaaccaatctatggcacccagtatctaccaaggaagttcaaggttgcagttaccgcggctggtgataactctgttgatattctgaccaatgacatcggtgttgttgttgtttcagatgatgcaggagaacctattggctttaacatctatgttggtggtggcatgggaaggacacaccgagtggaaactacattccctcggctggctgatccattgggttatgttccaaaagaagatatattatatgctataaaggccatcgtcgtcacacagagggaaaatggaagaagggatgaccgcaagtatagtaggatgaagtatttgattgaccgttggggaatagataggtttcgggctgaagttgaaaaatattacgggaagaagtttgaaagtttccgaccattgccagagtggcagtttaacagctaccttggctggcaagaacagggtgatgggaaattattctatggagtgcatgttgataatggtcgtgttggtgggcaagcaaagaaaactctacgagagataattgagaagtataatttggatgttagtattaccccaaaccaaaatcttattttatgtgggattgatcaagcgtggagagaacccataactacagctcttgcacaagctggcctgctggaaccgaaggatgtcgaccccctgaatttaactgccatggcatgccctgccttgccactgtgccctttggcacaaacagaagctgaacgggggatcttacccattcttaaacgaattagagcagtcttcaataaggttggtatcaaggattcggagtctgtggttgtgaggataactggatgccctaatggatgcgctagaccatatatggcagagcttggttttgttggtgatggcccaaaaagttaccagatctggctgggtggaacaccaaaccagagtacgctagcagaatcatttatggacaaagtgaagcttgatgacatcgagaaggttttggaacctctctttacctattggaatggcacacgccaggaaggcgaatcttttggaagcttcacaaaccgaacaggattcgacaaattgaaagaggtagtgaataagtgggcagagtcaccatcagccgcatgaagatttcgctttcgttggataaaatcccaggctcgcagcacaattttggccacgggattaattatatgacgaaggaaatccagataagccgagaaatggaaaaaggaagactcgggttgtgagttgctatgtttgttgggttgagtgatcgaatttttttgtgtgtgctctcaaggagacctctgtgaacttgaataaactccacacggagttgtgccaaattagaccgaggcgtccgtgaacttgaatcagttcctcgggatgttgtgcctgagaataaatcccaccgaggcgtctgtgaacttaattcaattcgtcaggaagctgtgccttagaataaattcgacgggtgtccaattttcttgtcattctagcgagat

SEQ ID NO: 63433 - DNA, 1726 bp, Zea Mays
cccgtacagtcctatcaactagtgaacagtggtgcaatgcaagtgcaagcgtggaagtaactggggcagatcggctttgacgatgtgaaggaatgccctcacctgtgcacgctagcttacgattatctcaggaagaacaagggttacgaagagaacatttttgcgttctttcagaatagcatggatcccgagcccctgattgtgaagtttatcgaggagcttgacaaatgcatagttggctacttctccttccattggaaatatgccacttacataattacccaggttctcacggtagaaggtgcgactaaaagaaagttcaagaattttgtgttagaggccaccagagcattttggtctggagcagcagcgaattcagtgatcgtggaggcagatgcattcaaggaaactgatgtaatctaccgagccattagctctagaggccaccacaatgacatgctgcagactgcagagctggtgcaccagtcatccttggacgcagcctcgtcgctcctcgtcactgcactcaacgaaggccgggacgtgatcatggatggcactctgtcctgggagccgttcgtgcagcagacgatagccatggccagggccgtgcaccggcagcggtaccgcatgggatgcggctacaagctcacagacgatgggacaataaccgaggagtactgggagccggttgaggactctaacactgacgaggaaaacgaagtaccggcaaggaagccctaccggatcgagctcgttggtgtggtctgtgacgcatatctagcggttgtcaggggaatcaggagagctgtagtcactgggagagcagtgagggtgaagtcgcagctgcagtctcacaagcgatttgctacggctttcaacagctactgcagcctcgtcgacaacgccaggctctacagcaccaacaccttgggtgttcctaaggtgagccagcttaacctggtgaactaagcatgacaaaacggaaccatttcaggacgcatgaatttcagaacgatctctacagacatcttgcacggggtagttaaattcctgcggcatgtcgttcttgtcttccaacttccaagcatggccgccaacttccttccactgctattatcatgtttggtgagagccgatcgatcccgtgttgcagctgataggatggaaggatggcgagagcagcttactggtggatcccgaagaaatcggctgcttggacaggctacgaagcttgaacgaggaggccgactgcgtccatgagctatacgccgacggccaaccgacaggaggctcgtcgtcagcgtggcaggacctgctggtcatgtcgccgtccagggtgtcggcgcagcgggagctcaaggctgccatcgagaggaacgaggggcgcttcgtcaaaccggcatagccgtgtagctgctacgttcgttcgttagttcggttccaacttccaaaggaatcgttccctagccggattgttgatcagctggaacgatttctgaatagattccttcgtaaccgaacatgcccttatcaggcgcatcatccaaaaacggggaaagatgaagctaatgtgatgctttgattgtggaggtggcctatcttcttcttttgtttccaaacatacgaatttcgcaatgcattttgtatgatgcgatccaaaacgctttgcaccgcaaatttattgcttgagaaaactagtttgttagcatgaagtatcagtgca

SEQ ID NO: 63434 - DNA, 2200 bp, Zea Mays
ccctcgttgacaccgaaccaaacacataaatctgaccggcgcggtggtcagcactcagcattagatatcgtggggcacctcgatccaaagataagcctggacggtacggaatggcacgtcagggcgggaccgccacggcgccaccgcttgaattgaaatcgtccagctgctagctcgagcggatagcagtatagcaccacgccgttgacccttggcgctttgcgagctgctgctaccgccagtccgtcagccacccaccgcgcgtgatcagattggaggcagcgagagcgagtccacgaccacgagcgaaccgagttgtccgcgcccggcgcctcgtcatctcccacctcctctgcggctctgcctcaggtcgggtcccggagcgtttctcgcctacttcgccttgccccctccccacgtcgcggaacgatcggtgcgacggtgccccggccgaacccattctgcctggcacctgcggggtatgatcctgggcggcctgtgccccgcccccgcatcaccttgcctggcgtcgcgctcgaccgcgcggcctcctcagccctgaacaccgcccgcccgcctgccgggtgtgagaggataggatcataggaggagtaaggagcggggcggcggcggcgacggcatgagggccgaggcgacgggctccgcggcgaagctgctggcgccgcggatggtggtgtccgcctccagccgcgtccaggagctggagaggttctcgcattacgtcgctaggcagatcggctttgacgatgtgaaggaatgccctcacctgtgcacgctagcttacgattatctcaggaagaacaagggttacgaagagaacatttttgcgttctttcagaatagcatggatcccgagcccctgattgtgaagtttatcgaggagcttgacaaatgcatagttggctacttctccttccattggaaatatgccacttacataattacccaggttctcacggtagaaggtgcgactaaaagaaagttcaagaattttgtgttagaggccaccagagcattttggtctggagcagcagcgaattcagtgatcgtggaggcagatgcattcaaggaaactgatgtaatctaccgagccattagctctagaggccaccacaatgacatgctgcagactgcagagctggtgcaccagtcatccttggacgcagcctcgtcgctcctcgtcactgcactcaacgaaggccgggacgtgatcatggatggcactctgtcctgggagccgttcgtgcagcagacgatagccatggccagggccgtgcaccggcagcggtaccgcatgggatgcggctacaagctcacagacgatgggacaataaccgaggagtactgggagccggttgaggactctaacactgacgaggaaaacgaagtaccggcaaggaagccctaccggatcgagctcgttggtgtggtctgtgacgcatatctagcggttgtcaggggaatcaggagagctgtagtcactgggagagcagtgagggtgaagtcgcagctgcagtctcacaagcgatttgctacggctttcaacagctactgcagcctcgtcgacaacgccaggctctacagcaccaacaccttgggtgttcctaagctgataggatggaaggatggcgagagcagcttactggtggatcccgaagaaatcggctgcttggacaggctacgaagcttgaacgaggaggccgactgcgtccatgagctatacgccgacggccaaccgacaggaggctcgtcgtcagcgtggcaggacctgctggtcatgtcgccgtccagggtgtcggcgcagcgggagctcaaggctgccatcgagaggaacgaggggcgcttcgtcaaaccggcatagccgtgtagctgctacgttcgttcgttagttcggttccaacttccaaaggaatcgttccctagccggattgttgatcagctggaacgatttctgaatagattccttcgtaaccgaacatgcccttatcaggcgcatcatccaaaaacggggaaagatgaagctaatgtgatgctttgattgtggaggtggcctatcttcttcttttgtttccaaacatacgaatttcgcaatgcattttgtatgatgcgatccaaaacgctttgcaccgcaaatttattgcttgagaaaactagtttgttagcatgaagtatcagtgca

SEQ ID NO: 63435 - DNA, 2962 bp, Zea Mays
catgcctacgtgcaggatggaagttctggcgaggtttacaaagtttctatggagcgtgaggaaagacgcctaactgagcttgctcagaagatactagagacatttgtgctatctcatatatttagcggaattgaagttgcataccaagaagctgttgctttgaaaaggcaagaagagcttattcgtgaagaggaggaggaggctggacttcttgaacatcagatgaaggggaagcgtggtggtggtgcaaatgaaaaggacaagcgtgccaagaaaaagcagaccaagcaaaagaagaacaaccgtaaggctaaagacaaggaaagagatgtgaaatgtgaggttaaaattctggaaaggcttcatgatgaaactgttattgataacagtgatggcttaccagctaaggtggaagtgatagccaaggttgatgccttggaagaaggttcttcagatgggtcagacatgccaaatagaggaaaaaatcagtgtaacaagggcttaagcattagtcttgccaaagaaggtgatggtcttccctccacctctagtgttacaggtggttcaggccgcaatagttctggctgctgcacagctccaaaactggatcaggatactgttctgcttaccttgagagataaacttcgtaagctagggcagcgtctgcaagagaaaaacattgaggggcagaaacttctcaaagctcattttgaagctagggacacaaaagtgaaggtagaagaatcttctgactcatctaattctttggataggccacctgatgttccagagagctcgatgcattcttcagaagatacagttgatcttaaagttaatggaacaccaaataaggatgcctctgtggtcaaccctgtcctggaggaatctgtttcaggcataccagtcactgcaaagaatgaatccttgccttctgccagaacaaaagaaggcccagtttcaaacaaagataacgcatcaagtttgaaaatgaaaaccatggcatcttgcttgaaattgcatccagctgatgtggataaagatgccccttttccttctaaatcaccacgaatcaatagggctgctccagttccctcgaagttaccttcggctgataaagctactccagttcttccaaaatcatctctgtcagtaaacaaagcagctctggtccgtcccaaatctccagcagttgacaaagcaactccagtttgtcctgaatctccagcagttgacaaagtaactccagttcgtcccagatctccagcagttgacaaagcaactccagttcgttctcaatctccagcagttgacaaagctactcatgtttgccctcaatctccatcagttgacaaggcaactccatccattgacaaagcaactccagttcgcccaaaatctccagccatagataaagtaactccaattcctcccaaatctccaccagttgacaaagcctctccagcaccaccaaaatcactatcaggtgctaaagatgtgcctgttccttcaaggtcgctgcaaattgataggttcattccagcccccccaagattatcgcaagttgataaagctgctctgccttcttcagaacagccacatatatctccagctactaattctgaagcccaaggggcaactacttctaggaaggtcacagccagctcagttttggaggttgctgcagcatcgaggccttcaagtgctcctgtgttacccacaccaagatcaactgcaccagttgcttcacatattcaaacttccacgttgctttcccgctcgatgagtgaggcagctgggagaaggtcagtaaatgatccttccttttctgccccatcttatactccccagacctaccgaaatgcaataattggtaagactggtctggctactacctctgcaaaccttgcatatcagtcctattctctgggtcaagatactgctccttcacagcctctatcagcatatgcatcaagcacagcagtcatgatgcctcctgctggaagatctgatcaatcatcagctaggcatggattcaagtctgggtctggtaagctagaagcacatgacagctggcagcagtggaaaggtgataataatgttgatatgcatctctggagggatcacactacctatcaacaaatgaccaggggtcaagcgtatgaccaatctcggagggacgatacttatcagcaaacatgcagcagaggaacagaaaagttcagcaggcacgcaggactgcaagctaggcagttccaaaccgagacacccgccagccatgtctggcaccaacaacaggggcaagtggcagaagagtttccacaccttgacatcataaacgatttgcttgaggaggaccagatcaacggcagtataccagagtcatttcatcaagattacaatgtgtttggcctgccattttcaccaagaggaaacgtgtcagatatgggaatggcttctgttagaagtcctgctcggttcaattcaaccaagtatgagtatgacggtggattctcgggggcttatgacataaatgcggtcaatgggttgagggaacggcagtttccctcgttggatagttactctaatggcctgtctgacgtgagtgcatcaaagccttggctgaatggctctcccagtccatcggtgatgagccttggggttaacacaaatggataccacccccaggttgcggactaccccagtctgggaaatggggtgaacggagtctccttgtggcgccgccatgctaacgggcgctggtaatgcgaggtgcctgtatacaatcatacagatggaataatgtttgttgtaacaaatggtttcgggcctgagctgatgtgccatgtaattaaaagttttaagttttaaaagggaaagaaagcgatacatgctgcaaaatctgccccgtgatttggttaatttgattgcttttctggttaaactctgttctataacgttttta

SEQ ID NO: 63436 - DNA, 2793 bp, Zea Mays
attaggacaactttgttgctagtttctcatgcctacgtgcaggatggaagttctggcgaggtttacaaagtttctatggagcgtgaggaaagacgcctaactgagcttgctcagaagatactagagacatttgtgctatctcatatatttagcggaattgaagttgcataccaagaagctgttgctttgaaaaggcaagaagagcttattcgtgaagaggaggaggaggctggacttcttgaacatcagatgaaggggaagcgtggtggtggtgcaaatgaaaaggacaagcgtgccaagaaaaagcagaccaagcaaaagaagaacaaccgtaaggctaaagacaaggaaagagatgtgaaatgtgaggttaaaattctggaaaggcttcatgatgaaactgttattgataacagtgatggcttaccagctaaggtggaagtgatagccaaggttgatgccttggaagaaggttcttcagatgggtcagacatgccaaatagaaaaacattgaggggcagaaacttctcaaagctcattttgaagctagggacacaaaagtgaaggtagaagaatcttctgactcatctaattctttggataggccacctgatgttccagagagctcgatgcattcttcagaagatacagttgatcttaaagttaatggaacaccaaataaggatgcctctgtggtcaaccctgtcctggaggaatctgtttcaggcataccagtcactgcaaagaatgaatccttgccttctgccagaacaaaagaaggcccagtttcaaacaaagataacgcatcaagtttgaaaatgaaaaccatggcatcttgcttgaaattgcatccagctgatgtggataaagatgccccttttccttctaaatcaccacgaatcaatagggctgctccagttccctcgaagttaccttcggctgataaagctactccagttcttccaaaatcatctctgtcagtaaacaaagcagctctggtccgtcccaaatctccagcagttgacaaagcaactccagtttgtcctgaatctccagcagttgacaaagtaactccagttcgtcccagatctccagcagttgacaaagcaactccagttcgttctcaatctccagcagttgacaaagctactcatgtttgccctcaatctccatcagttgacaaggcaactccatccattgacaaagcaactccagttcgcccaaaatctccagccatagataaagtaactccaattcctcccaaatctccaccagttgacaaagcctctccagcaccaccaaaatcactatcaggtgctaaagatgtgcctgttccttcaaggtcgctgcaaattgataggttcattccagcccccccaagattatcgcaagttgataaagctgctctgccttcttcagaacagccacatatatctccagctactaattctgaagcccaaggggcaactacttctaggaaggtcacagccagctcagttttggaggttgctgcagcatcgaggccttcaagtgctcctgtgttacccacaccaagatcaactgcaccagttgcttcacatattcaaacttccacgttgctttcccgctcgatgagtgaggcagctgggagaaggtcagtaaatgatccttccttttctgccccatcttatactccccagacctaccgaaatgcaataattggtaagactggtctggctactacctctgcaaaccttgcatatcagtcctattctctgggtcaagatactgctccttcacagcctctatcagcatatgcatcaagcacagcagtcatgatgcctcctgctggaagatctgatcaatcatcagctaggcatggattcaagtctgggtctggtaagctagaagcacatgacagctggcagcagtggaaaggtgataataatgttgatatgcatctctggagggatcacactacctatcaacaaatgaccaggggtcaagcgtatgaccaatctcggagggacgatacttatcagcaaacatgcagcagaggaacagaaaagttcagcaggcacgcaggactgcaagctaggcagttccaaaccgagacacccgccagccatgtctggcaccaacaacaggggcaagtggcagaagagtttccacaccttgacatcataaacgatttgcttgaggaggaccagatcaacggcagtataccagagtcatttcatcaagattacaatgtgtttggcctgccattttcaccaagaggaaacgtgtcagatatgggaatggcttctgttagaagtcctgctcggttcaattcaaccaagtatgagtatgacggtggattctcgggggcttatgacataaatgcggtcaatgggttgagggaacggcagtttccctcgttggatagttactctaatggcctgtctgacgtgagtgcatcaaagccttggctgaatggctctcccagtccatcggtgatgagccttggggttaacacaaatggataccacccccaggttgcggactaccccagtctgggaaatggggtgaacggagtctccttgtggcgccgccatgctaacgggcgctggtaatgcgaggtgcctgtatacaatcatacagatggaataatgtttgttgtaacaaatggtttcgggcctgagctgatgtgccatgtaattaaaagttttaagttttaaaagggaaagaaagcgatacatgctgcaaaatctgccccgtgatttggttaatttgattgcttttctggttaaactctgttctataacgttttta

SEQ ID NO: 63437 - DNA, 3372 bp, Zea Mays
cgcgaccatttccgtgaaagggagaaagtggatagaccttttcgttgccttgatcgtccttatcggagagaattaatccgcatctatatgacaaatgtggaacaaatctaccgacgtttcgttgaggagcgaagaagtaaattaagcaagctcattgaggacaaaatgaaatggtccagtttccgtgctttctggtcagcaattgacccaaacaccaggcatcacatgtccagggaaaagactgagactatattgaaaattttagtgaagcaattctttgtagagaaagaagttacttccacattagtgatggactctttgtatacaagtctgaaggcacttgaataccggatgaagagcaagaaatgcaaaacaaaattagcagatttggaagaactacctgcgcctatggtccatgttgacatggacatgtttgttttggctgatgatgttatagctttgcttgagagggcagccttagaacccttgccttgtcaacctgtagcccccaaggatgacaaaacttcccaaagccgcatgaagaacctcgatcaattatattaggacaactttgttgctagtttctcatgcctacgtgcaggatggaagttctggcgaggtttacaaagtttctatggagcgtgaggaaagacgcctaactgagcttgctcagaagatactagagacatttgtgctatctcatatatttagcggaattgaagttgcataccaagaagctgttgctttgaaaaggcaagaagagcttattcgtgaagaggaggaggaggctggacttcttgaacatcagatgaaggggaagcgtggtggtggtgcaaatgaaaaggacaagcgtgccaagaaaaagcagaccaagcaaaagaagaacaaccgtaaggctaaagacaaggaaagagatgtgaaatgtgaggttaaaattctggaaaggcttcatgatgaaactgttattgataacagtgatggcttaccagctaaggtggaagtgatagccaaggttgatgccttggaagaaggttcttcagatgggtcagacatgccaaatagtgttacaggtggttcaggccgcaatagttctggctgctgcacagctccaaaactggatcaggatactgttctgcttaccttgagagataaacttcgtaagctagggcagcgtctgcaagaggccacctgatgttccagagagctcgatgcattcttcagaagatacagttgatcttaaagttaatggaacaccaaataaggatgcctctgtggtcaaccctgtcctggaggaatctgtttcaggcataccagtcactgcaaagaatgaatccttgccttctgccagaacaaaagaaggcccagtttcaaacaaagataacgcatcaagtttgaaaatgaaaaccatggcatcttgcttgaaattgcatccagctgatgtggataaagatgccccttttccttctaaatcaccacgaatcaatagggctgctccagttccctcgaagttaccttcggctgataaagctactccagttcttccaaaatcatctctgtcagtaaacaaagcagctctggtccgtcccaaatctccagcagttgacaaagcaactccagtttgtcctgaatctccagcagttgacaaagtaactccagttcgtcccagatctccagcagttgacaaagcaactccagttcgttctcaatctccagcagttgacaaagctactcatgtttgccctcaatctccatcagttgacaaggcaactccatccattgacaaagcaactccagttcgcccaaaatctccagccatagataaagtaactccaattcctcccaaatctccaccagttgacaaagcctctccagcaccaccaaaatcactatcaggtgctaaagatgtgcctgttccttcaaggtcgctgcaaattgataggttcattccagcccccccaagattatcgcaagttgataaagctgctctgccttcttcagaacagccacatatatctccagctactaattctgaagcccaaggggcaactacttctaggaaggtcacagccagctcagttttggaggttgctgcagcatcgaggccttcaagtgctcctgtgttacccacaccaagatcaactgcaccagttgcttcacatattcaaacttccacgttgctttcccgctcgatgagtgaggcagctgggagaaggtcagtaaatgatccttccttttctgccccatcttatactccccagacctaccgaaatgcaataattggtaagactggtctggctactacctctgcaaaccttgcatatcagtcctattctctgggtcaagatactgctccttcacagcctctatcagcatatgcatcaagcacagcagtcatgatgcctcctgctggaagatctgatcaatcatcagctaggcatggattcaagtctgggtctggtaagctagaagcacatgacagctggcagcagtggaaaggtgataataatgttgatatgcatctctggagggatcacactacctatcaacaaatgaccaggggtcaagcgtatgaccaatctcggagggacgatacttatcagcaaacatgcagcagaggaacagaaaagttcagcaggcacgcaggactgcaagctaggcagttccaaaccgagacacccgccagccatgtctggcaccaacaacaggggcaagtggcagaagagtttccacaccttgacatcataaacgatttgcttgaggaggaccagatcaacggcagtataccagagtcatttcatcaagattacaatgtgtttggcctgccattttcaccaagaggaaacgtgtcagatatgggaatggcttctgttagaagtcctgctcggttcaattcaaccaagtatgagtatgacggtggattctcgggggcttatgacataaatgcggtcaatgggttgagggaacggcagtttccctcgttggatagttactctaatggcctgtctgacgtgagtgcatcaaagccttggctgaatggctctcccagtccatcggtgatgagccttggggttaacacaaatggataccacccccaggttgcggactaccccagtctgggaaatggggtgaacggagtctccttgtggcgccgccatgctaacgggcgctggtaatgcgaggtgcctgtatacaatcatacagatggaataatgtttgttgtaacaaatggtttcgggcctgagctgatgtgccatgtaattaaaagttttaagttttaaaagggaaagaaagcgatacatgctgcaaaatctgccccgtgatttggttaatttgattgcttttctggttaaactctgttctataacgttttta

SEQ ID NO: 63438 - DNA, 4336 bp, Zea Mays
accacggcatccaccattccagctccaggccaggagaaaacgttccgggactgggactgcgttcaccttgctttttcttcccacgctcaccccgcaccgcgtgccctctctggctctctccctctcgtggggacgactgggcgaccgccgccgccgccgccttacgccaggtgcccaggtcttagtcggccccttcgccggcgacgaggacctaccagctgtgaataaggttgtctggaacggccgtgggctctgcggatggcaggttctgtggtaacggatgattcagctgctagcacaactggaatgagggatgatgaaaacagtctctctggcgagtccttctctgagtggaggtcctgtgatagggcagacagcgataccccttcaacatccccacccttctgggatagcgatggtgatgatgatgatcctggcagagtgtggcatctgccagctggtgtgaaggaggatgagaaggtgcaggtggagacgtggaagaagggggatggtggtgatggcccaaagccttcagaattgtttggacatcacacttggaggattgaaaacttctcaaaggagaagaaaagagaaatgaaaagtgagccatttgaagctggtggttacaaatggtatattcttgtataccctcaaggatgtgatgtctctaatcatctttcattattcctttgcgttgctaatcatgacaaacttctcccaggatggagtcattttgcacagttcactatagctgtagccaatatagatcctaaaaagatgaagtactcaggtgagctgaacttggtttgttttcttcttggaaggttttggaagaaggaacatgattggggatggaaaaagtttatggagctgtcaaagattcaggatggttttcttgttgacgatgttcttgaaatcatagctcaagttcaggtcatcagggagaaagtggatagaccttttcgttgccttgatcgtccttatcggagagaattaatccgcatctatatgacaaatgtggaacaaatctaccgacgtttcgttgaggagcgaagaagtaaattaagcaagctcattgaggacaaaatgaaatggtccagtttccgtgctttctggtcagcaattgacccaaacaccaggcatcacatgtccagggaaaagactgagactatattgaaaattttagtgaagcaattctttgtagagaaagaagttacttccacattagtgatggactctttgtatacaagtctgaaggcacttgaataccggatgaagagcaagaaatgcaaaacaaaattagcagatttggaagaactacctgcgcctatggtccatgttgacatggacatgtttgttttggctgatgatgttatagctttgcttgagagggcagccttagaacccttgccttgtcaacctgtagcccccaaggatgacaaaacttcccaaagccgcatgaaggatggaagttctggcgaggtttacaaagtttctatggagcgtgaggaaagacgcctaactgagcttgctcagaagatactagagacatttgtgctatctcatatatttagcggaattgaagttgcataccaagaagctgttgctttgaaaaggcaagaagagcttattcgtgaagaggaggaggaggctggacttcttgaacatcagatgaaggggaagcgtggtggtggtgcaaatgaaaaggacaagcgtgccaagaaaaagcagaccaagcaaaagaagaacaaccgtaaggctaaagacaaggaaagagatgtgaaatgtgaggttaaaattctggaaaggcttcatgatgaaactgttattgataacagtgatggcttaccagctaaggtggaagtgatagccaaggttgatgccttggaagaaggttcttcagatgggtcagacatgccaaatagtgttacaggtggttcaggccgcaatagttctggctgctgcacagctccaaaactggatcaggatactgttctgcttaccttgagagataaacttcgtaagctagggcagcgtctgcaagagaaaaacattgaggggcagaaacttctcaaagctcattttgaagctagggacacaaaagtgaaggtagaagaatcttctgactcatctaattctttggataggccacctgatgttccagagagctcgatgcattcttcagaagatacagttgatcttaaagttaatggaacaccaaataaggatgcctctgtggtcaaccctgtcctggaggaatctgtttcaggcataccagtcactgcaaagaatgaatccttgccttctgccagaacaaaagaaggcccagtttcaaacaaagataacgcatcaagtttgaaaatgaaaaccatggcatcttgcttgaaattgcatccagctgatgtggataaagatgccccttttccttctaaatcaccacgaatcaatagggctgctccagttccctcgaagttaccttcggctgataaagctactccagttcttccaaaatcatctctgtcagtaaacaaagcagctctggtccgtcccaaatctccagcagttgacaaagcaactccagtttgtcctgaatctccagcagttgacaaagtaactccagttcgtcccagatctccagcagttgacaaagcaactccagttcgttctcaatctccagcagttgacaaagctactcatgtttgccctcaatctccatcagttgacaaggcaactccatccattgacaaagcaactccagttcgcccaaaatctccagccatagataaagtaactccaattcctcccaaatctccaccagttgacaaagcctctccagcaccaccaaaatcactatcaggtgctaaagatgtgcctgttccttcaaggtcgctgcaaattgataggttcattccagcccccccaagattatcgcaagttgataaagctgctctgccttcttcagaacagccacatatatctccagctactaattctgaagcccaaggggcaactacttctaggaaggtcacagccagctcagttttggaggttgctgcagcatcgaggccttcaagtgctcctgtgttacccacaccaagatcaactgcaccagttgcttcacatattcaaacttccacgttgctttcccgctcgatgagtgaggcagctgggagaaggtcagtaaatgatccttccttttctgccccatcttatactccccagacctaccgaaatgcaataattggtaagactggtctggctactacctctgcaaaccttgcatatcagtcctattctctgggtcaagatactgctccttcacagcctctatcagcatatgcatcaagcacagcagtcatgatgcctcctgctggaagatctgatcaatcatcagctaggcatggattcaagtctgggtctggtaagctagaagcacatgacagctggcagcagtggaaaggtgataataatgttgatatgcatctctggagggatcacactacctatcaacaaatgaccaggggtcaagcgtatgaccaatctcggagggacgatacttatcagcaaacatgcagcagaggaacagaaaagttcagcaggcacgcaggactgcaagctaggcagttccaaaccgagacacccgccagccatgtctggcaccaacaacaggggcaagtggcagaagagtttccacaccttgacatcataaacgatttgcttgaggaggaccagatcaacggcagtataccagagtcatttcatcaagattacaatgtgtttggcctgccattttcaccaagaggaaacgtgtcagatatgggaatggcttctgttagaagtcctgctcggttcaattcaaccaagtatgagtatgacggtggattctcgggggcttatgacataaatgcggtcaatgggttgagggaacggcagtttccctcgttggatagttactctaatggcctgtctgacgtgagtgcatcaaagccttggctgaatggctctcccagtccatcggtgatgagccttggggttaacacaaatggataccacccccaggttgcggactaccccagtctgggaaatggggtgaacggagtctccttgtggcgccgccatgctaacgggcgctggtaatgcgaggtgcctgtatacaatcatacagatggaataatgtttgttgtaacaaatggtttcgggcctgagctgatgtgccatgtaattaaaagttttaagttttaaaagggaaagaaagcgatacatgctgcaaaatctgccccgtgatttggttaatttgattgcttttctggttaaactctgttctataacgttttta

SEQ ID NO: 63439 - DNA, 4489 bp, Zea Mays
accacggcatccaccattccagctccaggccaggagaaaacgttccgggactgggactgcgttcaccttgctttttcttcccacgctcaccccgcaccgcgtgccctctctggctctctccctctcgtggggacgactgggcgaccgccgccgccgccgccttacgccaggtgcccaggtcttagtcggccccttcgccggcgacgaggacctaccagttcctgtctgaattctgtaattcagttgcggagtctgtattgtttttgactgatcactggtcacaaaatccccagtttgtgggggagtagaaacctgggaagcatgagtggcacctaaaactatttggcacgagcgctaaatttccaggtgcctaataaagctgtgaataaggttgtctggaacggccgtgggctctgcggatggcaggttctgtggtaacggatgattcagctgctagcacaactggaatgagggatgatgaaaacagtctctctggcgagtccttctctgagtggaggtcctgtgatagggcagacagcgataccccttcaacatccccacccttctgggatagcgatggtgatgatgatgatcctggcagagtgtggcatctgccagctggtgtgaaggaggatgagaaggtgcaggtggagacgtggaagaagggggatggtggtgatggcccaaagccttcagaattgtttggacatcacacttggaggattgaaaacttctcaaaggagaagaaaagagaaatgaaaagtgagccatttgaagctggtggttacaaatggtatattcttgtataccctcaaggatgtgatgtctctaatcatctttcattattcctttgcgttgctaatcatgacaaacttctcccaggatggagtcattttgcacagttcactatagctgtagccaatatagatcctaaaaagatgaagtactcaggtgagctgaacttggtttgttttcttcttggaaggttttggaagaaggaacatgattggggatggaaaaagtttatggagctgtcaaagattcaggatggttttcttgttgacgatgttcttgaaatcatagctcaagttcaggtcatcagggagaaagtggatagaccttttcgttgccttgatcgtccttatcggagagaattaatccgcatctatatgacaaatgtggaacaaatctaccgacgtttcgttgaggagcgaagaagtaaattaagcaagctcattgaggacaaaatgaaatggtccagtttccgtgctttctggtcagcaattgacccaaacaccaggcatcacatgtccagggaaaagactgagactatattgaaaattttagtgaagcaattctttgtagagaaagaagttacttccacattagtgatggactctttgtatacaagtctgaaggcacttgaataccggatgaagagcaagaaatgcaaaacaaaattagcagatttggaagaactacctgcgcctatggtccatgttgacatggacatgtttgttttggctgatgatgttatagctttgcttgagagggcagccttagaacccttgccttgtcaacctgtagcccccaaggatgacaaaacttcccaaagccgcatgaaggatggaagttctggcgaggtttacaaagtttctatggagcgtgaggaaagacgcctaactgagcttgctcagaagatactagagacatttgtgctatctcatatatttagcggaattgaagttgcataccaagaagctgttgctttgaaaaggcaagaagagcttattcgtgaagaggaggaggaggctggacttcttgaacatcagatgaaggggaagcgtggtggtggtgcaaatgaaaaggacaagcgtgccaagaaaaagcagaccaagcaaaagaagaacaaccgtaaggctaaagacaaggaaagagatgtgaaatgtgaggttaaaattctggaaaggcttcatgatgaaactgttattgataacagtgatggcttaccagctaaggtggaagtgatagccaaggttgatgccttggaagaaggttcttcagatgggtcagacatgccaaataggtggttcaggccgcaatagttctggctgctgcacagctccaaaactggatcaggatactgttctgcttaccttgagagataaacttcgtaagctagggcagcgtctgcaagagaaaaacattgaggggcagaaacttctcaaagctcattttgaagctagggacacaaaagtgaaggtagaagaatcttctgactcatctaattctttggataggccacctgatgttccagagagctcgatgcattcttcagaagatacagttgatcttaaagttaatggaacaccaaataaggatgcctctgtggtcaaccctgtcctggaggaatctgtttcaggcataccagtcactgcaaagaatgaatccttgccttctgccagaacaaaagaaggcccagtttcaaacaaagataacgcatcaagtttgaaaatgaaaaccatggcatcttgcttgaaattgcatccagctgatgtggataaagatgccccttttccttctaaatcaccacgaatcaatagggctgctccagttccctcgaagttaccttcggctgataaagctactccagttcttccaaaatcatctctgtcagtaaacaaagcagctctggtccgtcccaaatctccagcagttgacaaagcaactccagtttgtcctgaatctccagcagttgacaaagtaactccagttcgtcccagatctccagcagttgacaaagcaactccagttcgttctcaatctccagcagttgacaaagctactcatgtttgccctcaatctccatcagttgacaaggcaactccatccattgacaaagcaactccagttcgcccaaaatctccagccatagataaagtaactccaattcctcccaaatctccaccagttgacaaagcctctccagcaccaccaaaatcactatcaggtgctaaagatgtgcctgttccttcaaggtcgctgcaaattgataggttcattccagcccccccaagattatcgcaagttgataaagctgctctgccttcttcagaacagccacatatatctccagctactaattctgaagcccaaggggcaactacttctaggaaggtcacagccagctcagttttggaggttgctgcagcatcgaggccttcaagtgctcctgtgttacccacaccaagatcaactgcaccagttgcttcacatattcaaacttccacgttgctttcccgctcgatgagtgaggcagctgggagaaggtcagtaaatgatccttccttttctgccccatcttatactccccagacctaccgaaatgcaataattggtaagactggtctggctactacctctgcaaaccttgcatatcagtcctattctctgggtcaagatactgctccttcacagcctctatcagcatatgcatcaagcacagcagtcatgatgcctcctgctggaagatctgatcaatcatcagctaggcatggattcaagtctgggtctggtaagctagaagcacatgacagctggcagcagtggaaaggtgataataatgttgatatgcatctctggagggatcacactacctatcaacaaatgaccaggggtcaagcgtatgaccaatctcggagggacgatacttatcagcaaacatgcagcagaggaacagaaaagttcagcaggcacgcaggactgcaagctaggcagttccaaaccgagacacccgccagccatgtctggcaccaacaacaggggcaagtggcagaagagtttccacaccttgacatcataaacgatttgcttgaggaggaccagatcaacggcagtataccagagtcatttcatcaagattacaatgtgtttggcctgccattttcaccaagaggaaacgtgtcagatatgggaatggcttctgttagaagtcctgctcggttcaattcaaccaagtatgagtatgacggtggattctcgggggcttatgacataaatgcggtcaatgggttgagggaacggcagtttccctcgttggatagttactctaatggcctgtctgacgtgagtgcatcaaagccttggctgaatggctctcccagtccatcggtgatgagccttggggttaacacaaatggataccacccccaggttgcggactaccccagtctgggaaatggggtgaacggagtctccttgtggcgccgccatgctaacgggcgctggtaatgcgaggtgcctgtatacaatcatacagatggaataatgtttgttgtaacaaatggtttcgggcctgagctgatgtgccatgtaattaaaagttttaagttttaaaagggaaagaaagcgatacatgctgcaaaatctgccccgtgatttggttaatttgattgcttttctggttaaactctgttctataacgttttta

SEQ ID NO: 63440 - DNA, 4271 bp, Zea Mays
accacggcatccaccattccagctccaggccaggagaaaacgttccgggactgggactgcgttcaccttgctttttcttcccacgctcaccccgcaccgcgtgccctctctggctctctccctctcgtggggacgactgggcgaccgccgccgccgccgccttacgccaggtgcccaggtcttagtcggccccttcgccggcgacgaggacctaccagttcctgtctgaattctgtaattcagttgcggagtctgtattgtttttgactgatcactggtcacaaaatccccagtttgtgggggagtagaaacctgggaagcatgagtggcacctaaaactatttggcacgagcgctaaatttccaggtgcctaataaagctgtgaataaggttgtctggaacggccgtgggctctgcggatggcaggttctgtggtaacggatgattcagctgctagcacaactggaatgagggatgatgaaaacagtctctctggcgagtccttctctgagtggaggtcctgtgatagggcagacagcgataccccttcaacatccccacccttctgggatagcgatggtgatgatgatgatcctggcccaaagccttcagaattgtttggacatcacacttggaggattgaaaacttctcaaaggagaagaaaagagaaatgaaaagtgagccatttgaagctggtggttacaaatggtatattcttgtataccctcaaggatgtgatgtctctaatcatctttcattattcctttgcgttgctaatcatgacaaacttctcccaggatggagtcattttgcacagttcactatagctgtagccaatatagatcctaaaaagatgaagtactcagatactttgcataggttttggaagaaggaacatgattggggatggaaaaagtttatggagctgtcaaagattcaggatggttttcttgttgacgatgttcttgaaatcatagctcaagttcaggtcatcagggagaaagtggatagaccttttcgttgccttgatcgtccttatcggagagaattaatccgcatctatatgacaaatgtggaacaaatctaccgacgtttcgttgaggagcgaagaagtaaattaagcaagctcattgaggacaaaatgaaatggtccagtttccgtgctttctggtcagcaattgacccaaacaccaggcatcacatgtccagggaaaagactgagactatattgaaaattttagtgaagcaattctttgtagagaaagaagttacttccacattagtgatggactctttgtatacaagtctgaaggcacttgaataccggatgaagagcaagaaatgcaaaacaaaattagcagatttggaagaactacctgcgcctatggtccatgttgacatggacatgtttgttttggctgatgatgttatagctttgcttgagagggcagccttagaacccttgccttgtcaacctgtagcccccaaggatgacaaaacttcccaaagccgcatgaaggatggaagttctggcgaggtttacaaagtttctatggagcgtgaggaaagacgcctaactgagcttgctcagaagatactagagacatttgtgctatctcatatatttagcggaattgaagttgcataccaagaagctgttgctttgaaaaggcaagaagagcttattcgtgaagaggaggaggaggctggacttcttgaacatcagatgaaggggaagcgtggtggtggtgcaaatgaaaaggacaagcgtgccaagaaaaagcagaccaagcaaaagaagaacaaccgtaaggctaaagacaaggaaagagatgtgaaatgtgaggttaaaattctggaaaggcttcatgatgaaactgttattgataacagtgatggcttaccagctaaggtggaagtgatagccaaggttgatgccttggaagaaggttcttcagatgggtcagacatgccaaatagaaaaacattgaggggcagaaacttctcaaagctcattttgaagctagggacacaaaagtgaaggtagaagaatcttctgactcatctaattctttggataggccacctgatgttccagagagctcgatgcattcttcagaagatacagttgatcttaaagttaatggaacaccaaataaggatgcctctgtggtcaaccctgtcctggaggaatctgtttcaggcataccagtcactgcaaagaatgaatccttgccttctgccagaacaaaagaaggcccagtttcaaacaaagataacgcatcaagtttgaaaatgaaaaccatggcatcttgcttgaaattgcatccagctgatgtggataaagatgccccttttccttctaaatcaccacgaatcaatagggctgctccagttccctcgaagttaccttcggctgataaagctactccagttcttccaaaatcatctctgtcagtaaacaaagcagctctggtccgtcccaaatctccagcagttgacaaagcaactccagtttgtcctgaatctccagcagttgacaaagtaactccagttcgtcccagatctccagcagttgacaaagcaactccagttcgttctcaatctccagcagttgacaaagctactcatgtttgccctcaatctccatcagttgacaaggcaactccatccattgacaaagcaactccagttcgcccaaaatctccagccatagataaagtaactccaattcctcccaaatctccaccagttgacaaagcctctccagcaccaccaaaatcactatcaggtgctaaagatgtgcctgttccttcaaggtcgctgcaaattgataggttcattccagcccccccaagattatcgcaagttgataaagctgctctgccttcttcagaacagccacatatatctccagctactaattctgaagcccaaggggcaactacttctaggaaggtcacagccagctcagttttggaggttgctgcagcatcgaggccttcaagtgctcctgtgttacccacaccaagatcaactgcaccagttgcttcacatattcaaacttccacgttgctttcccgctcgatgagtgaggcagctgggagaaggtcagtaaatgatccttccttttctgccccatcttatactccccagacctaccgaaatgcaataattggtaagactggtctggctactacctctgcaaaccttgcatatcagtcctattctctgggtcaagatactgctccttcacagcctctatcagcatatgcatcaagcacagcagtcatgatgcctcctgctggaagatctgatcaatcatcagctaggcatggattcaagtctgggtctggtaagctagaagcacatgacagctggcagcagtggaaaggtgataataatgttgatatgcatctctggagggatcacactacctatcaacaaatgaccaggggtcaagcgtatgaccaatctcggagggacgatacttatcagcaaacatgcagcagaggaacagaaaagttcagcaggcacgcaggactgcaagctaggcagttccaaaccgagacacccgccagccatgtctggcaccaacaacaggggcaagtggcagaagagtttccacaccttgacatcataaacgatttgcttgaggaggaccagatcaacggcagtataccagagtcatttcatcaagattacaatgtgtttggcctgccattttcaccaagaggaaacgtgtcagatatgggaatggcttctgttagaagtcctgctcggttcaattcaaccaagtatgagtatgacggtggattctcgggggcttatgacataaatgcggtcaatgggttgagggaacggcagtttccctcgttggatagttactctaatggcctgtctgacgtgagtgcatcaaagccttggctgaatggctctcccagtccatcggtgatgagccttggggttaacacaaatggataccacccccaggttgcggactaccccagtctgggaaatggggtgaacggagtctccttgtggcgccgccatgctaacgggcgctggtaatgcgaggtgcctgtatacaatcatacagatggaataatgtttgttgtaacaaatggtttcgggcctgagctgatgtgccatgtaattaaaagttttaagttttaaaagggaaagaaagcgatacatgctgcaaaatctgccccgtgatttggttaatttgattgcttttctggttaaactctgttctataacgttttta

SEQ ID NO: 63441 - DNA, 4235 bp, Zea Mays
accacggcatccaccattccagctccaggccaggagaaaacgttccgggactgggactgcgttcaccttgctttttcttcccacgctcaccccgcaccgcgtgccctctctggctctctccctctcgtggggacgactgggcgaccgccgccgccgccgccttacgccaggtgcccaggtcttagtcggccccttcgccggcgacgaggacctaccagctgtgaataaggttgtctggaacggccgtgggctctgcggatggcaggttctgtggtaacggatgattcagctgctagcacaactggaatgagggatgatgaaaacagtctctctggcgagtccttctctgagtggaggtcctgtgatagggcagacagcgataccccttcaacatccccacccttctgggatagcgatggtgatgatgatgatcctggcagagtgtggcatctgccagctggtgtgaaggaggatgagaaggtgcaggtggagacgtggaagaagggggatggtggtgatggcccaaagccttcagaattgtttggacatcacacttggaggattgaaaacttctcaaaggagaagaaaagagaaatgaaaagtgagccatttgaagctggtggttacaaatggtatattcttgtataccctcaaggatgtgatgtctctaatcatctttcattattcctttgcgttgctaatcatgacaaacttctcccaggatggagtcattttgcacagttcactatagctgtagccaatatagatcctaaaaagatgaagtactcaggtgagctgaacttggtttgttttcttcttggaaggttttggaagaaggaacatgattggggatggaaaaagtttatggagctgtcaaagattcaggatggttttcttgttgacgatgttcttgaaatcatagctcaagttcaggtcatcagggagaaagtggatagaccttttcgttgccttgatcgtccttatcggagagaattaatccgcatctatatgacaaatgtggaacaaatctaccgacgtttcgttgaggagcgaagaagtaaattaagcaagctcattgaggacaaaatgaaatggtccagtttccgtgctttctggtcagcaattgacccaaacaccaggcatcacatgtccagggaaaagactgagactatattgaaaattttagtgaagcaattctttgtagagaaagaagttacttccacattagtgatggactctttgtatacaagtctgaaggcacttgaataccggatgaagagcaagaaatgcaaaacaaaattagcagatttggaagaactacctgcgcctatggtccatgttgacatggacatgtttgttttggctgatgatgttatagctttgcttgagagggcagccttagaacccttgccttgtcaacctgtagcccccaaggatgacaaaacttcccaaagccgcatgaaggatggaagttctggcgaggtttacaaagtttctatggagcgtgaggaaagacgcctaactgagcttgctcagaagatactagagacatttgtgctatctcatatatttagcggaattgaagttgcataccaagaagctgttgctttgaaaaggcaagaagagcttattcgtgaagaggaggaggaggctggacttcttgaacatcagatgaaggggaagcgtggtggtggtgcaaatgaaaaggacaagcgtgccaagaaaaagcagaccaagcaaaagaagaacaaccgtaaggctaaagacaaggaaagagatgtgaaatgtgaggttaaaattctggaaaggcttcatgatgaaactgttattgataacagtgatggcttaccagctaaggtggaagtgatagccaaggttgatgccttggaagaaggttcttcagatgggtcagacatgccaaatagtgttacaggtggttcaggccgcaatagttctggctgctgcacagctccaaaactggatcaggatactgttctgcttaccttgagagataaacttcgtaagctagggcagcgtctgcaagaggccacctgatgttccagagagctcgatgcattcttcagaagatacagttgatcttaaagttaatggaacaccaaataaggatgcctctgtggtcaaccctgtcctggaggaatctgtttcaggcataccagtcactgcaaagaatgaatccttgccttctgccagaacaaaagaaggcccagtttcaaacaaagataacgcatcaagtttgaaaatgaaaaccatggcatcttgcttgaaattgcatccagctgatgtggataaagatgccccttttccttctaaatcaccacgaatcaatagggctgctccagttccctcgaagttaccttcggctgataaagctactccagttcttccaaaatcatctctgtcagtaaacaaagcagctctggtccgtcccaaatctccagcagttgacaaagcaactccagtttgtcctgaatctccagcagttgacaaagtaactccagttcgtcccagatctccagcagttgacaaagcaactccagttcgttctcaatctccagcagttgacaaagctactcatgtttgccctcaatctccatcagttgacaaggcaactccatccattgacaaagcaactccagttcgcccaaaatctccagccatagataaagtaactccaattcctcccaaatctccaccagttgacaaagcctctccagcaccaccaaaatcactatcaggtgctaaagatgtgcctgttccttcaaggtcgctgcaaattgataggttcattccagcccccccaagattatcgcaagttgataaagctgctctgccttcttcagaacagccacatatatctccagctactaattctgaagcccaaggggcaactacttctaggaaggtcacagccagctcagttttggaggttgctgcagcatcgaggccttcaagtgctcctgtgttacccacaccaagatcaactgcaccagttgcttcacatattcaaacttccacgttgctttcccgctcgatgagtgaggcagctgggagaaggtcagtaaatgatccttccttttctgccccatcttatactccccagacctaccgaaatgcaataattggtaagactggtctggctactacctctgcaaaccttgcatatcagtcctattctctgggtcaagatactgctccttcacagcctctatcagcatatgcatcaagcacagcagtcatgatgcctcctgctggaagatctgatcaatcatcagctaggcatggattcaagtctgggtctggtaagctagaagcacatgacagctggcagcagtggaaaggtgataataatgttgatatgcatctctggagggatcacactacctatcaacaaatgaccaggggtcaagcgtatgaccaatctcggagggacgatacttatcagcaaacatgcagcagaggaacagaaaagttcagcaggcacgcaggactgcaagctaggcagttccaaaccgagacacccgccagccatgtctggcaccaacaacaggggcaagtggcagaagagtttccacaccttgacatcataaacgatttgcttgaggaggaccagatcaacggcagtataccagagtcatttcatcaagattacaatgtgtttggcctgccattttcaccaagaggaaacgtgtcagatatgggaatggcttctgttagaagtcctgctcggttcaattcaaccaagtatgagtatgacggtggattctcgggggcttatgacataaatgcggtcaatgggttgagggaacggcagtttccctcgttggatagttactctaatggcctgtctgacgtgagtgcatcaaagccttggctgaatggctctcccagtccatcggtgatgagccttggggttaacacaaatggataccacccccaggttgcggactaccccagtctgggaaatggggtgaacggagtctccttgtggcgccgccatgctaacgggcgctggtaatgcgaggtgcctgtatacaatcatacagatggaataatgtttgttgtaacaaatggtttcgggcctgagctgatgtgccatgtaattaaaagttttaagttttaaaagggaaagaaagcgatacatgctgcaaaatctgccccgtgatttggttaatttgattgcttttctggttaaactctgttctataacgttttta

SEQ ID NO: 63442 - DNA, 4293 bp, Zea Mays
accacggcatccaccattccagctccaggccaggagaaaacgttccgggactgggactgcgttcaccttgctttttcttcccacgctcaccccgcaccgcgtgccctctctggctctctccctctcgtggggacgactgggcgaccgccgccgccgccgccttacgccaggtgcccaggtcttagtcggccccttcgccggcgacgaggacctaccagctgtgaataaggttgtctggaacggccgtgggctctgcggatggcaggttctgtggtaacggatgattcagctgctagcacaactggaatgagggatgatgaaaacagtctctctggcgagtccttctctgagtggaggtcctgtgatagggcagacagcgataccccttcaacatccccacccttctgggatagcgatggtgatgatgatgatcctggcccaaagccttcagaattgtttggacatcacacttggaggattgaaaacttctcaaaggagaagaaaagagaaatgaaaagtgagccatttgaagctggtggttacaaatggtatattcttgtataccctcaaggatgtgatgtctctaatcatctttcattattcctttgcgttgctaatcatgacaaacttctcccaggatggagtcattttgcacagttcactatagctgtagccaatatagatcctaaaaagatgaagtactcaggttttggaagaaggaacatgattggggatggaaaaagtttatggagctgtcaaagattcaggatggttttcttgttgacgatgttcttgaaatcatagctcaagttcaggtcatcagggagaaagtggatagaccttttcgttgccttgatcgtccttatcggagagaattaatccgcatctatatgacaaatgtggaacaaatctaccgacgtttcgttgaggagcgaagaagtaaattaagcaagctcattgaggacaaaatgaaatggtccagtttccgtgctttctggtcagcaattgacccaaacaccaggcatcacatgtccagggaaaagactgagactatattgaaaattttagtgaagcaattctttgtagagaaagaagttacttccacattagtgatggactctttgtatacaagtctgaaggcacttgaataccggatgaagagcaagaaatgcaaaacaaaattagcagatttggaagaactacctgcgcctatggtccatgttgacatggacatgtttgttttggctgatgatgttatagctttgcttgagagggcagccttagaacccttgccttgtcaacctgtagcccccaaggatgacaaaacttcccaaagccgcatgaaggatggaagttctggcgaggtttacaaagtttctatggagcgtgaggaaagacgcctaactgagcttgctcagaagatactagagacatttgtgctatctcatatatttagcggaattgaagttgcataccaagaagctgttgctttgaaaaggcaagaagagcttattcgtgaagaggaggaggaggctggacttcttgaacatcagatgaaggggaagcgtggtggtggtgcaaatgaaaaggacaagcgtgccaagaaaaagcagaccaagcaaaagaagaacaaccgtaaggctaaagacaaggaaagagatgtgaaatgtgaggttaaaattctggaaaggcttcatgatgaaactgttattgataacagtgatggcttaccagctaaggtggaagtgatagccaaggttgatgccttggaagaaggttcttcagatgggtcagacatgccaaatagaggaaaaaatcagtgtaacaagggcttaagcattagtcttgccaaagaaggtgatggtcttccctccacctctagtgttacaggtggttcaggccgcaatagttctggctgctgcacagctccaaaactggatcaggatactgttctgcttaccttgagagataaacttcgtaagctagggcagcgtctgcaagagaaaaacattgaggggcagaaacttctcaaagctcattttgaagctagggacacaaaagtgaaggtagaagaatcttctgactcatctaattctttggataggccacctgatgttccagagagctcgatgcattcttcagaagatacagttgatcttaaagttaatggaacaccaaataaggatgcctctgtggtcaaccctgtcctggaggaatctgtttcaggcataccagtcactgcaaagaatgaatccttgccttctgccagaacaaaagaaggcccagtttcaaacaaagataacgcatcaagtttgaaaatgaaaaccatggcatcttgcttgaaattgcatccagctgatgtggataaagatgccccttttccttctaaatcaccacgaatcaatagggctgctccagttccctcgaagttaccttcggctgataaagctactccagttcttccaaaatcatctctgtcagtaaacaaagcagctctggtccgtcccaaatctccagcagttgacaaagcaactccagtttgtcctgaatctccagcagttgacaaagtaactccagttcgtcccagatctccagcagttgacaaagcaactccagttcgttctcaatctccagcagttgacaaagctactcatgtttgccctcaatctccatcagttgacaaggcaactccatccattgacaaagcaactccagttcgcccaaaatctccagccatagataaagtaactccaattcctcccaaatctccaccagttgacaaagcctctccagcaccaccaaaatcactatcaggtgctaaagatgtgcctgttccttcaaggtcgctgcaaattgataggttcattccagcccccccaagattatcgcaagttgataaagctgctctgccttcttcagaacagccacatatatctccagctactaattctgaagcccaaggggcaactacttctaggaaggtcacagccagctcagttttggaggttgctgcagcatcgaggccttcaagtgctcctgtgttacccacaccaagatcaactgcaccagttgcttcacatattcaaacttccacgttgctttcccgctcgatgagtgaggcagctgggagaaggtcagtaaatgatccttccttttctgccccatcttatactccccagacctaccgaaatgcaataattggtaagactggtctggctactacctctgcaaaccttgcatatcagtcctattctctgggtcaagatactgctccttcacagcctctatcagcatatgcatcaagcacagcagtcatgatgcctcctgctggaagatctgatcaatcatcagctaggcatggattcaagtctgggtctggtaagctagaagcacatgacagctggcagcagtggaaaggtgataataatgttgatatgcatctctggagggatcacactacctatcaacaaatgaccaggggtcaagcgtatgaccaatctcggagggacgatacttatcagcaaacatgcagcagaggaacagaaaagttcagcaggcacgcaggactgcaagctaggcagttccaaaccgagacacccgccagccatgtctggcaccaacaacaggggcaagtggcagaagagtttccacaccttgacatcataaacgatttgcttgaggaggaccagatcaacggcagtataccagagtcatttcatcaagattacaatgtgtttggcctgccattttcaccaagaggaaacgtgtcagatatgggaatggcttctgttagaagtcctgctcggttcaattcaaccaagtatgagtatgacggtggattctcgggggcttatgacataaatgcggtcaatgggttgagggaacggcagtttccctcgttggatagttactctaatggcctgtctgacgtgagtgcatcaaagccttggctgaatggctctcccagtccatcggtgatgagccttggggttaacacaaatggataccacccccaggttgcggactaccccagtctgggaaatggggtgaacggagtctccttgtggcgccgccatgctaacgggcgctggtaatgcgaggtgcctgtatacaatcatacagatggaataatgtttgttgtaacaaatggtttcgggcctgagctgatgtgccatgtaattaaaagttttaagttttaaaagggaaagaaagcgatacatgctgcaaaatctgccccgtgatttggttaatttgattgcttttctggttaaactctgttctataacgttttta

SEQ ID NO: 63443 - DNA, 4277 bp, Zea Mays
tttggatgcgtgtgtttaggcacgctgcctgcatcatcacagccaaaccacggcatccaccattccagctccaggccaggagaaaacgttccgggactgggactgcgttcaccttgctttttcttcccacgctcaccccgcaccgcgtgccctctctggctctctccctctcgtggggacgactgggcgaccgccgccgccgccgccttacgccaggtgcccaggtcttagtcggccccttcgccggcgacgaggacctaccagctgtgaataaggttgtctggaacggccgtgggctctgcggatggcaggttctgtggtaacggatgattcagctgctagcacaactggaatgagggatgatgaaaacagtctctctggcgagtccttctctgagtggaggtcctgtgatagggcagacagcgataccccttcaacatccccacccttctgggatagcgatggtgatgatgatgatcctggcccaaagccttcagaattgtttggacatcacacttggaggattgaaaacttctcaaaggagaagaaaagagaaatgaaaagtgagccatttgaagctggtggttacaaatggtatattcttgtataccctcaaggatgtgatgtctctaatcatctttcattattcctttgcgttgctaatcatgacaaacttctcccaggatggagtcattttgcacagttcactatagctgtagccaatatagatcctaaaaagatgaagtactcagatactttgcataggttttggaagaaggaacatgattggggatggaaaaagtttatggagctgtcaaagattcaggatggttttcttgttgacgatgttcttgaaatcatagctcaagttcaggtcatcagggagaaagtggatagaccttttcgttgccttgatcgtccttatcggagagaattaatccgcatctatatgacaaatgtggaacaaatctaccgacgtttcgttgaggagcgaagaagtaaattaagcaagctcattgaggacaaaatgaaatggtccagtttccgtgctttctggtcagcaattgacccaaacaccaggcatcacatgtccagggaaaagactgagactatattgaaaattttagtgaagcaattctttgtagagaaagaagttacttccacattagtgatggactctttgtatacaagtctgaaggcacttgaataccggatgaagagcaagaaatgcaaaacaaaattagcagatttggaagaactacctgcgcctatggtccatgttgacatggacatgtttgttttggctgatgatgttatagctttgcttgagagggcagccttagaacccttgccttgtcaacctgtagcccccaaggatgacaaaacttcccaaagccgcatgaaggatggaagttctggcgaggtttacaaagtttctatggagcgtgaggaaagacgcctaactgagcttgctcagaagatactagagacatttgtgctatctcatatatttagcggaattgaagttgcataccaagaagctgttgctttgaaaaggcaagaagagcttattcgtgaagaggaggaggaggctggacttcttgaacatcagatgaaggggaagcgtggtggtggtgcaaatgaaaaggacaagcgtgccaagaaaaagcagaccaagcaaaagaagaacaaccgtaaggctaaagacaaggaaagagatgtgaaatgtgaggttaaaattctggaaaggcttcatgatgaaactgttattgataacagtgatggcttaccagctaaggtggaagtgatagccaaggttgatgccttggaagaaggttcttcagatgggtcagacatgccaaatagtgttacaggtggttcaggccgcaatagttctggctgctgcacagctccaaaactggatcaggatactgttctgcttaccttgagagataaacttcgtaagctagggcagcgtctgcaagagaaaaacattgaggggcagaaacttctcaaagctcattttgaagctagggacacaaaagtgaaggtagaagaatcttctgactcatctaattctttggataggccacctgatgttccagagagctcgatgcattcttcagaagatacagttgatcttaaagttaatggaacaccaaataaggatgcctctgtggtcaaccctgtcctggaggaatctgtttcaggcataccagtcactgcaaagaatgaatccttgccttctgccagaacaaaagaaggcccagtttcaaacaaagataacgcatcaagtttgaaaatgaaaaccatggcatcttgcttgaaattgcatccagctgatgtggataaagatgccccttttccttctaaatcaccacgaatcaatagggctgctccagttccctcgaagttaccttcggctgataaagctactccagttcttccaaaatcatctctgtcagtaaacaaagcagctctggtccgtcccaaatctccagcagttgacaaagcaactccagtttgtcctgaatctccagcagttgacaaagtaactccagttcgtcccagatctccagcagttgacaaagcaactccagttcgttctcaatctccagcagttgacaaagctactcatgtttgccctcaatctccatcagttgacaaggcaactccatccattgacaaagcaactccagttcgcccaaaatctccagccatagataaagtaactccaattcctcccaaatctccaccagttgacaaagcctctccagcaccaccaaaatcactatcaggtgctaaagatgtgcctgttccttcaaggtcgctgcaaattgataggttcattccagcccccccaagattatcgcaagttgataaagctgctctgccttcttcagaacagccacatatatctccagctactaattctgaagcccaaggggcaactacttctaggaaggtcacagccagctcagttttggaggttgctgcagcatcgaggccttcaagtgctcctgtgttacccacaccaagatcaactgcaccagttgcttcacatattcaaacttccacgttgctttcccgctcgatgagtgaggcagctgggagaaggtcagtaaatgatccttccttttctgccccatcttatactccccagacctaccgaaatgcaataattggtaagactggtctggctactacctctgcaaaccttgcatatcagtcctattctctgggtcaagatactgctccttcacagcctctatcagcatatgcatcaagcacagcagtcatgatgcctcctgctggaagatctgatcaatcatcagctaggcatggattcaagtctgggtctggtaagctagaagcacatgacagctggcagcagtggaaaggtgataataatgttgatatgcatctctggagggatcacactacctatcaacaaatgaccaggggtcaagcgtatgaccaatctcggagggacgatacttatcagcaaacatgcagcagaggaacagaaaagttcagcaggcacgcaggactgcaagctaggcagttccaaaccgagacacccgccagccatgtctggcaccaacaacaggggcaagtggcagaagagtttccacaccttgacatcataaacgatttgcttgaggaggaccagatcaacggcagtataccagagtcatttcatcaagattacaatgtgtttggcctgccattttcaccaagaggaaacgtgtcagatatgggaatggcttctgttagaagtcctgctcggttcaattcaaccaagtatgagtatgacggtggattctcgggggcttatgacataaatgcggtcaatgggttgagggaacggcagtttccctcgttggatagttactctaatggcctgtctgacgtgagtgcatcaaagccttggctgaatggctctcccagtccatcggtgatgagccttggggttaacacaaatggataccacccccaggttgcggactaccccagtctgggaaatggggtgaacggagtctccttgtggcgccgccatgctaacgggcgctggtaatgcgaggtgcctgtatacaatcatacagatggaataatgtttgttgtaacaaatggtttcgggcctgagctgatgtgccatgtaattaaaagttttaagttttaaaagggaaagaaagcgatacatgctgcaaaatctgccccgtgatttggttaatttgattgcttttctggttaaactctgttctataacgttttta

SEQ ID NO: 63444 - DNA, 4436 bp, Zea Mays
tttggatgcgtgtgtttaggcacgctgcctgcatcatcacagccaaaccacggcatccaccattccagctccaggccaggagaaaacgttccgggactgggactgcgttcaccttgctttttcttcccacgctcaccccgcaccgcgtgccctctctggctctctccctctcgtggggacgactgggcgaccgccgccgccgccgccttacgccaggtgcccaggtcttagtcggccccttcgccggcgacgaggacctaccagctgtgaataaggttgtctggaacggccgtgggctctgcggatggcaggttctgtggtaacggatgattcagctgctagcacaactggaatgagggatgatgaaaacagtctctctggcgagtccttctctgagtggaggtcctgtgatagggcagacagcgataccccttcaacatccccacccttctgggatagcgatggtgatgatgatgatcctggcagagtgtggcatctgccagctggtgtgaaggaggatgagaaggtgcaggtggagacgtggaagaagggggatggtggtgatggcccaaagccttcagaattgtttggacatcacacttggaggattgaaaacttctcaaaggagaagaaaagagaaatgaaaagtgagccatttgaagctggtggttacaaatggtatattcttgtataccctcaaggatgtgatgtctctaatcatctttcattattcctttgcgttgctaatcatgacaaacttctcccaggatggagtcattttgcacagttcactatagctgtagccaatatagatcctaaaaagatgaagtactcagatactttgcataggttttggaagaaggaacatgattggggatggaaaaagtttatggagctgtcaaagattcaggatggttttcttgttgacgatgttcttgaaatcatagctcaagttcaggtcatcagggagaaagtggatagaccttttcgttgccttgatcgtccttatcggagagaattaatccgcatctatatgacaaatgtggaacaaatctaccgacgtttcgttgaggagcgaagaagtaaattaagcaagctcattgaggacaaaatgaaatggtccagtttccgtgctttctggtcagcaattgacccaaacaccaggcatcacatgtccagggaaaagactgagactatattgaaaattttagtgaagcaattctttgtagagaaagaagttacttccacattagtgatggactctttgtatacaagtctgaaggcacttgaataccggatgaagagcaagaaatgcaaaacaaaattagcagatttggaagaactacctgcgcctatggtccatgttgacatggacatgtttgttttggctgatgatgttatagctttgcttgagagggcagccttagaacccttgccttgtcaacctgtagcccccaaggatgacaaaacttcccaaagccgcatgaaggatggaagttctggcgaggtttacaaagtttctatggagcgtgaggaaagacgcctaactgagcttgctcagaagatactagagacatttgtgctatctcatatatttagcggaattgaagttgcataccaagaagctgttgctttgaaaaggcaagaagagcttattcgtgaagaggaggaggaggctggacttcttgaacatcagatgaaggggaagcgtggtggtggtgcaaatgaaaaggacaagcgtgccaagaaaaagcagaccaagcaaaagaagaacaaccgtaaggctaaagacaaggaaagagatgtgaaatgtgaggttaaaattctggaaaggcttcatgatgaaactgttattgataacagtgatggcttaccagctaaggtggaagtgatagccaaggttgatgccttggaagaaggttcttcagatgggtcagacatgccaaatagaggaaaaaatcagtgtaacaagggcttaagcattagtcttgccaaagaaggtgatggtcttccctccacctctagtgttacaggtggttcaggccgcaatagttctggctgctgcacagctccaaaactggatcaggatactgttctgcttaccttgagagataaacttcgtaagctagggcagcgtctgcaagagaaaaacattgaggggcagaaacttctcaaagctcattttgaagctagggacacaaaagtgaaggtagaagaatcttctgactcatctaattctttggataggccacctgatgttccagagagctcgatgcattcttcagaagatacagttgatcttaaagttaatggaacaccaaataaggatgcctctgtggtcaaccctgtcctggaggaatctgtttcaggcataccagtcactgcaaagaatgaatccttgccttctgccagaacaaaagaaggcccagtttcaaacaaagataacgcatcaagtttgaaaatgaaaaccatggcatcttgcttgaaattgcatccagctgatgtggataaagatgccccttttccttctaaatcaccacgaatcaatagggctgctccagttccctcgaagttaccttcggctgataaagctactccagttcttccaaaatcatctctgtcagtaaacaaagcagctctggtccgtcccaaatctccagcagttgacaaagcaactccagtttgtcctgaatctccagcagttgacaaagtaactccagttcgtcccagatctccagcagttgacaaagcaactccagttcgttctcaatctccagcagttgacaaagctactcatgtttgccctcaatctccatcagttgacaaggcaactccatccattgacaaagcaactccagttcgcccaaaatctccagccatagataaagtaactccaattcctcccaaatctccaccagttgacaaagcctctccagcaccaccaaaatcactatcaggtgctaaagatgtgcctgttccttcaaggtcgctgcaaattgataggttcattccagcccccccaagattatcgcaagttgataaagctgctctgccttcttcagaacagccacatatatctccagctactaattctgaagcccaaggggcaactacttctaggaaggtcacagccagctcagttttggaggttgctgcagcatcgaggccttcaagtgctcctgtgttacccacaccaagatcaactgcaccagttgcttcacatattcaaacttccacgttgctttcccgctcgatgagtgaggcagctgggagaaggtcagtaaatgatccttccttttctgccccatcttatactccccagacctaccgaaatgcaataattggtaagactggtctggctactacctctgcaaaccttgcatatcagtcctattctctgggtcaagatactgctccttcacagcctctatcagcatatgcatcaagcacagcagtcatgatgcctcctgctggaagatctgatcaatcatcagctaggcatggattcaagtctgggtctggtaagctagaagcacatgacagctggcagcagtggaaaggtgataataatgttgatatgcatctctggagggatcacactacctatcaacaaatgaccaggggtcaagcgtatgaccaatctcggagggacgatacttatcagcaaacatgcagcagaggaacagaaaagttcagcaggcacgcaggactgcaagctaggcagttccaaaccgagacacccgccagccatgtctggcaccaacaacaggggcaagtggcagaagagtttccacaccttgacatcataaacgatttgcttgaggaggaccagatcaacggcagtataccagagtcatttcatcaagattacaatgtgtttggcctgccattttcaccaagaggaaacgtgtcagatatgggaatggcttctgttagaagtcctgctcggttcaattcaaccaagtatgagtatgacggtggattctcgggggcttatgacataaatgcggtcaatgggttgagggaacggcagtttccctcgttggatagttactctaatggcctgtctgacgtgagtgcatcaaagccttggctgaatggctctcccagtccatcggtgatgagccttggggttaacacaaatggataccacccccaggttgcggactaccccagtctgggaaatggggtgaacggagtctccttgtggcgccgccatgctaacgggcgctggtaatgcgaggtgcctgtatacaatcatacagatggaataatgtttgttgtaacaaatggtttcgggcctgagctgatgtgccatgtaattaaaagttttaagttttaaaagggaaagaaagcgatacatgctgcaaaatctgccccgtgatttggttaatttgattgcttttctggttaaactctgttctataacgttttta

SEQ ID NO: 63445 - DNA, 4311 bp, Zea Mays
atttggtttggatgcgtgtgtttaggcacgctgcctgcatcatcacagccaaaccacggcatccaccattccagctccaggccaggagaaaacgttccgggactgggactgcgttcaccttgctttttcttcccacgctcaccccgcaccgcgtgccctctctggctctctccctctcgtggggacgactgggcgaccgccgccgccgccgccttacgccaggtgcccaggtcttagtcggccccttcgccggcgacgaggacctaccaggttctgtggtaacggatgattcagctgctagcacaactggaatgagggatgatgaaaacagtctctctggcgagtccttctctgagtggaggtcctgtgatagggcagacagcgataccccttcaacatccccacccttctgggatagcgatggtgatgatgatgatcctggcccaaagccttcagaattgtttggacatcacacttggaggattgaaaacttctcaaaggagaagaaaagagaaatgaaaagtgagccatttgaagctggtggttacaaatggtatattcttgtataccctcaaggatgtgatgtctctaatcatctttcattattcctttgcgttgctaatcatgacaaacttctcccaggatggagtcattttgcacagttcactatagctgtagccaatatagatcctaaaaagatgaagtactcagatactttgcataggttttggaagaaggaacatgattggggatggaaaaagtttatggagctgtcaaagattcaggatggttttcttgttgacgatgttcttgaaatcatagctcaagttcaggtcatcagggagaaagtggatagaccttttcgttgccttgatcgtccttatcggagagaattaatccgcatctatatgacaaatgtggaacaaatctaccgacgtttcgttgaggagcgaagaagtaaattaagcaagctcattgaggacaaaatgaaatggtccagtttccgtgctttctggtcagcaattgacccaaacaccaggcatcacatgtccagggaaaagactgagactatattgaaaattttagtgaagcaattctttgtagagaaagaagttacttccacattagtgatggactctttgtatacaagtctgaaggcacttgaataccggatgaagagcaagaaatgcaaaacaaaattagcagatttggaagaactacctgcgcctatggtccatgttgacatggacatgtttgttttggctgatgatgttatagctttgcttgagagggcagccttagaacccttgccttgtcaacctgtagcccccaaggatgacaaaacttcccaaagccgcatgaaggatggaagttctggcgaggtttacaaagtttctatggagcgtgaggaaagacgcctaactgagcttgctcagaagatactagagacatttgtgctatctcatatatttagcggaattgaagttgcataccaagaagctgttgctttgaaaaggcaagaagagcttattcgtgaagaggaggaggaggctggacttcttgaacatcagatgaaggggaagcgtggtggtggtgcaaatgaaaaggacaagcgtgccaagaaaaagcagaccaagcaaaagaagaacaaccgtaaggctaaagacaaggaaagagatgtgaaatgtgaggttaaaattctggaaaggcttcatgatgaaactgttattgataacagtgatggcttaccagctaaggtggaagtgatagccaaggttgatgccttggaagaaggttcttcagatgggtcagacatgccaaatagaggaaaaaatcagtgtaacaagggcttaagcattagtcttgccaaagaaggtgatggtcttccctccacctctagtgttacaggtggttcaggccgcaatagttctggctgctgcacagctccaaaactggatcaggatactgttctgcttaccttgagagataaacttcgtaagctagggcagcgtctgcaagagaaaaacattgaggggcagaaacttctcaaagctcattttgaagctagggacacaaaagtgaaggtagaagaatcttctgactcatctaattctttggataggccacctgatgttccagagagctcgatgcattcttcagaagatacagttgatcttaaagttaatggaacaccaaataaggatgcctctgtggtcaaccctgtcctggaggaatctgtttcaggcataccagtcactgcaaagaatgaatccttgccttctgccagaacaaaagaaggcccagtttcaaacaaagataacgcatcaagtttgaaaatgaaaaccatggcatcttgcttgaaattgcatccagctgatgtggataaagatgccccttttccttctaaatcaccacgaatcaatagggctgctccagttccctcgaagttaccttcggctgataaagctactccagttcttccaaaatcatctctgtcagtaaacaaagcagctctggtccgtcccaaatctccagcagttgacaaagcaactccagtttgtcctgaatctccagcagttgacaaagtaactccagttcgtcccagatctccagcagttgacaaagcaactccagttcgttctcaatctccagcagttgacaaagctactcatgtttgccctcaatctccatcagttgacaaggcaactccatccattgacaaagcaactccagttcgcccaaaatctccagccatagataaagtaactccaattcctcccaaatctccaccagttgacaaagcctctccagcaccaccaaaatcactatcaggtgctaaagatgtgcctgttccttcaaggtcgctgcaaattgataggttcattccagcccccccaagattatcgcaagttgataaagctgctctgccttcttcagaacagccacatatatctccagctactaattctgaagcccaaggggcaactacttctaggaaggtcacagccagctcagttttggaggttgctgcagcatcgaggccttcaagtgctcctgtgttacccacaccaagatcaactgcaccagttgcttcacatattcaaacttccacgttgctttcccgctcgatgagtgaggcagctgggagaaggtcagtaaatgatccttccttttctgccccatcttatactccccagacctaccgaaatgcaataattggtaagactggtctggctactacctctgcaaaccttgcatatcagtcctattctctgggtcaagatactgctccttcacagcctctatcagcatatgcatcaagcacagcagtcatgatgcctcctgctggaagatctgatcaatcatcagctaggcatggattcaagtctgggtctggtaagctagaagcacatgacagctggcagcagtggaaaggtgataataatgttgatatgcatctctggagggatcacactacctatcaacaaatgaccaggggtcaagcgtatgaccaatctcggagggacgatacttatcagcaaacatgcagcagaggaacagaaaagttcagcaggcacgcaggactgcaagctaggcagttccaaaccgagacacccgccagccatgtctggcaccaacaacaggggcaagtggcagaagagtttccacaccttgacatcataaacgatttgcttgaggaggaccagatcaacggcagtataccagagtcatttcatcaagattacaatgtgtttggcctgccattttcaccaagaggaaacgtgtcagatatgggaatggcttctgttagaagtcctgctcggttcaattcaaccaagtatgagtatgacggtggattctcgggggcttatgacataaatgcggtcaatgggttgagggaacggcagtttccctcgttggatagttactctaatggcctgtctgacgtgagtgcatcaaagccttggctgaatggctctcccagtccatcggtgatgagccttggggttaacacaaatggataccacccccaggttgcggactaccccagtctgggaaatggggtgaacggagtctccttgtggcgccgccatgctaacgggcgctggtaatgcgaggtgcctgtatacaatcatacagatggaataatgtttgttgtaacaaatggtttcgggcctgagctgatgtgccatgtaattaaaagttttaagttttaaaagggaaagaaagcgatacatgctgcaaaatctgccccgtgatttggttaatttgattgcttttctggttaaactctgttctataacgttttta

SEQ ID NO: 63446 - DNA, 4368 bp, Zea Mays
gttgaagctgatttggtttggatgcgtgtgtttaggcacgctgcctgcatcatcacagccaaaccacggcatccaccattccagctccaggccaggagaaaacgttccgggactgggactgcgttcaccttgctttttcttcccacgctcaccccgcaccgcgtgccctctctggctctctccctctcgtggggacgactgggcgaccgccgccgccgccgccttacgccaggtgcccaggtcttagtcggccccttcgccggcgacgaggacctaccagctgtgaataaggttgtctggaacggccgtgggctctgcggatggcaggttctgtggtaacggatgattcagctgctagcacaactggaatgagggatgatgaaaacagtctctctggcgagtccttctctgagtggaggtcctgtgatagggcagacagcgataccccttcaacatccccacccttctgggatagcgatggtgatgatgatgatcctggcccaaagccttcagaattgtttggacatcacacttggaggattgaaaacttctcaaaggagaagaaaagagaaatgaaaagtgagccatttgaagctggtggttacaaatggtatattcttgtataccctcaaggatgtgatgtctctaatcatctttcattattcctttgcgttgctaatcatgacaaacttctcccaggatggagtcattttgcacagttcactatagctgtagccaatatagatcctaaaaagatgaagtactcagatactttgcataggttttggaagaaggaacatgattggggatggaaaaagtttatggagctgtcaaagattcaggatggttttcttgttgacgatgttcttgaaatcatagctcaagttcaggtcatcagggagaaagtggatagaccttttcgttgccttgatcgtccttatcggagagaattaatccgcatctatatgacaaatgtggaacaaatctaccgacgtttcgttgaggagcgaagaagtaaattaagcaagctcattgaggacaaaatgaaatggtccagtttccgtgctttctggtcagcaattgacccaaacaccaggcatcacatgtccagggaaaagactgagactatattgaaaattttagtgaagcaattctttgtagagaaagaagttacttccacattagtgatggactctttgtatacaagtctgaaggcacttgaataccggatgaagagcaagaaatgcaaaacaaaattagcagatttggaagaactacctgcgcctatggtccatgttgacatggacatgtttgttttggctgatgatgttatagctttgcttgagagggcagccttagaacccttgccttgtcaacctgtagcccccaaggatgacaaaacttcccaaagccgcatgaaggatggaagttctggcgaggtttacaaagtttctatggagcgtgaggaaagacgcctaactgagcttgctcagaagatactagagacatttgtgctatctcatatatttagcggaattgaagttgcataccaagaagctgttgctttgaaaaggcaagaagagcttattcgtgaagaggaggaggaggctggacttcttgaacatcagatgaaggggaagcgtggtggtggtgcaaatgaaaaggacaagcgtgccaagaaaaagcagaccaagcaaaagaagaacaaccgtaaggctaaagacaaggaaagagatgtgaaatgtgaggttaaaattctggaaaggcttcatgatgaaactgttattgataacagtgatggcttaccagctaaggtggaagtgatagccaaggttgatgccttggaagaaggttcttcagatgggtcagacatgccaaatagaggaaaaaatcagtgtaacaagggcttaagcattagtcttgccaaagaaggtgatggtcttccctccacctctagtgttacaggtggttcaggccgcaatagttctggctgctgcacagctccaaaactggatcaggatactgttctgcttaccttgagagataaacttcgtaagctagggcagcgtctgcaagagaaaaacattgaggggcagaaacttctcaaagctcattttgaagctagggacacaaaagtgaaggtagaagaatcttctgactcatctaattctttggataggccacctgatgttccagagagctcgatgcattcttcagaagatacagttgatcttaaagttaatggaacaccaaataaggatgcctctgtggtcaaccctgtcctggaggaatctgtttcaggcataccagtcactgcaaagaatgaatccttgccttctgccagaacaaaagaaggcccagtttcaaacaaagataacgcatcaagtttgaaaatgaaaaccatggcatcttgcttgaaattgcatccagctgatgtggataaagatgccccttttccttctaaatcaccacgaatcaatagggctgctccagttccctcgaagttaccttcggctgataaagctactccagttcttccaaaatcatctctgtcagtaaacaaagcagctctggtccgtcccaaatctccagcagttgacaaagcaactccagtttgtcctgaatctccagcagttgacaaagtaactccagttcgtcccagatctccagcagttgacaaagcaactccagttcgttctcaatctccagcagttgacaaagctactcatgtttgccctcaatctccatcagttgacaaggcaactccatccattgacaaagcaactccagttcgcccaaaatctccagccatagataaagtaactccaattcctcccaaatctccaccagttgacaaagcctctccagcaccaccaaaatcactatcaggtgctaaagatgtgcctgttccttcaaggtcgctgcaaattgataggttcattccagcccccccaagattatcgcaagttgataaagctgctctgccttcttcagaacagccacatatatctccagctactaattctgaagcccaaggggcaactacttctaggaaggtcacagccagctcagttttggaggttgctgcagcatcgaggccttcaagtgctcctgtgttacccacaccaagatcaactgcaccagttgcttcacatattcaaacttccacgttgctttcccgctcgatgagtgaggcagctgggagaaggtcagtaaatgatccttccttttctgccccatcttatactccccagacctaccgaaatgcaataattggtaagactggtctggctactacctctgcaaaccttgcatatcagtcctattctctgggtcaagatactgctccttcacagcctctatcagcatatgcatcaagcacagcagtcatgatgcctcctgctggaagatctgatcaatcatcagctaggcatggattcaagtctgggtctggtaagctagaagcacatgacagctggcagcagtggaaaggtgataataatgttgatatgcatctctggagggatcacactacctatcaacaaatgaccaggggtcaagcgtatgaccaatctcggagggacgatacttatcagcaaacatgcagcagaggaacagaaaagttcagcaggcacgcaggactgcaagctaggcagttccaaaccgagacacccgccagccatgtctggcaccaacaacaggggcaagtggcagaagagtttccacaccttgacatcataaacgatttgcttgaggaggaccagatcaacggcagtataccagagtcatttcatcaagattacaatgtgtttggcctgccattttcaccaagaggaaacgtgtcagatatgggaatggcttctgttagaagtcctgctcggttcaattcaaccaagtatgagtatgacggtggattctcgggggcttatgacataaatgcggtcaatgggttgagggaacggcagtttccctcgttggatagttactctaatggcctgtctgacgtgagtgcatcaaagccttggctgaatggctctcccagtccatcggtgatgagccttggggttaacacaaatggataccacccccaggttgcggactaccccagtctgggaaatggggtgaacggagtctccttgtggcgccgccatgctaacgggcgctggtaatgcgaggtgcctgtatacaatcatacagatggaataatgtttgttgtaacaaatggtttcgggcctgagctgatgtgccatgtaattaaaagttttaagttttaaaagggaaagaaagcgatacatgctgcaaaatctgccccgtgatttggttaatttgattgcttttctggttaaactctgttctataacgttttta

SEQ ID NO: 63447 - DNA, 4377 bp, Zea Mays
gttgaagctgatttggtttggatgcgtgtgtttaggcacgctgcctgcatcatcacagccaaaccacggcatccaccattccagctccaggccaggagaaaacgttccgggactgggactgcgttcaccttgctttttcttcccacgctcaccccgcaccgcgtgccctctctggctctctccctctcgtggggacgactgggcgaccgccgccgccgccgccttacgccaggtgcccaggtcttagtcggccccttcgccggcgacgaggacctaccagctgtgaataaggttgtctggaacggccgtgggctctgcggatggcaggttctgtggtaacggatgattcagctgctagcacaactggaatgagggatgatgaaaacagtctctctggcgagtccttctctgagtggaggtcctgtgatagggcagacagcgataccccttcaacatccccacccttctgggatagcgatggtgatgatgatgatcctggcagagtgtggcatctgccagctggtgtgaaggaggatgagaaggtgcaggtggagacgtggaagaagggggatggtggtgatggcccaaagccttcagaattgtttggacatcacacttggaggattgaaaacttctcaaaggagaagaaaagagaaatgaaaagtgagccatttgaagctggtggttacaaatggtatattcttgtataccctcaaggatgtgatgtctctaatcatctttcattattcctttgcgttgctaatcatgacaaacttctcccaggatggagtcattttgcacagttcactatagctgtagccaatatagatcctaaaaagatgaagtactcagatactttgcataggttttggaagaaggaacatgattggggatggaaaaagtttatggagctgtcaaagattcaggatggttttcttgttgacgatgttcttgaaatcatagctcaagttcaggtcatcagggagaaagtggatagaccttttcgttgccttgatcgtccttatcggagagaattaatccgcatctatatgacaaatgtggaacaaatctaccgacgtttcgttgaggagcgaagaagtaaattaagcaagctcattgaggacaaaatgaaatggtccagtttccgtgctttctggtcagcaattgacccaaacaccaggcatcacatgtccagggaaaagactgagactatattgaaaattttagtgaagcaattctttgtagagaaagaagttacttccacattagtgatggactctttgtatacaagtctgaaggcacttgaataccggatgaagagcaagaaatgcaaaacaaaattagcagatttggaagaactacctgcgcctatggtccatgttgacatggacatgtttgttttggctgatgatgttatagctttgcttgagagggcagccttagaacccttgccttgtcaacctgtagcccccaaggatgacaaaacttcccaaagccgcatgaaggatggaagttctggcgaggtttacaaagtttctatggagcgtgaggaaagacgcctaactgagcttgctcagaagatactagagacatttgtgctatctcatatatttagcggaattgaagttgcataccaagaagctgttgctttgaaaaggcaagaagagcttattcgtgaagaggaggaggaggctggacttcttgaacatcagatgaaggggaagcgtggtggtggtgcaaatgaaaaggacaagcgtgccaagaaaaagcagaccaagcaaaagaagaacaaccgtaaggctaaagacaaggaaagagatgtgaaatgtgaggttaaaattctggaaaggcttcatgatgaaactgttattgataacagtgatggcttaccagctaaggtggaagtgatagccaaggttgatgccttggaagaaggttcttcagatgggtcagacatgccaaatagtgttacaggtggttcaggccgcaatagttctggctgctgcacagctccaaaactggatcaggatactgttctgcttaccttgagagataaacttcgtaagctagggcagcgtctgcaagagaaaaacattgaggggcagaaacttctcaaagctcattttgaagctagggacacaaaagtgaaggtagaagaatcttctgactcatctaattctttggataggccacctgatgttccagagagctcgatgcattcttcagaagatacagttgatcttaaagttaatggaacaccaaataaggatgcctctgtggtcaaccctgtcctggaggaatctgtttcaggcataccagtcactgcaaagaatgaatccttgccttctgccagaacaaaagaaggcccagtttcaaacaaagataacgcatcaagtttgaaaatgaaaaccatggcatcttgcttgaaattgcatccagctgatgtggataaagatgccccttttccttctaaatcaccacgaatcaatagggctgctccagttccctcgaagttaccttcggctgataaagctactccagttcttccaaaatcatctctgtcagtaaacaaagcagctctggtccgtcccaaatctccagcagttgacaaagcaactccagtttgtcctgaatctccagcagttgacaaagtaactccagttcgtcccagatctccagcagttgacaaagcaactccagttcgttctcaatctccagcagttgacaaagctactcatgtttgccctcaatctccatcagttgacaaggcaactccatccattgacaaagcaactccagttcgcccaaaatctccagccatagataaagtaactccaattcctcccaaatctccaccagttgacaaagcctctccagcaccaccaaaatcactatcaggtgctaaagatgtgcctgttccttcaaggtcgctgcaaattgataggttcattccagcccccccaagattatcgcaagttgataaagctgctctgccttcttcagaacagccacatatatctccagctactaattctgaagcccaaggggcaactacttctaggaaggtcacagccagctcagttttggaggttgctgcagcatcgaggccttcaagtgctcctgtgttacccacaccaagatcaactgcaccagttgcttcacatattcaaacttccacgttgctttcccgctcgatgagtgaggcagctgggagaaggtcagtaaatgatccttccttttctgccccatcttatactccccagacctaccgaaatgcaataattggtaagactggtctggctactacctctgcaaaccttgcatatcagtcctattctctgggtcaagatactgctccttcacagcctctatcagcatatgcatcaagcacagcagtcatgatgcctcctgctggaagatctgatcaatcatcagctaggcatggattcaagtctgggtctggtaagctagaagcacatgacagctggcagcagtggaaaggtgataataatgttgatatgcatctctggagggatcacactacctatcaacaaatgaccaggggtcaagcgtatgaccaatctcggagggacgatacttatcagcaaacatgcagcagaggaacagaaaagttcagcaggcacgcaggactgcaagctaggcagttccaaaccgagacacccgccagccatgtctggcaccaacaacaggggcaagtggcagaagagtttccacaccttgacatcataaacgatttgcttgaggaggaccagatcaacggcagtataccagagtcatttcatcaagattacaatgtgtttggcctgccattttcaccaagaggaaacgtgtcagatatgggaatggcttctgttagaagtcctgctcggttcaattcaaccaagtatgagtatgacggtggattctcgggggcttatgacataaatgcggtcaatgggttgagggaacggcagtttccctcgttggatagttactctaatggcctgtctgacgtgagtgcatcaaagccttggctgaatggctctcccagtccatcggtgatgagccttggggttaacacaaatggataccacccccaggttgcggactaccccagtctgggaaatggggtgaacggagtctccttgtggcgccgccatgctaacgggcgctggtaatgcgaggtgcctgtatacaatcatacagatggaataatgtttgttgtaacaaatggtttcgggcctgagctgatgtgccatgtaattaaaagttttaagttttaaaagggaaagaaagcgatacatgctgcaaaatctgccccgtgatttggttaatttgattgcttttctggttaaactctgttctataacgttttta

SEQ ID NO: 63448 - DNA, 4389 bp, Zea Mays
gttgaagctgatttggtttggatgcgtgtgtttaggcacgctgcctgcatcatcacagccaaaccacggcatccaccattccagctccaggccaggagaaaacgttccgggactgggactgcgttcaccttgctttttcttcccacgctcaccccgcaccgcgtgccctctctggctctctccctctcgtggggacgactgggcgaccgccgccgccgccgccttacgccaggtgcccaggtcttagtcggccccttcgccggcgacgaggacctaccagctgtgaataaggttgtctggaacggccgtgggctctgcggatggcaggttctgtggtaacggatgattcagctgctagcacaactggaatgagggatgatgaaaacagtctctctggcgagtccttctctgagtggaggtcctgtgatagggcagacagcgataccccttcaacatccccacccttctgggatagcgatggtgatgatgatgatcctggcccaaagccttcagaattgtttggacatcacacttggaggattgaaaacttctcaaaggagaagaaaagagaaatgaaaagtgagccatttgaagctggtggttacaaatggtatattcttgtataccctcaaggatgtgatgtctctaatcatctttcattattcctttgcgttgctaatcatgacaaacttctcccaggatggagtcattttgcacagttcactatagctgtagccaatatagatcctaaaaagatgaagtactcaggtgagctgaacttggtttgttttcttcttggaaggttttggaagaaggaacatgattggggatggaaaaagtttatggagctgtcaaagattcaggatggttttcttgttgacgatgttcttgaaatcatagctcaagttcaggtcatcagggagaaagtggatagaccttttcgttgccttgatcgtccttatcggagagaattaatccgcatctatatgacaaatgtggaacaaatctaccgacgtttcgttgaggagcgaagaagtaaattaagcaagctcattgaggacaaaatgaaatggtccagtttccgtgctttctggtcagcaattgacccaaacaccaggcatcacatgtccagggaaaagactgagactatattgaaaattttagtgaagcaattctttgtagagaaagaagttacttccacattagtgatggactctttgtatacaagtctgaaggcacttgaataccggatgaagagcaagaaatgcaaaacaaaattagcagatttggaagaactacctgcgcctatggtccatgttgacatggacatgtttgttttggctgatgatgttatagctttgcttgagagggcagccttagaacccttgccttgtcaacctgtagcccccaaggatgacaaaacttcccaaagccgcatgaaggatggaagttctggcgaggtttacaaagtttctatggagcgtgaggaaagacgcctaactgagcttgctcagaagatactagagacatttgtgctatctcatatatttagcggaattgaagttgcataccaagaagctgttgctttgaaaaggcaagaagagcttattcgtgaagaggaggaggaggctggacttcttgaacatcagatgaaggggaagcgtggtggtggtgcaaatgaaaaggacaagcgtgccaagaaaaagcagaccaagcaaaagaagaacaaccgtaaggctaaagacaaggaaagagatgtgaaatgtgaggttaaaattctggaaaggcttcatgatgaaactgttattgataacagtgatggcttaccagctaaggtggaagtgatagccaaggttgatgccttggaagaaggttcttcagatgggtcagacatgccaaatagaggaaaaaatcagtgtaacaagggcttaagcattagtcttgccaaagaaggtgatggtcttccctccacctctagtgttacaggtggttcaggccgcaatagttctggctgctgcacagctccaaaactggatcaggatactgttctgcttaccttgagagataaacttcgtaagctagggcagcgtctgcaagagaaaaacattgaggggcagaaacttctcaaagctcattttgaagctagggacacaaaagtgaaggtagaagaatcttctgactcatctaattctttggataggccacctgatgttccagagagctcgatgcattcttcagaagatacagttgatcttaaagttaatggaacaccaaataaggatgcctctgtggtcaaccctgtcctggaggaatctgtttcaggcataccagtcactgcaaagaatgaatccttgccttctgccagaacaaaagaaggcccagtttcaaacaaagataacgcatcaagtttgaaaatgaaaaccatggcatcttgcttgaaattgcatccagctgatgtggataaagatgccccttttccttctaaatcaccacgaatcaatagggctgctccagttccctcgaagttaccttcggctgataaagctactccagttcttccaaaatcatctctgtcagtaaacaaagcagctctggtccgtcccaaatctccagcagttgacaaagcaactccagtttgtcctgaatctccagcagttgacaaagtaactccagttcgtcccagatctccagcagttgacaaagcaactccagttcgttctcaatctccagcagttgacaaagctactcatgtttgccctcaatctccatcagttgacaaggcaactccatccattgacaaagcaactccagttcgcccaaaatctccagccatagataaagtaactccaattcctcccaaatctccaccagttgacaaagcctctccagcaccaccaaaatcactatcaggtgctaaagatgtgcctgttccttcaaggtcgctgcaaattgataggttcattccagcccccccaagattatcgcaagttgataaagctgctctgccttcttcagaacagccacatatatctccagctactaattctgaagcccaaggggcaactacttctaggaaggtcacagccagctcagttttggaggttgctgcagcatcgaggccttcaagtgctcctgtgttacccacaccaagatcaactgcaccagttgcttcacatattcaaacttccacgttgctttcccgctcgatgagtgaggcagctgggagaaggtcagtaaatgatccttccttttctgccccatcttatactccccagacctaccgaaatgcaataattggtaagactggtctggctactacctctgcaaaccttgcatatcagtcctattctctgggtcaagatactgctccttcacagcctctatcagcatatgcatcaagcacagcagtcatgatgcctcctgctggaagatctgatcaatcatcagctaggcatggattcaagtctgggtctggtaagctagaagcacatgacagctggcagcagtggaaaggtgataataatgttgatatgcatctctggagggatcacactacctatcaacaaatgaccaggggtcaagcgtatgaccaatctcggagggacgatacttatcagcaaacatgcagcagaggaacagaaaagttcagcaggcacgcaggactgcaagctaggcagttccaaaccgagacacccgccagccatgtctggcaccaacaacaggggcaagtggcagaagagtttccacaccttgacatcataaacgatttgcttgaggaggaccagatcaacggcagtataccagagtcatttcatcaagattacaatgtgtttggcctgccattttcaccaagaggaaacgtgtcagatatgggaatggcttctgttagaagtcctgctcggttcaattcaaccaagtatgagtatgacggtggattctcgggggcttatgacataaatgcggtcaatgggttgagggaacggcagtttccctcgttggatagttactctaatggcctgtctgacgtgagtgcatcaaagccttggctgaatggctctcccagtccatcggtgatgagccttggggttaacacaaatggataccacccccaggttgcggactaccccagtctgggaaatggggtgaacggagtctccttgtggcgccgccatgctaacgggcgctggtaatgcgaggtgcctgtatacaatcatacagatggaataatgtttgttgtaacaaatggtttcgggcctgagctgatgtgccatgtaattaaaagttttaagttttaaaagggaaagaaagcgatacatgctgcaaaatctgccccgtgatttggttaatttgattgcttttctggttaaactctgttctataacgttttta

SEQ ID NO: 63449 - DNA, 706 bp, Zea Mays
actattcatgaggtgaccagtgatggtttattttctgttggagaaatggagtgcatgggttgctgtgtgaatgctcctatgattgctgtggctgactactcgaaaggctcagagggttacacatataactactatgaggacctcactccaaaacgagttgttgagattgttgagatgcttagaagaggtgaaacaccccctcgaggtacacagcacccagagcgaaaaaactgtggccctgccggggggaacaccaccttgcacggagagccgaaacctcctccatgcagggatctggatgcctgctaggtttgcttcggagcattacgagcacgcgcataacttggctcgtactgtaaggtgtgcaaactgcacacagcggaggctgtgttatttgtattctgaagctttcttgtgtttcgtcaagaaagcttctctaacttttatcctgcactatcagataaacggtaaattgatagagaataagatgttttcgagctcatgtttagtggcaaacgctttatatttttggcaagctgtgaaggagctgaaccagtgacaactcgaagaattcattttgttgtattaagtcttcttgttagcccattaaacgatgagatcgtatacttgaaattctcgaattttacaaatcaacattggattctctgcaatgacagatggttgttatcgtatctatcattctcaa

SEQ ID NO: 63450 - DNA, 1356 bp, Zea Mays
ccatctcacaatctaataaaagaggggagccgcctcttcccagttcacacggacccgttgcgtgagcgcacccctcgtactcccatagtcccatcccatggaggccaccccgatctccatgaagccaccgtctccggcgccggcggcgccacccccagccactctggagcccggggacttgccaacgcatgccttcggagggaccgagctggagccgtccagtatgaaccagctcgcaatagctccggaccccaaacggccgagggtggaggaggctgcggacggcaacgggtgcaagcattgcgcctgcaaaaagtccagatgcttgaagctctattgcccatgtttttctggaggtggttattgctctgataagtgtggctgccaaccatgtttcaacaaagaagcttttgcagaaacagttcatactactcgcaaggtgttactttcgagacagaagcgtatgtcaatgaaaatcaataggagacctgaggcgaataccgaaccaatggaagatgctcaccattcttcttcttcaactccaccaaagagaggttgcaactgcaagaagtcaagttgcctaaagaaatactgtgattgctaccaggatgggactggatgttccttgttttgccgctgtgacgattgccagaacccttttgggaaaaatgaaggcataatggctgacgacagtaagcggtatttatacactggtgctgatttggatcacagcgagggcgaacatgacttcgttgtggagcgctcgcctcgtctgcaatcacctatctcgaaggagtcttccttcccaccaaaccccacctcatctcagggcgtcaagcagagacgcgcacgttttcccacacgcgatatcccagtggcaggcgctgccccgctcgtggcactgttccaacaagaggaacagcagcgaccgagccatggacgactccgcgaactacaagaactcgaaccatgactactggcaggtggagaaatcggttgcccccgacgtcttcctgcagccgggcaaccgggaaattttcgtctccctcagcggcgacgtgcgcgccatgtggctgaagcgcaagattcagcacctggcttaaattttccttgtgctgtgccgttcttccgagtggagtacaatcttttagattgtgcatgttcttctggtcgtggggtgggcgtgcacaggattctaggttcttttttcgccctgtatactgaggtgtatttctggattacggttatgtattgtctttgtagagagagccgttttcgagcctggtatcggctataataaaatgagattatacattgtttcccggctatggttgccagactgtcatgtacatttcc

SEQ ID NO: 63451 - DNA, 2141 bp, Zea Mays
tttttttatggagtcaaatgaagatactcttgatatgagaacgttatatttttttgacgagatctaaactttctagttttaagtcaagatcattaaatcgctaaaaaaagacacattcagcttaaaggaattttggattttttatacagatattgttaaaaccaaatctaactgaaaccgcacgaaagataaaaaaagtttgaattaataacacgtgacaaatacaaccttatataatggcacaaaaggccttgataacggccccaacccggtcgttgcgctggcagcctcaaagcgcccgcgaaaagagccactgcgccgcgccgcgccgccgcccctccgactccgcgtcggtgatcaaccgtctcgtctccgtgacccatccgtccaccgtgcttctcgcttcctgccgaagaggagggaggtctcgcggcgcggggcgcccgattatccgaccgaccggccgagatggtgctcgcggagctgggcgggagcatcgcccgcgcactggcgcggatgagcaacgccaccgtggtggacgagaaggtgctagcagactgcctcaacgagatctgccgcgcgctcctgcaggccgacgtccgcttcgacacggtccgcgacgtcaaggccaacatcaatcgcattgtcaatctcgacgcgctcgccgccggcaccaacaagcgccgcatcatacagcaggccgttgtcgatgagttgcgcaggatgctggatcccgggaagccatccttcacccccagcaaagggaagcccaatgtggtcatgttcgtcggcttgcagggttctgggaaaactactacctgcaccaagtacgcagattatcatcgacggaagggatttaatcctgcacttgtttgtgctgatacattcagagccggtgcttttgatcaactgaaacagaatgcaacaaaagccaagataccattctacggaagttacaccgaatcagatcctgtgaaaattgctgttgagggtgtggacatgttcatgaaagaaaagtatgatctcattattgttgatacaagtggacgccacaagcaagaagctgccctcttcgaagaaatgcgccaagtttcagaagctacaacctggtgatattcgttatggatggtagtattggtcaagctgcatttgatcaggcacaagcatttaaacagagtgcttcggttggtgctgtgattgttacaaaaatggatggtcatgcgaaaggtggcggtgcacttagcgcggttgcagctacaaaaagccctgtgatatttattggaactggagaacatattccagactttgaggttttcgaagtgaatccattcgttagccgtctcttgggtatgggtgacttgtctggcttggtgaacaagatccaggaatttatgcctgataatcagcaaatgcagatcatggataagttgggtgaaggaaccttcacactcaggcttctatatgagatgttccagaacctccagagaataggtcctcttggacagctcgtctctatgatacctggatttagcggccagtttattgaaaagggaaatgagaaggaaggccaagcgaagattaagcggtacatgacaatgatggactccatgaccgatgcagagcttgacgggacggacccaaagctgatgaaccagtcacgaatcaaccggatcgctcggggatccggcaggcgcgtggaggaagtggtgcacatgctggacgagtacaagcgaattgccaaggtgtggaagaaattgccagtgttgaacaacaacaggagatcggatatgaaccgcgacattaggcgcataagcgatgcgattcctcccaatatgctgactcagcttggtggcatcgctgggctgcagaatatgatcaaacaaatgggcgggcgcgatcgaagtagatgagataaaccattcaagtcgtggatagcaaccgttaggtataggtaggctgtgagtactacttggtgggacgagttgggtcaaggctgcttttgagcttctcgcgtcaagttactattagtttgccaggcgtgcttgtactgtatataattttaacaagttggaatctgatcattctctacactattcttgaatcttgatagaggagtcttcctgaaaattgctggatgccag

SEQ ID NO: 63452 - DNA, 1998 bp, Zea Mays
acctaaaccttgctaccatataaaccttttcactgctccagccgccgccgccgccgtttcttcgtcttcctcgcagcgccgccgctccatcttccgctgatccgctcgctcccgcctctcgccacgcaggcggcggcgctcaggcccgtgatttcagcgacggcgtcagcggcttcccctcccgtctcttcccagtcgcctcgcgccctcgcctccggtcctccgcacaccggccggtgaccctgcgtgcgtgcctctctctctctctctctctctctctctctatctctcctcccgcctccagttgatcgtcaacggcgcccgaccccggcggctgcgccgcgcgcagcctgagggcagcgggagcgagcagccgctgctccaccaaggcggtctcgccgctttgggagcgcttatgccccaaagtgaagcgttacctgtcctcttagagcttcagcgcgctgaagcgtgctcagtgccgctttttggaaccctgtttatcattttgtcttctgctatctgcagtttagatacgattatacgaaatgttcctcagatgcatataattatgagttagttattctgaaccttctactgtgaaatgatttctcaccattctgatcacgctgtccattattgtgtttgtggttatatcttcttcattttatatgttcacgtagatccaccatgactggtgtcagcactggattgttgacgggcttgaggagggtcatggaacagcaaaggatttcaaccgctttctgcagacaatcacgagtttcgagctctactgtttctttctctgacctcgatgagaagggtgacatggaatatgatgataactctccaaattcaaagagggagttacgaccccaaggtgtagatcccaataagggctgggaattccgtggtgtgcacagggccatcatctgtggcaaagttggacaagtccctgtgcaaaaaattttaaggaatgggcatacagtaaccgtttttactgttggaactggtggcatgtttgaccagagggtaattgggcctaaggatttgccaaagccagctcagtggcaccgcatagctgtccataatgactacttaagtgcttatgctgttcagaagctggtgaagaagtatgtggtttaataaaaaaatcctcatcttaccttgaatacaactatatctatcttttttgctatggatgctgttatatatatatatatttttttttcttttaccttgtgttagttctgctgtctatgttgagggtgatattgaaaccagggtctacaatgacagtgttaatgatcaagtcaaaaacatacctgagatatgtgttcgacgtgatggtatgctgattcgcacaagcttctttcctatcatgtttattattgagactgtattccacataagtagttttcatatgtaactcaacagcaatgacatttttttacgtgataacatagggtgtccttgtatggtaggttacatctaccttttattttcatgtctccgttgaagaaagcctaatgtttggataactattctatgtgcaggcaagattcaattggttaaatctggggacagtgctgctaacatatcattagatgaactaagagaaggactgttctagctatagtgaaagatgtcaggagtatgcttctggcttgagtgtgttttgctggcaccgggcaggctatcagctcatctgcattgtgtccagatgagatgctctgtgctgcggttgttttgctgaatgcttggagcatggtatccttgaactgaagtggcgcttgagaattggaggagttttggtttgacatgagaaaggctggcatggttttcccttcactcacaccgggaacgcagaagcctgcagttctcttccctgcctaaaacactagtaaaatgacaacgcgaggctccatgatgttgatgtccttgcccgcgagtagatgcgcaccaatagttcgcaccctgttctcacatcctcaacgacac

SEQ ID NO: 63453 - DNA, 932 bp, Zea Mays
acctaaaccttgctaccatataaaccttttcactgctccagccgccgccgccgccgtttcttcgtcttcctcgcagcgccgccgctccatcttccgctgatccgctcgctcccgcctctcgccacgcaggcggcggcgctcaggcccgtgatttcagcgacggcgtcagcggcttcccctcccgtctcttcccagtcgcctcgcgccctcgcctccggtcctccgcacaccggccggtgaccctgcatccaccatgactggtgtcagcactggattgttgacgggcttgaggagggtcatggaacagcaaaggatttcaaccgctttctgcagacaatcacgagtttcgagctctactgtttctttctctgacctcgatgagaagggtgacatggaatatgatgataactctccaaattcaaagagggagttacgaccccaaggtgtagatcccaataagggctgggaattccgtggtgtgcacagggcaagattcaattggttaaatctggggacagtgctgctaacatatcattagatgaactaagagaaggactgttctagctatagtgaaagatgtcaggagtatgcttctggcttgagtgtgttttgctggcaccgggcaggctatcagctcatctgcattgtgtccagatgagatgctctgtgctgcggttgttttgctgaatgcttggagcatggtatccttgaactgaagtggcgcttgagaattggaggagttttggtttgacatgagaaaggctggcatggttttcccttcactcacaccgggaacgcagaagcctgcagttctcttccctgcctaaaacactagtaaaatgacaacgcgaggctccatgatgttgatgtccttgcccgcgagtagatgcgcaccaatagttcgcaccctgttctcacatcctcaacgacac

SEQ ID NO: 63454 - DNA, 1242 bp, Zea Mays
acctaaaccttgctaccatataaaccttttcactgctccagccgccgccgccgccgtttcttcgtcttcctcgcagcgccgccgctccatcttccgctgatccgctcgctcccgcctctcgccacgcaggcggcggcgctcaggcccgtgatttcagcgacggcgtcagcggcttcccctcccgtctcttcccagtcgcctcgcgccctcgcctccggtcctccgcacaccggccggtgaccctgcatccaccatgactggtgtcagcactggattgttgacgggcttgaggagggtcatggaacagcaaaggatttcaaccgctttctgcagacaatcacgagtttcgagctctactgtttctttctctgacctcgatgagaagggtgacatggaatatgatgataactctccaaattcaaagagggagttacgaccccaaggtgtagatcccaataagggctgggaattccgtggtgtgcacagggccatcatctgtggcaaagttggacaagtccctgtgcaaaaaattttaaggaatgggcatacagtaaccgtttttactgttggaactggtggcatgtttgaccagagggtaattgggcctaaggatttgccaaagccagctcagtggcaccgcatagctgtccataatgactacttaagtgcttatgctgttcagaagctggtgaagaattctgctgtctatgttgagggtgatattgaaaccagggtctacaatgacagtgttaatgatcaagtcaaaaacatacctgagatatgtgttcgacgtgatggcaagattcaattggttaaatctggggacagtgctgctaacatatcattagatgaactaagagaaggactgttctagctatagtgaaagatgtcaggagtatgcttctggcttgagtgtgttttgctggcaccgggcaggctatcagctcatctgcattgtgtccagatgagatgctctgtgctgcggttgttttgctgaatgcttggagcatggtatccttgaactgaagtggcgcttgagaattggaggagttttggtttgacatgagaaaggctggcatggttttcccttcactcacaccgggaacgcagaagcctgcagttctcttccctgcctaaaacactagtaaaatgacaacgcgaggctccatgatgttgatgtccttgcccgcgagtagatgcgcaccaatagttcgcaccctgttctcacatcctcaacgacac

SEQ ID NO: 63455 - DNA, 1586 bp, Zea Mays
cgaatattaatttgcaaccagcacctaaaccttgctaccatataaaccttttcactgctccagccgccgccgccgccgtttcttcgtcttcctcgcagcgccgccgctccatcttccgctgatccgctcgctcccgcctctcgccacgcaggcggcggcgctcaggcccgtgatttcagcgacggcgtcagcggcttcccctcccgtctcttcccagtcgcctcgcgccctcgcctccggtcctccgcacaccggccggtgaccctgcatccaccatgactggtgtcagcactggattgttgacgggcttgaggagggtcatggaacagcaaaggatttcaaccgctttctgcagacaatcacgagtttcgagctctactgtttctttctctgacctcgatgagaagggtgacatggaatatgatgataactctccaaattcaaagagggagttacgaccccaaggtgtagatcccaataagggctgggaattccgtggtgtgcacagggccatcatctgtggcaaagttggacaagtccctgtgcaaaaaattttaaggaatgggcatacagtaaccgtttttactgttggaactggtggcatgtttgaccagagggtaattgggcctaaggatttgccaaagccagctcagtggcaccgcatagctgtccataatgactacttaagtgcttatgctgttcagaagctggtgaagaagtatgtggtttaataaaaaaatcctcatcttaccttgaatacaactatatctatcttttttgctatggatgctgttatatatatatatatttttttttcttttaccttgtgttagttctgctgtctatgttgagggtgatattgaaaccagggtctacaatgacagtgttaatgatcaagtcaaaaacatacctgagatatgtgttcgacgtgatggtatgctgattcgcacaagcttctttcctatcatgtttattattgagactgtattccacataagtagttttcatatgtaactcaacagcaatgacatttttttacgtgataacatagggtgtccttgtatggtaggttacatctaccttttattttcatgtctccgttgaagaaagcctaatgtttggataactattctatgtgcaggcaagattcaattggttaaatctggggacagtgctgctaacatatcattagatgaactaagagaaggactgttctagctatagtgaaagatgtcaggagtatgcttctggcttgagtgtgttttgctggcaccgggcaggctatcagctcatctgcattgtgtccagatgagatgctctgtgctgcggttgttttgctgaatgcttggagcatggtatccttgaactgaagtggcgcttgagaattggaggagttttggtttgacatgagaaaggctggcatggttttcccttcactcacaccgggaacgcagaagcctgcagttctcttccctgcctaaaacactagtaaaatgacaacgcgaggctccatgatgttgatgtccttgcccgcgagtagatgcgcaccaatagttcgcaccctgttctcacatcctcaacgacac

SEQ ID NO: 63456 - DNA, 1640 bp, Zea Mays
acctaaaccttgctaccatataaaccttttcactgctccagccgccgccgccgccgtttcttcgtcttcctcgcagcgccgccgctccatcttccgctgatccgctcgctcccgcctctcgccacgcaggcggcggcgctcaggcccgtgatttcagcgacggcgtcagcggcttcccctcccgtctcttcccagtcgcctcgcgccctcgcctccggtcctccgcacaccggccggtgaccctgcgtgcgtgcctctctctctctctctctctctctctctctatctctcctcccgcctccagttgatcgtcaacggcgcccgaccccggcggctgcgccgcgcgcagcctgagggcagcgggagcgagcagccgctgctccaccaaggcggtctcgccgctttgggagcgcttatgccccaaagtgaagcgttacctgtcctcttagagcttcagcgcgctgaagcgtgctcagtgccgctttttggaaccctgtttatcattttgtcttctgctatctgcagtttagatacgattatacgaaatgttcctcagatgcatataattatgagttagttattctgaaccttctactgtgaaatgatttctcaccattctgatcacgctgtccattattgtgtttgtggttatatcttcttcattttatatgttcacgtagatccaccatgactggtgtcagcactggattgttgacgggcttgaggagggtcatggaacagcaaaggatttcaaccgctttctgcagacaatcacgagtttcgagctctactgtttctttctctgacctcgatgagaagggtgacatggaatatgatgataactctccaaattcaaagagggagttacgaccccaaggtgtagatcccaataagggctgggaattccgtggtgtgcacagggccatcatctgtggcaaagttggacaagtccctgtgcaaaaaattttaaggaatgggcatacagtaaccgtttttactgttggaactggtggcatgtttgaccagagggtaattgggcctaaggatttgccaaagccagctcagtggcaccgcatagctgtccataatgactacttaagtgcttatgctgttcagaagctggtgaagaattctgctgtctatgttgagggtgatattgaaaccagggtctacaatgacagtgttaatgatcaagtcaaaaacatacctgagatatgtgttcgacgtgatggcaagattcaattggttaaatctggggacagtgctgctaacatatcattagatgaactaatctttggttgcaggagaaggactgttctagctatagtgaaagatgtcaggagtatgcttctggcttgaggcaagtttgagtatgtttgtgcttcttagtctcagcactactagtattagagtgatgcttcatgcttgcgtacccctctggctgggttttcattcgtttgaactctagcttatattgccaaatttacttatctgcagaatatttgagccctcaatgaaacatctctctgtgtaatttactgctactgtcttttccatgcgatgcgcatctgtcattaactcattatctaggcctccttgatcctcatgttggctttcttttagtaaaaaaagaagtaccc

SEQ ID NO: 63457 - DNA, 1699 bp, Zea Mays
acctaaaccttgctaccatataaaccttttcactgctccagccgccgccgccgccgtttcttcgtcttcctcgcagcgccgccgctccatcttccgctgatccgctcgctcccgcctctcgccacgcaggcggcggcgctcaggcccgtgatttcagcgacggcgtcagcggcttcccctcccgtctcttcccagtcgcctcgcgccctcgcctccggtcctccgcacaccggccggtgaccctgcgtgcgtgcctctctctctctctctctctctctctctctatctctcctcccgcctccagttgatcgtcaacggcgcccgaccccggcggctgcgccgcgcgcagcctgagggcagcgggagcgagcagccgctgctccaccaaggcggtctcgccgctttgggagcgcttatgccccaaagtgaagcgttacctgtcctcttagagcttcagcgcgctgaagcgtgctcagtgccgctttttggaaccctgtttatcattttgtcttctgctatctgcagtttagatacgattatacgaaatgttcctcagatgcatataattatgagttagttattctgaaccttctactgtgaaatgatttctcaccattctgatcacgctgtccattattgtgtttgtggttatatcttcttcattttatatgttcacgtagatccaccatgactggtgtcagcactggattgttgacgggcttgaggagggtcatggaacagcaaaggatttcaaccgctttctgcagacaatcacgagtttcgagctctactgtttctttctctgacctcgatgagaagggtgacatggaatatgatgataactctccaaattcaaagagggagttacgaccccaaggtgtagatcccaataagggctgggaattccgtggtgtgcacagggtatggacataaaactggacatcctatatcttttatatgaaattctgcccgttgttttgtttttgaggagcactattgtacagttataatctgttctgcttttgctaggccatcatctgtggcaaagttggacaagtccctgtgcaaaaaattttaaggaatgggcatacagtaaccgtttttactgttggaactggtggcatgtttgaccagagggtaattgggcctaaggatttgccaaagccagctcagtggcaccgcatagctgtccataatgactacttaagtgcttatgctgttcagaagctggtgaagaaggtctacaatgacagtgttaatgatcaagtcaaaaacatacctgagatatgtgttcgacgtgatggcaagattcaattggttaaatctggggacagtgctgctaacatatcattagatgaactaagagaaggactgttctagctatagtgaaagatgtcaggagtatgcttctggcttgaggcaagtttgagtatgtttgtgcttcttagtctcagcactactagtattagagtgatgcttcatgcttgcgtacccctctggctgggttttcattcgtttgaactctagcttatattgccaaatttacttatctgcagaatatttgagccctcaatgaaacatctctctgtgtaatttactgctactgtcttttccatgcgatgcgcatctgtcattaactcattatctaggcctccttgatcctcatgttggctttcttttagtaaaaaaagaagtaccc

SEQ ID NO: 63458 - DNA, 1263 bp, Zea Mays
acctaaaccttgctaccatataaaccttttcactgctccagccgccgccgccgccgtttcttcgtcttcctcgcagcgccgccgctccatcttccgctgatccgctcgctcccgcctctcgccacgcaggcggcggcgctcaggcccgtgatttcagcgacggcgtcagcggcttcccctcccgtctcttcccagtcgcctcgcgccctcgcctccggtcctccgcacaccggccggtgaccctgcatccaccatgactggtgtcagcactggattgttgacgggcttgaggagggtcatggaacagcaaaggatttcaaccgctttctgcagacaatcacgagtttcgagctctactgtttctttctctgacctcgatgagaagggtgacatggaatatgatgataactctccaaattcaaagagggagttacgaccccaaggtgtagatcccaataagggctgggaattccgtggtgtgcacagggccatcatctgtggcaaagttggacaagtccctgtgcaaaaaattttaaggaatgggcatacagtaaccgtttttactgttggaactggtggcatgtttgaccagagggtaattgggcctaaggatttgccaaagccagctcagtggcaccgcatagctgtccataatgactacttaagtgcttatgctgttcagaagctggtgaagaattctgctgtctatgttgagggtgatattgaaaccagggtctacaatgacagtgttaatgatcaagtcaaaaacatacctgagatatgtgttcgacgtgatggtatgctgattcgcacaagcttctttcctatcatgtttattattgagactgtattccacataagtagttttcatatgtaactcaacagcaatgacatttttttacgtgataacatagggtgtccttgtatggtaggttacatctaccttttattttcatgtctccgttgaagaaagcctaatgtttggataactattctatgtgcaggcaagattcaattggttaaatctggggacagtgctgctaacatatcattagatgaactaagagaaggactgttctagctatagtgaaagatgtcaggagtatgcttctggcttgagaatatttgagccctcaatgaaacatctctctgtgtaatttactgctactgtcttttccatgcgatgcgcatctgtcattaactcattatctaggcctccttgatcctcatgttggctttcttttagtaaaaaaagaagtaccc

SEQ ID NO: 63459 - DNA, 1056 bp, Zea Mays
acctaaaccttgctaccatataaaccttttcactgctccagccgccgccgccgccgtttcttcgtcttcctcgcagcgccgccgctccatcttccgctgatccgctcgctcccgcctctcgccacgcaggcggcggcgctcaggcccgtgatttcagcgacggcgtcagcggcttcccctcccgtctcttcccagtcgcctcgcgccctcgcctccggtcctccgcacaccggccggtgaccctgcatccaccatgactggtgtcagcactggattgttgacgggcttgaggagggtcatggaacagcaaaggatttcaaccgctttctgcagacaatcacgagtttcgagctctactgtttctttctctgacctcgatgagaagggtgacatggaatatgatgataactctccaaattcaaagagggagttacgaccccaaggtgtagatcccaataagggctgggaattccgtggtgtgcacagggccatcatctgtggcaaagttggacaagtccctgtgcaaaaaattttaaggaatgggcatacagtaaccgtttttactgttggaactggtggcatgtttgaccagagggtaattgggcctaaggatttgccaaagccagctcagtggcaccgcatagctgtccataatgactacttaagtgcttatgctgttcagaagctggtgaagaattctgctgtctatgttgagggtgatattgaaaccagggtctacaatgacagtgttaatgatcaagtcaaaaacatacctgagatatgtgttcgacgtgatggcaagattcaattggttaaatctggggacagtgctgctaacatatcattagatgaactaagagaaggactgttctagctatagtgaaagatgtcaggagtatgcttctggcttgagaatatttgagccctcaatgaaacatctctctgtgtaatttactgctactgtcttttccatgcgatgcgcatctgtcattaactcattatctaggcctccttgatcctcatgttggctttcttttagtaaaaaaagaagtaccc

SEQ ID NO: 63460 - DNA, 746 bp, Zea Mays
acctaaaccttgctaccatataaaccttttcactgctccagccgccgccgccgccgtttcttcgtcttcctcgcagcgccgccgctccatcttccgctgatccgctcgctcccgcctctcgccacgcaggcggcggcgctcaggcccgtgatttcagcgacggcgtcagcggcttcccctcccgtctcttcccagtcgcctcgcgccctcgcctccggtcctccgcacaccggccggtgaccctgcatccaccatgactggtgtcagcactggattgttgacgggcttgaggagggtcatggaacagcaaaggatttcaaccgctttctgcagacaatcacgagtttcgagctctactgtttctttctctgacctcgatgagaagggtgacatggaatatgatgataactctccaaattcaaagagggagttacgaccccaaggtgtagatcccaataagggctgggaattccgtggtgtgcacagggcaagattcaattggttaaatctggggacagtgctgctaacatatcattagatgaactaagagaaggactgttctagctatagtgaaagatgtcaggagtatgcttctggcttgagaatatttgagccctcaatgaaacatctctctgtgtaatttactgctactgtcttttccatgcgatgcgcatctgtcattaactcattatctaggcctccttgatcctcatgttggctttcttttagtaaaaaaagaagtaccc

SEQ ID NO: 63461 - DNA, 1949 bp, Zea Mays
acctaaaccttgctaccatataaaccttttcactgctccagccgccgccgccgccgtttcttcgtcttcctcgcagcgccgccgctccatcttccgctgatccgctcgctcccgcctctcgccacgcaggcggcggcgctcaggcccgtgatttcagcgacggcgtcagcggcttcccctcccgtctcttcccagtcgcctcgcgccctcgcctccggtcctccgcacaccggccggtgaccctgcgtgcgtgcctctctctctctctctctctctctctctctatctctcctcccgcctccagttgatcgtcaacggcgcccgaccccggcggctgcgccgcgcgcagcctgagggcagcgggagcgagcagccgctgctccaccaaggcggtctcgccgctttgggagcgcttatgccccaaagtgaagcgttacctgtcctcttagagcttcagcgcgctgaagcgtgctcagtgccgctttttggaaccctgtttatcattttgtcttctgctatctgcagtttagatacgattatacgaaatgttcctcagatgcatataattatgagttagttattctgaaccttctactgtgaaatgatttctcaccattctgatcacgctgtccattattgtgtttgtggttatatcttcttcattttatatgttcacgtagatccaccatgactggtgtcagcactggattgttgacgggcttgaggagggtcatggaacagcaaaggatttcaaccgctttctgcagacaatcacgagtttcgagctctactgtttctttctctgacctcgatgagaagggtgacatggaatatgatgataactctccaaattcaaagagggagttacgaccccaaggtgtagatcccaataagggctgggaattccgtggtgtgcacagggccatcatctgtggcaaagttggacaagtccctgtgcaaaaaattttaaggaatgggcatacagtaaccgtttttactgttggaactggtggcatgtttgaccagagggtaattgggcctaaggatttgccaaagccagctcagtggcaccgcatagctgtccataatgactacttaagtgcttatgctgttcagaagctggtgaagaagtatgtggtttaataaaaaaatcctcatcttaccttgaatacaactatatctatcttttttgctatggatgctgttatatatatatatatttttttttcttttaccttgtgttagttctgctgtctatgttgagggtgatattgaaaccagggtctacaatgacagtgttaatgatcaagtcaaaaacatacctgagatatgtgttcgacgtgatggtatgctgattcgcacaagcttctttcctatcatgtttattattgagactgtattccacataagtagttttcatatgtaactcaacagcaatgacatttttttacgtgataacatagggtgtccttgtatggtaggttacatctaccttttattttcatgtctccgttgaagaaagcctaatgtttggataactattctatgtgcaggcaagattcaattggttaaatctggggacagtgctgctaacatatcattagatgaactaagagaaggactgttctagctatagtgaaagatgtcaggagtatgcttctggcttgaggcaagtttgagtatgtttgtgcttcttagtctcagcactactagtattagagtgatgcttcatgcttgcgtacccctctggctgggttttcattcgtttgaactctagcttatattgccaaatttacttatctgcagaatatttgagccctcaatgaaacatctctctgtgtaatttactgctactgtcttttccatgcgatgcgcatctgtcattaactcattatctaggcctccttgatcctcatgttggctttcttttagtaaaaaaagaagtaccc

SEQ ID NO: 63462 - DNA, 1524 bp, Zea Mays
tataatttatggatggaatgacaagccaagctcacttctggtgaaattgcagatctcaccttagttgcctcctccgtcttcgctccctccgcagcgtcagatcggccgtcgctcgccgagccctagcgccgccgatctcagcccgtaccagtcttgcagatcggggtcgcgccgcggcggcaagaacgatggccgaggaggccaagtacctggagacggcgcgggccgaccgctccgtgtggctcatgaagtgccccccggtcgtctcccgcgcctggcaggccgcctccgcctccgcctcttcctccgacgccgctaacgccaaccccgttgtcgccaaggtcgtcctttccctcgacctgctccgcccagaagaacgccccgaagagcgcccggaagagcccacgctccaggactagttttgagtatactgggtggactctatttggcacgaatcaggctggtagagactcattggactgcagcaggaagaacaagaggaagaatgtcttgttagtgggcaaacttaattaatattcaaccaaagaaagtgttcatattcattcgactgcatagtttctgtgggctacatacgctacatactacacatggtattgttgaaagtgattgcaaactattagttcaagatggagttggcacaaactaacactgggaatacacctaagagctactctttgaatatgttcaaagatttcgtgcctatgtgtgttttctccgaatctaaccaagggaaactttcatgcgaaggaaaagtcgagcataaatttgacatggaacctcacagtgataatttggcgaactatggaaagttatgtcgtgaaagaacacaaaaatatatggttaaatctagacaagtgcaggtacttgacaatgaccacggtatgagcatgagaccaatgcctggcttggttggtctcataccttctggttcaaaggaaaagaagaaacaagcaccagcgaaaccatccgatgtcaaaagaactcgtagggatcgtacggagatggaaaacattatattcaagctttttgaaaggcaacccaattgggcactaaaggcgctggtgcaagaaactgaccagccagagcaatttctgaaggagatattgaacgatctctgtgtgtataataaacgaggaccaaaccagggaactcatgagcttaagccagagtacaagaaatccacaggggacactgatgctgcttaaagatgatagacgacttggttgtttatgtgcagaatcgctagttctctgtcggtaactcgggcacacaaacacaagcgtgatctagttttatttgtatgctttaagaggtgttatttgtaagctggatacacatttgtttagagaggaaaaggggaaagataattgaaacaaaatgtaagagtctaaattgttggaccaatgttctttatcgggtattaaatttagtcagttggaagtggagtgaataggtgaaacctgaaaattataaaactttgaacacgaattttaccttgagtta

SEQ ID NO: 63463 - DNA, 1494 bp, Zea Mays
tataatttatggatggaatgacaagccaagctcacttctggtgaaattgcagatctcaccttagttgcctcctccgtcttcgctccctccgcagcgtcagatcggccgtcgctcgccgagccctagcgccgccgatctcagcccgtaccagtcttgcagatcggggtcgcgccgcggcggcaagaacgatggccgaggaggccaagtacctggagacggcgcgggccgaccgctccgtgtggctcatgaagtgccccccggtcgtctcccgcgcctggcaggccgcctccgcctccgcctcttcctccgacgccgctaacgccaaccccgttgtcgccaaggtcgtcctttccctcgacctgctccgcccagaagaacgccccgaagagcgcccggaagagcccacgctccaggactagttttgagtatactgggtggactctatttggcacgaatcaggctggtagagactcattggactgcagcaggaagaacaagaggaagaatgtcttgttagtgggcaaacttaattaatattcaaccaaagaaagtgttcatattcattcgactgcatagtttctgtgggctacatacgctacatactacacatgttcaagatggagttggcacaaactaacactgggaatacacctaagagctactctttgaatatgttcaaagatttcgtgcctatgtgtgttttctccgaatctaaccaagggaaactttcatgcgaaggaaaagtcgagcataaatttgacatggaacctcacagtgataatttggcgaactatggaaagttatgtcgtgaaagaacacaaaaatatatggttaaatctagacaagtgcaggtacttgacaatgaccacggtatgagcatgagaccaatgcctggcttggttggtctcataccttctggttcaaaggaaaagaagaaacaagcaccagcgaaaccatccgatgtcaaaagaactcgtagggatcgtacggagatggaaaacattatattcaagctttttgaaaggcaacccaattgggcactaaaggcgctggtgcaagaaactgaccagccagagcaatttctgaaggagatattgaacgatctctgtgtgtataataaacgaggaccaaaccagggaactcatgagcttaagccagagtacaagaaatccacaggggacactgatgctgcttaaagatgatagacgacttggttgtttatgtgcagaatcgctagttctctgtcggtaactcgggcacacaaacacaagcgtgatctagttttatttgtatgctttaagaggtgttatttgtaagctggatacacatttgtttagagaggaaaaggggaaagataattgaaacaaaatgtaagagtctaaattgttggaccaatgttctttatcgggtattaaatttagtcagttggaagtggagtgaataggtgaaacctgaaaattataaaactttgaacacgaattttaccttgagtta

SEQ ID NO: 63464 - DNA, 1443 bp, Zea Mays
gtaaggtgtctctttgctattataccgtttgtgcttatgatttatgagtataatttatggatggaatgacaagccaagctcacttctggtgaaattgcagatctcaccttagttgcctcctccgtcttcgctccctccgcagcgtcagatcggccgtcgctcgccgagccctagcgccgccgatctcagcccgtaccagtcttgcagatcggggtcgcgccgcggcggcaagaacgatggccgaggaggccaagtacctggagacggcgcgggccgaccgctccgtgtggctcatgaagtgccccccggtcgtctcccgcgcctggcaggccgcctccgcctccgcctcttcctccgacgccgctaacgccaaccccgttgtcgccaaggtcgtcctttccctcgacctgctccgcccagaagaacgccccgaagagcgcccggaagagcccacgctccaggactagttttgagtatactgggtggactctatttggcacgaatcaggctggtagagactcattggactgcagcaggaagaacaagaggaagaatgtcttttcaagatggagttggcacaaactaacactgggaatacacctaagagctactctttgaatatgttcaaagatttcgtgcctatgtgtgttttctccgaatctaaccaagggaaactttcatgcgaaggaaaagtcgagcataaatttgacatggaacctcacagtgataatttggcgaactatggaaagttatgtcgtgaaagaacacaaaaatatatggttaaatctagacaagtgcaggtacttgacaatgaccacggtatgagcatgagaccaatgcctggcttggttggtctcataccttctggttcaaaggaaaagaagaaacaagcaccagcgaaaccatccgatgtcaaaagaactcgtagggatcgtacggagatggaaaacattatattcaagctttttgaaaggcaacccaattgggcactaaaggcgctggtgcaagaaactgaccagccagagcaatttctgaaggagatattgaacgatctctgtgtgtataataaacgaggaccaaaccagggaactcatgagcttaagccagagtacaagaaatccacaggggacactgatgctgcttaaagatgatagacgacttggttgtttatgtgcagaatcgctagttctctgtcggtaactcgggcacacaaacacaagcgtgatctagttttatttgtatgctttaagaggtgttatttgtaagctggatacacatttgtttagagaggaaaaggggaaagataattgaaacaaaatgtaagagtctaaattgttggaccaatgttctttatcgggtattaaatttagtcagttggaagtggagtgaataggtgaaacctgaaaattataaaactttgaacacgaattttaccttgagtta

SEQ ID NO: 63465 - DNA, 1929 bp, Zea Mays
cactctcacagcctcacttctccctctgccccacgcaaagcacccaaggcgcccacggccctacggcctcggcacctcccgctcaaaatcctcgccgcgccgcgcggagcgccgtagtgcccgagttcgcatgaagtgtgcctcctcgcgcccgcagccatgggagctcagcagagcgtcaacgcagggaaagccaaggtggatatgaaagtcgatctcacccacatgctgtgcgaggcgctgctgctgccgcccctcagaagctctggcgtcacgttatcacaaatcgttggaaggtaggcatgcatccactggtatatttgttcaagtgcaccgtgtactttagcatccggtgtttccctgtctctttgtgcatgcctttgatgcctgatgcctgacgcctagaacatgtctgtcctagcacgttcttgcacatgcacaacaatgtcttgcgtgttcatgacttcatgcacgtgcagattcttacactatcttcataccagatctgtgcatttgggtgacatgcctatgcatctctccgatctctctcaaacatccaaacctctttgggagaagtgagaagttggatgtgatattggataaaggaatcaacgactccaattttgtcattgcctatagacgccctagggctgagtggttatcacagcaatcatttgtatttcagaagttgccgtccatggattcccagctgataacttcacacgatcagggagcagagggataaaccttagtcgattgtcatttggtttggagcttaatgaaccagctacatcaaactggacatcgggaaccagtgttaaatttgagaatatccgtcctgttaataaccagggccactctattgccagagaccatgatggttttcctctgacatgcagtggtaatctccatgacaacatgatcatcttgaagcaagaatctggttatgcagatgtcaatgacaatagcttcttaaaagtaaacttccaaatggaacagggattgccacttgtacctaagtcattgaccttcaatagagttaaatgtgcagtttcaaaaggcattaagttgggtccgacatttttggttactagtttgacaggcggatccattgttggggacatggcaccttatcaagcttttgccataggtggacttggtagtgtccgaggctatggtgagggcgctgttggttcaggaagactatgtctaattgctaactgcgaatatacgattcccttggtgaagcatctggagggttctattttcatggactgtgggagtgacttagggtctgctcgtcatgtccctggtaatccagctctgcggcaggggaaaccaggatttggtattggatttggatacggacttcacttcaacactgacctaggtcagatccgtgtcgactacgctatgaatgcatttaaccgcaaaaccatctattttggaatcaacagtagcggtggctcttaggttatgaaagacatagctctcacttaacatagactggcaattcaattcgattcttttccgtggacatagaaggggagttctttttcttgacagtgtgttccggacatgccagcagaatcttattgtttgtactacgtgctggcattcaaaaggtgtatagttgggatccacaagatgcattcttcttattatttattgttatgatcttttttttgtgggtgtgggtagatgctgaacaaatgtttttgctgagaagatggtatgcttaggagtaggactgctccaaatatacttccactgcattatagcttaatttcattaggtttgcaaaatatatacaaatggatgttcatggtcaatgtaacttcgttagatgctaaatattttttaagttagacgctgagcaaacattttgcctgtatgataatgtgagaactgctcactgacgcttccatt

SEQ ID NO: 63466 - DNA, 1796 bp, Zea Mays
atttgttagtcattcttcttcttcttctttttttttgcaaaaaaaaaaaatgacatcaacaacggaaggaagctgcgcagctagttacccaaccgaagcaatcccactctcacagcctcacttctccctctgccccacgcaaagcacccaaggcgcccacggccctacggcctcggcacctcccgctcaaaatcctcgccgcgccgcgcggagcgccgtagtgcccgagttcgcatgaagtgtgcctcctcgcgcccgcagccatgggagctcagcagagcgtcaacgcagggaaagccaaggtggatatgaaagtcgatctcacccacatgctgtgcgaggcgctgctgctgccgcccctcagaagctctggcgtcacgttatcacaaatcgttggaaggatctctctcaaacatccaaacctctttgggagaagtgagaagttggatgtgatattggataaaggaatcaacgactccaattttgtcattgcctatagacgccctagggctgagtggttatcacagcaatcatttgtatttcagcactcaatgacaccagaagttgccgtccatggattcccagctgataacttcacacgatcagggagcagagggataaaccttagtcgattgtcatttggtttggagcttaatgaaccagctacatcaaactggacatcgggaaccagtgttaaatttgagaatatccgtcctgttaataaccagggccactctattgccagagaccatgatggttttcctctgacatgcagtggtaatctccatgacaacatgatcatcttgaagcaagaatctggttatgcagatgtcaatgacaatagcttcttaaaagtaaacttccaaatggaacagggattgccacttgtacctaagtcattgaccttcaatagagttaaatgtgcagtttcaaaaggcattaagttgggtccgacatttttggttactagtttgacaggcggatccattgttggggacatggcaccttatcaagcttttgccataggtggacttggtagtgtccgaggctatggtgagggcgctgttggttcaggaagactatgtctaattgctaactgcgaatatacgattcccttggtgaagcatctggagggttctattttcatggactgtgggagtgacttagggtctgctcgtcatgtccctgctctgcggcaggggaaaccaggatttggtattggatttggatacggacttcacttcaacactgacctaggtcagatccgtgtcgactacgctatgaatgcatttaaccgcaaaaccatctattttggaatcaacagtagcggtggctcttaggttatgaaagacatagctctcacttaacatagactggcaattcaattcgattcttttccgtggacatagaaggggagttctttttcttgacagtgtgttccggacatgccagcagaatcttattgtttgtactacgtgctggcattcaaaaggtgtatagttgggatccacaagatgcattcttcttattatttattgttatgatcttttttttgtgggtgtgggtagatgctgaacaaatgtttttgctgagaagatggtatgcttaggagtaggactgctccaaatatacttccactgcattatagcttaatttcattaggtttgcaaaatatatacaaatggatgttcatggtcaatgtaacttcgttagatgctaaatattttttaagttagacgctgagcaaacattttgcctgtatgataatgtgagaactgctcactgacgcttccatt

SEQ ID NO: 63467 - DNA, 2664 bp, Zea Mays
atgcccaacgtctgcgcgcgtaagagttgcccctgcggccctgcgacatcatctccggctccggcatgctcaatggcaccggaggcgaggagcttgcaatccttacggccctgcggcatcagctccggctctggcgcgctctatggcaccagaggcgaggagctcgcggtctgccaggcatgcgcgatgccgctggacgcttccaggatcctcattgccaacagcagggagcgattggcagccggagacgaggacaacgagaagaaggtcaagatcctgggtcgttgcgatcggcgtgggcggctgtagtggcgctctacctctgacacaataagacgacgatgaagctgcgtctcgaggagtcatcgcgacgggtgtgccgcaatgtggaggccatggccatgacagcgcctctggtcccgtcgctcggatgcgaggagttcacgatccgggacttgttgcgcgtcatagacggcttcttggagaagatgatcgggatcaacaacttcgtgtcagtgtagcgcgccaagcttcccgacgggcatgaggtgctgcctaagcatgctcgtgactagcccttgccggacatggcgccaaggcctcgtataggccacgcgacactaggtgtctgacgggcgctcgctcatcaagtcgatttgcgtgtgcgttgcgacaatgttaaccgtgaccctgcagtgctgaggggcaccaacctcaacgtcatcttccaggacaccaagtgtagcggattcgtcggcacaatccaaggtaggagcatgagagcagccatcctactactatgttttcttactttctttctttaattaactttcatggggattagggattggattttccaaccttggtgaggagattgccatgaatcatgatgtgatgtgatatgcctcctctgttttgggtgcttattgcactaccaaaacatgtcagcatgtggggctttaatttgtgggtgcagccaccgtcattattttttgattatttgcactcttaaggattccatttttcaagctcccaaatctgataactcaggtatgtttgacattgtcttatttttcttttactaaattaactataaagctacatagaaattacatagctcttctgtttctgcacttgattcggtccatttggtaaatagctcttggttctgcatttgtgatattagatttccaatacttgaaatagtagtagataagtatcacttagattcttgaattatatttttggatgaagggagtagtagtgcttgctctgttaagggtgggtgccgaggttcattcgatttggttttgttagtcacccaccttagggaggagtactgtgtttgtacgaatagcgaaacctaacgggcagctacacaccaggagaatctttgtaaaggctaggtagtgaatccctagtcattcacctcggtagtgaagatcgggtcttgcaagcctaggttggaaagggatcacgactcgtgggtaaagtgtgcgacctctgcagagggttagaatgtggtatatcagtcatgatcacggttaaaagcagccttgggatcatctttgattagagatactatggatacatttatgttgatggtttaatgatgatggctatacttatgatatatggtactttcctctctgaggaggtgctttcttttggtaatatcaacttgggttctatgataaaacttggcttttactaatgataagtacctgaccaactaaaagcaactgctttgagcttaaccccacatacagctagtccacttcaaccaaacggaacatttgctgaggacgttgatgtgtactcacccttgcttaaacaccaaacaccaggttgtccacattgcaaccattgctcaggagaagatgaaggcaacgcggaggattttcaggagtttcaagacttcgaggagttctaaactagattagcggcaaacccccagtcggctgcatatgaaggccttatctctactacatttcgtttagcactttgatttctgtttaagttaatgactttgtggatgttttggacatcatgatgtaataaagtaatacttctttacgctattatttgagcattgtgtgatgatgtccagttatgtaatcgttgtgtacgtgaatttctgatcctggcacgtacatggtccgcattcggtttaccttccaaaaccgggtgtaacacgcaggtcaagttttttttaaaaaaatggcatcaccttgttgccatgtcctcttctttctccatctatctcactcgatttcaagacaaacggcgagtgccaagccgacgaatctctctccatccctcttctgaccatccctcctcttttggcgcagattaccacaagtgacagcggctgcaaaacgcatgcggcgattccagccgccactcctcttccagcaccgataaacacgagctatgaggcctcagggtcagtgtcatgtggggccgctcctacacgaggaggcgtcgtgcgcgcgtcgtgcgcagggccacggagcgcgccgagcgcatggctcaggaaggagtcggtattagtggctagaatacaaagataggatttgatttgttagtttctaaattaagtccttaagtctaggactgattggttggccaagggccatatattccttgtaccgcacactatta

SEQ ID NO: 63468 - DNA, 743 bp, Zea Mays
aacaggcttgctaagtcagcttcttctgagcttcggctgtctgtatggatggatgatgtctataattttatgcgctcgcaaaagaggcgtcgacttctaagttcagacgttactcaagattttgatgcaatgagaaagcagctagtgtcagattctgcagcaatatttaggtcaaaagttccggagtcactgatggaaaatctcattaaacgcctgagatcatacttcgagggcaaacattcaccacatgagtagtttttcatgcagttcttcagaagctacttaaggatgttataactaatgttgtggatgcctttcatgcacctacttcggacgtggcaagtatgcgctattgtacgctatcagcaagaacatggatggaatcaaaacagaaattttgttaacttatgatgctggagtcgaaaggcaaaaccatggccgagttgattgtgttctctgagatcagatgtggcatagatagttttttttatatatatgtatccacatcaaggtactaactttatgtaatttctacttttggattgtggcattgtgccgcttgtttgcagaataacatgcaatgcgctctgtacatcaatgtgtgtcaagattggacccgtagatttggcattagtggaagctataaaattgttactagcacttcaaacagagtttgggaatgttgcttcctttcccccgtgaatctggaaatgttgtagccctgtatgatgtgattcagccct

SEQ ID NO: 63469 - DNA, 377 bp, Zea Mays
aacaggcttgctaagtcagcttcttctgagcttcggctgtctgtatggatggatgatgtctataattttatgcgctcgcaaaagaggcgtcgacttctaagttcagacgttactcaagattttgatgcaatgagaaagcagctagtgtcagattctgcagcaatatttaggtcaaaagttccggagtcactgatggaaaatctcattaaacgcctgagatcatacttcgagggcaaacattcaccacatgagtagtttttcatgcagttcttcagaagctacttaagaaattaaattggcatgctttaaatggaggatctaagctctggaaagaatatcgagctacctatccaatgatgcaagtgggtagacaggta

SEQ ID NO: 63470 - DNA, 746 bp, Zea Mays
aacaggcttgctaagtcagcttcttctgagcttcggctgtctgtatggatggatgatgtctataattttatgcgctcgcaaaagaggcgtcgacttctaagttcagacgttactcaagattttgatgcaatgagaaagcagctagtgtcagattctgcagcaatatttaggtcaaaagttccggagtcactgatggaaaatctcattaaacgcctgagatcatacttcgagggcaaacattcaccacatgagtagtttttcatgcagttcttcagaagctacttaagacaatttaggtgtcaattggatcttggtggtctactccctaacgcttcgcgcggcttattttgaggaattttttgttttctttgctgaggttgagacgaggagttctaagctgtatcttttgttgtttccctgatgttataggcaacgcaccaccatccccaccgcttctctgtctagaatgtagaagatacttccttttctccttttgtaagatactatagctggcagattaaagcaagagtttatggtgtttttgaccctttacaaatgtattttttgccccgatcagtctcagttttggtcaatgttctgttacgggcagattcgatagcaacatttttctagattttctggtgtaatctccggaagcaaattgacttgagaatacaatcttttatcgttctgatggtaaattgatgtttgatcatgagaaaaacctgaatagccctagcgcttcg

SEQ ID NO: 63471 - DNA, 747 bp, Zea Mays
gttaccttcacattctaaaaccatattcttttcttccatttaatgtatatgcataatatattattccttcctgtgctgatcattgtctcattgtaataattttataatgctaatggcatgttttgttgaccttgcctccaaaaaacaggcttgctaagtcagcttcttctgagcttcggctgtctgtatggatggatgatgtctataattttatgcgctcgcaaaagaggcgtcgacttctaagttcagacgttactcaagattttgatgcaatgagaaagcagctagtgtcagattctgcagcaatatttaggtcaaaagttccggagtcactgatggaaaatctcattaaacgcctgagatcatacttcgagggcaaacattcaccacatgagtagtttttcatgcagttcttcagaagctacttaaggcaacgcaccaccatccccaccgcttctctgtctagaatgtagaagatacttccttttctccttttgtaagatactatagctggcagattaaagcaagagtttatggtgtttttgaccctttacaaatgtattttttgccccgatcagtctcagttttggtcaatgttctgttacgggcagattcgatagcaacatttttctagattttctggtgtaatctccggaagcaaattgacttgagaatacaatcttttatcgttctgatggtaaattgatgtttgatcatgagaaaaacctgaatagccctagcgcttcg

SEQ ID NO: 63472 - DNA, 3422 bp, Zea Mays
cgaaatcagatcaccataattcttcgaagccgcaagcccgaaaggaaccccaagaatcgccgagagatccgaagcgaggtggagagatcgagatggcggacgtggggagcctcgagaggatgggccgggagctcaagtgccccatctggcttgagcctgctcacttcggcggtgtccatcacctgcaatcacatcttctgcaacgcctgcctgacggagtctaagaaatctgcctcctgctgccccgtgtgcaaggttccattccaccggagagaaatacggccagcgcctcacatggataatttggtggccgttttcaaaagtatggaagctgcagcaggtattagtgtcgtgtcaacacagctgactcctgcacccaaagctgcagagtgtagtgagtacactgctggaaagcctagaaggtcgaataaaaagaagctagcatccaagaaagaaaagaatacagtcaaagctactgcaaattctgcatcttgttctactgcaaagccttcaatctccaagaacaaaagaatacacgtgacaccattccctgaatctgagacgccgataaggcccaagaagattatgaagtctgacgagcaaaaacgtaaagaggataaagataacacactgaattctgatataccagataacccttcattgtcaccttttttctggctgaaggaacaagaagaaaacgtaggtggcactgctgaaactttgagtgaaccactatcattggacacagccttgtgtcacaatgtgcctaccttcagtgatatcaaagattctgatgatgaaatgcctaatgatatgactcctaatagcaaagttgaggtttcagaattattcgacagtgaaatctttgaatggagccaaagaccttgctcccccgagctgcgttctaccccactgaaaaaacagggtcaatcgaagaatactctagatcaaatcacagaggtggatgatggaggatatatgaatcttggtgatttatttgataagttagaccatgaaagtaatgtaactcaacctgccaatgctgaagaagctaagaagagaaagttggcaagagctaggaacagaaaaaactcaaaactgcccagtcgtgttaaactatgtacaaaaggatctgatgctgagcaccaagttaaaaatatccctgtaagtattgctgcaaagccaaaccagaaggacatcaataaaaaaaagagatgtactttgaatggaggaaacaaggtctctggcaacaacactaaagttgtcttctctagtgataaatatatgtatacattttcccctcaatcaggcgggttggacattgaagcacctgagaaccagccttcagaaaggatcctcaaaaagcctaaaaacagtcgaagcaaacttcacatagcaggggatagtgcagtgaagaccgcaaagaataaatctgaacaaagagtaaagcaaaccataagatgttctgggggtgttgtagatgaaaatctaagagttctttctgaggctgaaaatgaaatagaatcgtttcagcttcacagactcgcaaaaggttgcacccaacataaacccttcgatgatagaagtaaacaaaacatggaatcaaacattggtccaaatacaccaagcattttacctgggaggtgccaatttgatgaggccatacacacaattcctacagtgaagaatgtctctgttaagaacggtagggcaaaatcaattgaacaaccagattacccaggatctatcagattatgcactgcacacaatactgccctgaagaaatgtgagggtaaagcttctaagctttcctgtgctttctgccagtctgatgataccacacaggaatctggagagatggttcactaccataatggaaagcaagtgccagcagcatttgatgcaggggctggtgtagtacattgccacaaaaactgcctggagtgggctcctgatgtctactttgaagatgactctgtctttaatcttgcaaatgagttggctagaagtaaaagaatcaaatgtgcttgctgtggaattaaaggtgctgcacttggatgctttgagacgagttgccgaaaaagcttccatctcacctgtgctagattaatcccagagtgcagatgggataatgaaaactttgtgatgctatgccctttgcaccaatcttcaaagttgcccagagaaacttctgggtttaaaaataagtcgcacaggaaactagcacgaaaaagttcatctgaagtaaacactagtcaaagccatgataataagtggacatggccatctggatcaccaccgaaatgggttctatgctgttcagccctttctgccgcagaaaagggtatcgtatcagaactcgcaaaaatagctggtgtgccaatctcaacaagttggagtcctaatgttacccatgttattgcatcaaccaacatgtctggttcttgcaagcgcacactgaagtttctgatggcaatcttgaatggcaaatgggttatctccatggactgggttaaaacttgcatggaacttatggaacctgctgatgaaatgaaatttgaagtttccactgatgtacatgggactgctgacggtcccaggttaggtagacaacgagttatcaacaagcaacctaaattattcgatggcattcaattctatctccatggagactataccaagtcgtacagaggctacctgcaagaccttgtggttgcagccggtggaactgtcttgcagaggaagcccgtgtcaagaaaccatcagaagttgcttgacgagagctccctcatcctcatcgtatacagcatcgagaatcaggacaaggcaaaaccaggatcaagcgatggcatggatactggtcgtagccaagctgatgctcaggctctggcctgtgcctctggtggcaaagctgtgagcagcgcatggatcatcgactctatagcggcttgcaaccttcgaccttccatgctaccctagatgtgtacttgcattgcatgcacggtaggtttgactaatggacagaaaaatagtgtaaggccctgtttcaaatctctagagctagtttttagctaataagttatcaattgtgttaagacaactaacaactatctgagaggtatcccgttctaaaactctcaagtaactttagcgacttactatcagttttagagcttttgaacatagactaagtagtagaacgagacttaagtttcttgatgtataaacactatattttaccatgcaatagttaatgctatgtttttaattaaagcaccggcaccgctggaatgtcggagtttgtaacaggtttttatacataaagtggctgccgacgaattcaaccgcttatccgttggttcctgcagtaagtgtttgtaagttgctacgtttttatttatactaaagtgtagaatataaaa

SEQ ID NO: 63473 - DNA, 3411 bp, Zea Mays
cccaaacccacttctttcgtccttccagaatccagacccgaaatcagatcaccataattcttcgaagccgcaagcccgaaaggaaccccaagaatcgccgagagatccgaagcgaggtggagagatcgagatggcggacgtggggagcctcgagaggatgggccgggagctcaagtgccccatctgcttgagcctgctcacttcggcggtgtccatcacctgcaatcacatcttctgcaacgcctgcctgacggagtctaagaaatctgcctcctgctgccccgtgtgcaaggttccattccaccggagagaaatacggccagcgcctcacatggataatttggtggccgttttcaaaagtatggaagctgcagcagagtgtagtgagtacactgctggaaagcctagaaggtcgaataaaaagaagctagcatccaagaaagaaaagaatacagtcaaagctactgcaaattctgcatcttgttctactgcaaagccttcaatctccaagaacaaaagaatacacgtgacaccattccctgaatctgagacgccgataaggcccaagaagattatgaagtctgacgagcaaaaacgtaaagaggataaagataacacactgaattctgatataccagataacccttcattgtcaccttttttctggctgaaggaacaagaagaaaacgtaggtggcactgctgaaactttgagtgaaccactatcattggacacagccttgtgtcacaatgtgcctaccttcagtgatatcaaagattctgatgatgaaatgcctaatgatatgactcctaatagcaaagttgaggtttcagaattattcgacagtgaaatctttgaatggagccaaagaccttgctcccccgagctgcgttctaccccactgaaaaaacagggtcaatcgaagaatactctagatcaaatcacagaggtggatgatggaggatatatgaatcttggtgatttatttgataagttagaccatgaaagtaatgtaactcaacctgccaatgctgaagaagctaagaagagaaagttggcaagagctaggaacagaaaaaactcaaaactgcccagtcgtgttaaactatgtacaaaaggatctgatgctgagcaccaagttaaaaatatccctgtaagtattgctgcaaagccaaaccagaaggacatcaataaaaaaaagagatgtactttgaatggaggaaacaaggtctctggcaacaacactaaagttgtcttctctagtgataaatatatgtatacattttcccctcaatcaggcgggttggacattgaagcacctgagaaccagccttcagaaaggatcctcaaaaagcctaaaaacagtcgaagcaaacttcacatagcaggggatagtgcagtgaagaccgcaaagaataaatctgaacaaagagtaaagcaaaccataagatgttctgggggtgttgtagatgaaaatctaagagttctttctgaggctgaaaatgaaatagaatcgtttcagcttcacagactcgcaaaaggttgcacccaacataaacccttcgatgatagaagtaaacaaaacatggaatcaaacattggtccaaatacaccaagcattttacctgggaggtgccaatttgatgaggccatacacacaattcctacagtgaagaatgtctctgttaagaacggtagggcaaaatcaattgaacaaccagattacccaggatctatcagattatgcactgcacacaatactgccctgaagaaatgtgagggtaaagcttctaagctttcctgtgctttctgccagtctgatgataccacacaggaatctggagagatggttcactaccataatggaaagcaagtgccagcagcatttgatgcaggggctggtgtagtacattgccacaaaaactgcctggagtgggctcctgatgtctactttgaagatgactctgtctttaatcttgcaaatgagttggctagaagtaaaagaatcaaatgtgcttgctgtggaattaaaggtgctgcacttggatgctttgagacgagttgccgaaaaagcttccatctcacctgtgctagattaatcccagagtgcagatgggataatgaaaactttgtgatgctatgccctttgcaccaatcttcaaagttgcccagagaaacttctgggtttaaaaataagtcgcacaggaaactagcacgaaaaagttcatctgaagtaaacactagtcaaagccatgataataagtggacatggccatctggatcaccaccgaaatgggttctatgctgttcagccctttctgccgcagaaaagggtatcgtatcagaactcgcaaaaatagctggtgtgccaatctcaacaagttggagtcctaatgttacccatgttattgcatcaaccaacatgtctggttcttgcaagcgcacactgaagtttctgatggcaatcttgaatggcaaatgggttatctccatggactgggttaaaacttgcatggaacttatggaacctgctgatgaaatgaaatttgaagtttccactgatgtacatgggactgctgacggtcccaggttaggtagacaacgagttatcaacaagcaacctaaattattcgatggcattcaattctatctccatggagactataccaagtcgtacagaggctacctgcaagaccttgtggttgcagccggtggaactgtcttgcagaggaagcccgtgtcaagaaaccatcagaagttgcttgacgagagctccctcatcctcatcgtatacagcatcgagaatcaggacaaggcaaaaccaggatcaagcgatggcatggatactggtcgtagccaagctgatgctcaggctctggcctgtgcctctggtggcaaagctgtgagcagcgcatggatcatcgactctatagcggcttgcaaccttcgaccttccatgctaccctagatgtgtacttgcattgcatgcacggtaggtttgactaatggacagaaaaatagtgtaaggccctgtttcaaatctctagagctagtttttagctaataagttatcaattgtgttaagacaactaacaactatctgagaggtatcccgttctaaaactctcaagtaactttagcgacttactatcagttttagagcttttgaacatagactaagtagtagaacgagacttaagtttcttgatgtataaacactatattttaccatgcaatagttaatgctatgtttttaattaaagcaccggcaccgctggaatgtcggagtttgtaacaggtttttatacataaagtggctgccgacgaattcaaccgcttatccgttggttcctgcagtaagtgtttgtaagttgctacgtttttatttatactaaagtgtagaatataaaa

SEQ ID NO: 63474 - DNA, 3559 bp, Zea Mays
cccaaacccacttctttcgtccttccagaatccagacccgaaatcagatcaccataattcttcgaagccgcaagcccgaaaggaaccccaagaatcgccgagagatccgaagcgaggtggagagatcgagatggcggacgtggggagcctcgagaggatgggccgggagctcaagtgccccatctgcttgagcctgctcacttcggcggtgtccatcacctgcaatcacatcttctgcaacgcctgcctgacggagtctaagaaatctgcctcctgctgccccgtgtgcaaggttccattccaccggagagaaatacggccagcgcctcacatggataatttggtggccgttttcaaaagtatggaagctgcagcaggtattagtgtcgtgtcaacacagctgactcctgcacccaaagctgcagagtgtagtgagtacactgctggaaagcctagaaggtcgaataaaaagaagctagcatccaagaaagaaaagaatacagtcaaagctactgcaaattctgcatcttgttctactgcaaagccttcaatctccaagaacaaaagaatacacgtgacaccattccctgaatctgagacgccgataaggcccaagaagattatgaagtctgacgagcaaaaacgtaaagaggataaagataacacactgaattctgatataccagataacccttcattgtcaccttttttctggctgaaggaacaagaagaaaacgtaggtggcactgctgaaactttgagtgaaccactatcattggacacagccttgtgtcacaatgtgcctaccttcagtgatatcaaagattctgatgatgaaatgcctaatgatatgactcctaatagcaaagttgaggtttcagaattattcgacagtgaaatctttgaatggagccaaagaccttgctcccccgagctgcgttctaccccactgaaaaaacaggtattttttgttaacggacggtctgacacagaggctttacatttctagttctcccaccttaacaatctgagtgtttgcatcttgtgttttccatgtaattgattcagcgttttgtttgttcagggtcaatcgaagaatactctagatcaaatcacagaggtggatgatggaggatatatgaatcttggtgatttatttgataagttagaccatgaaagtaatgtaactcaacctgccaatgctgaagaagctaagaagagaaagttggcaagagctaggaacagaaaaaactcaaaactgcccagtcgtgttaaactatgtacaaaaggatctgatgctgagcaccaagttaaaaatatccctgtaagtattgctgcaaagccaaaccagaaggacatcaataaaaaaaagagatgtactttgaatggaggaaacaaggtctctggcaacaacactaaagttgtcttctctagtgataaatatatgtatacattttcccctcaatcaggcgggttggacattgaagcacctgagaaccagccttcagaaaggatcctcaaaaagcctaaaaacagtcgaagcaaacttcacatagcaggggatagtgcagtgaagaccgcaaagaataaatctgaacaaagagtaaagcaaaccataagatgttctgggggtgttgtagatgaaaatctaagagttctttctgaggctgaaaatgaaatagaatcgtttcagcttcacagactcgcaaaaggttgcacccaacataaacccttcgatgatagaagtaaacaaaacatggaatcaaacattggtccaaatacaccaagcattttacctgggaggtgccaatttgatgaggccatacacacaattcctacagtgaagaatgtctctgttaagaacggtagggcaaaatcaattgaacaaccagattacccaggatctatcagattatgcactgcacacaatactgccctgaagaaatgtgagggtaaagcttctaagctttcctgtgctttctgccagtctgatgataccacacaggaatctggagagatggttcactaccataatggaaagcaagtgccagcagcatttgatgcaggggctggtgtagtacattgccacaaaaactgcctggagtgatgactctgtctttaatcttgcaaatgagttggctagaagtaaaagaatcaaatgtgcttgctgtggaattaaaggtgctgcacttggatgctttgagacgagttgccgaaaaagcttccatctcacctgtgctagattaatcccagagtgcagatgggataatgaaaactttgtgatgctatgccctttgcaccaatcttcaaagttgcccagagaaacttctgggtttaaaaataagtcgcacaggaaactagcacgaaaaagttcatctgaagtaaacactagtcaaagccatgataataagtggacatggccatctggatcaccaccgaaatgggttctatgctgttcagccctttctgccgcagaaaagggtatcgtatcagaactcgcaaaaatagctggtgtgccaatctcaacaagttggagtcctaatgttacccatgttattgcatcaaccaacatgtctggttcttgcaagcgcacactgaagtttctgatggcaatcttgaatggcaaatgggttatctccatggactgggttaaaacttgcatggaacttatggaacctgctgatgaaatgaaatttgaagtttccactgatgtacatgggactgctgacggtcccaggttaggtagacaacgagttatcaacaagcaacctaaattattcgatggcattcaattctatctccatggagactataccaagtcgtacagaggctacctgcaagaccttgtggttgcagccggtggaactgtcttgcagaggaagcccgtgtcaagaaaccatcagaagttgcttgacgagagctccctcatcctcatcgtatacagcatcgagaatcaggacaaggcaaaaccaggatcaagcgatggcatggatactggtcgtagccaagctgatgctcaggctctggcctgtgcctctggtggcaaagctgtgagcagcgcatggatcatcgactctatagcggcttgcaaccttcgaccttccatgctaccctagatgtgtacttgcattgcatgcacggtaggtttgactaatggacagaaaaatagtgtaaggccctgtttcaaatctctagagctagtttttagctaataagttatcaattgtgttaagacaactaacaactatctgagaggtatcccgttctaaaactctcaagtaactttagcgacttactatcagttttagagcttttgaacatagactaagtagtagaacgagacttaagtttcttgatgtataaacactatattttaccatgcaatagttaatgctatgtttttaattaaagcaccggcaccgctggaatgtcggagtttgtaacaggtttttatacataaagtggctgccgacgaattcaaccgcttatccgttggttcctgcagtaagtgtttgtaagttgctacgtttttatttatactaaagtgtagaatataaaa

SEQ ID NO: 63475 - DNA, 3392 bp, Zea Mays
taccattccacccaaacccacttctttcgtccttccagaatccagacccgaaatcagatcaccataattcttcgaagccgcaagcccgaaaggaaccccaagaatcgccgagagatccgaagcgaggtggagagatcgagatggcggacgtggggagcctcgagaggatgggccgggagctcaagtgccccatctgcttgagcctgctcacttcggcggtgtccatcacctgcaatcacatcttctgcaacgcctgcctgacggagtctaagaaatctgcctcctgctgccccgtgtgcaaggttccattccaccggagagaaatacggccagcgcctcacatggataatttggtggccgttttcaaaagtatggaagctgcagcaggtattagtgtcgtgtcaacacagctgactcctgcacccaaagctgcagagtgtagtgagtacactgctggaaagcctagaaggtcgaataaaaagaagctagcatccaagaaagaaaagaatacagtcaaagctactgcaaattctgcatcttgttctactgcaaagccttcaatctccaagaacaaaagaatacacgtgacaccattccctgaatctgagacgccgataaggcccaagaagattatgaagtctgacgagcaaaaacgaacaagaagaaaacgtaggtggcactgctgaaactttgagtgaaccactatcattggacacagccttgtgtcacaatgtgcctaccttcagtgatatcaaagattctgatgatgaaatgcctaatgatatgactcctaatagcaaagttgaggtttcagaattattcgacagtgaaatctttgaatggagccaaagaccttgctcccccgagctgcgttctaccccactgaaaaaacagggtcaatcgaagaatactctagatcaaatcacagaggtggatgatggaggatatatgaatcttggtgatttatttgataagttagaccatgaaagtaatgtaactcaacctgccaatgctgaagaagctaagaagagaaagttggcaagagctaggaacagaaaaaactcaaaactgcccagtcgtgttaaactatgtacaaaaggatctgatgctgagcaccaagttaaaaatatccctgtaagtattgctgcaaagccaaaccagaaggacatcaataaaaaaaagagatgtactttgaatggaggaaacaaggtctctggcaacaacactaaagttgtcttctctagtgataaatatatgtatacattttcccctcaatcaggcgggttggacattgaagcacctgagaaccagccttcagaaaggatcctcaaaaagcctaaaaacagtcgaagcaaacttcacatagcaggggatagtgcagtgaagaccgcaaagaataaatctgaacaaagagtaaagcaaaccataagatgttctgggggtgttgtagatgaaaatctaagagttctttctgaggctgaaaatgaaatagaatcgtttcagcttcacagactcgcaaaaggttgcacccaacataaacccttcgatgatagaagtaaacaaaacatggaatcaaacattggtccaaatacaccaagcattttacctgggaggtgccaatttgatgaggccatacacacaattcctacagtgaagaatgtctctgttaagaacggtagggcaaaatcaattgaacaaccagattacccaggatctatcagattatgcactgcacacaatactgccctgaagaaatgtgagggtaaagcttctaagctttcctgtgctttctgccagtctgatgataccacacaggaatctggagagatggttcactaccataatggaaagcaagtgccagcagcatttgatgcaggggctggtgtagtacattgccacaaaaactgcctggagtgggctcctgatgtctactttgaagatgactctgtctttaatcttgcaaatgagttggctagaagtaaaagaatcaaatgtgcttgctgtggaattaaaggtgctgcacttggatgctttgagacgagttgccgaaaaagcttccatctcacctgtgctagattaatcccagagtgcagatgggataatgaaaactttgtgatgctatgccctttgcaccaatcttcaaagttgcccagagaaacttctgggtttaaaaataagtcgcacaggaaactagcacgaaaaagttcatctgaagtaaacactagtcaaagccatgataataagtggacatggccatctggatcaccaccgaaatgggttctatgctgttcagccctttctgccgcagaaaagggtatcgtatcagaactcgcaaaaatagctggtgtgccaatctcaacaagttggagtcctaatgttacccatgttattgcatcaaccaacatgtctggttcttgcaagcgcacactgaagtttctgatggcaatcttgaatggcaaatgggttatctccatggactgggttaaaacttgcatggaacttatggaacctgctgatgaaatgaaatttgaagtttccactgatgtacatgggactgctgacggtcccaggttaggtagacaacgagttatcaacaagcaacctaaattattcgatggcattcaattctatctccatggagactataccaagtcgtacagaggctacctgcaagaccttgtggttgcagccggtggaactgtcttgcagaggaagcccgtgtcaagaaaccatcagaagttgcttgacgagagctccctcatcctcatcgtatacagcatcgagaatcaggacaaggcaaaaccaggatcaagcgatggcatggatactggtcgtagccaagctgatgctcaggctctggcctgtgcctctggtggcaaagctgtgagcagcgcatggatcatcgactctatagcggcttgcaaccttcgaccttccatgctaccctagatgtgtacttgcattgcatgcacggtaggtttgactaatggacagaaaaatagtgtaaggccctgtttcaaatctctagagctagtttttagctaataagttatcaattgtgttaagacaactaacaactatctgagaggtatcccgttctaaaactctcaagtaactttagcgacttactatcagttttagagcttttgaacatagactaagtagtagaacgagacttaagtttcttgatgtataaacactatattttaccatgcaatagttaatgctatgtttttaattaaagcaccggcaccgctggaatgtcggagtttgtaacaggtttttatacataaagtggctgccgacgaattcaaccgcttatccgttggttcctgcagtaagtgtttgtaagttgctacgtttttatttatactaaagtgtagaatataaaa

SEQ ID NO: 63476 - DNA, 705 bp, Zea Mays
ccaaaatgccaatccaccgcagtcgcaggctcgcagctgcccttgcccgccatgatgcctccaccgccgctgcgccttcacctcctcttccgctccgaaaccctaatccctctactccggcaacgacccagctgcgacgcgccccattgccggaccaggaggtacatctccgttcgcgcctccgctgcacagctcgccgccgcggacgtctcgacggcgcagcagcctgcacttgaacttgggttggaggcagcggcggcgggcttcgtcaccggtaagaggaaggccaccgaggtagcccacgcgtaggttctggagaaatattgttcagaaaggggatacggtggtggatgccacatgcgggaatggcaatgacacgctcgctctgctgaagatggtggctgatgaaacaggccgtggacgtgtttatgggatggacattcaagattctgcgatagagaatacttcctcttttctgaaaatggccgtggatgatgaacatcaggcttgttgctttcaacttgggctaccttccaggaggagataaaactgtaatcacagtgcctaggacaactgagttagcattgcgagctgccagcagaattctcagttctgggggactcataagtgttcttgtatacattggacatccaggtggaaggtaaacaccagttgcaaacactgtagtctatccatttagaaaag

SEQ ID NO: 63477 - DNA, 695 bp, Zea Mays
ccaaaatgccaatccaccgcagtcgcaggctcgcagctgcccttgcccgccatgatgcctccaccgccgctgcgccttcacctcctcttccgctccgaaaccctaatccctctactccggcaacgacccagctgcgacgcgccccattgccggaccaggagggttggaggcagcggcggcgggcttcgtcaccggtaagaggaaggccaccgaggtagcccacgcgttctggagaaatattgttcagaaaggggatacggtggtggatgccacatgcgggaatggcaatgacacgctcgctctgctgaagatggtggctgatgaaacaggccgtggacgtgtttatgggatggacattcaagattctgcgatagagaatacttcctcttttctgaaaatggccgtggatgatgaacatcagcggggactggtaaaactgtttcctatatgtcatagtagaatggaagagattgttcccaaagatgctcctgtcaggcttgttgctttcaacttgggctaccttccaggaggagataaaactgtaatcacagtgcctaggacaactgagttagcattgcgagctgccagcagaattctcagttctgggggactcataagtgttcttgtatacattggacatccaggtggaaggtaaacaccagttgcaaacactgtagtctatccatttagaaaag

SEQ ID NO: 63478 - DNA, 848 bp, Zea Mays
ccagatgatacgagcacctctgagcttcgatcttttttttttttgctttctttttttctccggccttgcagacaattttggtccgttgatttattttaagtagtccaaaatgccaatccaccgcagtcgcaggctcgcagctgcccttgcccgccatgatgcctccaccgccgctgcgccttcacctcctcttccgctccgaaaccctaatccctctactccggcaacgacccagctgcgacgcgccccattgccggaccaggaggtacatctccgttcgcgcctccgctgcacagctcgccgccgcggacgtctcgacggcgcagcagcctgcacttgaacttgggttggaggcagcggcggcgggcttcgtcaccggttctggagaaatattgttcagaaaggggatacggtggtggatgccacatgcgggaatggcaatgacacgctcgctctgctgaagatggtggctgatgaaacaggccgtggacgtgtttatgggatggacattcaagattctgcgatagagaatacttcctcttttctgaaaatggccgtggatgatgaacatcagcggggactggtaaaactgtttcctatatgtcatagtagaatggaagagattgttcccaaagatgctcctgtcaggcttgttgctttcaacttgggctaccttccaggaggagataaaactgtaatcacagtgcctaggacaactgagttagcattgcgagctgccagcagaattctcagttctgggggactcataagtgttcttgtatacattggacatccaggtggaaggtaaacaccagttgcaaacactgtagtctatccatttagaaaag

SEQ ID NO: 63479 - DNA, 819 bp, Zea Mays
cttcccagatgatacgagcacctctgagcttcgatcttttttttttttgctttctttttttctccggccttgcagacaattttggtccgttgatttattttaagtagtccaaaatgccaatccaccgcagtcgcaggctcgcagctgcccttgcccgccatgatgcctccaccgccgctgcgccttcacctcctcttccgctccgaaaccctaatccctctactccggcaacgacccagctgcgacgcgccccattgccggaccaggaggtacatctccgttcgcgcctccgctgcacagctcgccgccgcggacgtctcgacggcgcagcagcctgcacttgaacttggttctggagaaatattgttcagaaaggggatacggtggtggatgccacatgcgggaatggcaatgacacgctcgctctgctgaagatggtggctgatgaaacaggccgtggacgtgtttatgggatggacattcaagattctgcgatagagaatacttcctcttttctgaaaatggccgtggatgatgaacatcagcggggactggtaaaactgtttcctatatgtcatagtagaatggaagagattgttcccaaagatgctcctgtcaggcttgttgctttcaacttgggctaccttccaggaggagataaaactgtaatcacagtgcctaggacaactgagttagcattgcgagctgccagcagaattctcagttctgggggactcataagtgttcttgtatacattggacatccaggtggaaggtaaacaccagttgcaaacactgtagtctatccatttagaaaag

SEQ ID NO: 63480 - DNA, 916 bp, Zea Mays
ctccgtgacgcatgggtcgtcgcaacctgtcatcttcccagatgatacgagcacctctgagcttcgatcttttttttttttgctttctttttttctccggccttgcagacaattttggtccgttgatttattttaagtagtccaaaatgccaatccaccgcagtcgcaggctcgcagctgcccttgcccgccatgatgcctccaccgccgctgcgccttcacctcctcttccgctccgaaaccctaatccctctactccggcaacgacccagctgcgacgcgccccattgccggaccaggaggtacatctccgttcgcgcctccgctgcacagctcgccgccgcggacgtctcgacggcgcagcagcctgcacttgaacttgggttggaggcagcggcggcgggcttcgtcaccggtaagaggaaggccaccgaggtagcccacgcgttctggagaaatattgttcagaaaggggatacggtggtggatgccacatgcgggaatggcaatgacacgctcgctctgctgaagatggtggctgatgaaacaggccgtggacgtgtttatgggatggacattcaagattctgcgatagagaatacttcctcttttctgaaaatggccgtggatgatgaacatcagcggggactggtaaaactgtttcctatatgtcatagtagaatggaagagattgttcccaaagatgctcctgtcaggcttgttgctttcaacttgggctaccttccaggaggagataaaactgtaatcacagtgcctaggacaactgagttagcattgcgagctgccagcagaattctcagttctgggggactcataagtgttcttgtatacattggacatccaggtggaaggtaaacaccagttgcaaacactgtagtctatccatttagaaaag

SEQ ID NO: 63481 - DNA, 920 bp, Zea Mays
ctccgtgacgcatgggtcgtcgcaacctgtcatcttcccagatgatacgagcacctctgagcttcgatcttttttttttttgctttctttttttctccggccttgcagacaattttggtccgttgatttattttaagtagtccaaaatgccaatccaccgcagtcgcaggctcgcagctgcccttgcccgccatgatgcctccaccgccgctgcgccttcacctcctcttccgctccgaaaccctaatccctctactccggcaacgacccagctgcgacgcgccccattgccggaccaggaggtacatctccgttcgcgcctccgctgcacagctcgccgccgcggacgtctcgacggcgcagcagcctgcacttgaacttgggttggaggcagcggcggcgggcttcgtcaccggtaagaggaaggccaccgaggtagcccacgcgtaggttctggagaaatattgttcagaaaggggatacggtggtggatgccacatgcgggaatggcaatgacacgctcgctctgctgaagatggtggctgatgaaacaggccgtggacgtgtttatgggatggacattcaagattctgcgatagagaatacttcctcttttctgaaaatggccgtggatgatgaacatcagcggggactggtaaaactgtttcctatatgtcatagtagaatggaagagattgttcccaaagatgctcctgtcaggcttgttgctttcaacttgggctaccttccaggaggagataaaactgtaatcacagtgcctaggacaactgagttagcattgcgagctgccagcagaattctcagttctgggggactcataagtgttcttgtatacattggacatccaggtggaaggtaaacaccagttgcaaacactgtagtctatccatttagaaaag

SEQ ID NO: 63482 - DNA, 910 bp, Zea Mays
aaaagctccgtgacgcatgggtcgtcgcaacctgtcatcttcccagatgatacgagcacctctgagcttcgatcttttttttttttgctttctttttttctccggccttgcagacaattttggtccgttgatttattttaagtagtccaaaatgccaatccaccgcagtcgcaggctcgcagctgcccttgcccgccatgatgcctccaccgccgctgcgccttcacctcctcttccgctccgaaaccctaatccctctactccggcaacgacccagctgcgacgcgccccattgccggaccaggaggtacatctccgttcgcgcctccgctgcacagctcgccgccgcggacgtctcgacggcgcagcagcctgcacttgaacttgggttggaggcagcggcggcgggcttcgtcaccggtaagaggaaggccaccgaggttctggagaaatattgttcagaaaggggatacggtggtggatgccacatgcgggaatggcaatgacacgctcgctctgctgaagatggtggctgatgaaacaggccgtggacgtgtttatgggatggacattcaagattctgcgatagagaatacttcctcttttctgaaaatggccgtggatgatgaacatcagcggggactggtaaaactgtttcctatatgtcatagtagaatggaagagattgttcccaaagatgctcctgtcaggcttgttgctttcaacttgggctaccttccaggaggagataaaactgtaatcacagtgcctaggacaactgagttagcattgcgagctgccagcagaattctcagttctgggggactcataagtgttcttgtatacattggacatccaggtggaaggtaaacaccagttgcaaacactgtagtctatccatttagaaaag

SEQ ID NO: 63483 - DNA, 3434 bp, Zea Mays
agagcagataaatttcccgaaaaccccaaagattaattcatcttcccttttcgattttctatattccttgcgggtttattttggtttaagtccacgagagaagagaagggaagcaaagcaacactgagcggaggcgagctgtgcgcctcgctcccctcccctgctctcgtcagatccaaaccccacgcgggaacacaaaccctagcacccgttcgcgccaccgcagaggctaagaggcgatgaggggcgttagggcggatggcggcggtggcgcgttctcttcttccaccgcagagaactcgtgcttcgatgcggcgcagtactctttctttggcaaggcgcccatggagggggcggaactcggtgggttgttggagggaggtgtcgacggcgatggtggtggattcggtggacatgatgacgctggttaccagttctcttctacaggcgaagagattgattgtatgagtaatttgtcggaaattgatgatcttgcaagcacttttgcaatgttgaaccgaaatattagcggaacaaggaaccctggcattattggtgatagacgatcaatttcgagagaaaatcaggatatactagatggcgatgaatccctggacagcaaacaatggtgctcgcagttgcaatcttcgcctcactttggagagtctaaaccactgtctcgtacatcttcgtaccccaatcaaccactacagcaccgctcaagcgaacctattcttctacacagatctacctcgtttacatcctatcctccatcaggggaaagtcctggattgccttatcctgctcaaggtcttacacggcactcaagcattccatcaccaggtgctggtcacctcatgggttctccaagttcatcgctttctggttctccatatcatatgcctggtctatctcatggactaccttatggacgaaacatgtcttacaccactggagatctttcaacgaacaatgtcctacaaaatgagtggtcaaaccaagctggcccacttgtttttgatcatcttaaccgacggcccagttttttgcagccacacttatctctttcaagtagttcaatgtcttcattgcttttttctcagcagcaccagagattagcaccaggccagccgcctcttcagaattacataaacatgcagcctcacctgttccatcaccatcaacctcctgatgttccttcaccaagagacaaacgatcaaggtcaggaagaggaggaaagcacaacatacgcttttctcaacagccttctgatgctggtagccagcatagtgagagttcagggataaagttcagatccaagtacatgtcatctgaagagatcgaaagtatcttaaaaatgcagcactctgcaaatcacagcaatgatccttactttgatgactactaccaccaagcttgcaaagccaaaagatctgtaacttttcagaagtccaatttctgtcctatgtcaataaaggacttcccctcaaaatccaggtctggtgttgatcagcattcatatctacaggttgacgctaatggaggagtttcattctctgccatacgtagacctcgtcctcttcttgaagctgatttgcctggatctggtgatggtttttatgatcataagtcatccaagaggtcactggagaaagaaccaatgcttgcagccagaataaccgttgaagattctcttcgtcttcttctggttgttgatgatattgatcggtttttacagtctagccagccacaggacagcagtttccaactgaagcgaaggcgagaggtcctgcttgaaggcttagctacatcactccagcttgttgacccttttggccccaacaaacatggccattcgggtgggttggcccctaaggatgacctaatttttcttcgtattatttctctgcccaaaggacgtaagcttttggcacgctatcttcgacttcttttctctggaagtgagctgacccgaatagtctgcatggctgttttccgacaccttaggagcttgtttggtggcttaccgtcagactatagtgctgcagaaacaaccatcgttcttgccaaggctgtttcctcttgtgtgcgccatatggaactcagtgctctcagtgcctgtctcgcagctgttgtctgttcttcgcagcagccacctctccggccactcggtagtgcctctggtgatggggcctctctgataattaaatctgtgctggatagagcgaccgagctactggcggatccccattccgcagccaactacagcagatcagcacgttcgctttggcatgcgtcatttgatgctttctttggactgctgacgaagtactgtgacagcaagtatgaaagtatcgtgcagaggtttgccatgcagggatccaactccatgggaggacctgaaaccaccaaagcagtcagcagggagatgcccgttgagctgttacgtgcgagtcttcctcatactaatgagcagcatcgtcagacactgctagattttgctcggaaatctacgcatctgcctggtttcagccctactgctaaccgtggacttgtcaattctgaatcagttccaggttaacgccactgaagaggcctgatggtcgtctgttttgatttatatatggcacgtaaggtgtgagcttggagaagttccattggctcagcgaagctggcattcaggatatgactgtgtaggatgttatttatttatatatagaaaaccaactttatgtatgtatcctgctgtaactgtgtagtgctgaacagaacatctgttggatttggaggtaagctagttgacttatttcctcccaaagagaacaattgtgagtgcatagcaacagcttaaggcttaagcttgtttgggaacaatggaattggagaagattgagcgctggttcggaggaaatctcattctattcaattttaaataacaagagatttttttcctcgtggactccccttcaaatcccatgtcaccaaaccaactcaaatcccatgtcaccaaaccaactcataagggctaaaatcctcttgaatatcaaggggattttagacaattcaggagccgttcggttgtctaggaacggtgacctgaaaccattccgagtcggatcacttctttaatttatataagttttgatcaacgagaaaaaatctggagctattcccggagaaacgaacatggcctcaatcctcttcaatccatttgctcccaaacaagccaacgggtgtttggtgcaggagctatgtgctcgaacaatttaatcaacaggttcttctgctgcagttacggcattttctgtgctcatttatctatgctgtctgttctaaattataagacgctttgttatgtctatatttgtggcttgtattatgtatcaaacacaatatatatataccggtgttataaaagatacagatgtagaaa

SEQ ID NO: 63484 - DNA, 3489 bp, Zea Mays
ccaagtcttctccttgttagcgcaaatcaatcagtcactccacataatcctcgcgtttcgagagcagataaatttcccgaaaaccccaaagattaattcatcttcccttttcgattttctatattccttgcgggtttattttggtttaagtccacgagagaagagaagggaagcaaagcaacactgagcggaggcgagctgtgcgcctcgctcccctcccctgctctcgtcagatccaaaccccacgcgggaacacaaaccctagcacccgttcgcgccaccgcagaggctaagaggcgatgaggggcgttagggcggatggcggcggtggcgcgttctcttcttccaccgcagagaactcgtgcttcgatgcggcgcagtactctttctttggcaaggcgcccatggagggggcggaactcggtgggttgttggagggaggtgtcgacggcgatggtggtggattcggtggacatgatgacgctggttaccagttctcttctacaggcgaagagattgattgtatgagtaatttgtcggaaattgatgatcttgcaagcacttttgcaatgttgaaccgaaatattagcggaacaaggaaccctggcattattggtgatagacgatcaatttcgagagaaagatatactagatggcgatgaatccctggacagcaaacaatggtgctcgcagttgcaatcttcgcctcactttggagagtctaaaccactgtctcgtacatcttcgtaccccaatcaaccactacagcaccgctcaagcgaacctattcttctacacagatctacctcgtttacatcctatcctccatcaggggaaagtcctggattgccttatcctgctcaaggtcttacacggcactcaagcattccatcaccaggtgctggtcacctcatgggttctccaagttcatcgctttctggttctccatatcatatgcctggtctatctcatggactaccttatggacgaaacatgtcttacaccactggagatctttcaacgaacaatgtcctacaaaatgagtggtcaaaccaagctggcccacttgtttttgatcatcttaaccgacggcccagttttttgcagccacacttatctctttcaagtagttcaatgtcttcattgcttttttctcagcagcaccagagattagcaccaggccagccgcctcttcagaattacataaacatgcagcctcacctgttccatcaccatcaacctcctgatgttccttcaccaagagacaaacgatcaaggtcaggaagaggaggaaagcacaacatacgcttttctcaacagccttctgatgctggtagccagcatagtgagagttcagggataaagttcagatccaagtacatgtcatctgaagagatcgaaagtatcttaaaaatgcagcactctgcaaatcacagcaatgatccttactttgatgactactaccaccaagcttgcaaagccaaaagatctgtaacttttcagaagtccaatttctgtcctatgtcaataaaggacttcccctcaaaatccaggtctggtgttgatcagcattcatatctacaggttgacgctaatggaggagtttcattctctgccatacgtagacctcgtcctcttcttgaagctgatttgcctggatctggtgatggtttttatgatcataagtcatccaagaggtcactggagaaagaaccaatgcttgcagccagaataaccgttgaagattctcttcgtcttcttctggttgttgatgatattgatcggtttttacagtctagccagccacaggacagcagtttccaactgaagcgaaggcgagaggtcctgcttgaaggcttagctacatcactccagcttgttgacccttttggccccaacaaacatggccattcgggtgggttggcccctaaggatgacctaatttttcttcgtattatttctctgcccaaaggacgtaagcttttggcacgctatcttcgacttcttttctctggaagtgagctgacccgaatagtctgcatggctgttttccgacaccttaggagcttgtttggtggcttaccgtcagactatagtgctgcagaaacaaccatcgttcttgccaaggctgtttcctcttgtgtgcgccatatggaactcagtgctctcagtgcctgtctcgcagctgttgtctgttcttcgcagcagccacctctccggccactcggtagtgcctctggtgatggggcctctctgataattaaatctgtgctggatagagcgaccgagctactggcggatccccattccgcagccaactacagcagatcagcacgttcgctttggcatgcgtcatttgatgctttctttggactgctgacgaagtactgtgacagcaagtatgaaagtatcgtgcagaggtttgccatgcagggatccaactccatgggaggacctgaaaccaccaaagcagtcagcagggagatgcccgttgagctgttacgtgcgagtcttcctcatactaatgagcagcatcgtcagacactgctagattttgctcggaaatctacgcatctgcctggtttcagccctactgctaaccgtggacttgtcaattctgaatcagttccaggttaacgccactgaagaggcctgatggtcgtctgttttgatttatatatggcacgtaaggtgtgagcttggagaagttccattggctcagcgaagctggcattcaggatatgactgtgtaggatgttatttatttatatatagaaaaccaactttatgtatgtatcctgctgtaactgtgtagtgctgaacagaacatctgttggatttggaggtaagctagttgacttatttcctcccaaagagaacaattgtgagtgcatagcaacagcttaaggcttaagcttgtttgggaacaatggaattggagaagattgagcgctggttcggaggaaatctcattctattcaattttaaataacaagagatttttttcctcgtggactccccttcaaatcccatgtcaccaaaccaactcaaatcccatgtcaccaaaccaactcataagggctaaaatcctcttgaatatcaaggggattttagacaattcaggagccgttcggttgtctaggaacggtgacctgaaaccattccgagtcggatcacttctttaatttatataagttttgatcaacgagaaaaaatctggagctattcccggagaaacgaacatggcctcaatcctcttcaatccatttgctcccaaacaagccaacgggtgtttggtgcaggagctatgtgctcgaacaatttaatcaacaggttcttctgctgcagttacggcattttctgtgctcatttatctatgctgtctgttctaaattataagacgctttgttatgtctatatttgtggcttgtattatgtatcaaacacaatatatatataccggtgttataaaagatacagatgtagaaa

SEQ ID NO: 63485 - DNA, 1957 bp, Zea Mays
gccccccgctccgtttactctcctctatcgtgcgctcaatcctcaggaatggcaggcattgttgtgccttcaacactgtcgcgatgtcgtcgacgcggcccatctgaggcagggacgtcgtacccccgtcgtcgaggtcgaagacctcacgccaccacctcgacttgaagccttcaccctatcgaggtacccatcccctagcctgccgccgagttactttgagttttggggacaggtttattgtccagctcttctgtgcgcgatcttttactggttgtttgcactttaagttttgtggatagtcgaaaacccttagacctacttccagtttcttattacccacatcgccatgagttaagcacgttcctccggccataaatgataaatctcgcattcctgtacggctctaccaactaatttcgacaggattgatcagtttgtatgtcaatcaaatgtgtctttgttattttttccaaataaaaaaggtgactgtaagtgctatccaaccacattagtatagaaaatcatcaagaccaaaaaccctacttaaaacaggtttatcttctacaaaatggtaaaacatattttctacaaaatggcatatattgtgcttcttttctgcttgtccccatttgtttgtgaaagtaatgtctgcgtaatattgctcaaccaaacccttctttttaagatgagaaacctactacttatgattatttatacatcttcattagggcttttctactgggcttcctgagagattgcaattgtcccttgtgcgaactataccagggctggagaactgcctaatgctaagacctgcatatgcagttgaatatgattacttacccgcatatcaatgctcaagatcacttatgacaaagaagattgagggtttattcttctctggccagataaatggaacaacgggatacgaagaagctgcagctcagggtataatttctggaatcaatgcagctaggcattctgatgggaaatcattaattattcttgagagggaaagcagttatataggaactcttattgatgatcttgttacaaaagatcttagagagccctatcgcatggtaacacaaaattacatgctgagttctttgaatttttatgctgtctagtgtctaatcaaatatgactaaactccccccttttttcctttgtttttgctgggacatttatggacatctagccgttcagaacaccggctattgcttcgatcagataatgctgatagtcgtttgacccctttgggacgagagattggtttaatagatgatagacgttgggagctttatcagtcaaagcaagcccgcattaagcaagagaaagaacggttgagatctacaaaagttccaggaggtgaatttgctgctgaagttactgcagtatccaaccaacctgtaaaggattcatctacacttgaagccatattaaagaagccacatgtacaatataaactccttgacgagcatggatgcggaaatgaaaatttatctcgaattgagaaggaatgtatagagattgatatcaagtatgaaggtttcatcgcacgacaacaaagtcaattacatcagatcgtaacatgattccaaaggacgtagatgccgccatggagcgtggagacggcgctcaacgcactgctctccctcctccctgacctctccctcgacctcctctccctggtcaatctcctgctccaggtatccatccttcgtcgtcccaattcaggccttctacgtcctttggttcggatagggattagcactctacaatttagttactgaacatagtctgcaaaagtatgaaacaaactagaaaaagctacacatttggcaattcctgaatccagtgccacctgacataaagcatatttggttcatgttaataaagaacttactaacaactgtagacattacctcaactgttattggttttcttccat

SEQ ID NO: 63486 - DNA, 1731 bp, Zea Mays
cgtccacacctcgggaccatttccttcgttcggtcgtttccctactatcctcctcgcgttcatctcgcccgtacgccgacgctgccgcctggctcgcaccgcccgccggcagtgcctcagtccagatcaagcccctcttcccagatcgggtcctagttgggctaccgcagccctacgccaggtgccgagtccctcgccgatttcttcggcggcgaagagtgcccaccagatccgcccctgatggacaacgtcgagtctgcccctgactcgccggcgcaggcgccgccgtcatccgcctcttctctccccaaggagcaatcgcaggtggaattggagctgaggctgcttcaggctcttgagttctaccctccatcaaaactcaaaggtttcgccatagtgttaagttatttgtttgttggcccttggggtttggcataaattgtcgtcacttaatgtaaacacctatgctaataacactaattcactaacgggaaaatatgtaaacaatgaatgagctacctgattaccgttagcattttttcatataacaaaggttggcatttaatgccaaaaagtttgtgtgcttgcactttgggagtaacaatgtattcgtcctcgttgttgaatgaatgaatggtatatttgcaaaatattttgatgtgaaaaggcgatgtaatttgtgttgttaaggttcagctaaagcttgtttagtggtgtataaggtgggattatagtattgtggaattgaaggtgggtttgtgcccctacagcgacaagttacagggctccagtgccaccttgctgcgctgtcattttgagaaaccagaaaccatgaaatttcctatttggttcttctttcaaagaacatgactgaaaccatcctggctttcaatgcttcagctattcatatgaatttgtcgtccatcacttccgtgatggagtatgcctgtataaataatttgcatggcattttcaaagagcatctaagtctatctgttgagaaaaatagcatgtgccgcattggcagtgatagtctgattacctgttttactaagttgtttcgcacatgttgtaattctggtgtacttgttttaggcgttcaccggcattttgttctctatggcctcatggaatatttgcgaaaaagccttgaccgacagttctcttctgacgaagttctacaactcttggaccgcttctttaacctagaaatgctgaaaccagaggatgatgagaaggataacttccgtcagggcgaagaattttcgttgccagagagttttctcaacaaggaagaataatatctagtaacctcgtactttgggtgtcctctggaagagaaatcagaaggctggttcttagtgattccctatttcttgtagcattgtcatctggaacatcggctgcggggagacactgaacactgaagtaaagaaacacatttcctaagctgtggttgtctttactgactgtacagctagcttttgtagactagtgtaatcgaaaataggttgaactgtgtggttgcctggagcgtgaacaaaaagcaaggaggggcaattacaaaagctgctgctgttttacctatcaaacttctctgatcatgactataggtgcagtcctataaagcatccatgattccatgaggattatagccaataggctatcaaagttactgctgccctagattaacacatgccctatattgccctagtggtcgctgaaaatcac

SEQ ID NO: 63487 - DNA, 1034 bp, Zea Mays
cgtccacacctcgggaccatttccttcgttcggtcgtttccctactatcctcctcgcgttcatctcgcccgtacgccgacgctgccgcctggctcgcaccgcccgccggcagtgcctcagtccagatcaagcccctcttcccagatcgggtcctagttgggctaccgcagccctacgccaggtgccgagtccctcgccgatttcttcggcggcgaagagtgcccaccagatccgcccctgatggacaacgtcgagtctgcccctgactcgccggcgcaggcgccgccgtcatccgcctcttctctccccaaggagcaatcgcaggtggaattggagctgaggctgcttcaggctcttgagttctaccctccatcaaaactcaaaggcgttcaccggcattttgttctctatggcctcatggaatatttgcgaaaaagccttgaccgacagttctcttctgacgaagttctacaactcttggaccgcttctttaacctagaaatgctgaaaccagaggatgatgagaaggataacttccgtcagggcgaagaattttcgttgccagagagttttctcaacaaggaagaataatatctagtaacctcgtaaggaatcatggtactttgggtgtcctctggaagagaaatcagaaggctggttcttagtgattccctatttcttgtagcattgtcatctggaacatcggctgcggggagacactgaacactgaagtaaagaaacacatttcctaagctgtggttgtctttactgactgtacagctagcttttgtagactagtgtaatcgaaaataggttgaactgtgtggttgcctggagcgtgaacaaaaagcaaggaggggcaattacaaaagctgctgctgttttacctatcaaacttctctgatcatgactataggtgcagtcctataaagcatccatgattccatgaggattatagccaataggctatcaaagttactgctgccctagattaacacatgccctatattgccctagtggtcgctgaaaatcac

SEQ ID NO: 63488 - DNA, 1071 bp, Zea Mays
cgtccacacctcgggaccatttccttcgttcggtcgtttccctactatcctcctcgcgttcatctcgcccgtacgccgacgctgccgcctggctcgcaccgcccgccggcagtgcctcagtccagatcaagcccctcttcccagatcgggtcctagttgggctaccgcagccctacgccaggtgccgagtccctcgccgatttcttcggcggcgaagagtgcccaccagatccgcccctgatggacaacgtcgagtctgcccctgactcgccggcgcaggcgccgccgtcatccgcctcttctctccccaaggagcaatcgcaggtggaattggagctgaggctgcttcaggctcttgagttctaccctccatcaaaactcaaaggcgttcaccggcattttgttctctatggcctcatggaatatttgcgaaaaagccttgaccgacagttctcttctgacgaagttctacaactcttggaccgcttctttaacctagaaatgctgttgggtcacaactgacaagttttacttatgatgatgattgataaatgaagaaaccagaggatgatgagaaggataacttccgtcagggcgaagaattttcgttgccagagagttttctcaacaaggaagaataatatctagtaacctcgtactttgggtgtcctctggaagagaaatcagaaggctggttcttagtgattccctatttcttgtagcattgtcatctggaacatcggctgcggggagacactgaacactgaagtaaagaaacacatttcctaagctgtggttgtctttactgactgtacagctagcttttgtagactagtgtaatcgaaaataggttgaactgtgtggttgcctggagcgtgaacaaaaagcaaggaggggcaattacaaaagctgctgctgttttacctatcaaacttctctgatcatgactataggtgcagtcctataaagcatccatgattccatgaggattatagccaataggctatcaaagttactgctgccctagattaacacatgccctatattgccctagtggtcgctgaaaatcac

SEQ ID NO: 63489 - DNA, 1009 bp, Zea Mays
cgtccacacctcgggaccatttccttcgttcggtcgtttccctactatcctcctcgcgttcatctcgcccgtacgccgacgctgccgcctggctcgcaccgcccgccggcagtgcctcagtccagatcaagcccctcttcccagatcgggtcctagttgggctaccgcagccctacgccaggtgccgagtccctcgccgatttcttcggcggcgaagagtgcccaccagatccgcccctgatggacaacgtcgagtctgcccctgactcgccggcgcaggcgccgccgtcatccgcctcttctctccccaaggtggaattggagctgaggctgcttcaggctcttgagttctaccctccatcaaaactcaaaggcgttcaccggcattttgttctctatggcctcatggaatatttgcgaaaaagccttgaccgacagttctcttctgacgaagttctacaactcttggaccgcttctttaacctagaaatgctgaaaccagaggatgatgagaaggataacttccgtcagggcgaagaattttcgttgccagagagttttctcaacaaggaagaataatatctagtaacctcgtactttgggtgtcctctggaagagaaatcagaaggctggttcttagtgattccctatttcttgtagcattgtcatctggaacatcggctgcggggagacactgaacactgaagtaaagaaacacatttcctaagctgtggttgtctttactgactgtacagctagcttttgtagactagtgtaatcgaaaataggttgaactgtgtggttgcctggagcgtgaacaaaaagcaaggaggggcaattacaaaagctgctgctgttttacctatcaaacttctctgatcatgactataggtgcagtcctataaagcatccatgattccatgaggattatagccaataggctatcaaagttactgctgccctagattaacacatgccctatattgccctagtggtcgctgaaaatcac

SEQ ID NO: 63490 - DNA, 3803 bp, Zea Mays
ccagccccggcccctccgtcgatgccgtcgctggcgccgccgaatcgagcttgcctcgctggactgcgctccatctcctctcttccctagccctggcccctccgtcaatgccgtcaccagtggctacccgagcttgcctcaccgtccccgctgtcgtcccgcgaatccacgaaccacgtcttccactagctcgatttggcgcgaacccccgcgccgcggagggcgccggccgctccgtggcggcgtcgccggccttgcctcgtctctcgcggggtgcctactcctcggtctcgtcgcgaccgcggcgatgctctgcctctcctccccgccctcccgcgcgcgccagcatggtggcagccgcgggatcgtgcccgccggcggcagtggagcgacaccgagggtcacgatcttctccgcgccgcggccgccgccggagggctcgcccgcgcggcaggagctggcggcgcgctcctggctggcgctcccgtggaacgtcagcgtcgtgctcctaggcgccggccccgagtccgtcgcgctcgccgcgcggctcgggcaccgcgtcaccgccgatgccgccatcgattttgcgtacgaattcacaagaacattttaccttcttatcgtcttttacgtacgcaagatgatcagctcgccgatctatcccgtctgtcaatcgtcatcgttgattggtttaggttcacggggacaccgttcttccactcaatggtcgcgagagcacaggctgccgccgacaccgacgtttgcgtcctcgtcgacgccgagatcgtccttcttcccgaaattgtcaacgcgttggatcgtttcagcaaggttgatggcgactggttcctcgtttctctgtcacgtaacgtcaccgatccccgttaccagctcgctgacagtggaagccattgggtacaagcagacggcaaagaagtgagctttacggagctgcaggagattccagctgagtggtcatcatcggagggctctgacagagggctgattatggcgtggaacaatccaagcagtgctttacacgcaggagttctgccttcttttctgtatggaagaggagcacagaattggtggctggctcacgaggttctgtcctctgagatgaggcttttctttgatgcaagcagtctggttcttggactgtatcctgagagcattagcgccatgcagcatgtcatggcctcgagtaagaatggcaggttaccttctgtatcctgggagtacggcgtcaatcaccatcttgctgcggtttatggctcgtattgctgtcgatcaccagcgagacgctttcctatgctgcatagagtggtaaagcaatctgaagattatatgctcagcaaagttgacacactcgtatcatcagatttcttcatcagtaaacaaggaaatgcccatggagtagatagcctacggaagaaacaaaacgtttctctatctggatatctacacggttgttcttccgagacctcagcgcctgaccttccatattctttgagcatgctactcgatcttgtcgctgatgagaatggttccgttgtccttggcgtggctggaaaaagctacagggacatgctcatgagttgggcatgccgcctgcgtcgtcttagagttaccaatttcttagtatgtgccttagaccatgagacatatgagttctcaatcttacaggggttgccagttttcagagacccattgtcaccaacaaatgtcagctttgacgactgccactttggaacgaagtgttttcaacaagtgacaaaagtgaagtcgcggattgtccttgagatactaagactgggatacaatgtgctgctgagtgacgttgatgtttattggtttggcaatccgatgccactcctgtactctcttggtcttgctacattcggagcacaatctgatgaatacaatgagacaggaccaataaacttgccacgccgactgaactcaggattctactttgctcgctcagacaacgccaccatcattgcaatggagatgatagtaaaacacgcagccagttcaggcctatctgagcagccgagtttctacgatgtcttgtgtggggagaacggaacaaaccggatcggtgaagacagatgcttggagcccaacacgaacctgaccgttgtgttcttggatcgggacttgttccccaatggtgcctacaagggtctatgggagaagcgtgatgtacgagcaacctgcaaagagcttggctgtttcatcattcacaacaactggataaacaagaggagaaaaaaggtccaccggcaaatggtatctgggctgtgggactacgatcctacctctaggcagtgcttgcaggaatggagtgctcagaatgatggggcaattccatttgtttgaggacactgacagttagtagactggttaacttacctcatcccctgttattaaattcgaatattatgtgagggattgatcaatactttcattcgacttcttgcaatcacaatctaaaattgctaattggacattgtgtttgccacaaccgttgtgcgactccaataaaaccaggtttctgtaatttccagaacagaataagtaatccagcactcagttcagagccaacagcttcgtttggtttttagttgagcatctcgacggttcgccgccggctcagaggaaaacatggcatcgtttcacaaaacatggcggtgtgaaagaaaaagatgggagtccagatttcatttgtagtttcccacacaaaatgacaaaacactagccatctgctgcttgcagctcattggagcaggaaaaacacataggatcgttaatcatctgtctaataacggcataaaggtttctggtcgcaaaaggttgacaacttattacagttctgcattgtggagaaacaagatctcacttcatcttcgcttcggtaaacagaacatgcttgttcacacggggatcatactttctaaactcaagcttctcggtgatgcgacgaggattcttgcgcttcacgtagaagaatccagtgccggctgcagaaaccagcctgatgaagatcgaggcacgctttgccttccccatcagtgactatgaatttgtagcagaaggaactggaagccgagcagccgaggtcgagcagatctgcagcaggtgccgacgcgaccgagcagcactgcagcaggggccgagcactggagcagccgagcaccaggaagacgagcaggggacggtcgtacggggatcagatggagggctggaggaagagtggatgacgagcgcccgacccgaggaagaggagcaggggacggctggacggggatccaccggtcgctcgccttcttcctcaacccgccgctggactgcgtcgcctgcccgccgggcgcgctcctccaggagaacaagcaggtcggcggcccgcgcgcgttcggaggaagacgagcgcccgaggaagacgacgagcaggggccaggggacggccttccggtcgacggacggacggagcgcactgcgcagcgcaccaaagcagccgccacccgcaaggcaacagccaaacagaagctagggttagccggtgtcggtccgattgattggaatggatgaggaaatgaggatcagggtattccacgctgagacatttgagacactgaggtaacggtcccatctgtcatatcgggcctcgacgggtagcgggtatgggcggcgataaaccgtacccagccccgccatcctgatggggggattggtttttgcccatatctttttccgcgggagtattatcacctggcaatggatgaattacctgcccgaag

SEQ ID NO: 63491 - DNA, 3810 bp, Zea Mays
cgactgcgctccatctcctctcttccccagctctgccccctccatcgatgccgttgtcgacgccaaaccgagcttgcctcaccacgtcggactgcgctccatctccatctcctcttttccccagccccggcccctccgtcgatgccgtcgctggcgccgccgaatcgagcttgcctcgctggactgcgctccatctcctctcttccctagccctggcccctccgtcaatgccgtcaccagtggctacccgagcttgcctcaccgtccccgctgtcgtcccgcgaatccacgaaccacgtcttccactagctcgatttggcgcgaacccccgcgccgcggagggcgccggccgctccgtggcggcgtcgccggccttgcctcgtctctcgcggggtgcctactcctcggtctcgtcgcgaccgcggcgatgctctgcctctcctccccgccctcccgcgcgcgccagcatggtggcagccgcgggatcgtgcccgccggcggcagtggagcgacaccgagggtcacgatcttctccgcgccgcggccgccgccggagggctcgcccgcgcggcaggagctggcggcgcgctcctggctggcgctcccgtggaacgtcagcgtcgtgctcctaggcgccggccccgagtccgtcgcgctcgccgcgcggctcgggcaccgcgtcaccgccgatgccgccatcgattttgcgttcacggggacaccgttcttccactcaatggtcgcgagagcacaggctgccgccgacaccgacgtttgcgtcctcgtcgacgccgagatcgtccttcttcccgaaattgtcaacgcgttggatcgtttcagcaaggttgatggcgactggttcctcgtttctctgtcacgtaacgtcaccgatccccgttaccagctcgctgacagtggaagccattgggtacaagcagacggcaaagaagtgagctttacggaggagattccagctgagtggtcatcatcggagggctctgacagagggctgattatggcgtggaacaatccaagcagtgctttacacgcaggagttctgccttcttttctgtatggaagaggagcacagaattggtggctggctcacgaggttctgtcctctgagatgaggcttttctttgatgcaagcagtctggttcttggactgtatcctgagagcattagcgccatgcagcatgtcatggcctcgagtaagaatggcaggttaccttctgtatcctgggagtacggcgtcaatcaccatcttgctgcggtttatggctcgtattgctgtcgatcaccagcgagacgctttcctatgctgcatagagtggtaaagcaatctgaagattatatgctcagcaaagttgacacactcgtatcatcagatttcttcatcagtaaacaaggaaatgcccatggagtagatagcctacggaagaaacaaaacgtttctctatctggatatctacacggttgttcttccgagacctcagcgcctgaccttccatattctttgagcatgctactcgatcttgtcgctgatgagaatggttccgttgtccttggcgtggctggaaaaagctacagggacatgctcatgagttgggcatgccgcctgcgtcgtcttagagttaccaatttcttagtatgtgccttagaccatgagacatatgagttctcaatcttacaggggttgccagttttcagagacccattgtcaccaacaaatgtcagctttgacgactgccactttggaacgaagtgttttcaacaagtgacaaaagtgaagtcgcggattgtccttgagatactaagactgggatacaatgtgctgctgagtgacgttgatgtttattggtttggcaatccgatgccactcctgtactctcttggtcttgctacattcggagcacaatctgatgaatacaatgagacaggaccaataaacttgccacgccgactgaactcaggattctactttgctcgctcagacaacgccaccatcattgcaatggagatgatagtaaaacacgcagccagttcaggcctatctgagcagccgagtttctacgatgtcttgtgtggggagaacggaacaaaccggatcggtgaagacagatgcttggagcccaacacgaacctgaccgttgtgttcttggatcgggacttgttccccaatggtgcctacaagggtctatgggagaagcgtgatgtacgagcaacctgcaaagagcttggctgtttcatcattcacaacaactggataaacaagaggagaaaaaaggtccaccggcaaatggtatctgggctgtgggactacgatcctacctctaggcagtgcttgcaggaatggagtgctcagaatgatggggcaattccatttgtttgaggacactgacagttagtagactggttaacttacctcatcccctgttattaaattcgaatattatgtgagggattgatcaatactttcattcgacttcttgcaatcacaatctaaaattgctaattggacattgtgtttgccacaaccgttgtgcgactccaataaaaccaggtttctgtaatttccagaacagaataagtaatccagcactcagttcagagccaacagcttcgtttggtttttagttgagcatctcgacggttcgccgccggctcagaggaaaacatggcatcgtttcacaaaacatggcggtgtgaaagaaaaagatgggagtccagatttcatttgtagtttcccacacaaaatgacaaaacactagccatctgctgcttgcagctcattggagcaggaaaaacacataggatcgttaatcatctgtctaataacggcataaaggtttctggtcgcaaaaggttgacaacttattacagttctgcattgtggagaaacaagatctcacttcatcttcgcttcggtaaacagaacatgcttgttcacacggggatcatactttctaaactcaagcttctcggtgatgcgacgaggattcttgcgcttcacgtagaagaatccagtgccggctgcagaaaccagcctgatgaagatcgaggcacgctttgccttccccatcagtgactatgaatttgtagcagaaggaactggaagccgagcagccgaggtcgagcagatctgcagcaggtgccgacgcgaccgagcagcactgcagcaggggccgagcactggagcagccgagcaccaggaagacgagcaggggacggtcgtacggggatcagatggagggctggaggaagagtggatgacgagcgcccgacccgaggaagaggagcaggggacggctggacggggatccaccggtcgctcgccttcttcctcaacccgccgctggactgcgtcgcctgcccgccgggcgcgctcctccaggagaacaagcaggtcggcggcccgcgcgcgttcggaggaagacgagcgcccgaggaagacgacgagcaggggccaggggacggccttccggtcgacggacggacggagcgcactgcgcagcgcaccaaagcagccgccacccgcaaggcaacagccaaacagaagctagggttagccggtgtcggtccgattgattggaatggatgaggaaatgaggatcagggtattccacgctgagacatttgagacactgaggtaacggtcccatctgtcatatcgggcctcgacgggtagcgggtatgggcggcgataaaccgtacccagccccgccatcctgatggggggattggtttttgcccatatctttttccgcgggagtattatcacctggcaatggatgaattacctgcccgaag

SEQ ID NO: 63492 - DNA, 3311 bp, Zea Mays
cctttacccactttctcctgcgcacacaccgcagcgcattgcctcctcgctccgcgcatggctaccaccgatcccagatatcactcgtggagacgaagaagcgtatgtcggtgaggttcacggggacaccgttcttccactcaatggtcgcgagagcacaggctgccgccgacaccgacgtttgcgtcctcgtcgacgccgagatcgtccttcttcccgaaattgtcaacgcgttggatcgtttcagcaaggttgatggcgactggttcctcgtttctctgtcacgtaacgtcaccgatccccgttaccagctcgctgacagtggaagccattgggtacaagcagacggcaaagaagtgagctttacggaggtaccttttcgtctatctaaaaccaatgctacacaagctgacaagcattctctgtaactgttgaccaattaatatctgtctgcattagctgcaggagattccagctgagtggtcatcatcggagggctctgacagagggctgattatggcgtggaacaatccaagcagtgctttacacgcaggagttctgccttcttttctgtatggaagaggagcacagaattggtggctggctcacgaggttctgtcctctgagatgaggcttttctttgatgcaagcagtctggttcttggactgtatcctgagagcattagcgccatgcagcatgtcatggcctcgagtaagaatggcaggttaccttctgtatcctgggagtacggcgtcaatcaccatcttgctgcggtttatggctcgtattgctgtcgatcaccagcgagacgctttcctatgctgcatagagtggtaaagcaatctgaagattatatgctcagcaaagttgacacactcgtatcatcagatttcttcatcagtaaacaaggaaatgcccatggagtagatagcctacggaagaaacaaaacgtttctctatctggatatctacacggttgttcttccgagacctcagcgcctgaccttccatattctttgagcatgctactcgatcttgtcgctgatgagaatggttccgttgtccttggcgtggctggaaaaagctacagggacatgctcatgagttgggcatgccgcctgcgtcgtcttagagttaccaatttcttagtatgtgccttagaccatgagacatatgagttctcaatcttacaggggttgccagttttcagagacccattgtcaccaacaaatgtcagctttgacgactgccactttggaacgaagtgttttcaacaagtgacaaaagtgaagtcgcggattgtccttgagatactaagactgggatacaatgtgctgctgagtgacgttgatgtttattggtttggcaatccgatgccactcctgtactctcttggtcttgctacattcggagcacaatctgatgaatacaatgagacaggaccaataaacttgccacgccgactgaactcaggattctactttgctcgctcagacaacgccaccatcattgcaatggagatgatagtaaaacacgcagccagttcaggcctatctgagcagccgagtttctacgatgtcttgtgtggggagaacggaacaaaccggatcggtgaagacagatgcttggagcccaacacgaacctgaccgttgtgttcttggatcgggacttgttccccaatggtgcctacaagggtctatgggagaagcgtgatgtacgagcaacctgcaaagagcttggctgtttcatcattcacaacaactggataaacaagaggagaaaaaaggtccaccggcaaatggtatctgggctgtgggactacgatcctacctctaggcagtgcttgcaggaatggagtgctcagaatgatggggcaattccatttgtttgaggacactgacagttagtagactggttaacttacctcatcccctgttattaaattcgaatattatgtgagggattgatcaatactttcattcgacttcttgcaatcacaatctaaaattgctaattggacattgtgtttgccacaaccgttgtgcgactccaataaaaccaggtttctgtaatttccagaacagaataagtaatccagcactcagttcagagccaacagcttcgtttggtttttagttgagcatctcgacggttcgccgccggctcagaggaaaacatggcatcgtttcacaaaacatggcggtgtgaaagaaaaagatgggagtccagatttcatttgtagtttcccacacaaaatgacaaaacactagccatctgctgcttgcagctcattggagcaggaaaaacacataggatcgttaatcatctgtctaataacggcataaaggtttctggtcgcaaaaggttgacaacttattacagttctgcattgtggagaaacaagatctcacttcatcttcgcttcggtaaacagaacatgcttgttcacacggggatcatactttctaaactcaagcttctcggtgatgcgacgaggattcttgcgcttcacgtagaagaatccagtgccggctgcagaaaccagcctgatgaagatcgaggcacgctttgccttccccatcagtgactatgaatttgtagcagaaggaactggaagccgagcagccgaggtcgagcagatctgcagcaggtgccgacgcgaccgagcagcactgcagcaggggccgagcactggagcagccgagcaccaggaagacgagcaggggacggtcgtacggggatcagatggagggctggaggaagagtggatgacgagcgcccgacccgaggaagaggagcaggggacggctggacggggatccaccggtcgctcgccttcttcctcaacccgccgctggactgcgtcgcctgcccgccgggcgcgctcctccaggagaacaagcaggtcggcggcccgcgcgcgttcggaggaagacgagcgcccgaggaagacgacgagcaggggccaggggacggccttccggtcgacggacggacggagcgcactgcgcagcgcaccaaagcagccgccacccgcaaggcaacagccaaacagaagctagggttagccggtgtcggtccgattgattggaatggatgaggaaatgaggatcagggtattccacgctgagacatttgagacactgaggtaacggtcccatctgtcatatcgggcctcgacgggtagcgggtatgggcggcgataaaccgtacccagccccgccatcctgatggggggattggtttttgcccatatctttttccgcgggagtattatcacctggcaatggatgaattacctgcccgaag

SEQ ID NO: 63493 - DNA, 2618 bp, Zea Mays
ctcctctcttccccagctctgccccctccatcgatgccgttgtcgacgccaaaccgagcttgcctcaccacgtcggactgcgctccatctccatctcctcttttccccagccccggcccctccgtcgatgccgtcgctggcgccgccgaatcgagcttgcctcgctggactgcgctccatctcctctcttccctagccctggcccctccgtcaatgccgtcaccagtggctacccgagcttgcctcaccgtccccgctgtcgtcccgcgaatccacgaaccacgtcttccactagctcgatttggcgcgaacccccgcgccgcggagggcgccggccgctccgtggcggcgtcgccggccttgcctcgtctctcgcggggtgcctactcctcggtctcgtcgcgaccgcggcgatgctctgcctctcctccccgccctcccgcgcgcgccagcatggtggcagccgcgggatcgtgcccgccggcggcagtggagcgacaccgagggtcacgatcttctccgcgccgcggccgccgccggagggctcgcccgcgcggcaggagctggcggcgcgctcctggctggcgctcccgtggaacgtcagcgtcgtgctcctaggcgccggccccgagtccgtcgcgctcgccgcgcggctcgggcaccgcgtcaccgccgatgccgccatcgattttgcgtacgaattcacaagaacattttaccttcttatcgtcttttacgtacgcaagatgatcagctcgccgatctatcccgtctgtcaatcgtcatcgttgattggtttaggttcacggggacaccgttcttccactcaatggtcgcgagagcacaggctgccgccgacaccgacgtttgcgtcctcgtcgacgccgagatcgtccttcttcccgaaattgtcaacgcgttggatcgtttcagcaaggttgatggcgactggttcctcgtttctctgtcacgtaacgtcaccgatccccgttaccagctcgctgacagtggaagccattgggtacaagcagacggcaaagaagtgagctttacggagctgcaggagattccagctgagtggtcatcatcggagggctctgacagagggctgattatggcgtggaacaatccaagcagtgctttacacgcaggagttctgccttcttttctgtatggaagaggagcacagaattggtggctggctcacgaggttctgtcctctgagatgaggcttttctttgatgcaagcagtctggttcttggactgtatcctgagagcattagcgccatgcagcatgtcatggcctcgagtaagaatggcaggttaccttctgtatcctgggagtacggcgtcaatcaccatcttgctgcggtttatggctcgtattgctgtcgatcaccagcgagacgctttcctatgctgcatagagtggtaaagcaatctgaagattatatgctcagcaaagttgacacactcgtatcatcagatttcttcatcagtaaacaaggaaatgcccatggagtagatagcctacggaagaaacaaaacgtttctctatctggatatctacacggttgttcttccgagacctcagcgcctgaccttccatattctttgagcatgctactcgatcttgtcgctgatgagaatggttccgttgtccttggcgtggctggaaaaagctacagggacatgctcatgagttgggcatgccgcctgcgtcgtcttagagttaccaatttcttagtatgtgccttagaccatgagacatatgagttctcaatcttacaggtagtcattttctgttatttgggcttcttttatgcttttcaaaccacagacagaccacctcaaaagctttttaattcgaattctaggggttgccagttttcagagacccattgtcaccaacaaatgtcagctttgacgactgccactttggaacgaagtgttttcaacaagtgacaaaagtgaagtcgcggattgtccttgagatactaagactgggatacaatgtgctgctgagtgacgttgatgtttattggtttggcaatccgatgccactcctgtactctcttggtcttgctacattcggagcacaatctgatgaatacaatgagacagacaacgccaccatcattgcaatggagatgatagtaaaacacgcagccagttcaggcctatctgagcagccgagtttctacgatgtcttgtgtggggagaacggaacaaaccggatcggtgaagacagatgcttggagcccaacacgaacctgaccgttgtgttcttggatcgggacttgttccccaatggtgcctacaagggtctatgggagaagcgtgatgtacgagcaacctgcaaagagcttggctgtttcatcattcacaacaactggataaacaagaggagaaaaaaggtccaccggcaaatggtatctgggctgtgggactacgatcctacctctaggcagtgcttgcaggaatggagtgctcagaatgatggggcaattccatttgtttgaggacactgacagttagtagactggttaacttacctcatcccctgttattaaattcgaatattatgtgagggattgatcaatactttcattcgact

SEQ ID NO: 63494 - DNA, 1824 bp, Zea Mays
acatccagatccgtccagatccagattcacccgtctggcacttcacttggcatcacccccgccgtcgcgccgcggccggccgggcctgcaccaaggggtccaggtgaataggtgatgcggccgactcacccgcggcgcggcgcggccctcgtgagaactgcaaaaccaccggccgtatacagtaggcctgcctgcctgcctgcctgcctgccagcaaaccctcccgatcggccgcactgaaatgatcagagtgagtcccctcctcctcgcccgcccgctccgtgttcattgccccactccctcacgcctctcgcgcccgccgctccaccaccccaacccccacccacgctcaggggaagggggtctgggttgcgtacaggcgaaaggcacgcgccgccgctgccgcgcgagcctctccgtccccatcgccgcgcagatggatccgtcgtcggagcccctgtacgcgcaggtcgagccgtacgactccgggttcctcaaggtctccgatgtccacaccatctactacgagcagtccgggaacccgcagggccatgcggcggtgtttctccacggcggtcccggagccggcacgtcgcccggcaacaggaggttctttgacccgcagttctacaggatcgttctgtttgaccagaggggtgcaggcagaagcactccccatgcttgtttagagcagaacactacttgggacttggtagctgacattgagaagctcagggagcatcttggcatccctgaatggcaggtgtttggtggttcatggggaagcaccttggcacttgcctacagccaggagcaccctgataaggtcactggccttgttctgagaggaattttcttgcttaggaaaaaggagtttgattggttctatgagggtggtgcagcagccattttcccagatgcatgggaaccatttagagattttattcctgaggatgaaaggaattgtttcgtagatgcttataacaaaaggttaacttcctctgatcctattgttcaggttgaagctgctaagcgctggacgatgtgggagatgatgactgcgcaacttatccaaaacaatgataacattaaacgaggagaagatgatgaattttcactggcatttgcaaggattgaaaaccactactttgtgaataagggatttttaccctcggactcattcctattggacaatgttgataagatccgacatattaaaggttttattgtacagggacgttatgatgtttgttgccctatgatgtctgcttgggatcttcataaggcttggcctgaagcagaattcaagagtttggagctgcaggtgatgaatttcagttggatgaagatcttctttaggtaactaggtggtaatgtgtgttgtgtggtatctgggacttgtagcattagtaactagtggtagcagatgcagggcactcggccaatgaagttggcatcgctgccgaactgaggtcagccaccgataaactgagagacttgctgcgcaaatgagccggcgaaaggcaacctgcacctctatctgatcatggaactcagaggcccataataattacatagctgtgtaacggttagcactgtgccgttaaacaatgtcattgtcaccatcgatatgttgtttgtttgctcgctggagtgtatgaggaattgaagtttcaagacgggaccagaatgggtggggcgtgtttggtttgcgtttttagacctggtctgtctagccagctatgccagggcaacacaccctggctctcacctagatcctgtttggttgcttaaaagaagaagaagaagaagaagaagaagaaa

SEQ ID NO: 63495 - DNA, 1717 bp, Zea Mays
acatccagatccgtccagatccagattcacccgtctggcacttcacttggcatcacccccgccgtcgcgccgcggccggccgggcctgcaccaaggggtccaggtgaataggtgatgcggccgactcacccgcggcgcggcgcggccctcgtgagaactgcaaaaccaccggccgtatacagtaggcctgcctgcctgcctgcctgcctgccagcaaaccctcccgatcggccgcactgaaatgatcagagtgagtcccctcctcctcgcccgcccgctccgtgttcattgccccactccctcacgcctctcgcgcccgccgctccaccaccccaacccccacccacgctcaggggaagggggtctgggttgcgtacaggcgaaaggcacgcgccgccgctgccgcgcgagcctctccgtccccatcgccgcgcagatggatccgtcgtcggagcccctgtacgcgcaggtcgagccgtacgactccgggttcctcaaggtctccgatgtccacaccatctactacgagcagtccgggaacccgcagggccatgcggcggtgtttctccacggcggtcccggagccggcacgtcgcccggcaacaggaggttctttgacccgcagttctacaggatcgttctgtttgaccagaggggtgcaggcagaagcactccccatgcttgtttagagcagaacactacttgggacttggtagctgacattgagaagctcagggagcatcttggcatccctgaatggcaggtgtttggtggttcatggggaagcaccttggcacttgcctacagccaggagcaccctgataaggtcactggccttgttctgagaggaattttcttgcttaggaaaaaggagtttgattggttctatgagggtggtgcagcagccattttcccagatgcatgggaaccatttagagattttattcctgaggatgaaaggaattgtttcgtagatgcttataacaaaaggttaacttcctctgatcctattgttcaggttgaagctgctaagcgctggacgatgtgggagatgatgactgcgcaacttatccaaaacaatgataacattaaacgaggagaagatgatgaattttcactggcatttgcaaggattgaaaaccactactttgtgaataagggatttttaccctcggactcattcctattggacaatgttgataagatccgacatattaaaggttttattgtacagggacgttatgatgtttgttgccctatgatgtctgcttgggatcttcataaggcttggcctgaagcagaattcaaggtggtagcagatgcagggcactcggccaatgaagttggcatcgctgccgaactgaggtcagccaccgataaactgagagacttgctgcgcaaatgagccggcgaaaggcaacctgcacctctatctgatcatggaactcagaggcccataataattacatagctgtgtaacggttagcactgtgccgttaaacaatgtcattgtcaccatcgatatgttgtttgtttgctcgctggagtgtatgaggaattgaagtttcaagacgggaccagaatgggtggggcgtgtttggtttgcgtttttagacctggtctgtctagccagctatgccagggcaacacaccctggctctcacctagatcctgtttggttgcttaaaagaagaagaagaagaagaagaagaagaaa

SEQ ID NO: 63496 - DNA, 814 bp, Zea Mays
tttttttttttttttttcatgggaaccatttagagattttattcctgaggatgaaaggaattgtttcgtagatgcttataacaaaaggttaacttcctctgatcctattgttcaggttgaagctgctaagcgctggacgatgtgggagatgatgactgcgcaacttatccaaaacaatgataacattaaacgaggagaagatgatgaattttcactggcatttgcaaggattgaaaaccactactttgtgaataagggatttttaccctcggactcattcctattggacaatgttgataagatccgacatattaaaggttttattgtacagggacgttatgatgtttgttgccctatgatgtctgcttgggatcttcataaggcttggcctgaagcagaattcaaggtggtagcagatgcagggcactcggccaatgaagttggcatcgctgccgaactgaggtcagccaccgataaactgagagacttgctgcgcaaatgagccggcgaaaggcaacctgcacctctatctgatcatggaactcagaggcccataataattacatagctgtgtaacggttagcactgtgccgttaaacaatgtcattgtcaccatcgatatgttgtttgtttgctcgctggagtgtatgaggaattgaagtttcaagacgggaccagaatgggtggggcgtgtttggtttgcgtttttagacctggtctgtctagccagctatgccagggcaacacaccctggctctcacctagatcctgtttggttgcttaaaagaagaagaagaagaagaagaagaagaaa

SEQ ID NO: 63497 - DNA, 1857 bp, Zea Mays
aagaaactgacataaaataggctgtttagatcccacccaatttccagaacgccagattcctagaaatttccaaatgccagattcctaaaaaaatagaacacgtagtgatcggtaagacattacaaatgtagattatatgcaaccaataccatgccatcaaattctgggttacccttcgtcaaaggaaaaagacacctcatgatttaaaagatatgataaaaatagattatacgcaatcaatgcttatgtcatcaaatactgaatacaaggaccattatcggattacatgtataacgggttgtcagattaatgtagagtgaggatggtacacctttttccaggtacaatttaatctgaagcacaggaagactcgacaaagattagacatgatgtgcagatatccaccatcataatctcattgagatataagatcccatttcagaaccttgaacctaagatgtcttccattattcagtaaaatttccaacagaactaaaggtcctacaacacatacatttttttaaaggaccaattcaaaatcctggacctcaaactgccaacgcattacaagaaacagggtgtaagatcatctaatgtttgtcgtccttgggcacagcgtctttcttggcagcttgggactccaactccttcactgaagactgttcagtagatctattttgaatcatgaaaatgcatgagaccgtacagaactattaaagcaaatgtgatgctcaaatggttattggtggtttcaagtttcaactttgagcagagcttcaaagcatgagagaagacacagtgacacacgcagcattataatggctacaacaaaaggtgtgtaataaacaaaacaaaaataggtatcgctgaagcaccaatgcgactactgtaaactttgatagtttgatgtacaaacacatcatcactaattcattcgaaatagtaacagtagattgcttattctggatccatataagaatggttgattccaataaaatttcacttccagaccaaataagcccaccgaataatttaaagtaaaatggccaaagtgatgtctgtcctcattggggtcggtgcggccctgtgccatgagcaccatgcactggctaattacaatttggactaatcatccacggctaattacattggtcctgcactagtgccgcacatggacatggacaaaatcaaagttgtatcgccaaatgcaccagcacatgttcctggcccgtcatcgaccgttggcacagcttggatggtatgctaactagctttaatccaatgaaaattgcttgatggcatgaggggaggggaaattttaaatagtgtcgtcgaaggaaaaaatatatttccaacggcacataagggatcattataagtttcggtgacattcaaggaattttctcatccaatgatccaatagtggagtgttctgcaccccacctcatcttggtcagtttcataaatgctgagttatgaacccagtaaacagcacacgtccctctagcagtaccatctcttaaaacagattcatcctccgcccaccggatatagaatgcagggatacaacacatcctgaactggccactctcccgttgctgagttctctacccagttggcacaccctcccagcggcaagcatgacacctagacttgttgcttcatttgtcaaccaaatttgtttttgcttttcatttaggtagttatgaattttccatccactctatttttttccctactcttcaactgagctcatgatattttattcctttctttctttttttgtcagctggtgtaattttttaagtcagcattaatttatgaatctcatattctgttcttatgcgcatgtatttc

SEQ ID NO: 63498 - DNA, 3793 bp, Zea Mays
  misc_feature (1)..(1): n is a, c, g, or t
nttgttgcacaaaagcgctagccttgtgtttccgtgaaccgcaattctacaacaatgctacctgcgtcatattggaaagtgtgtatatatactgaggaaacaagaaacaagggatacataagctacttaattctgtttgtcaaattggaggcctaaaattagtcgcaatgcagtaaaaaataactcaaagatatctgtggtgcgagcgagcctgatacctgtagaccacaaactgataaacagttatgcagtaatcatgtaaggattaaaaataggagtgcaattatgtgctctttcagaccgaacacaggttattcaggaatattaaataagtgacaaaaagggacctacctctttggatcctattgtgctttcataatgcccatgttctttaatgagcttttttttgttttgaaggtcatcctaaattgaaaagaaagctttgagaaaaaataaatattttgtgagctttactgaagaacccaccaactaaaatgaaaacaagaagtattatgaagacctttagcaatcctctttctccttgaattgcaattcaaaatcttcgactatgctataaactttgcgctcttcatcagtcctcttcaatattgtttgtggtacagtgaaccaacacaacacaacactgtagtctctatatgtgcagtcaaggttaagtatgttaatctgattattagtattcttgtctaattgtcaccacaggagtgttcttttatgaaaatggcttaattaatgtctcacctataaaatatcaaattttccaataataaatattcaaaacaaacattacagctaaggcataaaaaataacaaaaaagaggaataattgagatcttagagcgacttaaaataaatcgcagcccacaaaacaaattgataaaattagaaatccgtgcatcaacaatttagtaccttggacctattgacaactcaaaacgataagtcaatatgtaacacatgcactaacaaatcataatccatgcgatatatgttgtgttttctccatactctgtgcttcaacgaatcgagcaggcaacagatacaggagctggttggcaagggatactgtaggacatgtttcacaatggatagcaacgaagaacactccctacagtaaaatcaaccaaacttttaggtttcacaatgtatttctaaagttccttcactattctgaaacctttaaggacacaattgcatgtaaattgttattgtttgatgatgtttgatcatgcttattatgatagcatccatgtgcacatttagaaaacacaactatagtacatagagttacctgatagacctccatcgctcgctcattcttaaatctgcaatttctgggtccttgcaaacatcaggatgaaattccttgacctgtacaaagctcccaaagttatgttgtggtggtattgttagacaagaaaataacacataggtttggcctagcaaaagctcaccctacacccccagtttataacaagaaattgttactttatggagaaaagtaagttgaagaaaaaattaggcatggtgtcggtgtttgtgacccgactgtgcaccacggggttacccacgtgatgcttttgggtaggacaacgttgtagattgtgactcaatggtatgtgcataggcacgtcggtattgctcgtagatttatataggttcgggctgcttttaattgcgtaacaccctacttcattttgtggttaggtattgatttctagagtatggggattacacatgagctttgtgatggctcagctgctgtcgatgaggatggggtgagatgatgtgggatgagatgattttgtaggggaccccctcggccttatatacccgatcaaagagttatccctttacaagttgtgatcactatctacttcacttatctcctttgtcgctgcttgcagtcctatatatccagagtcttgatcaccttctcgcccgagttatcgccgaatgcttagctcctcagggtgcttgcaactgcaccacccgagatatcagtgcttcagtagcgcctaactcggacgttggtctttgtcgccttggatcaggcttgcctaacccggctatatcctccccgcccatcccataggatgacccagtgggaggcccatcagacggcccatgatacgttttagtgttcaagaggacccgggggatatctatcccccacacatggggtgattgaaggaataaagtaggtcctgcttgtgacgaataagaactccagtgagttcatgagaaaataaaaactcaattgtagaaaaaataggcatgtctactaaaaagggaaaattaataaatctatatttgtctagaagataatatcaccaacaattgcgcaccacacttgcactgtaaattgtagttgtttgatgatgtttgatcgtggttattatgatagcattcatacgcacttgtagaaacacacaactatagtacacaaagttacctgataggcctccatcactcgcatcattcttaaatctgcattttctaggtccatgcaaacacaaggatggaattccttgacctgtacagagctcccaatgttatgtcgtggcagtattgttagacaagaaaataacaaactggtttggcctagcaaaagctcaacctacactcccagtttataacacaaaaaaatcttacttattcttatgaagaaaaattgaagaaaaaaataggcatgtggtgattgaaggaaaaaattaggccctgcttgtgacagagtaagaactccaatcagttcatgataaaataaaaactcagttgaataaaaaaattaggcatgctactaaaaatgggaaaataaataattctctatttgtctaaaagagaatatcatcaaaccaattttcacttacatatatattacattttgtgtttttagcctggtttttatttgatggtcagccttttaagatgatttcgaaaaaattgtcgagcgccaactttttcttctgctgctattttctcttcaagctaaatctatggatcggcacctatcagaagcaaaaacatagagtgaatcaccttaacaacacagtaatattgaaggcaccttgcaaatggaatacattttagctgcctggattgccgtattgtgcaaaaaacataagtacttcagccaagtgaatatggtagttcagttttactaagaggccagttaacacttctcaactaacaggttcctttactgaaagattagaaaaaggcctttttaattctcaaatacacgagaactacacacctttgcttgggactaaaaggctttgttattgtaacagtaatcaatagcttcaactgaccaaaaatgatcaatgaaggtatgtgcatcaaacaagaagcaagtagcattcaaaaaggctttctatgtgcagcttgcacaacaacaaccactacactgatgtagaaaaatgtaatgcaagggcagcttcggttgattaccattgatttatttatctacaggaatcaatattaagaattgttcgttcaatatatatgctccagaaatttagagcaatccaattcaataatcaatttcatgcacacaagagaagtctatatttttccatgaacaaagaaagggcgggttcagtaagagaacaggacacaggtggcaataaggaagcagccttgtatgatactgatctaagaaattagattagctaagagagtgaagtgttttacctccacgtaaaccgtcatacacaaatatcaaatcaccaagcgcggcagctgcgtgcctgcacggccgtgtaagctctac

SEQ ID NO: 63499 - DNA, 558 bp, Zea Mays
cataaactgaatgctagaccaacttgttaggccaagagctagtattttatgagagaccagatccaagatctggtatccacaggctggtatttgtgttgttccgccaacttggcaggggtacggtttttgcaccagaaatgcgccaaaacttcaactgcagaagctttgcacggcaatatcacctcagcattgccagtgctacacatttcaactgtcaaagggaaggtggatcgggtggaagaaggtttagggaagagtagagaccatagaccactgcatggctacactatataattatcatcaataatgtgcactatattgaatgtcaatgcaccacctctatatgctgaatgctatgtatctcaaactatgatttgtaatgacttgaaggattgagagcttattctcttaacggaatatagaccaatattattagtatatattccatgattaatcagacaaagtattctccaaggagaaaccagtacagtttcagggccatactagtactgcttgtttcaacaggtattaaacaaactcagcacaatctgaataata

SEQ ID NO: 63500 - DNA, 935 bp, Zea Mays
cacacttcagctatctgggtgacgtatgacatcacaatggtatctcaaatgctggaagttgaataagacagccttcctcaactccagtataaatagttcatgctcaggctgcagcttcctcagtcccatagggttatttttctgcagtatttgtcagcaaccgatcctttggttatggctcgtgtcctacaggatgtgttggatacctttacaccaaccattccactaagaataacatacaacaatagtcaagttctggcaggtgctgagctaaagccatctgcggttataagtaaaccacgagtcgatatcggtggcaatgacatgaggactttctacaccctggtactgattgacccggacgccccaagtccaagccatccatcactaagggagtacttgcactggccaagagctagtattttatgagagaccagatccaagatctggtatccacaggctggtatttgtgttgttccgccaacttggcaggggtacggtttttgcaccagaaatgcgccaaaacttcaactgcagaagctttgcacggcaatatcacctcagcattgccagtgctacacatttcaactgtcaaagggaaggtggatcgggtggaagaaggtttagggaagagtagagaccatagaccactgcatggctacactatataattatcatcaataatgtgcactatattgaatgtcaatgcaccacctctatatgctgaatgctatgtatctcaaactatgatttgtaatgacttgaaggattgagagcttattctcttaacggaatatagaccaatattattagtatatattccatgattaatcagacaaagtattctccaaggagaaaccagtacagtttcagggccatactagtactgcttgtttcaacaggtattaaacaaactcagcacaatctgaataata

SEQ ID NO: 63501 - DNA, 2110 bp, Zea Mays
gccatcgccgccaactgtgcgtgagcggccgccgcaagaaaatactttgttttttgcgcgcccgatctctgaccgggagcgccgggagtcgcctcgctacaaaagatcgcggacacgcgactctggccagggagacggacaaaaggagaggcgtggacacgggacgcgaggtagacagcgcccggcgtgacgtggcgcgagagggagagcggagaggggggctcaccaaactgcaaagtctgtctcctgactcctcgccggcgtgccggatctcctgtctctctcgcggtcggcggccgcatagcctcgttcactcgcacgacacagggcaggggggcgatgggctgcgcgacgtccaagcagttcagcaggagcgcgccggcgcacgcggatccggccgtgctggcgacccagacctcattcacggtgaacgaggtggaggcgctgtacgagctgtacaagaagctgagctgctccatcgtcaaagacgggctcatccacaaggaggagttccagctcgccttgttcaggaacagcaggagagcgaacctctttgcagacagggtcttcgatctgttcgatctcaagcggaacggagtcatcgatttcgaggagttcgtgcggtcgctcagtgtgttccaccctaaagcagatacgtcggagaagacggctcgctttcaagctgtatgatctgaggggaacaggctacatcgagaaagaagagataatggatcaaaattcggctttcgcctctttcgagggtaaggtcaaatttacacaacttaaaacaaatccaacaactcacaaaaacatgataaaactgtaagcttaaaagaggtaatagcttccctacttctcaccgactcaaactcacttaaacattattttattacaactcaatcatgtttgaaaacctccaaccctgataatcaaaaaactgcatgaccaccgactccagatgacgataagcttttcttaaaaaatctgctctttttcacttttatgtagctgtgcccgtagtcttagctaatgagtacctctaactagaacctgcaaataagtcaacatacgtaatttattaaatactaagtcatttatacttttccaaaaagctcagcacagtgttaagacacatgtaataatcagattcttagtatttagatccatcacgtcaaccaactcccaaccataatgcctgtgtacactgcacttgttcgattctaatataaaacagtaactttgttcttgagaagcagctcagagagatggtcttggcgctgcttgatgagtccgacctctgcctttcagacagcaccgtcgagacgatcgtcgataacacgttcagccaagcggactcgaacggagatggcaggatagatcctgaagaatgggaggagttcgtgaagaagaacccggcaacgttaaggaacatgactctcccctatctgcaggacatcaccatgtcatttccgagcttcataatgcgttcagaagccagtgactgaaatgtttgcgtacatctgcgtgtaaggaagcaccgttccatcagctctgctgtttgttggagcctacagcttagtccatggcacgaggcaccggagaaagttcagaatgtagcagcaacggccagcagagtgcatgagggttgctgccatagctgcaggctgcagccaaacaaaatgatgaccaaagattcatctagtgtcagcttcagggttcagatggtataccagccaacaattttctttctcggtatctaaacaccgtggatgttgcgtttaaaaaaattgttgcagaggatcaacaagtctgttcatcgaagcagtgcctgagtttagaatcagaagctaactgtctattgctgagatgctttcgtctaaatcttgcgtgtagttgtaactgcaaggaaagaataacttgtggagagttggatttgttgatgaaccttagtagttcttgacttggttagttgtttccacatttcttcgcagtgccagtgcgtgcacttgtaacttgcaaattcttctcaatccacccctaatcgaagggtggatccagttccgcatgtaatgaggcaatatcatcaatagtttatgcttcgtttatcgca

SEQ ID NO: 63502 - DNA, 4213 bp, Zea Mays
gccggaggaatccgccggcacgagacgtaaactgaggcggagcccgcggcggctgatcggggaatacatcgctgtccgcctgtcccgcgtccggcggctggtcccagccgcgacgacctggggcctcatgttctccgcagctcgccgcctcctcacgtcccgcgcccgctcccgcgccctggcggcggccacgccctacccccactccgctgtggcgtccccgtcgtgccctcgctttccgacgcccaaggagatccgcaggggcttggacgagttcgtagttggccaggacaaggccaagaaggtgctctctgttgctgtgcacaatcactacaagaggatatacaacgagtcatcaaataagtgttctgtgaaaagctgggtgcgtggtggtgtcgctacgaacagtgatgatgtcattgagcttgaaaagagtaacatccttctgattgggccgacagggtcaggtaaaacactgttagcaaaaacgttagctcggtatgtgaatgtgccattcgtgattgctgatgcaacagcaattacacaggctggatattctggtgaagatgtggaatctgtaatctacaaacttctagtggctgctgacttcaatattgaagctgcagagcatggtattgtgtacattgacgaagttgataagctcacaaagaaggctgactgccgcaaggatcgaagggatgtatctggagagggtgtgcagcaagcgttgctaaaaatatttgaaggaacaatcatcagcgtgccaggaaaaagaagtcgagaaaatataccccagggttatgttgaggtcgatacacgaaacatactttttatttgtggaggtgccttctttggcttggaaaagatagtttcagaaagacatcaattttatcctgttggatttggcataccaatatgccatgagctgcggaactgcagctggagaactgttcaggaatcttcctctattgatactggttgaaaatgatgatttgattgcctacggcctgatcccagaatttattggaaggttgccaataacagttggcctgaccaatcttagtgaagagcaattggttcaagtagtaaatttctttgattttataatttaaagcaatatttcttaaaattaccatctcaaatatttccaccacctcaaaatattagaaattctctttgcaggtgctcatggagcccaaaaacgcaataggaaagcaatacaagaagctattcaaaatgaatgatgtcaagcttcatttcactgataatgctttgaggatgatagcaaagaaggcactcgcaaaagaaacaggagcccgaggactgcggtctataatggaggacattttgacagaagcaatgtttgagattcctgatggtagacacgggaaagagaaggttattgctgttcttgttgacgaagagtctgtaggaccactacactctcgagggtgtcgagcaaaaatttttcgggatgatggagccttggaactgtatgtttaccagaacaatatcaaactgcccgggctgattcagagcaaccccagacgcagacgcattttccggctctgccttctagtcgcattatcggcaacaaagctttggatttaccagacaattccttgtttttcatcgatatatgaatggattgcatggatactatgcaaggtctacaattttacacaataaaatatgatgaggttgattttcgtgttaaactgttcacacagcaaaagaatggctggaccccacgttctgctttcttcggtagcttgcaatgattttgcaacaacaattcgtatcatttacacgctactggtagcaaacagacagttgttttgatactgaacctgaacaaatggaaaatggtttccaatggttacacatcaaaattatgtttgtatgcatccactgcagtaacacaatgctgagccagaagcaagctaatttttggcattgcggaaatcactaatcgtgctcattatattgatatataaactgacaaacggtagcttatgacttgaatgtgatgagcaaattgtggacataattttttgtggtcatcacagatatccctgctgcacattgcctccatttctttccgttggattgccttgaagtgccccctctccatcgtctccactttctgttggattgccatgaagtgccccttctccatcgtctccactttctgttggattgtcttgaagtgccccttctccggctgttttaaggcctagcttactgagaaagccaccatccagggtgtttgcatcaggagcaggcgctcctccttcattctctgtcttccttttatgggctaggatagcttcaatggcagcggcactggctttagctgcggcttcatccttagcagcaatctctgctctcctcctctccctctcttctctggcaagagcctctgccctcgccttctcttctgcagcccgggcttccgcttcagccttttccctctccacatcctcatataacttggcgatgtcatttcccctcccatctccacgtaatgctccttctaaaagctccctcattccatagctgaacagaaccttctcattcaaaagaataccttttgcaacattgactgcatcatccaaccggtcagcagcaatatatgccttcagcaatgtctcgtagcttgagatgcttgggttaactcccttctccttcatctgattgaagtattcctgagccttgtcgaccatactgaaacccaccaggccatcaataagtttatgatatgcagttgcatcaggcttcagctccaattcgtccattttgtcaaagtaagagataccatcatcgatgcgatcaacactgaagcatgcttccgtgagcagtaaatatgtctccttatccgcaccaacaccactctcacacatctcattgtagagcacctccgccttatctatcagctggttaatctgcaggtgccgaatcaaattattataggatgccacatcaggcaccagcttccattcccccattcttctgaacactgcaactgcatcttcaaatctcccagcagcacaataggtatcaaccatcaccctgaagcttctcagatcaactgcaatccgcagtggcgggtcatgttcctcaagcattctgtcgaacagcttaagtgcatcctccaacctcccattctgcccaagcgcatcaaccacctcattgtagctctcggccccaaacctcaccgcagattcaacacacagcacctctttgtaacactccataaccttttcccccgttcccataaggaagtacgccttcatgagagtcccgtacacaatgccatccagaattggttcgcccccaaccttgtccttgagttcttggtacagctccaaggctttggctccatccccagcacccacgaacccagccatgagaaggctgtagaccttgggatccggcccgacgaatccagaggtgagcatctcatccttgagcttgacggcatccgcgagccggccgtggtctgcaacgaggcactcgacgacgacgcggtaggccgtcggggagggcggcacgggggagccggggcgggcgatgatgcggaggtggtggagcgcgtcgtcggcgaggcggcgcgcggcgagcgcggataggtagagcacgtgcgtggcggcggtgggcgggacggcggcttggagcgcgaagcggtgcagcgcgaagaagtcttcgaggcggcgcgtgcggaggagcgcggcgaggacggcggcgcaggtgaaggatgaggggcggcagttggagtggagcgcgtggcgggtgaggagcgccgcctcggggaggtcggcctggggccccgagaggagcgcgaggatccggttgtggaacgcgaggcgtgacggcgccagcgtggggagcggctccgcgaggcgcactgcccgcggggaaggcgcggggatcgggggcgtcgcgacgaacgtgtccttacggcgctcgcggcgggaagccgtggccgaggcggcgtccgcgtgcgcgagcgggaagagcgccggcacgaggcggcgtgccgagaccggcttcgacagcgacatcttccgcgggtgcgcttgggcgacggccaccgggcggcgacgagggtttggggtttggggcggggatcggccttccgggttggagcattgagaacaggagatatgttactctgtgtttcgccttggctgaagaaaaacgtactcgcaag

SEQ ID NO: 63503 - DNA, 4312 bp, Zea Mays
gccggaggaatccgccggcacgagacgtaaactgaggcggagcccgcggcggctgatcggggaatacatcgctgtccgcctgtcccgcgtccggcggctggtcccagccgcgacgacctggggcctcatgttctccgcagctcgccgcctcctcacgtcccgcgcccgctcccgcgccctggcggcggccacgccctacccccactccgctgtggcgtccccgtcgtgccctcgctttccgacgcccaaggagatccgcaggggcttggacgagttcgtagttggccaggacaaggccaagaaggtgctctctgttgctgtgcacaatcactacaagaggatatacaacgagtcatcaaataagtgttctgtgaaaagctgggtgcgtggtggtgtcgctacgaacagtgatgatgtcattgagcttgaaaagagtaacatccttctgattgggccgacagggtcaggtattgtttgcggacatgtaatctataaacaatggtaatggtctatgctgatgcctttgccttttctgtataggacaggtaaaacactgttagcaaaaacgttagctcggtatgtgaatgtgccattcgtgattgctgatgcaacagcaattacacaggctggatattctggtgaagatgtggaatctgtaatctacaaacttctagtggctgactgccgcaaggatcgaagggatgtatctggagagggtgtgcagcaagcgttgctaaaaatatttgaaggaacaatcatcagcgtgccaggaaaaagaagtcgagaaaatataccccagggttatgttgaggtcgatacacgaaacatactttttatttgtggaggtgccttctttggcttggaaaagatagtttcagaaagacatcaattttatcctgttggatttggcataccaatatgccatgagctgcggaactgcagctggagaactgttcaggaatcttcctctattgatactgtaggttcaattgcttcagcagttggcattgttttagacaatttttgtttgattctgcattgacaacaaaggttttcccaaatggtttcccacttaggttgaaaatgatgatttgattgcctacggcctgatcccagaatttattggaaggttgccaataacagttggcctgaccaatcttagtgaagagcaattggttcaagtagtaaatttctttgattttataatttaaagcaatatttcttaaaattaccatctcaaatatttccaccacctcaaaatattagaaattctctttgcaggtgctcatggagcccaaaaacgcaataggaaagcaatacaagaagctattcaaaatgaatgatgtcaagcttcatttcactgataatgctttgaggatgatagcaaagaaggcactcgcaaaagaaacaggagcccgaggactgcggtctataatggaggacattttgacagaagcaatgtttgagattcctgatggtagacacgggaaagagaaggttattgctgttcttgttgacgaagagtctgtaggaccactacactctcgagggtgtcgagcaaaaatttttcgggatgatggagccttggaactgtatgtttaccagaacaatatcaaactgcccgggctgattcagagcaaccccagacgcagacgcattttccggctctgccttctagtcgcattatcggcaacaaagctttggatttaccagacaattccttgtttttcatcgatatatgaatggattgcatggatactatgcaaggtctacaattttacacaataaaatatgatgaggttgattttcgtgttaaactgttcacacagcaaaagaatggctggaccccacgttctgctttcttcggtagcttgcaatgattttgcaacaacaattcgtatcatttacacgctactggtagcaaacagacagttgttttgatactgaacctgaacaaatggaaaatggtttccaatggttacacatcaaaattatgtttgtatgcatccactgcagtaacacaatgctgagccagaagcaagctaatttttggcattgcggaaatcactaatcgtgctcattatattgatatataaactgacaaacggtagcttatgacttgaatgtgatgagcaaattgtggacataattttttgtggtcatcacagatatccctgctgcacattgcctccatttctttccgttggattgccttgaagtgccccctctccatcgtctccactttctgttggattgccatgaagtgccccttctccatcgtctccactttctgttggattgtcttgaagtgccccttctccggctgttttaaggcctagcttactgagaaagccaccatccagggtgtttgcatcaggagcaggcgctcctccttcattctctgtcttccttttatgggctaggatagcttcaatggcagcggcactggctttagctgcggcttcatccttagcagcaatctctgctctcctcctctccctctcttctctggcaagagcctctgccctcgccttctcttctgcagcccgggcttccgcttcagccttttccctctccacatcctcatataacttggcgatgtcatttcccctcccatctccacgtaatgctccttctaaaagctccctcattccatagctgaacagaaccttctcattcaaaagaataccttttgcaacattgactgcatcatccaaccggtcagcagcaatatatgccttcagcaatgtctcgtagcttgagatgcttgggttaactcccttctccttcatctgattgaagtattcctgagccttgtcgaccatactgaaacccaccaggccatcaataagtttatgatatgcagttgcatcaggcttcagctccaattcgtccattttgtcaaagtaagagataccatcatcgatgcgatcaacactgaagcatgcttccgtgagcagtaaatatgtctccttatccgcaccaacaccactctcacacatctcattgtagagcacctccgccttatctatcagctggttaatctgcaggtgccgaatcaaattattataggatgccacatcaggcaccagcttccattcccccattcttctgaacactgcaactgcatcttcaaatctcccagcagcacaataggtatcaaccatcaccctgaagcttctcagatcaactgcaatccgcagtggcgggtcatgttcctcaagcattctgtcgaacagcttaagtgcatcctccaacctcccattctgcccaagcgcatcaaccacctcattgtagctctcggccccaaacctcaccgcagattcaacacacagcacctctttgtaacactccataaccttttcccccgttcccataaggaagtacgccttcatgagagtcccgtacacaatgccatccagaattggttcgcccccaaccttgtccttgagttcttggtacagctccaaggctttggctccatccccagcacccacgaacccagccatgagaaggctgtagaccttgggatccggcccgacgaatccagaggtgagcatctcatccttgagcttgacggcatccgcgagccggccgtggtctgcaacgaggcactcgacgacgacgcggtaggccgtcggggagggcggcacgggggagccggggcgggcgatgatgcggaggtggtggagcgcgtcgtcggcgaggcggcgcgcggcgagcgcggataggtagagcacgtgcgtggcggcggtgggcgggacggcggcttggagcgcgaagcggtgcagcgcgaagaagtcttcgaggcggcgcgtgcggaggagcgcggcgaggacggcggcgcaggtgaaggatgaggggcggcagttggagtggagcgcgtggcgggtgaggagcgccgcctcggggaggtcggcctggggccccgagaggagcgcgaggatccggttgtggaacgcgaggcgtgacggcgccagcgtggggagcggctccgcgaggcgcactgcccgcggggaaggcgcggggatcgggggcgtcgcgacgaacgtgtccttacggcgctcgcggcgggaagccgtggccgaggcggcgtccgcgtgcgcgagcgggaagagcgccggcacgaggcggcgtgccgagaccggcttcgacagcgacatcttccgcgggtgcgcttgggcgacggccaccgggcggcgacgagggtttggggtttggggcggggatcggccttccgggttggagcattgagaacaggagatatgttactctgtgtttcgccttggctgaagaaaaacgtactcgcaag

SEQ ID NO: 63504 - DNA, 3919 bp, Zea Mays
gcggccgtagccggaggaatccgccggcacgagacgtaaactgaggcggagcccgcggcggctgatcggggaatacatcgctgtccgcctgtcccgcgtccggcggctggtcccagccgcgacgacctggggcctcatgttctccgcagctcgccgcctcctcacgtcccgcgcccgctcccgcgccctggcggcggccacgccctacccccactccgctgtggcgtccccgtcgtgccctcgctttccgacgcccaaggagatccgcaggggcttggacgagttcgtagttggccaggacaaggccaagaaggtgctctctgttgctgtgcacaatcactacaagaggatatacaacgagtcatcaaataagtgttctgtgaaaagctgggtgcgtggtggtgtcgctacgaacagtgatgatgtcattgagcttgaaaagagtaacatccttctgattgggccgacagggtcaggtaaaacactgttagcaaaaacgttagctcggtatgtgaatgtgccattcgtgattgctgatgcaacagcaattacacaggctggatattctggtgaagatgtggaatctgtaatctacaaacttctagtggctgctgacttcaatattgaagctgcagagcatggtattgtgtacattgacgaagttgataagctcacaaagaaggctgactgccgcaaggatcgaagggatgtatctggagagggtgtgcagcaagcgttgctaaaaatatttgaaggaacaatcatcagcgtgccaggaaaaagaagtcgagaaaatataccccagggttatgttgaggtcgatacacgaaacatactttttatttgtggaggtgccttctttggcttggaaaagatagtttcagaaaggtgctcatggagcccaaaaacgcaataggaaagcaatacaagaagctattcaaaatgaatgatgtcaagcttcatttcactgataatgctttgaggatgatagcaaagaaggcactcgcaaaagaaacaggagcccgaggactgcggtctataatggaggacattttgacagaagcaatgtttgagattcctgatggtagacacgggaaagagaaggttattgctgttcttgttgacgaagagtctgtaggaccactacactctcgagggtgtcgagcaaaaatttttcgggatgatggagccttggaactgtatgtttaccagaacaatatcaaactgcccgggctgattcagagcaaccccagacgcagacgcattttccggctctgccttctagtcgcattatcggcaacaaagctttggatttaccagacaattccttgtttttcatcgatatatgaatggattgcatggatactatgcaaggtctacaattttacacaataaaatatgatgaggttgattttcgtgttaaactgttcacacagcaaaagaatggctggaccccacgttctgctttcttcggtagcttgcaatgattttgcaacaacaattcgtatcatttacacgctactggtagcaaacagacagttgttttgatactgaacctgaacaaatggaaaatggtttccaatggttacacatcaaaattatgtttgtatgcatccactgcagtaacacaatgctgagccagaagcaagctaatttttggcattgcggaaatcactaatcgtgctcattatattgatatataaactgacaaacggtagcttatgacttgaatgtgatgagcaaattgtggacataattttttgtggtcatcacagatatccctgctgcacattgcctccatttctttccgttggattgccttgaagtgccccctctccatcgtctccactttctgttggattgccatgaagtgccccttctccatcgtctccactttctgttggattgtcttgaagtgccccttctccggctgttttaaggcctagcttactgagaaagccaccatccagggtgtttgcatcaggagcaggcgctcctccttcattctctgtcttccttttatgggctaggatagcttcaatggcagcggcactggctttagctgcggcttcatccttagcagcaatctctgctctcctcctctccctctcttctctggcaagagcctctgccctcgccttctcttctgcagcccgggcttccgcttcagccttttccctctccacatcctcatataacttggcgatgtcatttcccctcccatctccacgtaatgctccttctaaaagctccctcattccatagctgaacagaaccttctcattcaaaagaataccttttgcaacattgactgcatcatccaaccggtcagcagcaatatatgccttcagcaatgtctcgtagcttgagatgcttgggttaactcccttctccttcatctgattgaagtattcctgagccttgtcgaccatactgaaacccaccaggccatcaataagtttatgatatgcagttgcatcaggcttcagctccaattcgtccattttgtcaaagtaagagataccatcatcgatgcgatcaacactgaagcatgcttccgtgagcagtaaatatgtctccttatccgcaccaacaccactctcacacatctcattgtagagcacctccgccttatctatcagctggttaatctgcaggtgccgaatcaaattattataggatgccacatcaggcaccagcttccattcccccattcttctgaacactgcaactgcatcttcaaatctcccagcagcacaataggtatcaaccatcaccctgaagcttctcagatcaactgcaatccgcagtggcgggtcatgttcctcaagcattctgtcgaacagcttaagtgcatcctccaacctcccattctgcccaagcgcatcaaccacctcattgtagctctcggccccaaacctcaccgcagattcaacacacagcacctctttgtaacactccataaccttttcccccgttcccataaggaagtacgccttcatgagagtcccgtacacaatgccatccagaattggttcgcccccaaccttgtccttgagttcttggtacagctccaaggctttggctccatccccagcacccacgaacccagccatgagaaggctgtagaccttgggatccggcccgacgaatccagaggtgagcatctcatccttgagcttgacggcatccgcgagccggccgtggtctgcaacgaggcactcgacgacgacgcggtaggccgtcggggagggcggcacgggggagccggggcgggcgatgatgcggaggtggtggagcgcgtcgtcggcgaggcggcgcgcggcgagcgcggataggtagagcacgtgcgtggcggcggtgggcgggacggcggcttggagcgcgaagcggtgcagcgcgaagaagtcttcgaggcggcgcgtgcggaggagcgcggcgaggacggcggcgcaggtgaaggatgaggggcggcagttggagtggagcgcgtggcgggtgaggagcgccgcctcggggaggtcggcctggggccccgagaggagcgcgaggatccggttgtggaacgcgaggcgtgacggcgccagcgtggggagcggctccgcgaggcgcactgcccgcggggaaggcgcggggatcgggggcgtcgcgacgaacgtgtccttacggcgctcgcggcgggaagccgtggccgaggcggcgtccgcgtgcgcgagcgggaagagcgccggcacgaggcggcgtgccgagaccggcttcgacagcgacatcttccgcgggtgcgcttgggcgacggccaccgggcggcgacgagggtttggggtttggggcggggatcggccttccgggttggagcattgagaacaggagatatgttactctgtgtttcgccttggctgaagaaaaacgtactcgcaag

SEQ ID NO: 63505 - DNA, 4134 bp, Zea Mays
cacacacacagcggccgtagccggaggaatccgccggcacgagacgtaaactgaggcggagcccgcggcggctgatcggggaatacatcgctgtccgcctgtcccgcgtccggcggctggtcccagccgcgacgacctggggcctcatgttctccgcagctcgccgcctcctcacgtcccgcgcccgctcccgcgccctggcggcggccacgccctacccccactccgctgtggcgtccccgtcgtgccctcgctttccgacgcccaaggagatccgcaggggcttggacgagttcgtagttggccaggacaaggccaagaaggtgctctctgttgctgtgcacaatcactacaagaggatatacaacgagtcatcaaataagtgttctgtgaaaagctgggtgcgtggtggtgtcgctacgaacagtgatgatgtcattgagcttgaaaagagtaacatccttctgattgggccgacagggtcaggtaaaacactgttagcaaaaacgttagctcggtatgtgaatgtgccattcgtgattgctgatgcaacagcaattacacaggctggatattctggtgaagatgtggaatctgtaatctacaaacttctagtggctgctgacttcaatattgaagctgcagagcatggtattgtgtacattgacgaagttgataagctcacaaagaaggctgactgccgcaaggatcgaagggatgtatctggagagggtgtgcagcaagcgttgctaaaaatatttgaaggaacaatcatcagcgtgccaggaaaaagaagtcgagaaaatataccccagggttatgttgaggtcgatacacgaaacatactttttatttgtggaggtgccttctttggcttggaaaagatagtttcagaaagacatcaattttatcctgttggatttggcataccaatatgccatgagctgcggaactgcagctggagaactgttcaggaatcttcctctattgatactgttgaaaatgatgatttgattgcctacggcctgatcccagaatttattggaaggttgccaataacagttggcctgaccaatcttagtgaagagcaattggttcaagtagtgctcatggagcccaaaaacgcaataggaaagcaatacaagaagctattcaaaatgaatgatgtcaagcttcatttcactgataatgctttgaggatgatagcaaagaaggcactcgcaaaagaaacaggagcccgaggactgcggtctataatggaggacattttgacagaagcaatgtttgagattcctgatggtagacacgggaaagagaaggttattgctgttcttgttgacgaagagtctgtaggaccactacactctcgagggtgtcgagcaaaaatttttcgggatgatggagccttggaactgtatgtttaccagaacaatatcaaactgcccgggctgattcagagcaaccccagacgcagacgcattttccggctctgccttctagtcgcattatcggcaacaaagctttggatttaccagacaattccttgtttttcatcgatatatgaatggattgcatggatactatgcaaggtctacaattttacacaataaaatatgatgaggttgattttcgtgttaaactgttcacacagcaaaagaatggctggaccccacgttctgctttcttcggtagcttgcaatgattttgcaacaacaattcgtatcatttacacgctactggtagcaaacagacagttgttttgatactgaacctgaacaaatggaaaatggtttccaatggttacacatcaaaattatgtttgtatgcatccactgcagtaacacaatgctgagccagaagcaagctaatttttggcattgcggaaatcactaatcgtgctcattatattgatatataaactgacaaacggtagcttatgacttgaatgtgatgagcaaattgtggacataattttttgtggtcatcacagatatccctgctgcacattgcctccatttctttccgttggattgccttgaagtgccccctctccatcgtctccactttctgttggattgccatgaagtgccccttctccatcgtctccactttctgttggattgtcttgaagtgccccttctccggctgttttaaggcctagcttactgagaaagccaccatccagggtgtttgcatcaggagcaggcgctcctccttcattctctgtcttccttttatgggctaggatagcttcaatggcagcggcactggctttagctgcggcttcatccttagcagcaatctctgctctcctcctctccctctcttctctggcaagagcctctgccctcgccttctcttctgcagcccgggcttccgcttcagccttttccctctccacatcctcatataacttggcgatgtcatttcccctcccatctccacgtaatgctccttctaaaagctccctcattccatagctgaacagaaccttctcattcaaaagaataccttttgcaacattgactgcatcatccaaccggtcagcagcaatatatgccttcagcaatgtctcgtagcttgagatgcttgggttaactcccttctccttcatctgattgaagtattcctgagccttgtcgaccatactgaaacccaccaggccatcaataagtttatgatatgcagttgcatcaggcttcagctccaattcgtccattttgtcaaagtaagagataccatcatcgatgcgatcaacactgaagcatgcttccgtgagcagtaaatatgtctccttatccgcaccaacaccactctcacacatctcattgtagagcacctccgccttatctatcagctggttaatctgcaggtgccgaatcaaattattataggatgccacatcaggcaccagcttccattcccccattcttctgaacactgcaactgcatcttcaaatctcccagcagcacaataggtatcaaccatcaccctgaagcttctcagatcaactgcaatccgcagtggcgggtcatgttcctcaagcattctgtcgaacagcttaagtgcatcctccaacctcccattctgcccaagcgcatcaaccacctcattgtagctctcggccccaaacctcaccgcagattcaacacacagcacctctttgtaacactccataaccttttcccccgttcccataaggaagtacgccttcatgagagtcccgtacacaatgccatccagaattggttcgcccccaaccttgtccttgagttcttggtacagctccaaggctttggctccatccccagcacccacgaacccagccatgagaaggctgtagaccttgggatccggcccgacgaatccagaggtgagcatctcatccttgagcttgacggcatccgcgagccggccgtggtctgcaacgaggcactcgacgacgacgcggtaggccgtcggggagggcggcacgggggagccggggcgggcgatgatgcggaggtggtggagcgcgtcgtcggcgaggcggcgcgcggcgagcgcggataggtagagcacgtgcgtggcggcggtgggcgggacggcggcttggagcgcgaagcggtgcagcgcgaagaagtcttcgaggcggcgcgtgcggaggagcgcggcgaggacggcggcgcaggtgaaggatgaggggcggcagttggagtggagcgcgtggcgggtgaggagcgccgcctcggggaggtcggcctggggccccgagaggagcgcgaggatccggttgtggaacgcgaggcgtgacggcgccagcgtggggagcggctccgcgaggcgcactgcccgcggggaaggcgcggggatcgggggcgtcgcgacgaacgtgtccttacggcgctcgcggcgggaagccgtggccgaggcggcgtccgcgtgcgcgagcgggaagagcgccggcacgaggcggcgtgccgagaccggcttcgacagcgacatcttccgcgggtgcgcttgggcgacggccaccgggcggcgacgagggtttggggtttggggcggggatcggccttccgggttggagcattgagaacaggagatatgttactctgtgtttcgccttggctgaagaaaaacgtactcgcaag

SEQ ID NO: 63506 - DNA, 4151 bp, Zea Mays
cggggcctttcttctctacgcacacacacagcggccgtagccggaggaatccgccggcacgagacgtaaactgaggcggagcccgcggcggctgatcggggaatacatcgctgtccgcctgtcccgcgtccggcggctggtcccagccgcgacgacctggggcctcatgttctccgcagctcgccgcctcctcacgtcccgcgcccgctcccgcgccctggcggcggccacgccctacccccactccgctgtggcgtccccgtcgtgccctcgctttccgacgcccaaggagatccgcaggggcttggacgagttcgtagttggccaggacaaggccaagaaggtgctctctgttgctgtgcacaatcactacaagaggatatacaacgagtcatcaaataagtgttctgtgaaaagctgggtgcgtggtggtgtcgctacgaacagtgatgatgtcattgagcttgaaaagagtaacatccttctgattgggccgacagggtcaggtaaaacactgttagcaaaaacgttagctcggtatgtgaatgtgccattcgtgattgctgatgcaacagcaattacacaggctggatattctggtgaagatgtggaatctgtaatctacaaacttctagtggctgctgacttcaatattgaagctgcagagcatggtattgtgtacattgacgaagttgataagctcacaaagaaggctgactgccgcaaggatcgaagggatgtatctggagagggtgtgcagcaagcgttgctaaaaatatttgaaggaacaatcatcagcgtgccaggaaaaagaagtcgagaaaatataccccagggttatgttgaggtcgatacacgaaacatactttttatttgtggaggtgccttctttggcttggaaaagatagtttcagaaagacatcaattttatcctgttggatttggcataccaatatgccatgagctgcggaactgcagctggagaactgttcaggaatcttcctctattgatactgttgaaaatgatgatttgattgcctacggcctgatcccagaatttattggaaggttgccaataacagttggcctgaccaatcttagtgaagagcaattggttcaagtgctcatggagcccaaaaacgcaataggaaagcaatacaagaagctattcaaaatgaatgatgtcaagcttcatttcactgataatgctttgaggatgatagcaaagaaggcactcgcaaaagaaacaggagcccgaggactgcggtctataatggaggacattttgacagaagcaatgtttgagattcctgatggtagacacgggaaagagaaggttattgctgttcttgttgacgaagagtctgtaggaccactacactctcgagggtgtcgagcaaaaatttttcgggatgatggagccttggaactgtatgtttaccagaacaatatcaaactgcccgggctgattcagagcaaccccagacgcagacgcattttccggctctgccttctagtcgcattatcggcaacaaagctttggatttaccagacaattccttgtttttcatcgatatatgaatggattgcatggatactatgcaaggtctacaattttacacaataaaatatgatgaggttgattttcgtgttaaactgttcacacagcaaaagaatggctggaccccacgttctgctttcttcggtagcttgcaatgattttgcaacaacaattcgtatcatttacacgctactggtagcaaacagacagttgttttgatactgaacctgaacaaatggaaaatggtttccaatggttacacatcaaaattatgtttgtatgcatccactgcagtaacacaatgctgagccagaagcaagctaatttttggcattgcggaaatcactaatcgtgctcattatattgatatataaactgacaaacggtagcttatgacttgaatgtgatgagcaaattgtggacataattttttgtggtcatcacagatatccctgctgcacattgcctccatttctttccgttggattgccttgaagtgccccctctccatcgtctccactttctgttggattgccatgaagtgccccttctccatcgtctccactttctgttggattgtcttgaagtgccccttctccggctgttttaaggcctagcttactgagaaagccaccatccagggtgtttgcatcaggagcaggcgctcctccttcattctctgtcttccttttatgggctaggatagcttcaatggcagcggcactggctttagctgcggcttcatccttagcagcaatctctgctctcctcctctccctctcttctctggcaagagcctctgccctcgccttctcttctgcagcccgggcttccgcttcagccttttccctctccacatcctcatataacttggcgatgtcatttcccctcccatctccacgtaatgctccttctaaaagctccctcattccatagctgaacagaaccttctcattcaaaagaataccttttgcaacattgactgcatcatccaaccggtcagcagcaatatatgccttcagcaatgtctcgtagcttgagatgcttgggttaactcccttctccttcatctgattgaagtattcctgagccttgtcgaccatactgaaacccaccaggccatcaataagtttatgatatgcagttgcatcaggcttcagctccaattcgtccattttgtcaaagtaagagataccatcatcgatgcgatcaacactgaagcatgcttccgtgagcagtaaatatgtctccttatccgcaccaacaccactctcacacatctcattgtagagcacctccgccttatctatcagctggttaatctgcaggtgccgaatcaaattattataggatgccacatcaggcaccagcttccattcccccattcttctgaacactgcaactgcatcttcaaatctcccagcagcacaataggtatcaaccatcaccctgaagcttctcagatcaactgcaatccgcagtggcgggtcatgttcctcaagcattctgtcgaacagcttaagtgcatcctccaacctcccattctgcccaagcgcatcaaccacctcattgtagctctcggccccaaacctcaccgcagattcaacacacagcacctctttgtaacactccataaccttttcccccgttcccataaggaagtacgccttcatgagagtcccgtacacaatgccatccagaattggttcgcccccaaccttgtccttgagttcttggtacagctccaaggctttggctccatccccagcacccacgaacccagccatgagaaggctgtagaccttgggatccggcccgacgaatccagaggtgagcatctcatccttgagcttgacggcatccgcgagccggccgtggtctgcaacgaggcactcgacgacgacgcggtaggccgtcggggagggcggcacgggggagccggggcgggcgatgatgcggaggtggtggagcgcgtcgtcggcgaggcggcgcgcggcgagcgcggataggtagagcacgtgcgtggcggcggtgggcgggacggcggcttggagcgcgaagcggtgcagcgcgaagaagtcttcgaggcggcgcgtgcggaggagcgcggcgaggacggcggcgcaggtgaaggatgaggggcggcagttggagtggagcgcgtggcgggtgaggagcgccgcctcggggaggtcggcctggggccccgagaggagcgcgaggatccggttgtggaacgcgaggcgtgacggcgccagcgtggggagcggctccgcgaggcgcactgcccgcggggaaggcgcggggatcgggggcgtcgcgacgaacgtgtccttacggcgctcgcggcgggaagccgtggccgaggcggcgtccgcgtgcgcgagcgggaagagcgccggcacgaggcggcgtgccgagaccggcttcgacagcgacatcttccgcgggtgcgcttgggcgacggccaccgggcggcgacgagggtttggggtttggggcggggatcggccttccgggttggagcattgagaacaggagatatgttactctgtgtttcgccttggctgaagaaaaacgtactcgcaag

SEQ ID NO: 63507 - DNA, 4157 bp, Zea Mays
gcggggcctttcttctctacgcacacacacagcggccgtagccggaggaatccgccggcacgagacgtaaactgaggcggagcccgcggcggctgatcggggaatacatcgctgtccgcctgtcccgcgtccggcggctggtcccagccgcgacgacctggggcctcatgttctccgcagctcgccgcctcctcacgtcccgcgcccgctcccgcgccctggcggcggccacgccctacccccactccgctgtggcgtccccgtcgtgccctcgctttccgacgcccaaggagatccgcaggggcttggacgagttcgtagttggccaggacaaggccaagaaggtgctctctgttgctgtgcacaatcactacaagaggatatacaacgagtcatcaaataagtgttctgtgaaaagctgggtgcgtggtggtgtcgctacgaacagtgatgatgtcattgagcttgaaaagagtaacatccttctgattgggccgacagggtcaggacaggtaaaacactgttagcaaaaacgttagctcggtatgtgaatgtgccattcgtgattgctgatgcaacagcaattacacaggctggatattctggtgaagatgtggaatctgtaatctacaaacttctagtggctgctgacttcaatattgaagctgcagagcatggtattgtgtacattgacgaagttgataagctcacaaagaaggctgactgccgcaaggatcgaagggatgtatctggagagggtgtgcagcaagcgttgctaaaaatatttgaaggaacaatcatcagcgtgccaggaaaaagaagtcgagaaaatataccccagggttatgttgaggtcgatacacgaaacatactttttatttgtggaggtgccttctttggcttggaaaagatagtttcagaaagacatcaattttatcctgttggatttggcataccaatatgccatgagctgcggaactgcagctggagaactgttcaggaatcttcctctattgatactgttgaaaatgatgatttgattgcctacggcctgatcccagaatttattggaaggttgccaataacagttggcctgaccaatcttagtgaagagcaattggttcaagtgctcatggagcccaaaaacgcaataggaaagcaatacaagaagctattcaaaatgaatgatgtcaagcttcatttcactgataatgctttgaggatgatagcaaagaaggcactcgcaaaagaaacaggagcccgaggactgcggtctataatggaggacattttgacagaagcaatgtttgagattcctgatggtagacacgggaaagagaaggttattgctgttcttgttgacgaagagtctgtaggaccactacactctcgagggtgtcgagcaaaaatttttcgggatgatggagccttggaactgtatgtttaccagaacaatatcaaactgcccgggctgattcagagcaaccccagacgcagacgcattttccggctctgccttctagtcgcattatcggcaacaaagctttggatttaccagacaattccttgtttttcatcgatatatgaatggattgcatggatactatgcaaggtctacaattttacacaataaaatatgatgaggttgattttcgtgttaaactgttcacacagcaaaagaatggctggaccccacgttctgctttcttcggtagcttgcaatgattttgcaacaacaattcgtatcatttacacgctactggtagcaaacagacagttgttttgatactgaacctgaacaaatggaaaatggtttccaatggttacacatcaaaattatgtttgtatgcatccactgcagtaacacaatgctgagccagaagcaagctaatttttggcattgcggaaatcactaatcgtgctcattatattgatatataaactgacaaacggtagcttatgacttgaatgtgatgagcaaattgtggacataattttttgtggtcatcacagatatccctgctgcacattgcctccatttctttccgttggattgccttgaagtgccccctctccatcgtctccactttctgttggattgccatgaagtgccccttctccatcgtctccactttctgttggattgtcttgaagtgccccttctccggctgttttaaggcctagcttactgagaaagccaccatccagggtgtttgcatcaggagcaggcgctcctccttcattctctgtcttccttttatgggctaggatagcttcaatggcagcggcactggctttagctgcggcttcatccttagcagcaatctctgctctcctcctctccctctcttctctggcaagagcctctgccctcgccttctcttctgcagcccgggcttccgcttcagccttttccctctccacatcctcatataacttggcgatgtcatttcccctcccatctccacgtaatgctccttctaaaagctccctcattccatagctgaacagaaccttctcattcaaaagaataccttttgcaacattgactgcatcatccaaccggtcagcagcaatatatgccttcagcaatgtctcgtagcttgagatgcttgggttaactcccttctccttcatctgattgaagtattcctgagccttgtcgaccatactgaaacccaccaggccatcaataagtttatgatatgcagttgcatcaggcttcagctccaattcgtccattttgtcaaagtaagagataccatcatcgatgcgatcaacactgaagcatgcttccgtgagcagtaaatatgtctccttatccgcaccaacaccactctcacacatctcattgtagagcacctccgccttatctatcagctggttaatctgcaggtgccgaatcaaattattataggatgccacatcaggcaccagcttccattcccccattcttctgaacactgcaactgcatcttcaaatctcccagcagcacaataggtatcaaccatcaccctgaagcttctcagatcaactgcaatccgcagtggcgggtcatgttcctcaagcattctgtcgaacagcttaagtgcatcctccaacctcccattctgcccaagcgcatcaaccacctcattgtagctctcggccccaaacctcaccgcagattcaacacacagcacctctttgtaacactccataaccttttcccccgttcccataaggaagtacgccttcatgagagtcccgtacacaatgccatccagaattggttcgcccccaaccttgtccttgagttcttggtacagctccaaggctttggctccatccccagcacccacgaacccagccatgagaaggctgtagaccttgggatccggcccgacgaatccagaggtgagcatctcatccttgagcttgacggcatccgcgagccggccgtggtctgcaacgaggcactcgacgacgacgcggtaggccgtcggggagggcggcacgggggagccggggcgggcgatgatgcggaggtggtggagcgcgtcgtcggcgaggcggcgcgcggcgagcgcggataggtagagcacgtgcgtggcggcggtgggcgggacggcggcttggagcgcgaagcggtgcagcgcgaagaagtcttcgaggcggcgcgtgcggaggagcgcggcgaggacggcggcgcaggtgaaggatgaggggcggcagttggagtggagcgcgtggcgggtgaggagcgccgcctcggggaggtcggcctggggccccgagaggagcgcgaggatccggttgtggaacgcgaggcgtgacggcgccagcgtggggagcggctccgcgaggcgcactgcccgcggggaaggcgcggggatcgggggcgtcgcgacgaacgtgtccttacggcgctcgcggcgggaagccgtggccgaggcggcgtccgcgtgcgcgagcgggaagagcgccggcacgaggcggcgtgccgagaccggcttcgacagcgacatcttccgcgggtgcgcttgggcgacggccaccgggcggcgacgagggtttggggtttggggcggggatcggccttccgggttggagcattgagaacaggagatatgttactctgtgtttcgccttggctgaagaaaaacgtactcgcaag

SEQ ID NO: 63508 - DNA, 1764 bp, Zea Mays
ctccactccgtctccgtgtagaggatgctgtcaaatgcttggacctgttacattacatactccccacgctgatgatgacagcaattcaatcagtatcgtaaataattatgaagtaccaaatgccatacagaagtcagtgtatcccagcacaacacggcctctaatgatgtctggaaaccaatactccaccagtgttgtcaacaaaatcgagcttccaaatcggcttcatcttacgtatgcaaacttcacacatccttgcgaaggtttctcagtccctcctcccctggttgataagaaacgcactggaccccgaccatgccctgtttgctatgtttctgtggatcaggcatttgccttgatgcccctacaagcttcaccatcacctgtcgtaaagaacttaaactatgtatcagaagatggtgttactgcaaatttatcaaatctaggatctggatttggagggcatccatctctggagcagagaaacaaatctttcaacattaatgagtcaatgactgtccactgtggctttgttagaggaaagaagcctggccaaggtactggattcgatatcaaggatgatgatctgctagagatggagcaatgccgtgagctagtcgtagcttctgctatttttggaaattatgatatgattcagcatccgaggaacatcagtgaattttcaaaggcaaatgcatgtttctatatgtttgtagatgaagaaacagaggcttatgtcaagaattctagttctttgtacaataataataaagttggactgtggaggctggtggttgtccgaaacctcccttatgaagatccaaggcgtacgggaaagattccaaaacttctgctccataggctttttccaaacgtgaaattttcagtttggatagatgcaaagcttcagcttgttgcggatccctatctcctgcttgagaggttcctgtggaggaagaataccacttttgcaatctctcggcattacaaacgctttgatgtgttcgaagaagcagaagctaacaaagctgctggaaagtattacaacgcatccatcgattaccaaatagagttttacagaaatgagggcctaacacattattctcctgccaagcttcccatcacaagtgatgtccctgaaggctgtgtgatcatcagagaacacatccccatcacgaacctcttcacgtgcttatggttcaatgaagttgatcgcttcacctccagggaccaaataagtttcagcaccgtccgggacaaaatcagggctagagttggctggatgcccgagatgttcatggactgcgagaggcgcaactttgtcgttcaggcgtaccacagagagctactggagcagatgattgcatcaggtaggatgcccccttcgggggctgtggtggtgaccgacgcagcaccatctcggaaagtccgggcaggtagcaggaaggctactccgtcgaagaagccctccgtgaagcggaaaaaagagaagaaatcgagctcgcgacggcgtctcccgaaacccgtcgccggtggtttgggtgctatgtgacctaagttttcgtcgagtagcagagtcttgatactcccacagtcacacacttatacagcgtgtaccggaatacaaacaatgttccattacttaggtctggggcttgtaatcgtgccccggcgaaatttgttcatattactcttcatcgttgttgtacataacatctccaaaccaatattcaattttgttcattgatgttatgttcagttatt

SEQ ID NO: 63509 - DNA, 1725 bp, Zea Mays
gcagctgctgcaccgcgcgctgcggctgggcggtcgccgcagggccggcgtcctgatgctgctcgcagtcgtgtccgccgctgtcttctcctctctcttcgccgtcgtcaaagatgacagcaattcaatcagtatcgtaaataattatgaagtaccaaatgccatacagaagtcagtgtatcccagcacaacacggcctctaatgatgtctggaaaccaatactccaccagtgttgtcaacaaaatcgagcttccaaatcggcttcatcttacgtatgcaaacttcacacatccttgcgaaggtttctcagtccctcctcccctggttgataagaaacgcactggaccccgaccatgccctgtttgctatgtttctgtggatcaggcatttgccttgatgcccctacaagcttcaccatcacctgtcgtaaagaacttaaactatgtatcagaagatggtgttactgcaaatttatcaaatctaggatctggatttggagggcatccatctctggagcagagaaacaaatctttcaacattaatgagtcaatgactgtccactgtggctttgttagaggaaagaagcctggccaaggtactggattcgatatcaaggatgatgatctgctagagatggagcaatgccgtgagctagtcgtagcttctgctatttttgatgaagaaacagaggcttatgtcaagaattctagttctttgtacaataataataaagttggactgtggaggctggtggttgtccgaaacctcccttatgaagatccaaggcgtacgggaaagattccaaaacttctgctccataggctttttccaaacgtgaaattttcagtttggatagatgcaaagcttcagcttgttgcggatccctatctcctgcttgagaggttcctgtggaggaagaataccacttttgcaatctctcggcattacaaacgctttgatgtgttcgaagaagcagaagctaacaaagctgctggaaagtattacaacgcatccatcgattaccaaatagagttttacagaaatgagggcctaacacattattctcctgccaagcttcccatcacaagtgatgtccctgaaggctgtgtgatcatcagagaacacatccccatcacgaacctcttcacgtgcttatggttcaatgaagttgatcgcttcacctccagggaccaaataagtttcagcaccgtccgggacaaaatcagggctagagttggctggatgcccgagatgttcatggactgcgagaggcgcaactttgtcgttcaggcgtaccacagagagctactggagcagatgattgcatcaggtaggatgcccccttcgggggctgtggtggtgaccgacgcagcaccatctcggaaagtccgggcaggtagcaggaaggctactccgtcgaagaagccctccgtgaagcggaaaaaagagaagaaatcgagctcgcgacggcgtctcccgaaacccgtcgccggtggtttgggtgctatgtgacctaagttttcgtcgagtagcagagtcttgatactcccacagtcacacacttatacagcgtgtaccggaatacaaacaatgttccattacttaggtctggggcttgtaatcgtgccccggcgaaatttgttcatattactcttcatcgttgttgtacataacatctccaaaccaatattcaattttgttcattgatgttatgttcagttatt

SEQ ID NO: 63510 - DNA, 1826 bp, Zea Mays
gcagctgctgcaccgcgcgctgcggctgggcggtcgccgcagggccggcgtcctgatgctgctcgcagtcgtgtccgccgctgtcttctcctctctcttcgccgtcgtcaaagatgacagcaattcaatcagtatcgtaaataattatgaagtaccaaatgccatacagaagtcagtgtatcccagcacaacacggcctctaatgatgtctggaaaccaatactccaccagtgttgtcaacaaaatcgagcttccaaatcggcttcatcttacgtatgcaaacttcacacatccttgcgaaggtttctcagtccctcctcccctggttgataagaaacgcactggaccccgaccatgccctgtttgctatgtttctgtggatcaggcatttgccttgatgcccctacaagcttcaccatcacctgtcgtaaagaacttaaactatgtatcagaagatggtgttactgcaaatttatcaaatctaggatctggatttggagggcatccatctctggagcagagaaacaaatctttcaacattaatgagtcaatgactgtccactgtggctttgttagaggaaagaagcctggccaaggtactggattcgatatcaaggatgatgatctgctagagatggagcaatgccgtgagctagtcgtagcttctgctatttttggaaattatgatatgattcagcatccgaggaacatcagtgaattttcaaaggcaaatgcatgtttctatatgtttgtagatgaagaaacagaggcttatgtcaagaattctagttctttgtacaataataataaagttggactgtggaggctggtggttgtccgaaacctcccttatgaagatccaaggcgtacgggaaagattccaaaacttctgctccataggctttttccaaacgtgaaattttcagtttggatagatgcaaagcttcagcttgttgcggatccctatctcctgcttgagaggttcctgtggaggaagaataccacttttgcaatctctcggcattacaaacgctttgatgtgttcgaagaagcagaagctaacaaagctgctggaaagtattacaacgcatccatcgattaccaaatagagttttacagaaatgagggcctaacacattattctcctgccaagcttcccatcacaagtggtcagtgaactcatcagattatgatgtccctgaaggctgtgtgatcatcagagaacacatccccatcacgaacctcttcacgtgcttatggttcaatgaagttgatcgcttcacctccagggaccaaataagtttcagcaccgtccgggacaaaatcagggctagagttggctggatgcccgagatgttcatggactgcgagaggcgcaactttgtcgttcaggcgtaccacagagagctactggagcagatgattgcatcaggtaggatgcccccttcgggggctgtggtggtgaccgacgcagcaccatctcggaaagtccgggcaggtagcaggaaggctactccgtcgaagaagccctccgtgaagcggaaaaaagagaagaaatcgagctcgcgacggcgtctcccgaaacccgtcgccggtggtttgggtgctatgtgacctaagttttcgtcgagtagcagagtcttgatactcccacagtcacacacttatacagcgtgtaccggaatacaaacaatgttccattacttaggtctggggcttgtaatcgtgccccggcgaaatttgttcatattactcttcatcgttgttgtacataacatctccaaaccaatattcaattttgttcattgatgttatgttcagttatt

SEQ ID NO: 63511 - DNA, 2124 bp, Zea Mays
ctctcgcgtcgctcgtcttcatctccctgtggccggcgctcgttctccaaccatccatgaccgccggtcgctcctttctgtcccgcccgatgctctgcactgccccatcgcttggcctccagctcgtcgttctccctgcttcaagctttttttttccccagccacggagctcgccgtacctcctctctcttcctcactgttcacgcgcgtccccagctcctttgccacgcccggcctgctcttcttcatggccgcgcgcccagattctctgctcgaccgcgccccctgctgcgcgcgctcgtgcgctctgcgcttcgctcgccatcgcaggcagcggcgccctgcttctccccaaccacggcgtcctctgctccctctgccgaccggaacgccctgctcggattccgctcgcggagctctctttccccagcgccgtttgccgtcctggtgcaagctccagctgctgcgcccgactggcttcctgcatcgcgcccagccgcgttcttcacagccggctgctgctccctggcgcagctcgttcagtccagccgcacttgctttcccatggccgcgcgcgaagttttcggctcgtcgcgccctggattccctggccttcgcgccctggctctctgcccagagttccctgttctgctcggcgctctccctgctcgctctggacgcgcagctctcttcgtcgcgcccaggccgtatcccgctccagcttaccgaagtccctcccacggccgtctccctcaagccgccgtgagctccatgctctgaaattcgtgcatcgcctccttcccatttgtcatgccttgcgacgctcgtcatggacctcgtcgtcgacccacgttgtgcccacgacgtgctcgttgactccgatgatttgatttccaatttcatgctgcttatgtcgaccctcagaactccttgtcgtgctcaaccctgcaagtctccaactcgtcgacatcccttgcgtcgtcgaacgatcccgagaaatcggataaagcaataaatcccgtgtggtgcttgccgggtgctcggaaaaagttctatgcaagaatcgttgctgtctgcgcgaagttatggtcaatatggtaatcatactctgattcgctaccgctattattttgttttagtggatggattaatagatatggaggttgcgacgatcctttttctttagcataggcacgcttagtgattatggccagctcggttgttgtgtcggtgtgctgttacgcgaccatttttattaatttagcatacgtatgttgtgatgttcgtaattatgaaatagtcgcgaggtgtggtaaaatataggtgtaaggcacacctgctagcgcgaacgattaaatatcgtatttaactcgtagactgtacaagttaatccgataaaatggcttagaaaactagttaagttagttttaagtatggtgatggccgattgtgattagcaccatcgatctgtattttatgcgtcttaatttacaaaatggaaacatatgtctagtctaatcggattgatctgatgcttgtgatgtacttgtgttcaatagtgaattaatcacattgtataatgatcgtcaattagtaaggatgtgaatagtgactcgatgggtgttttgatataggacttgtgtttagtttattatcaatttgatatttgaagtagatacgattacactagaaaagtatgataattgagcgtagtcgtatgtcgataactagtgttttccataggaaatagtataacgcctcaccgctaggtgtttaattcaccgtcgtgtagccttatttaggtttgtgatattcttgtttatatgcattcatgtgcattatgcaaatcatctaggtacgttgattaaccacgagatgcagaagacaagccaagtcgaccccaagcacgggctaatccacaggatgatactgatgaatggaactgaagatgggcagacgaaacgagtatcggaataaagactgatcgccaagtggtcgtctaacaacactaacctagtgttacccaggcaagccccggtgcatgcaaccccttccttgtgttttaaatacttttcgcacacttaagtctagtgaaatgtgcattaggtttataggagttgcttg

SEQ ID NO: 63512 - DNA, 1449 bp, Zea Mays
ctcttccaatttttttttgtttgtttgtttcagccaccgctcggcgcttgataaaaatcctgctcgctctctccactctatctctctcgcgtcgctcgtcttcatctccctgtggccggcgctcgttctccaaccatccatgaccgccggtcgctcctttctgtcccgcccgatgctctgcactgccccatcgcttggcctccagctcgtcgttctccctgcttcaagctttttttttccccagccacggagctcgccgtacctcctctctcttcctcactgttcacgcgcgtccccagctcctttgccacgcccggcctgctcttcttcatggccgcgcgcccagattctctgctcgaccgcgccccctgctgcgcgcgctcgtgcgctctgcgcttcgctcgccatcgcaggcagcggcgccctgcttctccccaaccacggcgtcctctgctccctctgccgaccggaacgccctgctcggattccgctcgcggagctctctttccccagcgccgtttgccgtcctggtgcaagctccagctgctgcgcccgactggcttcctgcatcgcgcccagccgcgttcttcacagccggctgctgctccctggcgcagctcgttcagtccagccgcacttgctttcccatggccgcgcgcgaagttttcggctcgtcgcgccctggattccctggccttcgcgccctggctctctgcccagagttccctgttctgctcggcgctctccctgctcgctctggacgcgcagctctcttcgtcgcgcccaggccgtatcccgctccagcttaccgaagtccctcccacggccgtctccctcaagccgccgtgagctccatgctctgaaattcgtgcatcgcctccttcccatttgtcatgccttgcgacgctcgtcatggacctcgtcgtcgacccacgttgtgcccacgacgtgctcgttgactccgatgatttgatttccaatttcatgctgcttatgtcgaccctcagaactccttgtcgtgctcaaccctgcaagtctccaactcgtcgacatcccttgcgtcgtcgaacgatcccgagaaatcggataaagcaataaatcccgtgtggtgcttgccgggtgctcggaaaaagttctatgcaagaatcgttgctgtctgcgcgaagttatggtcaatatggtacgttgattaaccacgagatgcagaagacaagccaagtcgaccccaagcacgggctaatccacaggatgatactgatgaatggaactgaagatgggcagacgaaacgagtatcggaataaagactgatcgccaagtggtcgtctaacaacactaacctagtgttacccaggcaagccccggtgcatgcaaccccttccttgtgttttaaatacttttcgcacacttaagtctagtgaaatgtgcattaggtttataggagttgcttg

SEQ ID NO: 63513 - DNA, 3646 bp, Zea Mays
gcctacgccgcggacgcgacgtcgccgcctgtcatgcacagccagtccgcacccggcccgagggtgggatgccgcgcccacctccaccttccgtccttcccccacaccttcaccacggctccactccactctccagttctccactccccccgcccccatctcggcctcctctccaccccccttggcctgtcgcgaaacgattgcccgacacgggtccccaaccaagatggcctagccggagaggttgaaccagcgcaatgccggcgccagcgagcggcggcggtggcggggaccacctccgcggccacgcgcacctgaccaactgcatccacctgcgccaccaccacgcccacgcccacgcccacggcgcgtccgggcggaggcgcagccccacggggtcctcggcgtcggcgtcggccgcgctgatgcgggacctcctggccctgcagcgctcgcgctcgctgcgggacccatccacccgccgctccgtcgacgactccgcttccaacaaccgggtcgccgccgacccggacgacgccgaccactcccgcgccggcgcgatcaagacgctcctcgaccagctcacggagaacccgcaccccaagcccggccgccggccccggcgccggttcaggcgaagcgctacccgtcgcgtcgcccagcccgctgccgccccccgcgtctccgtcaactccagctcccaggaggccgtctgcggcaacaggtacctcttcggcggcaccggcggagccgacggcggtgtcgagctgatgcagcagcagcagcaggtgtcgcacgagtcgcacaacgtgtgcggcatcccgtggaactggtcgcgcatccaccaccgcggcaagtccatcctcgacatggccggccggagcctctcgtgcggcctgtccgaccccaagtcgacgtcggcggcgcggaggtccgaacccgccacctccgccgcctcgtgcggccacgtcaacgggtcacgctcgcacccgcatttcccggtcaccgcgaggctgacgtcctcgagcagttcagactccgactctctgcctctgcttgtcgacggcgtgcgcaacgccgtcggtggcatttccagcagcttctccggggagctcgggattttctccaagagcagcgagctggactccgacctcgcgtccgaggcacggtctgggcagaagtcgcggggctcgcaccgtgcccgacaccggagctttacgcagaagtatgctccaaggactttcaaagacgtcgtcggccagagcttggtggtgcaggcgctgtccaatgccattctgaagaagaagatcggactggtgtatgtcttctatgggccacatggcacgggcaagacctcgtgcgccagggtgttcgcaaaggctttgaattgccattccccggagcacccgaggccctgtgattcatgtgcctcttgtattgcacacaatctgggcaagagcaggagcttgctggagattggaccggttggtaatatagatctggatggcattgtggatatccttgacaatgtgatgctctcgccggtgaaatcccagcacagggtgtttataattgatgactgcaacacattgccgcctgatacatggagtgtcatatccaaggtcgtcgaacgtgcacctaggcgtgtggtttttattctcatcagccctaatcttgatctccctcatataatcgtgtcgaggtgccaaaagttctttttccccaaactgaaggagtgcgacattatcagcactttgcagtggatttctaccagcgaaggcctggatgttgatagagatgccttgaaacttattgcttcccggtcagacgggtcactgagggatgccgagatgactctggatcaactcagtctgcttgggcagacaatttcgatgtcccttgttcaagaacttgttggcttggtttctgatgataaattggttgatttgcttgatttagcactatctgctgatacagtgaacacagtgaaaaccttgcgagatatcacagaaacaggtgttgagccactggccctgatgtctcaacttgctacaataatcactgacatccttgctggcacctatacattaacacgagaaagagttcggaggaaattcttcaaacgtccaaccttatcaaaggatgatatggaaaagctgcgccaagccttgaaaacactctctgaagctgaaaaacagttgagggtctctaatgacaagatgacatggcttacagctgctcttcttcagcttgcacctgataaacaatacgtattaccgagttcatccccgagcacaagtcttattcaagcaacaacatggcaaacaattaccatgttggaaggagacctggggaacataccccagacagccatgtgttgccaaccggtgctacaagagtgaatgaaggatctaggtatggcaaaactgacagtgaaatgatttggcaggctgtgctagagaatgttcagtcagactcattaagaagattgttagccagagagggtcgactgatatccgtcagcctaggcacagctccaactgtacaattaatattcaactctcgagtaaataaatctaaagctgagaagtataggggccaaattctgcaggcatttgaatctgttctttcttctaccataatacttgaaattcgatatgaatctaaggatgatctggcagcaggccatgctccagttatttctgcctaccctgaggatggctcctcaaatctggtattaaggaggtcttttactaaacatagttcagtttcttcggggggcgagaacttaattaggaggcttcagaaagatagtgtggtccaacttggtagctcaaatcagacacgctggatgcaatctgatccacatatattgactgaaggtgaaattattgaagttggatctcaaatggattggcgtgctgaacaagatagtggcattgttatggcaaacagaagacaagaggctgtctcgggagaaggtttgtcatcacagaatcaagaaatttctcagggaggaaaaattgtgaataatggagatggtcggcaaaagaacattgtgagaggcaaggtatctcttgctaatgttattaaccaggcggaatcttgttcccaacaaggtggctggtctagacacaaagctgtatcaattgcagaaaagctagagcaagataatttgagattggagcctagatccagtttgctttgttggaaagcttcaagcacctctagacggaagctgtctgcactgaagatcaggacacgaagatcacgagctttatcaaggctcgccttgtgcggaaggtgtatttcagtgagatctccaagatgaagcattagggggtcaatcgccccagattttacatgtagctaacttagcagggcacccataatccataatttattctctgtagttgtagcagcgacctagaggtgtcattctgtagcacattgtgtaacatgtaggagagagataaacacatatccccattctttctattgaaacaccagaaatagttgctcttgctccataattcgttaatctgaacttctgaagccatgccaaggccttatattgatcctctgttgtcatattgataaaaatagggcatgtgaggcttgcggctgcgagcaccagaaagctttc

SEQ ID NO: 63514 - DNA, 1065 bp, Zea Mays
agaggtgacgtggctgggcaactcacctgcgcggtgacagcacctcgccggcttttcttccctcaggcttgcactttgcacagcctctcacatcacatgccgctgatgcttcgcgtctcctactccttcctgcttccacctattaatccaccccactctcttccctccccgttccacccgcctctaccgccgcgagatccggctccgcttccagaagcttctggaacgcccgttccatgagcgtctgatcggccgccgccatgggctgcgctggatccacccccaaagtcgacgagaacagcaagaaactgaaaaggcctaaggcttggaagcatacccaaccaattacaccggcacggctgaaacagatgcgtgatgagttctgggacacggctccgcactacggaggccaaaaaggtacaggttttagctgtttgtgccaagttgaacagaaccagttcttgtgcgggtgtgtgtgtgcgcgcgcgcgcgcgcttcatggtcctcgcgacgttgagatctgggatgctctgagggttgccgcggagtccgatctagcccttgcacagaccatcgtggacagtgctggaatcatcgagattggagcctagatccagtttgctttgttggaaagcttcaagcacctctagacggaagctgtctgcactgaagatcaggacacgaagatcacgagctttatcaaggctcgccttgtgcggaaggtgtatttcagtgagatctccaagatgaagcattagggggtcaatcgccccagattttacatgtagctaacttagcagggcacccataatccataatttattctctgtagttgtagcagcgacctagaggtgtcattctgtagcacattgtgtaacatgtaggagagagataaacacatatccccattctttctattgaaacaccagaaatagttgctcttgctccataattcgttaatctgaacttctgaagccatgccaaggccttatattgatcctctgttgtcatattgataaaaatagggcatgtgaggcttgcggctgcgagcaccagaaagctttc

SEQ ID NO: 63515 - DNA, 1027 bp, Zea Mays
aactcacctgcgcggtgacagcacctcgccggcttttcttccctcaggcttgcactttgcacagcctctcacatcacatgccgctgatgcttcgcgtctcctactccttcctgcttccacctattaatccaccccactctcttccctccccgttccacccgcctctaccgccgcgagatccggctccgcttccagaagcttctggaacgcccgttccatgagcgtctgatcggccgccgccatgggctgcgctggatccacccccaaagtcgacgagaacagcaagaaactgaaaaggcctaaggcttggaagcatacccaaccaattacaccggcacggctgaaacagatgcgtgatgagttctgggacacggctccgcactacggaggccaaaaagatctgggatgctctgagggttgccgcggagtccgatctagcccttgcacagaccatcgtggacagtgctggaatcatcgtgtcgaaccctgacatgacgctctgctacgacgagagagactccgttgcaggcgccaagtacgagctgcccaagtatgtcttgagcgagccagcgaacctgatccgcgacgggtgattctggaccccaaaaggttttgcagcagcacgaaacagggccacgtgaatttatgcggatggttgattcggtcgctggttctggattgtaactttcagggacagtgaaagctcgtttcagcgctggatgttgtatagtgatgttattggacacgatgtgtagtctctagacctgctactgctgaactcggtcattcagggacagtgaatgcagtgtcgtttaggctatatgctgcagacttattcacctcatatttcagacttcagacttaactgtatctatataaatagtgcagtttgcactcatatttcagacttcagacttcactgtatctatatagatagtgcagtttgcaatgcaaaaaaatgtatgctcagagtctacgagctcagcttgcaaagaaagagccatgtcacagaatcactgaagtgaaa

SEQ ID NO: 63516 - DNA, 1029 bp, Zea Mays
aactcacctgcgcggtgacagcacctcgccggcttttcttccctcaggcttgcactttgcacagcctctcacatcacatgccgctgatgcttcgcgtctcctactccttcctgcttccacctattaatccaccccactctcttccctccccgttccacccgcctctaccgccgcgagatccggctccgcttccagaagcttctggaacgcccgttccatgagcgtctgatcggccgccgccatgggctgcgctggatccacccccaaagtcgacgagaacagcaagaaactgaaaaggcctaaggcttggaagcatacccaaccaattacaccggcacggctgaaacagatgcgtgatgagttctgggacacggctccgcactacggaggccaaaaagagatctgggatgctctgagggttgccgcggagtccgatctagcccttgcacagaccatcgtggacagtgctggaatcatcgtgtcgaaccctgacatgacgctctgctacgacgagagagactccgttgcaggcgccaagtacgagctgcccaagtatgtcttgagcgagccagcgaacctgatccgcgacgggtgattctggaccccaaaaggttttgcagcagcacgaaacagggccacgtgaatttatgcggatggttgattcggtcgctggttctggattgtaactttcagggacagtgaaagctcgtttcagcgctggatgttgtatagtgatgttattggacacgatgtgtagtctctagacctgctactgctgaactcggtcattcagggacagtgaatgcagtgtcgtttaggctatatgctgcagacttattcacctcatatttcagacttcagacttaactgtatctatataaatagtgcagtttgcactcatatttcagacttcagacttcactgtatctatatagatagtgcagtttgcaatgcaaaaaaatgtatgctcagagtctacgagctcagcttgcaaagaaagagccatgtcacagaatcactgaagtgaaa

SEQ ID NO: 63517 - DNA, 1298 bp, Zea Mays
tgacgtggctgggcaactcacctgcgcggtgacagcacctcgccggcttttcttccctcaggcttgcactttgcacagcctctcacatcacatgccgctgatgcttcgcgtctcctactccttcctgcttccacctattaatccaccccactctcttccctccccgttccacccgcctctaccgccgcgagatccggctccgcttccagaagcttctggaacgcccgttccatgagcgtctgatcggccgccgccatgggctgcgctggatccacccccaaagtcgacgagaacagcaagaaactgaaaaggcctaaggcttggaagcatacccaaccaattacaccggcacggctgaaacagatgcgtgatgagttctgggacacggctccgcactacggaggccaaaaaggtacaggttttagctgtttgtgccaagttgaacagaaccagttcttgtgcgggtgtgtgtgtgcgcgcgcgcgcgcgcttcatggtcctcgcgacgttggttggtttcgtcatctcttatgtttcgatatagtttcatgatagtaactggtcggtgcttgttttgacctgtccaatcattatccttaaaaattaggagtttaactatgagacgtactgctaattagcgtacatcagtgttgtaacgagtcaccgcctcgctgtccagagatctgggatgctctgagggttgccgcggagtccgatctagcccttgcacagaccatcgtggacagtgctggaatcatcgtgtcgaaccctgacatgacgctctgctacgacgagagaggcgccaagtacgagctgcccaagtatgtcttgagcgagccagcgaacctgatccgcgacgggtgattctggaccccaaaaggttttgcagcagcacgaaacagggccacgtgaatttatgcggatggttgattcggtcgctggttctggattgtaactttcagggacagtgaaagctcgtttcagcgctggatgttgtatagtgatgttattggacacgatgtgtagtctctagacctgctactgctgaactcggtcattcagggacagtgaatgcagtgtcgtttaggctatatgctgcagacttattcacctcatatttcagacttcagacttaactgtatctatataaatagtgcagtttgcactcatatttcagacttcagacttcactgtatctatatagatagtgcagtttgcaatgcaaaaaaatgtatgctcagagtctacgagctcagcttgcaaagaaagagccatgtcacagaatcactgaagtgaaa

SEQ ID NO: 63518 - DNA, 4540 bp, Zea Mays
gcacaacaattctgataaaaagatgtgggatagaacactaaaccatacaaaagtgacaacttacggatccatctgctgcgatgaccctccgtgaaataacgataaatccagtttagaatgtaaaacgcacggtaggccctgaaaaataagtatggtgttactataaagagacaaaatagctacagaacttaaaaagtgtgaagagaatttaatctagtgaatttgttcttgccacatgatgcaactctaggaaatatatactccctccatacctgaataaatcaattcctagagttgttttacgtcaaactttttatgtttgaccgagtttgtagaaaaaaccacaaatatttatgaaaccgaataagcacattataaaaatatattttatggtgtatgtcaaggttggaaaaggcacacctaggcgttctctaagtgtttatgccaaattatatcgaatatgtgtggctgaataaattaaagttgatattcatgccttgacgtagtctatagatgcaacaccacaccaacagacatactgcagaggcatattaatattaggtggtgtttgattcattgcaggagtggttaacgtaacgtgaatggatcccactgctattggttacagtgcaacagaaagcgagatatgtttggttagttaacaacttaacgttatgtattaacactagctgaggagtggtaacgaaaagatatggctccgtatccatttatggtgtgaatcgttatggactggcccaaccaaccataaaagaaagggaataaataccactgtaaatggatcacggacaaaaacatctaaccaaacagcctcttagatgcaataatgaatcatagtcatagaattcagaggagcagaggaggaaggactgaaggactacagaggaggaagatgacagggagaaaaaggagagaggagcagaggagagcggaggcgtgaggagaacaggagatcttgcctagcttcaggtcacgacaactggcaacgaggaggtctggcctttggattacggctcaccgtggcacacggagggaggaagaggtcacagcagccgggcggggggaggaactgcaacttgatgtcaggaatggtgtctggcgggaacagatcgaggagcagcactgaggccggaacatggatatgaaatcgggaagcagcatggtgacgagctctctttttgacgtgcagcctgtgcagtttatcattcccacacatcaactttcttttcctgagtcacagtttcgcccgccgcgcaggtccgaccgcttcctcatcgcctcagtccaccttagcaccacaaaatcgccacggaattgctgtccaacgttgctgaggcgccaccaccgcttagctgtccgtctaccaccctaggccccatggtcctccacctagcgcctactcgcgcatcgacgtccgcggaataccttgttgcacactcgagtatctaagctaatgatactaacttggtgctataaatctttgcactttatgctataaattgggtcaaacttagaaaagtttgacttaggacagaattgaatcattcagagacagagatagtaataccaaactgaaaattaaccagaaaagacaatccaagtatgatttaaaaatggtaaacaaataaaaacatagttgtgtatagtgcctgcttgaaattaagctagaaatccagggttaaaaggttaaatttctttgggtttttagacttcatgactataagtacaacttaagatgccctgacaatgacatagttgtacaaaccaacactattcctccctctaaattatcctatagcatcaatcagatattaactaaccctaaacacaattgtctaaattcttctattgggttgtgccacttagtgaggatatgcatatctattaaatgctggtatatttcaagactgcagtattggacagagttcaatgccataaattgtttaatggagtaatggacctttaccggatagcactatagcaggctttgaatacaacagatgtgttcagaaaaacagcaaattgccgacaagaagtaaaaaacgtacccaaggaagaaaacatattgtccagttaagttatccacatttctgcttctctggagcaacactaattgtgggagaatagccactgcctccaaatagattgaaaatgcccagcatatctgcaaaggaacagtattttagccttttaggatactctgtctccatcaatgaatctttggaacaattagtaacacttcagtgtacatgtaacttataatattttgaggattctgatatgttatcattgaacttctgttttagtagtagctaatgatcacagcaactatgataaggtaagacaattcaagccaaacaggcaattataaataaaagaaagtatgtaaagttaagtgaactgtactgatagatttgcaaaaagtgtgaagagattccgatcaaagcacatgggtcatgggtgtgaactgagcaaacgattgtaaatttggaaaaaatataagttagctgattgttgacgatcactgatttcttttatgagaattgcataccattgaatgtggttaactcaagaacctgggaaattatgctggagtcaattgggcaatacggtttacggtcctaggtaccgctcgctcaccaccatatcatgatattaggactccactgcttgaagagctgtgaacagaacatcagagatgaggaataatctcgaggaggcttggaagaaatatggttgcaccataatgtctgatgggtgcactgacacaagccacctgccatctcatcgatttcctgaaaagtccagcagggaccttcctatggtctgttgatgcttcaagtaagataacaaatgcacacatgctggctaccttgttggacaagcaaattgacaagtttgagaaggaacatatggtgcagattgtcactgacagtggagccaacttcaaggcaacagggaggcttctaatggagaggatcacacatttggacaccttcttctgctcatttcttggatttgctgttggagaacattgagaagatcaaggaattcaacacttggatcaacatggaaaagaaggtgtgcagattcatctacaagcatggagggttcttgatctaatgagactatgagacataaaataggcgaagatcttgtgaggccagctgttactcactttgctacttcaattctcacattggcaagcatgcataagcgcaggaatggattgaggaatttatttgttagtgatgaatggcatgctaccagcttctccacctctaaagaaggtcggcaagttgagaacattgtcctttcaatgccattttggaatgaagtggataattgcctaagaacttcacaaacacttcttgttgctctaaggatagcagatggagatgagacaccagcagcttctaagattatgacagccatggacgttgcaaagactgccatcaaggattcgttgaaagacaaaccaagtttacttatagaggactatacaaaaaagagaaaccgagagcttggttccaaagggaagaaatacaatacactcttgcttgagcaatttcattgggaaaatgaatgtgttgatgaaaattgcgaattagttcaagaaggtggtggcaatgctatgaattgggctcttgtggatgatgttattggtgtaactcagagtctagaggggcgtaacttgcctagggcggctgctgctgcccctatgaggcatacttatactaggaacaggaagcgtccaaggaagaaagtgactcaagataatgatgaagaagatgacgatgaagaccaagatcagcatggagaatctgattcagcaacatcaatggaagaggatgaagaatctattcgctgatggatctgcaccaacaagaacgggagatggacagaggcttctgtttgaatgatgatttgcttaattacatgactggttgtctacttgcgttggactattgaatgccaatgtagtactgaactagtttggttatgtaatatgctggctgtgtggctgctatggtcgattagatgttagttatttgctaatgcagtagtgttactgttgagctgctctacttataagttagtcaagaccaagactacattagtgttgctaattatgtcctactttggtttggtactccagcagcaagtcagcaaataaatgaagtttgggacatgaatatggagctctagacagtgcagaaaacaactctcacaagtaagtcaccagctaaacaataatgtagtcttgatgcttgctttattgtgtatacatatagtaggtatatgtcctgatatataggacgactaagatcgactaggctcgactaatcggcctggtcgacgactaatcaagattaatcgcctggtcagtcccacggcgactagcttcgactatacaatttgtaaacattgttagtagctaatgatcacaacaactatgataaggtaagacaactcatgccaaacaggaaattactaataaaagaaagtatgtaaaagcaag

SEQ ID NO: 63519 - DNA, 50 bp, Zea Mays
cttgattcttgtattatatccgcatattcccaaaccaaatcgattcatcc

SEQ ID NO: 63520 - DNA, 3136 bp, Zea Mays
agcccagtccgaggtgctggaggctattcagctgttttggcttggcttgtggccggtgagaggtggacacgacgacggtgacggtgaggtggagagcggagtggcggatcgtggctccgatccacaagggacggctccacacatcgggttcctgcctctgctcagcagccatgccggtgaggcggcggcagccgcgtcggccggagacgggtgcggcggagaggtacagggagatggggatcggggctgcgctgtcgcggccctgggactatcccacggcctgcggcgagcttgcagcgctgctgcgcctcggatacgcggacctccctaaggcagcccaggcgctcgttgcctccgacgtgctactcgcgtttcgcctccttcccgatgtgcagacaggatatgcagtaagcacagctaatgttcttctccaagcagtagaagttgctctaccaaagcaaaagaaggcgcaggctgtttcagagttcaagcactctattattgcacataaaaggcgtgcaagagtccaacaaatttcaggtacgtgataggttccttttccatggtgtaactgcatcaatgtaactctgtttagtgtgaacttgatatcttgagcccatttagctcttgagcatatttggtgactgggaaattactactcaagctgtgtcttctattctgtgctgcagtaccatagatgccatacacacgggccattttgttaatttattcttccaagttctatgagctgatttcagaatttctgcttgatggtgtgtttggatggtaatcatgacaaaatcatgaagtttggctttaagtaaaagcttattaaatgctaacatgttgtctcgtaaaagtaaaaccatatgcatcttcagacgtcctggtgttttgattcattttaccaaaaagacagcttggccatttcgaattaactaactagttggcttacggtgcagcctcctttgaagatttaggaggattacaagccttaagacttactgatacaaggcattgtgatgtgttattttcaatcctcttgacaggttcaccacacataccacaagatatacttgtccatatcttcagtttcctggacatgcattctttggtagcagcaggtcttgtctgctggtcttggaattcagcggcaaatgacaacaaactgtggaagatgaattactcgattttctttggcctcagccatttgagttgcaacaacattcctgtatctggtgtgcaatacagcacgaattcggtgccaaattatccaaactttagctggaaggagtccttccacactaagtatgcaggtaggagtggtattcttccttttgcttacaattcgagacactaagtatcacaccccctattttaagcttctctctgcaaacagtgtcatctacagtttcgcgttccctattttacacagcctactgaagacagtcttaaagtgcacaatttccatggttgtcctctaaaacaagggtgaattatattttactgcagaatgcgcgtcatggaaatttgtatcaaatagagcactatgtgcgcattgcagatcagttatttggctgagcaacctcacatgtgcttctccacaccattgccctaagaatagacaccatgaagtaaaactacgacctctgttacctgatacagtaagttgtttaaccctgcatgacctagcacatcagagctttcatctaattttcaggttcttattataccacacgggcgaaagggcctctagcctagcggttaaggacttccgagtagcacctccaagtcctgagttcgattcctatcgggagcgaattttcagacttggttaaaaaaatccccttgctatgccccatccgctctcgggttgtgatgtcctgtgcgccacccttcggttggaccgttgcagagtggacagttgacgccagcccgttagtgatggggagctagggtccggggattttctcggccgggaccattgtttcggtttcttcttatatggaataccgggagggcggtctttccctccctgaccgagtttttattataccacaccgttaactatatagtctgtctgatcagctatagaaatttattcgtgtaataatcataatttgttttgtcttttcatcgggtatgtattcactgaaccttctgcttaaccaagtcctggatcaggttgctaaatacatattgcgcgttgaagatctagcagcttcatcatctgaaagtgatgacacagatgactcagattatgagaattggcacccaagattttgggcgctataggacaatgatattcggattgtgactatttatgtcctcgattctactagtttgctgtatttagtatgtagcaactacaaacatcatacgaatggaacacattgtatattgtattgtctattgtagtcttggtacaactatatttaggagaagcaactgttgggttgatttcatttagggcgtcgagctagggagcgtggtgccgagcgaggagagggacgccgccgcgccgggagctaggcgctggggagcagggcgcaacaggaataacgacgacgatggtgtggtctacagaggttcttggtttggaaacgaccgaccaatgctaatagtgctcaacggctgatgggagactagcatgatgtgatctgcaggagctaacaggtacatatgtgctactagtgctcaatagctgaaacgaccgtgcaaactactgtgatgtggtgtgtaggagcaggcgttgccaaatagatacagttgctgctactacatgcactgccagtgagtgatgactgatgaagcaatgctactgcagaaaccgatacagacaatcagacataaaagaccgtgctagcgaaaccagtgatcactctttattccgagtttctaatgagtgtttggtttgagaaatgatatagtccatcatcttctcactccttattttttttatttggtttgtataatggagtgagttaatctatcatcacctcatttctcatagttagttgtttagtactaatatgtggaatagagttatcccaccaaatttgaggaatggacctatgatacaccactttattttagatagagtgattcattaaaccaaacacctcgtaagtttacc

SEQ ID NO: 63521 - DNA, 1625 bp, Zea Mays
agcccagtccgaggtgctggaggctattcagctgttttggcttggcttgtggccggtgagaggtggacacgacgacggtgacggtgaggtggagagcggagtggcggatcgtggctccgatccacaagggacggctccacacatcgggttcctgcctctgctcagcagccatgccggtgaggcggcggcagccgcgtcggccggagacgggtgcggcggagaggtacagggagatggggatcggggctgcgctgtcgcggccctgggactatcccacggcctgcggcgagcttgcagcgctgctgcgcctcggatacgcggacctccctaaggcagcccaggcgctcgttgcctccgacgtgctactcgcgtttcgcctccttcccgatgtgcagacaggatatgcagtaagcacagctaatgttcttctccaagcagtagaagttgctctaccaaagcaaaagaaggcgcaggctgtttcagagttcaagcactctattattgcacataaaaggcgtgcaagagtccaacaaatttcaggttcaccacacataccacaagatatacttgtccatatcttcagtttcctggacatgcattctttggtagcagcaggtcttgtctgctggtcttggaattcagcggcaaatgacaacaaactgtggaagatgaattactcgattttctttggcctcagccatttgagttgcaacaacattcctgtatctggtgtgcaatacagcacgaattcggtgccaaattatccaaactttagctggaaggagtccttccacactaagtatgcagaatgcgcgtcatggaaatttgtatcaaatagagcactatgtgcgcattgcagatcagttatttggctgagcaacctcacatgtgcttctccacaccattgccctaagaatagacaccatgaagtaaaactacgacctctgttacctgatacaggcgtcgagctagggagcgtggtgccgagcgaggagagggacgccgccgcgccgggagctaggcgctggggagcagggcgcaacaggaataacgacgacgatggtgtggtctacagaggttcttggtttggaaacgaccgaccaatgctaatagtgctcaacggctgatgggagactagcatgatgtgatctgcaggagctaacaggtacatatgtgctactagtgctcaatagctgaaacgaccgtgcaaactactgtgatgtggtgtgtaggagcaggcgttgccaaatagatacagttgctgctactacatgcactgccagtgagtgatgactgatgaagcaatgctactgcagaaaccgatacagacaatcagacataaaagaccgtgctagcgaaaccagtgatcactctttattccgagtttctaatgagtgtttggtttgagaaatgatatagtccatcatcttctcactccttattttttttatttggtttgtataatggagtgagttaatctatcatcacctcatttctcatagttagttgtttagtactaatatgtggaatagagttatcccaccaaatttgaggaatggacctatgatacaccactttattttagatagagtgattcattaaaccaaacacctcgtaagtttacc

SEQ ID NO: 63522 - DNA, 1922 bp, Zea Mays
agcccagtccgaggtgctggaggctattcagctgttttggcttggcttgtggccggtgagaggtggacacgacgacggtgacggtgaggtggagagcggagtggcggatcgtggctccgatccacaagggacggctccacacatcgggttcctgcctctgctcagcagccatgccggtgaggcggcggcagccgcgtcggccggagacgggtgcggcggagaggtacagggagatggggatcggggctgcgctgtcgcggccctgggactatcccacggcctgcggcgagcttgcagcgctgctgcgcctcggatacgcggacctccctaaggcagcccaggcgctcgttgcctccgacgtgctactcgcgtttcgcctccttcccgatgtgcagacaggatatgcagtaagcacagctaatgttcttctccaagcagtagaagttgctctaccaaagcaaaagaaggcgcaggctgtttcagagttcaagcactctattattgcacataaaaggcgtgcaagagtccaacaaatttcaggttcaccacacataccacaagatatacttgtccatatcttcagtttcctggacatgcattctttggtagcagcaggtcttgtctgctggtcttggaattcagcggcaaatgacaacaaactgtggaagatgaattactcgattttctttggcctcagccatttgagttgcaacaacattcctgtatctggtgtgcaatacagcacgaattcggtgccaaattatccaaactttagctggaaggagtccttccacactaagtatgcagaatgcgcgtcatggaaatttgtatcaaatagagcactatgtgcgcattgcagatcagttatttggctgagcaacctcacatgtgcttctccacaccattgccctaagaatagacaccatgaagtaaaactacgacctctgttacctgatacatcctggatcaggttgctaaatacatattgcgcgttgaagatctagcagcttcatcatctgaaagtgatgacacagatgactcagattatgagaattggcacccaagattttgggcgctataggacaatgatattcggattgtgactatttatgtcctcgattctactagtttgctgtatttagtatgtagcaactacaaacatcatacgaatggaacacattgtatattgtattgtctattgtagtcttggtacaactatatttaggagaagcaactgttgggttgatttcatttagggcgtcgagctagggagcgtggtgccgagcgaggagagggacgccgccgcgccgggagctaggcgctggggagcagggcgcaacaggaataacgacgacgatggtgtggtctacagaggttcttggtttggaaacgaccgaccaatgctaatagtgctcaacggctgatgggagactagcatgatgtgatctgcaggagctaacaggtacatatgtgctactagtgctcaatagctgaaacgaccgtgcaaactactgtgatgtggtgtgtaggagcaggcgttgccaaatagatacagttgctgctactacatgcactgccagtgagtgatgactgatgaagcaatgctactgcagaaaccgatacagacaatcagacataaaagaccgtgctagcgaaaccagtgatcactctttattccgagtttctaatgagtgtttggtttgagaaatgatatagtccatcatcttctcactccttattttttttatttggtttgtataatggagtgagttaatctatcatcacctcatttctcatagttagttgtttagtactaatatgtggaatagagttatcccaccaaatttgaggaatggacctatgatacaccactttattttagatagagtgattcattaaaccaaacacctcgtaagtttacc

SEQ ID NO: 63523 - DNA, 2627 bp, Zea Mays
agcccagtccgaggtgctggaggctattcagctgttttggcttggcttgtggccggtgagaggtggacacgacgacggtgacggtgaggtggagagcggagtggcggatcgtggctccgatccacaagggacggctccacacatcgggttcctgcctctgctcagcagccatgccggtgaggcggcggcagccgcgtcggccggagacgggtgcggcggagaggtacagggagatggggatcggggctgcgctgtcgcggccctgggactatcccacggcctgcggcgagcttgcagcgctgctgcgcctcggatacgcggacctccctaaggcagcccaggcgctcgttgcctccgacgtgctactcgcgtttcgcctccttcccgatgtgcagacaggatatgcagtaagcacagctaatgttcttctccaagcagtagaagttgctctaccaaagcaaaagaaggcgcaggctgtttcagagttcaagcactctattattgcacataaaaggcgtgcaagagtccaacaaatttcaggttcaccacacataccacaagatatacttgtccatatcttcagtttcctggacatgcattctttggtagcagcaggtcttgtctgctggtcttggaattcagcggcaaatgacaacaaactgtggaagatgaattactcgattttctttggcctcagccatttgagttgcaacaacattcctgtatctggtgtgcaatacagcacgaattcggtgccaaattatccaaactttagctggaaggagtccttccacactaagtatgcaggtaggagtggtattcttccttttgcttacaattcgagacactaagtatcacaccccctattttaagcttctctctgcaaacagtgtcatctacagtttcgcgttccctattttacacagcctactgaagacagtcttaaagtgcacaatttccatggttgtcctctaaaacaagggtgaattatattttactgcagaatgcgcgtcatggaaatttgtatcaaatagagcactatgtgcgcattgcagatcagttatttggctgagcaacctcacatgtgcttctccacaccattgccctaagaatagacaccatgaagtaaaactacgacctctgttacctgatacagtaagttgtttaaccctgcatgacctagcacatcagagctttcatctaattttcaggttcttattataccacacgggcgaaagggcctctagcctagcggttaaggacttccgagtagcacctccaagtcctgagttcgattcctatcgggagcgaattttcagacttggttaaaaaaatccccttgctatgccccatccgctctcgggttgtgatgtcctgtgcgccacccttcggttggaccgttgcagagtggacagttgacgccagcccgttagtgatggggagctagggtccggggattttctcggccgggaccattgtttcggtttcttcttatatggaataccgggagggcggtctttccctccctgaccgagtttttattataccacaccgttaactatatagtctgtctgatcagctatagaaatttattcgtgtaataatcataatttgttttgtcttttcatcgggtatgtattcactgaaccttctgcttaaccaagtcctggatcaggttgctaaatacatattgcgcgttgaagatctagcagcttcatcatctgaaagtgatgacacagatgactcagattatgagaattggcacccaagattttgggcgctataggacaatgatattcggattgtgactatttatgtcctcgattctactagtttgctgtatttagtatgtagcaactacaaacatcatacgaatggaacacattgtatattgtattgtctattgtagtcttggtacaactatatttaggagaagcaactgttgggttgatttcatttagggcgtcgagctagggagcgtggtgccgagcgaggagagggacgccgccgcgccgggagctaggcgctggggagcagggcgcaacaggaataacgacgacgatggtgtggtctacagaggttcttggtttggaaacgaccgaccaatgctaatagtgctcaacggctgatgggagactagcatgatgtgatctgcaggagctaacaggtacatatgtgctactagtgctcaatagctgaaacgaccgtgcaaactactgtgatgtggtgtgtaggagcaggcgttgccaaatagatacagttgctgctactacatgcactgccagtgagtgatgactgatgaagcaatgctactgcagaaaccgatacagacaatcagacataaaagaccgtgctagcgaaaccagtgatcactctttattccgagtttctaatgagtgtttggtttgagaaatgatatagtccatcatcttctcactccttattttttttatttggtttgtataatggagtgagttaatctatcatcacctcatttctcatagttagttgtttagtactaatatgtggaatagagttatcccaccaaatttgaggaatggacctatgatacaccactttattttagatagagtgattcattaaaccaaacacctcgtaagtttacc

SEQ ID NO: 63524 - DNA, 1762 bp, Zea Mays
agcccagtccgaggtgctggaggctattcagctgttttggcttggcttgtggccggtgagaggtggacacgacgacggtgacggtgaggtggagagcggagtggcggatcgtggctccgatccacaagggacggctccacacatcgggttcctgcctctgctcagcagccatgccggtgaggcggcggcagccgcgtcggccggagacgggtgcggcggagaggtacagggagatggggatcggggctgcgctgtcgcggccctgggactatcccacggcctgcggcgagcttgcagcgctgctgcgcctcggatacgcggacctccctaaggcagcccaggcgctcgttgcctccgacgtgctactcgcgtttcgcctccttcccgatgtgcagacaggatatgcagtaagcacagctaatgttcttctccaagcagtagaagttgctctaccaaagcaaaagaaggcgcaggctgtttcagagttcaagcactctattattgcacataaaaggcgtgcaagagtccaacaaatttcaggttcaccacacataccacaagatatacttgtccatatcttcagtttcctggacatgcattctttggtagcagcaggtcttgtctgctgaaggtcttggaattcagcggcaaatgacaacaaactgtggaagatgaattactcgattttctttggcctcagccatttgagttgcaacaacattcctgtatctggtgtgcaatacagcacgaattcggtgccaaattatccaaactttagctggaaggagtccttccacactaagtatgcaggttgctaaatacatattgcgcgttgaagatctagcagcttcatcatctgaaagtgatgacacagatgactcagattatgagaattggcacccaagattttgggcgctataggacaatgatattcggattgtgactatttatgtcctcgattctactagtttgctgtatttagtatgtagcaactacaaacatcatacgaatggaacacattgtatattgtattgtctattgtagtcttggtacaactatatttaggagaagcaactgttgggttgatttcatttagggcgtcgagctagggagcgtggtgccgagcgaggagagggacgccgccgcgccgggagctaggcgctggggagcagggcgcaacaggaataacgacgacgatggtgtggtctacagaggttcttggtttggaaacgaccgaccaatgctaatagtgctcaacggctgatgggagactagcatgatgtgatctgcaggagctaacaggtacatatgtgctactagtgctcaatagctgaaacgaccgtgcaaactactgtgatgtggtgtgtaggagcaggcgttgccaaatagatacagttgctgctactacatgcactgccagtgagtgatgactgatgaagcaatgctactgcagaaaccgatacagacaatcagacataaaagaccgtgctagcgaaaccagtgatcactctttattccgagtttctaatgagtgtttggtttgagaaatgatatagtccatcatcttctcactccttattttttttatttggtttgtataatggagtgagttaatctatcatcacctcatttctcatagttagttgtttagtactaatatgtggaatagagttatcccaccaaatttgaggaatggacctatgatacaccactttattttagatagagtgattcattaaaccaaacacctcgtaagtttacc

SEQ ID NO: 63525 - DNA, 1643 bp, Zea Mays
caggcgtagccgcgcagcccagtccgaggtgctggaggctattcagctgttttggcttggcttgtggccggtgagaggtggacacgacgacggtgacggtgaggtggagagcggagtggcggatcgtggctccgatccacaagggacggctccacacatcgggttcctgcctctgctcagcagccatgccggtgaggcggcggcagccgcgtcggccggagacgggtgcggcggagaggtacagggagatggggatcggggctgcgctgtcgcggccctgggactatcccacggcctgcggcgagcttgcagcgctgctgcgcctcggatacgcggacctccctaaggcagcccaggcgctcgttgcctccgacgtgctactcgcgtttcgcctccttcccgatgtgcagacaggatatgcagtaagcacagctaatgttcttctccaagcagtagaagttgctctaccaaagcaaaagaaggcgcaggctgtttcagagttcaagcactctattattgcacataaaaggcgtgcaagagtccaacaaatttcaggttcaccacacataccacaagatatacttgtccatatcttcagtttcctggacatgcattctttggtagcagcaggtcttgtctgctgaaggtcttggaattcagcggcaaatgacaacaaactgtggaagatgaattactcgattttctttggcctcagccatttgagttgcaacaacattcctgtatctggtgtgcaatacagcacgaattcggtgccaaattatccaaactttagctggaaggagtccttccacactaagtatgcagaatgcgcgtcatggaaatttgtatcaaatagagcactatgtgcgcattgcagatcagttatttggctgagcaacctcacatgtgcttctccacaccattgccctaagaatagacaccatgaagtaaaactacgacctctgttacctgatacaggcgtcgagctagggagcgtggtgccgagcgaggagagggacgccgccgcgccgggagctaggcgctggggagcagggcgcaacaggaataacgacgacgatggtgtggtctacagaggttcttggtttggaaacgaccgaccaatgctaatagtgctcaacggctgatgggagactagcatgatgtgatctgcaggagctaacaggtacatatgtgctactagtgctcaatagctgaaacgaccgtgcaaactactgtgatgtggtgtgtaggagcaggcgttgccaaatagatacagttgctgctactacatgcactgccagtgagtgatgactgatgaagcaatgctactgcagaaaccgatacagacaatcagacataaaagaccgtgctagcgaaaccagtgatcactctttattccgagtttctaatgagtgtttggtttgagaaatgatatagtccatcatcttctcactccttattttttttatttggtttgtataatggagtgagttaatctatcatcacctcatttctcatagttagttgtttagtactaatatgtggaatagagttatcccaccaaatttgaggaatggacctatgatacaccactttattttagatagagtgattcattaaaccaaacacctcgtaagtttacc

SEQ ID NO: 63526 - DNA, 415 bp, Zea Mays
agcccagtccgaggtgctggaggctattcagctgttttggcttggcttgtggccggtgagaggtggacacgacgacggtgacggtgaggtggagagcggagtggcggatcgtggctccgatccacaagggacggctccacacatcgggttcctgcctctgctcagcagccatgccggtgaggcggcggcagccgcgtcggccggagacgggtgcggcggagaggtacagggagatggggatcggggctgcgctgtcgcggccctgggactatcccacggcctgcggcgagcttgcagcgctgctgcgcctcggatacgcggacctccctaaggcagcccaggcgctcgttgcctccgacgtgctactcgcgtttcgcctccttcccgaaaaaaataaagcaggagcactgctatt

SEQ ID NO: 63527 - DNA, 4547 bp, Zea Mays
aagctccccacctctgcataaaagaaatagaatcatacatggtcactttcgggttgtaggggagtttcttttcaatcgccatcttgttgcgagtgcaccacatagaccaaagcagccccgcaattaagaaagtacatagggggttggataaatgaaatcctgggattgcccattcatcaaacaagaaccaaatcatgctgggagagtggtgccaaccaaaaatctgccttaagcagcaccagatatattttgacaatgcgcaatgaaagaaaatgtggtccacagtttcatgccccttgcacaaggagcagaattcgctccccttccaccctcttttcatgccccttgcacaaggagcaaaataccttacctgagtcgctccgatcacaagcgtcgggcgaccaccttcctcctccgcggaatcctgctgtatctggtgcctagcgctggtcgtcgagaggacgggcggggaggcgtccgccggcgagggactgagcggtggagacctcggtgggcaggcgcctacgagcccccggctgacacggtcgaagctgctgcggacggccgggctccaagcgcaccctcggtgtccgcgtcgccctccgttctcttctttgactcctgagtttcagtggacgttggcggcgtttgagacccggcggcggcgtatccgccggccactgcacatcccccgcggcgcgccactcctatggtgtttctgatcaaatggagcaagcctgcaatggcgcactgccggctcctccaccgctacgtctcgtccgccgccgccagagccgcagcgccgatccctgcccggcacgtgccccggtcgcccggcacgtccgcgcaaagcgcccgcatacgggagctcggccgcctcggccgcttgcacgaggccagggaggtgttcgactcgatgcccttccgcgacatcatcgcctggaactccatgatcttcgcctactgcaacaacgggatgcccgacgccgggaggtcgctcgctgacgcgatctccggcgggaacctgcgcacgggcaccatcctgctgtcgggctacgcgcgcgccgggcgcgtgcgcgacgctcggagggtgttcgatggaatgggcgtgcggaacaccgtggcgtggaatgccatggttacctgctacgtccagaacggggacatcaccctcgcgcgcaagctgttcgatgcaatgccgagcagggacgtctcgtcatggaacacgatgctcaccgggtactgccatagccaactgatggaggaggcaaggaatctgtttgaacgaatgccagaacgcaacggggtttcttggacagtgatgatttctgggtatgttctaattgagcagcatggcagggcttgggacatgtttcgcacaatgctatgtgaaggaatgacaccagagcaaccaaaccttgtttctgtgctttcagctgtacgccatcttggtaaacctggcattctagagagtatccacgttcttgtgcataagactggctttgagagggatgttgttgtcggcactgctatacttaatggctacactaaggatgtgaatatgcttgacagtgcagtaaagttctttgaaggtatggcagctaggaatgagtacacatggtcaaccataatcgctgcactatctcaggctggacgaatagatgatgcttttgctgtttaccaaagagatcctctaaagtctgttcctagtaggacttcaatgctcacaggccttgctcgatatggaaggatcgatgatgcaaagattctatttgaccagattcatgaacctaatgttgtatcctggaatgccatgattactgggtacatgcagaatgaaatggttgatgaagcagaagatctttttaacaggatgccctttagaaacacaatatcttgggctgggatgattgcagggtatgcgcgtaatgggaggagtgaacaagctttggtttcactccaagctctccataggaaaggaatgttacctagcctgtctagtttgactagtagcttctttgcttgttcaaacatcgaagctcttgagacaggaaagcaagttcattcacttgcagtaaaggctggctgtcagtttaatagctatgtttgtaatgcactgattactctgtacggtaagtacagaagcatagggtctgtgagacaaatctttgatcggatgacagttaaagatacagtgtcttataactcttttatgtccgcgcttgtacagaataatctgtttgatgaagcaagagatgtattcaacaatatgccgagtccagatgttgtatcttggactacgataatatctgcatgcgcacaagctgaccaggggaatgaggcagtagagattttcagaagtatgctgcatgagcgtgagctacccaatccacctatattaacgatacttcttggtctcagtggaaatcttggtgctccccaacttggacagcaaattcacacaatcgctattaaacttggaatggattcaggacttgtagtggctaatgctcttgtctcgatgtatttcaagtgtagttctgcagattcccttaaggtttttgattcaatggaggaacgggacatttttacatggaataccatcattaccggctatgctcaacatggccttggaagagaagctatcagaatgtatcaactaatggtatctgcaggagtgttgcctaatgaggtcacttttgtgggccttttacatgcatgtagccattctggtttggtagatgaagggcaccagttcttcaagtctatgagcagtgattatggattaactcctctgctagagcactatgcttgcatggtcgacctacttgggcgagctggtgatgtgcaaggagctgaacattttatttatgatatgcctattgagccagattcagtgatctggagtgcgcttctcggggcatgcaagattcacaagaatgtagaaattggtaggagagcagctgagaaacttttctctatcgagccatcaaatgctgggaattatgtcatgttgtcaaatatatactcctcccaagggatgtgggacgaagttgcaaaggtacggaaacttatgaaagaacgaggtgtgaacaaggatcctggttgtagctggatgcagataaagaacaaaatgcactcatttgtcactggagatgaggaacatgagcaaattcaaaacatatatgctaccctttgggagttatacactttgctaaaggccacagggtatgtacctgacacggactttgttctccatgacatagatgaagagcagaaagagagctcgcttctgtaccatagcgagaagcttgctgttgcttatggccttcttgttacacccaagggcatgcccatacagataatgaagaaccttagaatatgtggtgactgtcacactttcatcaagtttgtatcctctgtcaccaagagagaaattgatgttagggatgggaatcgattccatcatttcaggaatggaagctgttcatgcggtgatttttggtgataaactatcagagcatgagcaggtcttcttcatgctatcccctcaaacacagtgtctgatggagccgaccctatggagctgcatgtttatgattttaaaggacctggtgtggccttatcgatgtacaatagcgatgagtttattaggcctttcgctgaatcctccatggatatggctctttcaaaaaagttgtctctttatctcagcaccaagaatacaatcctcaagaagtatgacgacaggtcacaattggaccatggtgctccattttgcttactgtgatatgtgcagcgaagcgatggcgatggtgtttttgatgttcaggacagaatcaatggccgcaccttatgtgattgtgatagcatagttgtttgcgaggtaattacaaagctgcaggctgccgcctggaggcagtgggaggccctgggcgaccgaagggtgcatgatattctagtttcagatcaatgctgagtgcagggagaggcaatgtcttacctcttggatgttcatctctatattagtccatccataggtatgcagctttggaccgtcgatgttaaatcttgtctcaccagcgactacttctgatggtgtggctacctgagcagcttgtaccgattctgccttagcttgccgatcaacgctgtccaccaggacagagctgaaaacttgaaatggcaagaccagaaccctgaagttgaagtgttggcaagaaactcagataggtggatgaacgttgtgagccacctagctaagagcttgaagacgacagatggtaggtgttagaaatggaaggccatgcggctcccatgttatggaaaaaaaacccaatcatgaattttggaaagctcaagaacctttgttgaaggagataaggcggatccgttcaaggtcaacaatcgtgatgagaaattacagaaaagaggaagaatattgtcgatgaaaaaaagtgctcaaagtaggtgatgtaagtaaaggtgacagactctaaattttacactataagatttaaagacccatttatagttatttttaaaca

SEQ ID NO: 63528 - DNA, 4864 bp, Zea Mays
aagctccccacctctgcataaaagaaatagaatcatacatggtcactttcgggttgtaggggagtttcttttcaatcgccatcttgttgcgagtgcaccacatagaccaaagcagccccgcaattaagaaagtacatagggggttggataaatgaaatcctgggattgcccattcatcaaacaagaaccaaatcatgctgggagagtggtgccaaccaaaaatctgccttaagcagcaccagatatattttgacaatgcgcaatgaaagaaaatgtggtccacagtttcatgccccttgcacaaggagcagaattcgctccccttccaccctcttttcatgccccttgcacaaggagcaaaataccttacctgagtcgctccgatcacaagcgtcgggcgaccaccttcctcctccgcggaatcctgctgtatctggtgcctagcgctggtcgtcgagaggacgggcggggaggcgtccgccggcgagggactgagcggtggagacctcggtgggcaggcgcctacgagcccccggctgacacggtcgaagctgctgcggacggccgggctccaagcgcaccctcggtgtccgcgtcgccctccgttctcttctttgactcctgagtttcagtggacgttggcggcgtttgagacccggcggcggcgtatccgccggccactgcacatcccccgcggcgcgccactcctatggtgtttctgatcaaatggagcaagcctgcaatggcgcactgccggctcctccaccgctacgtctcgtccgccgccgccagagccgcagcgccgatccctgcccggcacgtgccccggtcgcccggcacgtccgcgcaaagcgcccgcatacgggagctcggccgcctcggccgcttgcacgaggccagggaggtgttcgactcgatgcccttccgcgacatcatcgcctggaactccatgatcttcgcctactgcaacaacgggatgcccgacgccgggaggtcgctcgctgacgcgatctccggcgggaacctgcgcacgggcaccatcctgctgtcgggctacgcgcgcgccgggcgcgtgcgcgacgctcggagggtgttcgatggaatgggcgtgcggaacaccgtggcgtggaatgccatggttacctgctacgtccagaacggggacatcaccctcgcgcgcaagctgttcgatgcaatgccgagcagggacgtctcgtcatggaacacgatgctcaccgggtactgccatagccaactgatggaggaggcaaggaatctgtttgaacgaatgccagaacgcaacggggtttcttggacagtgatgatttctgggtatgttctaattgagcagcatggcagggcttgggacatgtttcgcacaatgctatgtgaaggaatgacaccagagcaaccaaaccttgtttctgtgctttcagctgtacgccatcttggtaaacctggcattctagagagtatccacgttcttgtgcataagactggctttgagagggatgttgttgtcggcactgctatacttaatggctacactaaggatgtgaatatgcttgacagtgcagtaaagttctttgaaggtatggcagctaggaatgagtacacatggtcaaccataatcgctgcactatctcaggctggacgaatagatgatgcttttgctgtttaccaaagagatcctctaaagtctgttcctagtaggacttcaatgctcacaggccttgctcgatatggaaggatcgatgatgcaaagattctatttgaccagattcatgaacctaatgttgtatcctggaatgccatgattactgggtacatgcagaatgaaatggttgatgaagcagaagatctttttaacaggatgccctttagaaacacaatatcttgggctgggatgattgcagggtatgcgcgtaatgggaggagtgaacaagctttggtttcactccaagctctccataggaaaggaatgttacctagcctgtctagtttgactagtagcttctttgcttgttcaaacatcgaagctcttgagacaggaaagcaagttcattcacttgcagtaaaggctggctgtcagtttaatagctatgtttgtaatgcactgattactctgtacggtaagtacagaagcatagggtctgtgagacaaatctttgatcggatgacagttaaagatacagtgtcttataactcttttatgtccgcgcttgtacagaataatctgtttgatgaagcaagagatgtattcaacaatatgccgagtccagatgttgtatcttggactacgataatatctgcatgcgcacaagctgaccaggggaatgaggcagtagagattttcagaagtatgctgcatgagcgtgagctacccaatccacctatattaacgatacttcttggtctcagtggaaatcttggtgctccccaacttggacagcaaattcacacaatcgctattaaacttggaatggattcaggacttgtagtggctaatgctcttgtctcgatgtatttcaagtgtagttctgcagattcccttaaggtttttgattcaatggaggaacgggacatttttacatggaataccatcattaccggctatgctcaacatggccttggaagagaagctatcagaatgtatcaactaatggtatctgcaggagtgttgcctaatgaggtcacttttgtgggccttttacatgcatgtagccattctggtttggtagatgaagggcaccagttcttcaagtctatgagcagtgattatggattaactcctctgctagagcactatgcttgcatggtcgacctacttgggcgagctggtgatgtgcaaggagctgaacattttatttatgatatgcctattgagccagattcagtgatctggagtgcgcttctcggggcatgcaagattcacaagaatgtagaaattggtaggagagcagctgagaaacttttctctatcgagccatcaaatgctgggaattatgtcatgttgtcaaatatatactcctcccaagggatgtgggacgaagttgcaaaggtacggaaacttatgaaagaacgaggtgtgaacaaggatcctggttgtagctggatgcagataaagaacaaaatgcactcatttgtcactggagatgaggaacatgagcaaattcaaaacatatatgctaccctttgggagttatacactttgctaaaggccacagggtatgtacctgacacggactttgttctccatgacatagatgaagagcagaaagagagctcgcttctgtaccatagcgagaagcttgctgttgcttatggccttcttgttacacccaagggcatgcccatacagataatgaagaaccttagaatatgtggtgactgtcacactttcatcaagtttgtatcctctgtcaccaagagagaaattgatgttagggatgggaatcgattccatcatttcaggaatggaagctgttcatgcggtgatttttggtgataaactatcagagcatgagcaggtcttcttcatgctatcccctcaaacacagaatcccactgaaagagagatggagttgaatgagaaatctgaaaagaatacgcaagaggtagatgagaagttccaaaacacaaacttgtatctcaagaacttagagatggagcttcgggagttacaagtgcttcataaggaatcgaatagatctgaaagttttactgtgccaacacatgcacacactggtggtgcctgcatctagcttttcagatcaaagcctgacaggtatcatagggcaaagtgaagaagaaacagaagagttgagcaagatcacactagagaataaggatattcagcttgatatcgatataagagtgtctgatggagccgaccctatggagctgcatgtttatgattttaaaggacctggtgtggccttatcgatgtacaatagcgatgagtttattaggcctttcgctgaatcctccatggatatggctctttcaaaaaagttgtctctttatctcagcaccaagaatacaatcctcaagaagtatgacgacaggtcacaattggaccatggtgctccattttgcttactgtgatatgtgcagcgaagcgatggcgatggtgtttttgatgttcaggacagaatcaatggccgcaccttatgtgattgtgatagcatagttgtttgcgaggtaattacaaagctgcaggctgccgcctggaggcagtgggaggccctgggcgaccgaagggtgcatgatattctagtttcagatcaatgctgagtgcagggagaggcaatgtcttacctcttggatgttcatctctatattagtccatccataggtatgcagctttggaccgtcgatgttaaatcttgtctcaccagcgactacttctgatggtgtggctacctgagcagcttgtaccgattctgccttagcttgccgatcaacgctgtccaccaggacagagctgaaaacttgaaatggcaagaccagaaccctgaagttgaagtgttggcaagaaactcagataggtggatgaacgttgtgagccacctagctaagagcttgaagacgacagatggtaggtgttagaaatggaaggccatgcggctcccatgttatggaaaaaaaacccaatcatgaattttggaaagctcaagaacctttgttgaaggagataaggcggatccgttcaaggtcaacaatcgtgatgagaaattacagaaaagaggaagaatattgtcgatgaaaaaaagtgctcaaagtaggtgatgtaagtaaaggtgacagactctaaattttacactataagatttaaagacccatttatagttatttttaaaca

SEQ ID NO: 63529 - DNA, 5218 bp, Zea Mays
aagctccccacctctgcataaaagaaatagaatcatacatggtcactttcgggttgtaggggagtttcttttcaatcgccatcttgttgcgagtgcaccacatagaccaaagcagccccgcaattaagaaagtacatagggggttggataaatgaaatcctgggattgcccattcatcaaacaagaaccaaatcatgctgggagagtggtgccaaccaaaaatctgccttaagcagcaccagatatattttgacaatgcgcaatgaaagaaaatgtggtccacagtttcatgccccttgcacaaggagcagaattcgctccccttccaccctcttttcatgccccttgcacaaggagcaaaataccttacctgagtcgctccgatcacaagcgtcgggcgaccaccttcctcctccgcggaatcctgctgtatctggtgcctagcgctggtcgtcgagaggacgggcggggaggcgtccgccggcgagggactgagcggtggagacctcggtgggcaggcgcctacgagcccccggctgacacggtcgaagctgctgcggacggccgggctccaagcgcaccctcggtgtccgcgtcgccctccgttctcttctttgactcctgagtttcagtggacgttggcggcgtttgagacccggcggcggcgtatccgccggccactgcacatcccccgcggcgcgccactcctatggtgtttctgatcaaatggagcaagcctgcaatggcgcactgccggctcctccaccgctacgtctcgtccgccgccgccagagccgcagcgccgatccctgcccggcacgtgccccggtcgcccggcacgtccgcgcaaagcgcccgcatacgggagctcggccgcctcggccgcttgcacgaggccagggaggtgttcgactcgatgcccttccgcgacatcatcgcctggaactccatgatcttcgcctactgcaacaacgggatgcccgacgccgggaggtcgctcgctgacgcgatctccggcgggaacctgcgcacgggcaccatcctgctgtcgggctacgcgcgcgccgggcgcgtgcgcgacgctcggagggtgttcgatggaatgggcgtgcggaacaccgtggcgtggaatgccatggttacctgctacgtccagaacggggacatcaccctcgcgcgcaagctgttcgatgcaatgccgagcagggacgtctcgtcatggaacacgatgctcaccgggtactgccatagccaactgatggaggaggcaaggaatctgtttgaacgaatgccagaacgcaacggggtttcttggacagtgatgatttctgggtatgttctaattgagcagcatggcagggcttgggacatgtttcgcacaatgctatgtgaaggaatgacaccagagcaaccaaaccttgtttctgtgctttcagctgtacgccatcttggtaaacctggcattctagagagtatccacgttcttgtgcataagactggctttgagagggatgttgttgtcggcactgctatacttaatggctacactaaggatgtgaatatgcttgacagtgcagtaaagttctttgaaggtatggcagctaggaatgagtacacatggtcaaccataatcgctgcactatctcaggctggacgaatagatgatgcttttgctgtttaccaaagagatcctctaaagtctgttcctagtaggacttcaatgctcacaggccttgctcgatatggaaggatcgatgatgcaaagattctatttgaccagattcatgaacctaatgttgtatcctggaatgccatgattactgggtacatgcagaatgaaatggttgatgaagcagaagatctttttaacaggatgccctttagaaacacaatatcttgggctgggatgattgcagggtatgcgcgtaatgggaggagtgaacaagctttggtttcactccaagctctccataggaaaggaatgttacctagcctgtctagtttgactagtagcttctttgcttgttcaaacatcgaagctcttgagacaggaaagcaagttcattcacttgcagtaaaggctggctgtcagtttaatagctatgtttgtaatgcactgattactctgtacggtaagtacagaagcatagggtctgtgagacaaatctttgatcggatgacagttaaagatacagtgtcttataactcttttatgtccgcgcttgtacagaataatctgtttgatgaagcaagagatgtattcaacaatatgccgagtccagatgttgtatcttggactacgataatatctgcatgcgcacaagctgaccaggggaatgaggcagtagagattttcagaagtatgctgcatgagcgtgagctacccaatccacctatattaacgatacttcttggtctcagtggaaatcttggtgctccccaacttggacagcaaattcacacaatcgctattaaacttggaatggattcaggacttgtagtggctaatgctcttgtctcgatgtatttcaagtgtagttctgcagattcccttaaggtttttgattcaatggaggaacgggacatttttacatggaataccatcattaccggctatgctcaacatggccttggaagagaagctatcagaatgtatcaactaatggtatctgcaggagtgttgcctaatgaggtcacttttgtgggccttttacatgcatgtagccattctggtttggtagatgaagggcaccagttcttcaagtctatgagcagtgattatggattaactcctctgctagagcactatgcttgcatggtcgacctacttgggcgagctggtgatgtgcaaggagctgaacattttatttatgatatgcctattgagccagattcagtgatctggagtgcgcttctcggggcatgcaagattcacaagaatgtagaaattggtaggagagcagctgagaaacttttctctatcgagccatcaaatgctgggaattatgtcatgttgtcaaatatatactcctcccaagggatgtgggacgaagttgcaaaggtacggaaacttatgaaagaacgaggtgtgaacaaggatcctggttgtagctggatgcagataaagaacaaaatgcactcatttgtcactggagatgaggaacatgagcaaattcaaaacatatatgctaccctttgggagttatacactttgctaaaggccacagggtatgtacctgacacggactttgttctccatgacatagatgaagagcagaaagagagctcgcttctgtaccatagcgagaagcttgctgttgcttatggccttcttgttacacccaagggcatgcccatacagataatgaagaaccttagaatatgtggtgactgtcacactttcatcaagtttgtatcctctgtcaccaagagagaaattgatgttagggatgggaatcgattccatcatttcaggaatggaagctgttcatgcgagttcttaaaacttgacccagtttggagcgccgtccgcgctacacgggtacgacacaagtcacttgctgacgtgtgcatgttctatgcattcattcgctacgaaaagctgctcgaggaagacacctctcgccatgttgtcgcactgctcgagggcatgggcgcggccatccaacgaaggacacgcttgggccccgcctccactctcctctccttcttgtcctcattggcttgctgccctacccttctcctcttcccaccaccctccctctcatccacgccctcctgccctcccacgctagatgctcgacatccccatccgcgcgctcgaggcagagtccagggacgccaagatgagcccgaccgcgaccgcctagccgtcagctccaaagaagaagccagggcaccggtggacgtcagggttccgtcgtggtggcctgctagatccagattcaacaagaaagaagatgatgcacttctgtgcctgaacactgaacggacagctaccatagggcaaagtgaagaagaaacagaagagttgagcaagatcacactagagaataaggatattcagcttgatatcgatataagagaagaatctcggagctcttcacaacaagtgaacttttacacagaaagtaccagctccagtgaggctgcatgtttatgagatcgagatccttttttttgctctgttgatccataagattgagaatttttttttggcttgtatacgaggtgtctgatggagccgaccctatggagctgcatgtttatgattttaaaggacctggtgtggccttatcgatgtacaatagcgatgagtttattaggcctttcgctgaatcctccatggatatggctctttcaaaaaagttgtctctttatctcagcaccaagaatacaatcctcaagaagtatgacgacaggtcacaattggaccatggtgctccattttgcttactgtgatatgtgcagcgaagcgatggcgatggtgtttttgatgttcaggacagaatcaatggccgcaccttatgtgattgtgatagcatagttgtttgcgaggtaattacaaagctgcaggctgccgcctggaggcagtgggaggccctgggcgaccgaagggtgcatgatattctagtttcagatcaatgctgagtgcagggagaggcaatgtcttacctcttggatgttcatctctatattagtccatccataggtatgcagctttggaccgtcgatgttaaatcttgtctcaccagcgactacttctgatggtgtggctacctgagcagcttgtaccgattctgccttagcttgccgatcaacgctgtccaccaggacagagctgaaaacttgaaatggcaagaccagaaccctgaagttgaagtgttggcaagaaactcagataggtggatgaacgttgtgagccacctagctaagagcttgaagacgacagatggtaggtgttagaaatggaaggccatgcggctcccatgttatggaaaaaaaacccaatcatgaattttggaaagctcaagaacctttgttgaaggagataaggcggatccgttcaaggtcaacaatcgtgatgagaaattacagaaaagaggaagaatattgtcgatgaaaaaaagtgctcaaagtaggtgatgtaagtaaaggtgacagactctaaattttacactataagatttaaagacccatttatagttatttttaaaca

SEQ ID NO: 63530 - DNA, 4903 bp, Zea Mays
aagctccccacctctgcataaaagaaatagaatcatacatggtcactttcgggttgtaggggagtttcttttcaatcgccatcttgttgcgagtgcaccacatagaccaaagcagccccgcaattaagaaagtacatagggggttggataaatgaaatcctgggattgcccattcatcaaacaagaaccaaatcatgctgggagagtggtgccaaccaaaaatctgccttaagcagcaccagatatattttgacaatgcgcaatgaaagaaaatgtggtccacagtttcatgccccttgcacaaggagcagaattcgctccccttccaccctcttttcatgccccttgcacaaggagcaaaataccttacctgagtcgctccgatcacaagcgtcgggcgaccaccttcctcctccgcggaatcctgctgtatctggtgcctagcgctggtcgtcgagaggacgggcggggaggcgtccgccggcgagggactgagcggtggagacctcggtgggcaggcgcctacgagcccccggctgacacggtcgaagctgctgcggacggccgggctccaagcgcaccctcggtgtccgcgtcgccctccgttctcttctttgactcctgagtttcagtggacgttggcggcgtttgagacccggcggcggcgtatccgccggccactgcacatcccccgcggcgcgccactcctatggtgtttctgatcaaatggagcaagcctgcaatggcgcactgccggctcctccaccgctacgtctcgtccgccgccgccagagccgcagcgccgatccctgcccggcacgtgccccggtcgcccggcacgtccgcgcaaagcgcccgcatacgggagctcggccgcctcggccgcttgcacgaggccagggaggtgttcgactcgatgcccttccgcgacatcatcgcctggaactccatgatcttcgcctactgcaacaacgggatgcccgacgccgggaggtcgctcgctgacgcgatctccggcgggaacctgcgcacgggcaccatcctgctgtcgggctacgcgcgcgccgggcgcgtgcgcgacgctcggagggtgttcgatggaatgggcgtgcggaacaccgtggcgtggaatgccatggttacctgctacgtccagaacggggacatcaccctcgcgcgcaagctgttcgatgcaatgccgagcagggacgtctcgtcatggaacacgatgctcaccgggtactgccatagccaactgatggaggaggcaaggaatctgtttgaacgaatgccagaacgcaacggggtttcttggacagtgatgatttctgggtatgttctaattgagcagcatggcagggcttgggacatgtttcgcacaatgctatgtgaaggaatgacaccagagcaaccaaaccttgtttctgtgctttcagctgtacgccatcttggtaaacctggcattctagagagtatccacgttcttgtgcataagactggctttgagagggatgttgttgtcggcactgctatacttaatggctacactaaggatgtgaatatgcttgacagtgcagtaaagttctttgaaggtatggcagctaggaatgagtacacatggtcaaccataatcgctgcactatctcaggctggacgaatagatgatgcttttgctgtttaccaaagagatcctctaaagtctgttcctagtaggacttcaatgctcacaggccttgctcgatatggaaggatcgatgatgcaaagattctatttgaccagattcatgaacctaatgttgtatcctggaatgccatgattactgggtacatgcagaatgaaatggttgatgaagcagaagatctttttaacaggatgccctttagaaacacaatatcttgggctgggatgattgcagggtatgcgcgtaatgggaggagtgaacaagctttggtttcactccaagctctccataggaaaggaatgttacctagcctgtctagtttgactagtagcttctttgcttgttcaaacatcgaagctcttgagacaggaaagcaagttcattcacttgcagtaaaggctggctgtcagtttaatagctatgtttgtaatgcactgattactctgtacggtaagtacagaagcatagggtctgtgagacaaatctttgatcggatgacagttaaagatacagtgtcttataactcttttatgtccgcgcttgtacagaataatctgtttgatgaagcaagagatgtattcaacaatatgccgagtccagatgttgtatcttggactacgataatatctgcatgcgcacaagctgaccaggggaatgaggcagtagagattttcagaagtatgctgcatgagcgtgagctacccaatccacctatattaacgatacttcttggtctcagtggaaatcttggtgctccccaacttggacagcaaattcacacaatcgctattaaacttggaatggattcaggacttgtagtggctaatgctcttgtctcgatgtatttcaagtgtagttctgcagattcccttaaggtttttgattcaatggaggaacgggacatttttacatggaataccatcattaccggctatgctcaacatggccttggaagagaagctatcagaatgtatcaactaatggtatctgcaggagtgttgcctaatgaggtcacttttgtgggccttttacatgcatgtagccattctggtttggtagatgaagggcaccagttcttcaagtctatgagcagtgattatggattaactcctctgctagagcactatgcttgcatggtcgacctacttgggcgagctggtgatgtgcaaggagctgaacattttatttatgatatgcctattgagccagattcagtgatctggagtgcgcttctcggggcatgcaagattcacaagaatgtagaaattggtaggagagcagctgagaaacttttctctatcgagccatcaaatgctgggaattatgtcatgttgtcaaatatatactcctcccaagggatgtgggacgaagttgcaaaggtacggaaacttatgaaagaacgaggtgtgaacaaggatcctggttgtagctggatgcagataaagaacaaaatgcactcatttgtcactggagatgaggaacatgagcaaattcaaaacatatatgctaccctttgggagttatacactttgctaaaggccacagggtatgtacctgacacggactttgttctccatgacatagatgaagagcagaaagagagctcgcttctgtaccatagcgagaagcttgctgttgcttatggccttcttgttacacccaagggcatgcccatacagataatgaagaaccttagaatatgtggtgactgtcacactttcatcaagtttgtatcctctgtcaccaagagagaaattgatgttagggatgggaatcgattccatcatttcaggaatggaagctgttcatgcggtgatttttggtgataaactatcagagcatgagcaggtcttcttcatgctatcccctcaaacacagaatcccactgaaagagagatggagttgaatgagaaatctgaaaagaatacgcaagaggtagatgagaagttccaaaacacaaacttgtatctcaagaacttagagatggagcttcgggagttacaagtgcttcataaggaatcgaatagatctgaaagttttactgtgccaacacatgcacacactggtggtgcctgcatctagcttttcagatcaaagcctgacagaagatgatgcacttctgtgcctgaacactgaacggacagctaccatagggcaaagtgaagaagaaacagaagagttgagcaagatcacactagagaataaggatattcagcttgatatcgatataagagtgtctgatggagccgaccctatggagctgcatgtttatgattttaaaggacctggtgtggccttatcgatgtacaatagcgatgagtttattaggcctttcgctgaatcctccatggatatggctctttcaaaaaagttgtctctttatctcagcaccaagaatacaatcctcaagaagtatgacgacaggtcacaattggaccatggtgctccattttgcttactgtgatatgtgcagcgaagcgatggcgatggtgtttttgatgttcaggacagaatcaatggccgcaccttatgtgattgtgatagcatagttgtttgcgaggtaattacaaagctgcaggctgccgcctggaggcagtgggaggccctgggcgaccgaagggtgcatgatattctagtttcagatcaatgctgagtgcagggagaggcaatgtcttacctcttggatgttcatctctatattagtccatccataggtatgcagctttggaccgtcgatgttaaatcttgtctcaccagcgactacttctgatggtgtggctacctgagcagcttgtaccgattctgccttagcttgccgatcaacgctgtccaccaggacagagctgaaaacttgaaatggcaagaccagaaccctgaagttgaagtgttggcaagaaactcagataggtggatgaacgttgtgagccacctagctaagagcttgaagacgacagatggtaggtgttagaaatggaaggccatgcggctcccatgttatggaaaaaaaacccaatcatgaattttggaaagctcaagaacctttgttgaaggagataaggcggatccgttcaaggtcaacaatcgtgatgagaaattacagaaaagaggaagaatattgtcgatgaaaaaaagtgctcaaagtaggtgatgtaagtaaaggtgacagactctaaattttacactataagatttaaagacccatttatagttatttttaaaca

SEQ ID NO: 63531 - DNA, 4746 bp, Zea Mays
aagctccccacctctgcataaaagaaatagaatcatacatggtcactttcgggttgtaggggagtttcttttcaatcgccatcttgttgcgagtgcaccacatagaccaaagcagccccgcaattaagaaagtacatagggggttggataaatgaaatcctgggattgcccattcatcaaacaagaaccaaatcatgctgggagagtggtgccaaccaaaaatctgccttaagcagcaccagatatattttgacaatgcgcaatgaaagaaaatgtggtccacagtttcatgccccttgcacaaggagcagaattcgctccccttccaccctcttttcatgccccttgcacaaggagcaaaataccttacctgagtcgctccgatcacaagcgtcgggcgaccaccttcctcctccgcggaatcctgctgtatctggtgcctagcgctggtcgtcgagaggacgggcggggaggcgtccgccggcgagggactgagcggtggagacctcggtgggcaggcgcctacgagcccccggctgacacggtcgaagctgctgcggacggccgggctccaagcgcaccctcggtgtccgcgtcgccctccgttctcttctttgactcctgagtttcagtggacgttggcggcgtttgagacccggcggcggcgtatccgccggccactgcacatcccccgcggcgcgccactcctatggtgtttctgatcaaatggagcaagcctgcaatggcgcactgccggctcctccaccgctacgtctcgtccgccgccgccagagccgcagcgccgatccctgcccggcacgtgccccggtcgcccggcacgtccgcgcaaagcgcccgcatacgggagctcggccgcctcggccgcttgcacgaggccagggaggtgttcgactcgatgcccttccgcgacatcatcgcctggaactccatgatcttcgcctactgcaacaacgggatgcccgacgccgggaggtcgctcgctgacgcgatctccggcgggaacctgcgcacgggcaccatcctgctgtcgggctacgcgcgcgccgggcgcgtgcgcgacgctcggagggtgttcgatggaatgggcgtgcggaacaccgtggcgtggaatgccatggttacctgctacgtccagaacggggacatcaccctcgcgcgcaagctgttcgatgcaatgccgagcagggacgtctcgtcatggaacacgatgctcaccgggtactgccatagccaactgatggaggaggcaaggaatctgtttgaacgaatgccagaacgcaacggggtttcttggacagtgatgatttctgggtatgttctaattgagcagcatggcagggcttgggacatgtttcgcacaatgctatgtgaaggaatgacaccagagcaaccaaaccttgtttctgtgctttcagctgtacgccatcttggtaaacctggcattctagagagtatccacgttcttgtgcataagactggctttgagagggatgttgttgtcggcactgctatacttaatggctacactaaggatgtgaatatgcttgacagtgcagtaaagttctttgaaggtatggcagctaggaatgagtacacatggtcaaccataatcgctgcactatctcaggctggacgaatagatgatgcttttgctgtttaccaaagagatcctctaaagtctgttcctagtaggacttcaatgctcacaggccttgctcgatatggaaggatcgatgatgcaaagattctatttgaccagattcatgaacctaatgttgtatcctggaatgccatgattactgggtacatgcagaatgaaatggttgatgaagcagaagatctttttaacaggatgccctttagaaacacaatatcttgggctgggatgattgcagggtatgcgcgtaatgggaggagtgaacaagctttggtttcactccaagctctccataggaaaggaatgttacctagcctgtctagtttgactagtagcttctttgcttgttcaaacatcgaagctcttgagacaggaaagcaagttcattcacttgcagtaaaggctggctgtcagtttaatagctatgtttgtaatgcactgattactctgtacggtaagtacagaagcatagggtctgtgagacaaatctttgatcggatgacagttaaagatacagtgtcttataactcttttatgtccgcgcttgtacagaataatctgtttgatgaagcaagagatgtattcaacaatatgccgagtccagatgttgtatcttggactacgataatatctgcatgcgcacaagctgaccaggggaatgaggcagtagagattttcagaagtatgctgcatgagcgtgagctacccaatccacctatattaacgatacttcttggtctcagtggaaatcttggtgctccccaacttggacagcaaattcacacaatcgctattaaacttggaatggattcaggacttgtagtggctaatgctcttgtctcgatgtatttcaagtgtagttctgcagattcccttaaggtttttgattcaatggaggaacgggacatttttacatggaataccatcattaccggctatgctcaacatggccttggaagagaagctatcagaatgtatcaactaatggtatctgcaggagtgttgcctaatgaggtcacttttgtgggccttttacatgcatgtagccattctggtttggtagatgaagggcaccagttcttcaagtctatgagcagtgattatggattaactcctctgctagagcactatgcttgcatggtcgacctacttgggcgagctggtgatgtgcaaggagctgaacattttatttatgatatgcctattgagccagattcagtgatctggagtgcgcttctcggggcatgcaagattcacaagaatgtagaaattggtaggagagcagctgagaaacttttctctatcgagccatcaaatgctgggaattatgtcatgttgtcaaatatatactcctcccaagggatgtgggacgaagttgcaaaggtacggaaacttatgaaagaacgaggtgtgaacaaggatcctggttgtagctggatgcagataaagaacaaaatgcactcatttgtcactggagatgaggaacatgagcaaattcaaaacatatatgctaccctttgggagttatacactttgctaaaggccacagggtatgtacctgacacggactttgttctccatgacatagatgaagagcagaaagagagctcgcttctgtaccatagcgagaagcttgctgttgcttatggccttcttgttacacccaagggcatgcccatacagataatgaagaaccttagaatatgtggtgactgtcacactttcatcaagtttgtatcctctgtcaccaagagagaaattgatgttagggatgggaatcgattccatcatttcaggaatggaagctgttcatgcggtgatttttggtgataaactatcagagcatgagcaggtcttcttcatgctatcccctcaaacacagagttacaagtgcttcataaggaatcgaatagatctgaaagttttactgtgccaacacatgcacacactggtggtgcctgcatctagcttttcagatcaaagcctgacaggtatcatagggcaaagtgaagaagaaacagaagagttgagcaagatcacactagagaataaggatattcagcttgatatcgatataagagtgtctgatggagccgaccctatggagctgcatgtttatgattttaaaggacctggtgtggccttatcgatgtacaatagcgatgagtttattaggcctttcgctgaatcctccatggatatggctctttcaaaaaagttgtctctttatctcagcaccaagaatacaatcctcaagaagtatgacgacaggtcacaattggaccatggtgctccattttgcttactgtgatatgtgcagcgaagcgatggcgatggtgtttttgatgttcaggacagaatcaatggccgcaccttatgtgattgtgatagcatagttgtttgcgaggtaattacaaagctgcaggctgccgcctggaggcagtgggaggccctgggcgaccgaagggtgcatgatattctagtttcagatcaatgctgagtgcagggagaggcaatgtcttacctcttggatgttcatctctatattagtccatccataggtatgcagctttggaccgtcgatgttaaatcttgtctcaccagcgactacttctgatggtgtggctacctgagcagcttgtaccgattctgccttagcttgccgatcaacgctgtccaccaggacagagctgaaaacttgaaatggcaagaccagaaccctgaagttgaagtgttggcaagaaactcagataggtggatgaacgttgtgagccacctagctaagagcttgaagacgacagatggtaggtgttagaaatggaaggccatgcggctcccatgttatggaaaaaaaacccaatcatgaattttggaaagctcaagaacctttgttgaaggagataaggcggatccgttcaaggtcaacaatcgtgatgagaaattacagaaaagaggaagaatattgtcgatgaaaaaaagtgctcaaagtaggtgatgtaagtaaaggtgacagactctaaattttacactataagatttaaagacccatttatagttatttttaaaca

SEQ ID NO: 63532 - DNA, 4785 bp, Zea Mays
aagctccccacctctgcataaaagaaatagaatcatacatggtcactttcgggttgtaggggagtttcttttcaatcgccatcttgttgcgagtgcaccacatagaccaaagcagccccgcaattaagaaagtacatagggggttggataaatgaaatcctgggattgcccattcatcaaacaagaaccaaatcatgctgggagagtggtgccaaccaaaaatctgccttaagcagcaccagatatattttgacaatgcgcaatgaaagaaaatgtggtccacagtttcatgccccttgcacaaggagcagaattcgctccccttccaccctcttttcatgccccttgcacaaggagcaaaataccttacctgagtcgctccgatcacaagcgtcgggcgaccaccttcctcctccgcggaatcctgctgtatctggtgcctagcgctggtcgtcgagaggacgggcggggaggcgtccgccggcgagggactgagcggtggagacctcggtgggcaggcgcctacgagcccccggctgacacggtcgaagctgctgcggacggccgggctccaagcgcaccctcggtgtccgcgtcgccctccgttctcttctttgactcctgagtttcagtggacgttggcggcgtttgagacccggcggcggcgtatccgccggccactgcacatcccccgcggcgcgccactcctatggtgtttctgatcaaatggagcaagcctgcaatggcgcactgccggctcctccaccgctacgtctcgtccgccgccgccagagccgcagcgccgatccctgcccggcacgtgccccggtcgcccggcacgtccgcgcaaagcgcccgcatacgggagctcggccgcctcggccgcttgcacgaggccagggaggtgttcgactcgatgcccttccgcgacatcatcgcctggaactccatgatcttcgcctactgcaacaacgggatgcccgacgccgggaggtcgctcgctgacgcgatctccggcgggaacctgcgcacgggcaccatcctgctgtcgggctacgcgcgcgccgggcgcgtgcgcgacgctcggagggtgttcgatggaatgggcgtgcggaacaccgtggcgtggaatgccatggttacctgctacgtccagaacggggacatcaccctcgcgcgcaagctgttcgatgcaatgccgagcagggacgtctcgtcatggaacacgatgctcaccgggtactgccatagccaactgatggaggaggcaaggaatctgtttgaacgaatgccagaacgcaacggggtttcttggacagtgatgatttctgggtatgttctaattgagcagcatggcagggcttgggacatgtttcgcacaatgctatgtgaaggaatgacaccagagcaaccaaaccttgtttctgtgctttcagctgtacgccatcttggtaaacctggcattctagagagtatccacgttcttgtgcataagactggctttgagagggatgttgttgtcggcactgctatacttaatggctacactaaggatgtgaatatgcttgacagtgcagtaaagttctttgaaggtatggcagctaggaatgagtacacatggtcaaccataatcgctgcactatctcaggctggacgaatagatgatgcttttgctgtttaccaaagagatcctctaaagtctgttcctagtaggacttcaatgctcacaggccttgctcgatatggaaggatcgatgatgcaaagattctatttgaccagattcatgaacctaatgttgtatcctggaatgccatgattactgggtacatgcagaatgaaatggttgatgaagcagaagatctttttaacaggatgccctttagaaacacaatatcttgggctgggatgattgcagggtatgcgcgtaatgggaggagtgaacaagctttggtttcactccaagctctccataggaaaggaatgttacctagcctgtctagtttgactagtagcttctttgcttgttcaaacatcgaagctcttgagacaggaaagcaagttcattcacttgcagtaaaggctggctgtcagtttaatagctatgtttgtaatgcactgattactctgtacggtaagtacagaagcatagggtctgtgagacaaatctttgatcggatgacagttaaagatacagtgtcttataactcttttatgtccgcgcttgtacagaataatctgtttgatgaagcaagagatgtattcaacaatatgccgagtccagatgttgtatcttggactacgataatatctgcatgcgcacaagctgaccaggggaatgaggcagtagagattttcagaagtatgctgcatgagcgtgagctacccaatccacctatattaacgatacttcttggtctcagtggaaatcttggtgctccccaacttggacagcaaattcacacaatcgctattaaacttggaatggattcaggacttgtagtggctaatgctcttgtctcgatgtatttcaagtgtagttctgcagattcccttaaggtttttgattcaatggaggaacgggacatttttacatggaataccatcattaccggctatgctcaacatggccttggaagagaagctatcagaatgtatcaactaatggtatctgcaggagtgttgcctaatgaggtcacttttgtgggccttttacatgcatgtagccattctggtttggtagatgaagggcaccagttcttcaagtctatgagcagtgattatggattaactcctctgctagagcactatgcttgcatggtcgacctacttgggcgagctggtgatgtgcaaggagctgaacattttatttatgatatgcctattgagccagattcagtgatctggagtgcgcttctcggggcatgcaagattcacaagaatgtagaaattggtaggagagcagctgagaaacttttctctatcgagccatcaaatgctgggaattatgtcatgttgtcaaatatatactcctcccaagggatgtgggacgaagttgcaaaggtacggaaacttatgaaagaacgaggtgtgaacaaggatcctggttgtagctggatgcagataaagaacaaaatgcactcatttgtcactggagatgaggaacatgagcaaattcaaaacatatatgctaccctttgggagttatacactttgctaaaggccacagggtatgtacctgacacggactttgttctccatgacatagatgaagagcagaaagagagctcgcttctgtaccatagcgagaagcttgctgttgcttatggccttcttgttacacccaagggcatgcccatacagataatgaagaaccttagaatatgtggtgactgtcacactttcatcaagtttgtatcctctgtcaccaagagagaaattgatgttagggatgggaatcgattccatcatttcaggaatggaagctgttcatgcggtgatttttggtgataaactatcagagcatgagcaggtcttcttcatgctatcccctcaaacacagagttacaagtgcttcataaggaatcgaatagatctgaaagttttactgtgccaacacatgcacacactggtggtgcctgcatctagcttttcagatcaaagcctgacagaagatgatgcacttctgtgcctgaacactgaacggacagctaccatagggcaaagtgaagaagaaacagaagagttgagcaagatcacactagagaataaggatattcagcttgatatcgatataagagtgtctgatggagccgaccctatggagctgcatgtttatgattttaaaggacctggtgtggccttatcgatgtacaatagcgatgagtttattaggcctttcgctgaatcctccatggatatggctctttcaaaaaagttgtctctttatctcagcaccaagaatacaatcctcaagaagtatgacgacaggtcacaattggaccatggtgctccattttgcttactgtgatatgtgcagcgaagcgatggcgatggtgtttttgatgttcaggacagaatcaatggccgcaccttatgtgattgtgatagcatagttgtttgcgaggtaattacaaagctgcaggctgccgcctggaggcagtgggaggccctgggcgaccgaagggtgcatgatattctagtttcagatcaatgctgagtgcagggagaggcaatgtcttacctcttggatgttcatctctatattagtccatccataggtatgcagctttggaccgtcgatgttaaatcttgtctcaccagcgactacttctgatggtgtggctacctgagcagcttgtaccgattctgccttagcttgccgatcaacgctgtccaccaggacagagctgaaaacttgaaatggcaagaccagaaccctgaagttgaagtgttggcaagaaactcagataggtggatgaacgttgtgagccacctagctaagagcttgaagacgacagatggtaggtgttagaaatggaaggccatgcggctcccatgttatggaaaaaaaacccaatcatgaattttggaaagctcaagaacctttgttgaaggagataaggcggatccgttcaaggtcaacaatcgtgatgagaaattacagaaaagaggaagaatattgtcgatgaaaaaaagtgctcaaagtaggtgatgtaagtaaaggtgacagactctaaattttacactataagatttaaagacccatttatagttatttttaaaca

SEQ ID NO: 63533 - DNA, 4782 bp, Zea Mays
aagctccccacctctgcataaaagaaatagaatcatacatggtcactttcgggttgtaggggagtttcttttcaatcgccatcttgttgcgagtgcaccacatagaccaaagcagccccgcaattaagaaagtacatagggggttggataaatgaaatcctgggattgcccattcatcaaacaagaaccaaatcatgctgggagagtggtgccaaccaaaaatctgccttaagcagcaccagatatattttgacaatgcgcaatgaaagaaaatgtggtccacagtttcatgccccttgcacaaggagcagaattcgctccccttccaccctcttttcatgccccttgcacaaggagcaaaataccttacctgagtcgctccgatcacaagcgtcgggcgaccaccttcctcctccgcggaatcctgctgtatctggtgcctagcgctggtcgtcgagaggacgggcggggaggcgtccgccggcgagggactgagcggtggagacctcggtgggcaggcgcctacgagcccccggctgacacggtcgaagctgctgcggacggccgggctccaagcgcaccctcggtgtccgcgtcgccctccgttctcttctttgactcctgagtttcagtggacgttggcggcgtttgagacccggcggcggcgtatccgccggccactgcacatcccccgcggcgcgccactcctatggtgtttctgatcaaatggagcaagcctgcaatggcgcactgccggctcctccaccgctacgtctcgtccgccgccgccagagccgcagcgccgatccctgcccggcacgtgccccggtcgcccggcacgtccgcgcaaagcgcccgcatacgggagctcggccgcctcggccgcttgcacgaggccagggaggtgttcgactcgatgcccttccgcgacatcatcgcctggaactccatgatcttcgcctactgcaacaacgggatgcccgacgccgggaggtcgctcgctgacgcgatctccggcgggaacctgcgcacgggcaccatcctgctgtcgggctacgcgcgcgccgggcgcgtgcgcgacgctcggagggtgttcgatggaatgggcgtgcggaacaccgtggcgtggaatgccatggttacctgctacgtccagaacggggacatcaccctcgcgcgcaagctgttcgatgcaatgccgagcagggacgtctcgtcatggaacacgatgctcaccgggtactgccatagccaactgatggaggaggcaaggaatctgtttgaacgaatgccagaacgcaacggggtttcttggacagtgatgatttctgggtatgttctaattgagcagcatggcagggcttgggacatgtttcgcacaatgctatgtgaaggaatgacaccagagcaaccaaaccttgtttctgtgctttcagctgtacgccatcttggtaaacctggcattctagagagtatccacgttcttgtgcataagactggctttgagagggatgttgttgtcggcactgctatacttaatggctacactaaggatgtgaatatgcttgacagtgcagtaaagttctttgaaggtatggcagctaggaatgagtacacatggtcaaccataatcgctgcactatctcaggctggacgaatagatgatgcttttgctgtttaccaaagagatcctctaaagtctgttcctagtaggacttcaatgctcacaggccttgctcgatatggaaggatcgatgatgcaaagattctatttgaccagattcatgaacctaatgttgtatcctggaatgccatgattactgggtacatgcagaatgaaatggttgatgaagcagaagatctttttaacaggatgccctttagaaacacaatatcttgggctgggatgattgcagggtatgcgcgtaatgggaggagtgaacaagctttggtttcactccaagctctccataggaaaggaatgttacctagcctgtctagtttgactagtagcttctttgcttgttcaaacatcgaagctcttgagacaggaaagcaagttcattcacttgcagtaaaggctggctgtcagtttaatagctatgtttgtaatgcactgattactctgtacggtaagtacagaagcatagggtctgtgagacaaatctttgatcggatgacagttaaagatacagtgtcttataactcttttatgtccgcgcttgtacagaataatctgtttgatgaagcaagagatgtattcaacaatatgccgagtccagatgttgtatcttggactacgataatatctgcatgcgcacaagctgaccaggggaatgaggcagtagagattttcagaagtatgctgcatgagcgtgagctacccaatccacctatattaacgatacttcttggtctcagtggaaatcttggtgctccccaacttggacagcaaattcacacaatcgctattaaacttggaatggattcaggacttgtagtggctaatgctcttgtctcgatgtatttcaagtgtagttctgcagattcccttaaggtttttgattcaatggaggaacgggacatttttacatggaataccatcattaccggctatgctcaacatggccttggaagagaagctatcagaatgtatcaactaatggtatctgcaggagtgttgcctaatgaggtcacttttgtgggccttttacatgcatgtagccattctggtttggtagatgaagggcaccagttcttcaagtctatgagcagtgattatggattaactcctctgctagagcactatgcttgcatggtcgacctacttgggcgagctggtgatgtgcaaggagctgaacattttatttatgatatgcctattgagccagattcagtgatctggagtgcgcttctcggggcatgcaagattcacaagaatgtagaaattggtaggagagcagctgagaaacttttctctatcgagccatcaaatgctgggaattatgtcatgttgtcaaatatatactcctcccaagggatgtgggacgaagttgcaaaggtacggaaacttatgaaagaacgaggtgtgaacaaggatcctggttgtagctggatgcagataaagaacaaaatgcactcatttgtcactggagatgaggaacatgagcaaattcaaaacatatatgctaccctttgggagttatacactttgctaaaggccacagggtatgtacctgacacggactttgttctccatgacatagatgaagagcagaaagagagctcgcttctgtaccatagcgagaagcttgctgttgcttatggccttcttgttacacccaagggcatgcccatacagataatgaagaaccttagaatatgtggtgactgtcacactttcatcaagtttgtatcctctgtcaccaagagagaaattgatgttagggatgggaatcgattccatcatttcaggaatggaagctgttcatgcggtgatttttggtgataaactatcagagcatgagcaggtcttcttcatgctatcccctcaaacacagagttacaagtgcttcataaggaatcgaatagatctgaaagttttactgtgccaacacatgcacacactggtggtgcctgcatctagcttttcagatcaaagcctgacagatgatgcacttctgtgcctgaacactgaacggacagctaccatagggcaaagtgaagaagaaacagaagagttgagcaagatcacactagagaataaggatattcagcttgatatcgatataagagtgtctgatggagccgaccctatggagctgcatgtttatgattttaaaggacctggtgtggccttatcgatgtacaatagcgatgagtttattaggcctttcgctgaatcctccatggatatggctctttcaaaaaagttgtctctttatctcagcaccaagaatacaatcctcaagaagtatgacgacaggtcacaattggaccatggtgctccattttgcttactgtgatatgtgcagcgaagcgatggcgatggtgtttttgatgttcaggacagaatcaatggccgcaccttatgtgattgtgatagcatagttgtttgcgaggtaattacaaagctgcaggctgccgcctggaggcagtgggaggccctgggcgaccgaagggtgcatgatattctagtttcagatcaatgctgagtgcagggagaggcaatgtcttacctcttggatgttcatctctatattagtccatccataggtatgcagctttggaccgtcgatgttaaatcttgtctcaccagcgactacttctgatggtgtggctacctgagcagcttgtaccgattctgccttagcttgccgatcaacgctgtccaccaggacagagctgaaaacttgaaatggcaagaccagaaccctgaagttgaagtgttggcaagaaactcagataggtggatgaacgttgtgagccacctagctaagagcttgaagacgacagatggtaggtgttagaaatggaaggccatgcggctcccatgttatggaaaaaaaacccaatcatgaattttggaaagctcaagaacctttgttgaaggagataaggcggatccgttcaaggtcaacaatcgtgatgagaaattacagaaaagaggaagaatattgtcgatgaaaaaaagtgctcaaagtaggtgatgtaagtaaaggtgacagactctaaattttacactataagatttaaagacccatttatagttatttttaaaca

SEQ ID NO: 63534 - DNA, 4737 bp, Zea Mays
aagctccccacctctgcataaaagaaatagaatcatacatggtcactttcgggttgtaggggagtttcttttcaatcgccatcttgttgcgagtgcaccacatagaccaaagcagccccgcaattaagaaagtacatagggggttggataaatgaaatcctgggattgcccattcatcaaacaagaaccaaatcatgctgggagagtggtgccaaccaaaaatctgccttaagcagcaccagatatattttgacaatgcgcaatgaaagaaaatgtggtccacagtttcatgccccttgcacaaggagcagaattcgctccccttccaccctcttttcatgccccttgcacaaggagcaaaataccttacctgagtcgctccgatcacaagcgtcgggcgaccaccttcctcctccgcggaatcctgctgtatctggtgcctagcgctggtcgtcgagaggacgggcggggaggcgtccgccggcgagggactgagcggtggagacctcggtgggcaggcgcctacgagcccccggctgacacggtcgaagctgctgcggacggccgggctccaagcgcaccctcggtgtccgcgtcgccctccgttctcttctttgactcctgagtttcagtggacgttggcggcgtttgagacccggcggcggcgtatccgccggccactgcacatcccccgcggcgcgccactcctatggtgtttctgatcaaatggagcaagcctgcaatggcgcactgccggctcctccaccgctacgtctcgtccgccgccgccagagccgcagcgccgatccctgcccggcacgtgccccggtcgcccggcacgtccgcgcaaagcgcccgcatacgggagctcggccgcctcggccgcttgcacgaggccagggaggtgttcgactcgatgcccttccgcgacatcatcgcctggaactccatgatcttcgcctactgcaacaacgggatgcccgacgccgggaggtcgctcgctgacgcgatctccggcgggaacctgcgcacgggcaccatcctgctgtcgggctacgcgcgcgccgggcgcgtgcgcgacgctcggagggtgttcgatggaatgggcgtgcggaacaccgtggcgtggaatgccatggttacctgctacgtccagaacggggacatcaccctcgcgcgcaagctgttcgatgcaatgccgagcagggacgtctcgtcatggaacacgatgctcaccgggtactgccatagccaactgatggaggaggcaaggaatctgtttgaacgaatgccagaacgcaacggggtttcttggacagtgatgatttctgggtatgttctaattgagcagcatggcagggcttgggacatgtttcgcacaatgctatgtgaaggaatgacaccagagcaaccaaaccttgtttctgtgctttcagctgtacgccatcttggtaaacctggcattctagagagtatccacgttcttgtgcataagactggctttgagagggatgttgttgtcggcactgctatacttaatggctacactaaggatgtgaatatgcttgacagtgcagtaaagttctttgaaggtatggcagctaggaatgagtacacatggtcaaccataatcgctgcactatctcaggctggacgaatagatgatgcttttgctgtttaccaaagagatcctctaaagtctgttcctagtaggacttcaatgctcacaggccttgctcgatatggaaggatcgatgatgcaaagattctatttgaccagattcatgaacctaatgttgtatcctggaatgccatgattactgggtacatgcagaatgaaatggttgatgaagcagaagatctttttaacaggatgccctttagaaacacaatatcttgggctgggatgattgcagggtatgcgcgtaatgggaggagtgaacaagctttggtttcactccaagctctccataggaaaggaatgttacctagcctgtctagtttgactagtagcttctttgcttgttcaaacatcgaagctcttgagacaggaaagcaagttcattcacttgcagtaaaggctggctgtcagtttaatagctatgtttgtaatgcactgattactctgtacggtaagtacagaagcatagggtctgtgagacaaatctttgatcggatgacagttaaagatacagtgtcttataactcttttatgtccgcgcttgtacagaataatctgtttgatgaagcaagagatgtattcaacaatatgccgagtccagatgttgtatcttggactacgataatatctgcatgcgcacaagctgaccaggggaatgaggcagtagagattttcagaagtatgctgcatgagcgtgagctacccaatccacctatattaacgatacttcttggtctcagtggaaatcttggtgctccccaacttggacagcaaattcacacaatcgctattaaacttggaatggattcaggacttgtagtggctaatgctcttgtctcgatgtatttcaagtgtagttctgcagattcccttaaggtttttgattcaatggaggaacgggacatttttacatggaataccatcattaccggctatgctcaacatggccttggaagagaagctatcagaatgtatcaactaatggtatctgcaggagtgttgcctaatgaggtcacttttgtgggccttttacatgcatgtagccattctggtttggtagatgaagggcaccagttcttcaagtctatgagcagtgattatggattaactcctctgctagagcactatgcttgcatggtcgacctacttgggcgagctggtgatgtgcaaggagctgaacattttatttatgatatgcctattgagccagattcagtgatctggagtgcgcttctcggggcatgcaagattcacaagaatgtagaaattggtaggagagcagctgagaaacttttctctatcgagccatcaaatgctgggaattatgtcatgttgtcaaatatatactcctcccaagggatgtgggacgaagttgcaaaggtacggaaacttatgaaagaacgaggtgtgaacaaggatcctggttgtagctggatgcagataaagaacaaaatgcactcatttgtcactggagatgaggaacatgagcaaattcaaaacatatatgctaccctttgggagttatacactttgctaaaggccacagggtatgtacctgacacggactttgttctccatgacatagatgaagagcagaaagagagctcgcttctgtaccatagcgagaagcttgctgttgcttatggccttcttgttacacccaagggcatgcccatacagataatgaagaaccttagaatatgtggtgactgtcacactttcatcaagtttgtatcctctgtcaccaagagagaaattgatgttagggatgggaatcgattccatcatttcaggaatggaagctgttcatgcggtgatttttggtgataaactatcagagcatgagcaggtcttcttcatgctatcccctcaaacacagagttacaagtgcttcataaggaatcgaatagatctgaaagttttactgtgccaacacatgcacacactggtggtgcctgcatctagcttttcagatcaaagcctgacagggcaaagtgaagaagaaacagaagagttgagcaagatcacactagagaataaggatattcagcttgatatcgatataagagtgtctgatggagccgaccctatggagctgcatgtttatgattttaaaggacctggtgtggccttatcgatgtacaatagcgatgagtttattaggcctttcgctgaatcctccatggatatggctctttcaaaaaagttgtctctttatctcagcaccaagaatacaatcctcaagaagtatgacgacaggtcacaattggaccatggtgctccattttgcttactgtgatatgtgcagcgaagcgatggcgatggtgtttttgatgttcaggacagaatcaatggccgcaccttatgtgattgtgatagcatagttgtttgcgaggtaattacaaagctgcaggctgccgcctggaggcagtgggaggccctgggcgaccgaagggtgcatgatattctagtttcagatcaatgctgagtgcagggagaggcaatgtcttacctcttggatgttcatctctatattagtccatccataggtatgcagctttggaccgtcgatgttaaatcttgtctcaccagcgactacttctgatggtgtggctacctgagcagcttgtaccgattctgccttagcttgccgatcaacgctgtccaccaggacagagctgaaaacttgaaatggcaagaccagaaccctgaagttgaagtgttggcaagaaactcagataggtggatgaacgttgtgagccacctagctaagagcttgaagacgacagatggtaggtgttagaaatggaaggccatgcggctcccatgttatggaaaaaaaacccaatcatgaattttggaaagctcaagaacctttgttgaaggagataaggcggatccgttcaaggtcaacaatcgtgatgagaaattacagaaaagaggaagaatattgtcgatgaaaaaaagtgctcaaagtaggtgatgtaagtaaaggtgacagactctaaattttacactataagatttaaagacccatttatagttatttttaaaca

SEQ ID NO: 63535 - DNA, 6188 bp, Zea Mays
aagctccccacctctgcataaaagaaatagaatcatacatggtcactttcgggttgtaggggagtttcttttcaatcgccatcttgttgcgagtgcaccacatagaccaaagcagccccgcaattaagaaagtacatagggggttggataaatgaaatcctgggattgcccattcatcaaacaagaaccaaatcatgctgggagagtggtgccaaccaaaaatctgccttaagcagcaccagatatattttgacaatgcgcaatgaaagaaaatgtggtccacagtttcatgccccttgcacaaggagcagaattcgctccccttccaccctcttttcatgccccttgcacaaggagcaaaataccttacctgagtcgctccgatcacaagcgtcgggcgaccaccttcctcctccgcggaatcctgctgtatctggtgcctagcgctggtcgtcgagaggacgggcggggaggcgtccgccggcgagggactgagcggtggagacctcggtgggcaggcgcctacgagcccccggctgacacggtcgaagctgctgcggacggccgggctccaagcgcaccctcggtgtccgcgtcgccctccgttctcttctttgactcctgagtttcagtggacgttggcggcgtttgagacccggcggcggcgtatccgccggccactgcacatcccccgcggcgcgccactcctatggtgtttctgatcaaatggagcaagcctgcaatggcgcactgccggctcctccaccgctacgtctcgtccgccgccgccagagccgcagcgccgatccctgcccggcacgtgccccggtcgcccggcacgtccgcgcaaagcgcccgcatacgggagctcggccgcctcggccgcttgcacgaggccagggaggtgttcgactcgatgcccttccgcgacatcatcgcctggaactccatgatcttcgcctactgcaacaacgggatgcccgacgccgggaggtcgctcgctgacgcgatctccggcgggaacctgcgcacgggcaccatcctgctgtcgggctacgcgcgcgccgggcgcgtgcgcgacgctcggagggtgttcgatggaatgggcgtgcggaacaccgtggcgtggaatgccatggttacctgctacgtccagaacggggacatcaccctcgcgcgcaagctgttcgatgcaatgccgagcagggacgtctcgtcatggaacacgatgctcaccgggtactgccatagccaactgatggaggaggcaaggaatctgtttgaacgaatgccagaacgcaacggggtttcttggacagtgatgatttctgggtatgttctaattgagcagcatggcagggcttgggacatgtttcgcacaatgctatgtgaaggaatgacaccagagcaaccaaaccttgtttctgtgctttcagctgtacgccatcttggtaaacctggcattctagagagtatccacgttcttgtgcataagactggctttgagagggatgttgttgtcggcactgctatacttaatggctacactaaggatgtgaatatgcttgacagtgcagtaaagttctttgaaggtatggcagctaggaatgagtacacatggtcaaccataatcgctgcactatctcaggctggacgaatagatgatgcttttgctgtttaccaaagagatcctctaaagtctgttcctagtaggacttcaatgctcacaggccttgctcgatatggaaggatcgatgatgcaaagattctatttgaccagattcatgaacctaatgttgtatcctggaatgccatgattactgggtacatgcagaatgaaatggttgatgaagcagaagatctttttaacaggatgccctttagaaacacaatatcttgggctgggatgattgcagggtatgcgcgtaatgggaggagtgaacaagctttggtttcactccaagctctccataggaaaggaatgttacctagcctgtctagtttgactagtagcttctttgcttgttcaaacatcgaagctcttgagacaggaaagcaagttcattcacttgcagtaaaggctggctgtcagtttaatagctatgtttgtaatgcactgattactctgtacggtaagtacagaagcatagggtctgtgagacaaatctttgatcggatgacagttaaagatacagtgtcttataactcttttatgtccgcgcttgtacagaataatctgtttgatgaagcaagagatgtattcaacaatatgccgagtccagatgttgtatcttggactacgataatatctgcatgcgcacaagctgaccaggggaatgaggcagtagagattttcagaagtatgctgcatgagcgtgagctacccaatccacctatattaacgatacttcttggtctcagtggaaatcttggtgctccccaacttggacagcaaattcacacaatcgctattaaacttggaatggattcaggacttgtagtggctaatgctcttgtctcgatgtatttcaagtgtagttctgcagattcccttaaggtttttgattcaatggaggaacgggacatttttacatggaataccatcattaccggctatgctcaacatggccttggaagagaagctatcagaatgtatcaactaatggtatctgcaggagtgttgcctaatgaggtcacttttgtgggccttttacatgcatgtagccattctggtttggtagatgaagggcaccagttcttcaagtctatgagcagtgattatggattaactcctctgctagagcactatgcttgcatggtcgacctacttgggcgagctggtgatgtgcaaggagctgaacattttatttatgatatgcctattgagccagattcagtgatctggagtgcgcttctcggggcatgcaagattcacaagaatgtagaaattggtaggagagcagctgagaaacttttctctatcgagccatcaaatgctgggaattatgtcatgttgtcaaatatatactcctcccaagggatgtgggacgaagttgcaaaggtacggaaacttatgaaagaacgaggtgtgaacaaggatcctggttgtagctggatgcagataaagaacaaaatgcactcatttgtcactggagatgaggaacatgagcaaattcaaaacatatatgctaccctttgggagttatacactttgctaaaggccacagggtatgtacctgacacggactttgttctccatgacatagatgaagagcagaaagagagctcgcttctgtaccatagcgagaagcttgctgttgcttatggccttcttgttacacccaagggcatgcccatacagataatgaagaaccttagaatatgtggtgactgtcacactttcatcaagtttgtatcctctgtcaccaagagagaaattgatgttagggatgggaatcgattccatcatttcaggaatggaagctgttcatgcgagttcttaaaacttgacccagtttggagcgccgtccgcgctacacgggtacgacacaagtcacttgctgacgtgtgcatgttctatgcattcattcgctacgaaaagctgctcgaggaagacacctctcgccatgttgtcgcactgctcgagggcatgggcgcggccatccaacgaaggacacgcttgggccccgcctccactctcctctccttcttgtcctcattggcttgctgccctacccttctcctcttcccaccaccctccctctcatccacgccctcctgccctcccagtgaggtccctccgtccctgtcgcctccgattccgatcgattgtgcccgactccagtctcgccctgcgccagcatggcctcacccatggtcgcctccccgatccgggcgacatccccaccaccgcgccctcgccgaccttcccgccgcagcgcctcacgtcatcgctgcccgtcgccaacacgtccaggtcgtcctccccgcttgactatgcccgaccccagtctcgcccgtgttcaccaacatggcctcactcacggttacctccccgatgcgagtgagccccatcgacaaccccaccgccacgccctcactggcctccctgccgcgacgccttgtgtgagcgtcgcccgtcgtcgacgcgtccgggtcgtgctccttggctttcacccactatggggatcagctctccccccgacgccttggtggccggtgggtgccgcgcacagtgcgcttgcgtacgaatttgacctggcgcatgtttgatgtggcatggtgtttggtcagcgctagatgctcgacatccccatccgcgcgctcgaggcagagtccagggacgccaagatgagcccgaccgcgaccgcctagccgtcagctccaaagaagaagccagggcaccggtggacgtcagggttccgtcgtggtggcctgctagatccagattcaacaagaaaggtttgtgattcgtttggccttaggatgacaaacggtttttatttttctagaatcccactgaaagagagatggagttgaatgagaaatctgaaaagaatacgcaagaggtagatgagaagttccaaaacacaaacttgtatctcaagaacttagagatggagcttcggggtatgctaccattcatgtctccaatcatgcttaggttcctgtctgtgtatgttctagggttgtttgttttggtcccccctcttcacaaattatctttaccttttttctgttcttttcggtagagttacaagtgcttcataaggaatcgaatagatctgaaagttttactgtgccaacacatgcacacactggtggtgcctgcatctagcttttcagatcaaagcctgacaggtatctcctagttctatacttccatcctttttttctaaataattttacatggcaatctgcactcagttaggagccatatttcttgttctgtagagactagactcactcttaaaagataattaaatcttcgcaaggaaaaccctgtttgcttgagttttcatgaattttgctaggcaaaagatcataagaggtatacttttaaatttttttagaagatgatgcacttctgtgcctgaacactgaacggacagctaccatagggcaaagtgaagaagaaacagaagagttgagcaagatcacactagagaataaggatattcagcttgatatcgatataagagtgtctgatggagccgaccctatggagctgcatgtttatgattttaaaggacctggtgtggccttatcgatgtacaatagcgatgagtttattaggcctttcgctgaatcctccatggatatggctctttcaaaaaagttgtctctttatctcagcaccaagaatacaatcctcaagaagtatgacgacaggtcacaattggaccatggtgctccattttgcttactgtgatatgtgcagcgaagcgatggcgatggtgtttttgatgttcaggacagaatcaatggccgcaccttatgtgattgtgatagcatagttgtttgcgaggtaattacaaagctgcaggctgccgcctggaggcagtgggaggccctgggcgaccgaagggtgcatgatattctagtttcagatcaatgctgagtgcagggagaggcaatgtcttacctcttggatgttcatctctatattagtccatccataggtatgcagctttggaccgtcgatgttaaatcttgtctcaccagcgactacttctgatggtgtggctacctgagcagcttgtaccgattctgccttagcttgccgatcaacgctgtccaccaggacagagctgaaaacttgaaatggcaagaccagaaccctgaagttgaagtgttggcaagaaactcagataggtggatgaacgttgtgagccacctagctaagagcttgaagacgacagatggtaggtgttagaaatggaaggccatgcggctcccatgttatggaaaaaaaacccaatcatgaattttggaaagctcaagaacctttgttgaaggagataaggcggatccgttcaaggtcaacaatcgtgatgagaaattacagaaaagaggaagaatattgtcgatgaaaaaaagtgctcaaagtaggtgatgtaagtaaaggtgacagactctaaattttacactataagatttaaagacccatttatagttatttttaaaca

SEQ ID NO: 63536 - DNA, 4676 bp, Zea Mays
aagctccccacctctgcataaaagaaatagaatcatacatggtcactttcgggttgtaggggagtttcttttcaatcgccatcttgttgcgagtgcaccacatagaccaaagcagccccgcaattaagaaagtacatagggggttggataaatgaaatcctgggattgcccattcatcaaacaagaaccaaatcatgctgggagagtggtgccaaccaaaaatctgccttaagcagcaccagatatattttgacaatgcgcaatgaaagaaaatgtggtccacagtttcatgccccttgcacaaggagcagaattcgctccccttccaccctcttttcatgccccttgcacaaggagcaaaataccttacctgagtcgctccgatcacaagcgtcgggcgaccaccttcctcctccgcggaatcctgctgtatctggtgcctagcgctggtcgtcgagaggacgggcggggaggcgtccgccggcgagggactgagcggtggagacctcggtgggcaggcgcctacgagcccccggctgacacggtcgaagctgctgcggacggccgggctccaagcgcaccctcggtgtccgcgtcgccctccgttctcttctttgactcctgagtttcagtggacgttggcggcgtttgagacccggcggcggcgtatccgccggccactgcacatcccccgcggcgcgccactcctatggtgtttctgatcaaatggagcaagcctgcaatggcgcactgccggctcctccaccgctacgtctcgtccgccgccgccagagccgcagcgccgatccctgcccggcacgtgccccggtcgcccggcacgtccgcgcaaagcgcccgcatacgggagctcggccgcctcggccgcttgcacgaggccagggaggtgttcgactcgatgcccttccgcgacatcatcgcctggaactccatgatcttcgcctactgcaacaacgggatgcccgacgccgggaggtcgctcgctgacgcgatctccggcgggaacctgcgcacgggcaccatcctgctgtcgggctacgcgcgcgccgggcgcgtgcgcgacgctcggagggtgttcgatggaatgggcgtgcggaacaccgtggcgtggaatgccatggttacctgctacgtccagaacggggacatcaccctcgcgcgcaagctgttcgatgcaatgccgagcagggacgtctcgtcatggaacacgatgctcaccgggtactgccatagccaactgatggaggaggcaaggaatctgtttgaacgaatgccagaacgcaacggggtttcttggacagtgatgatttctgggtatgttctaattgagcagcatggcagggcttgggacatgtttcgcacaatgctatgtgaaggaatgacaccagagcaaccaaaccttgtttctgtgctttcagctgtacgccatcttggtaaacctggcattctagagagtatccacgttcttgtgcataagactggctttgagagggatgttgttgtcggcactgctatacttaatggctacactaaggatgtgaatatgcttgacagtgcagtaaagttctttgaaggtatggcagctaggaatgagtacacatggtcaaccataatcgctgcactatctcaggctggacgaatagatgatgcttttgctgtttaccaaagagatcctctaaagtctgttcctagtaggacttcaatgctcacaggccttgctcgatatggaaggatcgatgatgcaaagattctatttgaccagattcatgaacctaatgttgtatcctggaatgccatgattactgggtacatgcagaatgaaatggttgatgaagcagaagatctttttaacaggatgccctttagaaacacaatatcttgggctgggatgattgcagggtatgcgcgtaatgggaggagtgaacaagctttggtttcactccaagctctccataggaaaggaatgttacctagcctgtctagtttgactagtagcttctttgcttgttcaaacatcgaagctcttgagacaggaaagcaagttcattcacttgcagtaaaggctggctgtcagtttaatagctatgtttgtaatgcactgattactctgtacggtaagtacagaagcatagggtctgtgagacaaatctttgatcggatgacagttaaagatacagtgtcttataactcttttatgtccgcgcttgtacagaataatctgtttgatgaagcaagagatgtattcaacaatatgccgagtccagatgttgtatcttggactacgataatatctgcatgcgcacaagctgaccaggggaatgaggcagtagagattttcagaagtatgctgcatgagcgtgagctacccaatccacctatattaacgatacttcttggtctcagtggaaatcttggtgctccccaacttggacagcaaattcacacaatcgctattaaacttggaatggattcaggacttgtagtggctaatgctcttgtctcgatgtatttcaagtgtagttctgcagattcccttaaggtttttgattcaatggaggaacgggacatttttacatggaataccatcattaccggctatgctcaacatggccttggaagagaagctatcagaatgtatcaactaatggtatctgcaggagtgttgcctaatgaggtcacttttgtgggccttttacatgcatgtagccattctggtttggtagatgaagggcaccagttcttcaagtctatgagcagtgattatggattaactcctctgctagagcactatgcttgcatggtcgacctacttgggcgagctggtgatgtgcaaggagctgaacattttatttatgatatgcctattgagccagattcagtgatctggagtgcgcttctcggggcatgcaagattcacaagaatgtagaaattggtaggagagcagctgagaaacttttctctatcgagccatcaaatgctgggaattatgtcatgttgtcaaatatatactcctcccaagggatgtgggacgaagttgcaaaggtacggaaacttatgaaagaacgaggtgtgaacaaggatcctggttgtagctggatgcagataaagaacaaaatgcactcatttgtcactggagatgaggaacatgagcaaattcaaaacatatatgctaccctttgggagttatacactttgctaaaggccacagggtatgtacctgacacggactttgttctccatgacatagatgaagagcagaaagagagctcgcttctgtaccatagcgagaagcttgctgttgcttatggccttcttgttacacccaagggcatgcccatacagataatgaagaaccttagaatatgtggtgactgtcacactttcatcaagtttgtatcctctgtcaccaagagagaaattgatgttagggatgggaatcgattccatcatttcaggaatggaagctgttcatgcggtgatttttggtgataaactatcagagcatgagcaggtcttcttcatgctatcccctcaaacacagaagatgatgcacttctgtgcctgaacactgaacggacagctaccatagggcaaagtgaagaagaaacagaagagttgagcaagatcacactagagaataaggatattcagcttgatatcgatataagagtgtctgatggagccgaccctatggagctgcatgtttatgattttaaaggacctggtgtggccttatcgatgtacaatagcgatgagtttattaggcctttcgctgaatcctccatggatatggctctttcaaaaaagttgtctctttatctcagcaccaagaatacaatcctcaagaagtatgacgacaggtcacaattggaccatggtgctccattttgcttactgtgatatgtgcagcgaagcgatggcgatggtgtttttgatgttcaggacagaatcaatggccgcaccttatgtgattgtgatagcatagttgtttgcgaggtaattacaaagctgcaggctgccgcctggaggcagtgggaggccctgggcgaccgaagggtgcatgatattctagtttcagatcaatgctgagtgcagggagaggcaatgtcttacctcttggatgttcatctctatattagtccatccataggtatgcagctttggaccgtcgatgttaaatcttgtctcaccagcgactacttctgatggtgtggctacctgagcagcttgtaccgattctgccttagcttgccgatcaacgctgtccaccaggacagagctgaaaacttgaaatggcaagaccagaaccctgaagttgaagtgttggcaagaaactcagataggtggatgaacgttgtgagccacctagctaagagcttgaagacgacagatggtaggtgttagaaatggaaggccatgcggctcccatgttatggaaaaaaaacccaatcatgaattttggaaagctcaagaacctttgttgaaggagataaggcggatccgttcaaggtcaacaatcgtgatgagaaattacagaaaagaggaagaatattgtcgatgaaaaaaagtgctcaaagtaggtgatgtaagtaaaggtgacagactctaaattttacactataagatttaaagacccatttatagttatttttaaaca

SEQ ID NO: 63537 - DNA, 2347 bp, Zea Mays
ctcactttccgtgcctcgtcgttattaaaaaaacacaccggaggcgcgaccgcctcgtccgcgtctgcttctgcatctgcttctgcttgtgctgctgctgacatcgaatcaaagctgctaaacctcggtccatccatcacccgcggcgcgacacacccaaaggcctctccctcccgtcccgtgtcccgatcgcaccgctccccacgatggcgtcgcacatcatcctgccgccggacgacgccgacgagaaccacaaccaccaggcggcggcggcggcggaggaggaggaggaagagcgggacgagctggggcgcgacgacgacgacgacgagcacggggtgccaccggcgctgccgcccaaggcggcgctgccgttctcggccacgtgcgtgcggatctcccgcgactcgtaccccaacctccgcgcgctccgcaacgcctcctccgtcagcctcgctgacgccgcctacgtcaagatctccgaggccgactttggatacgtcctcgacgacgtgccgcacttcaccgactacctccccgacatcccgacttatcctaatccactacaagatcatccagcctattcaactgtcaagcagtattttgtcaatgaagatgacaccgttcctcaaaaggttgttgttcagaagaacagtcggcgtggtgttcacttccgtcgtgctgggcctcgtcagagggtttattttggcaccgatgaagtgaaagcctgcattgtaacttgtggaggcctgtgccctgggcttaacactgttatcagggaactggtgtgtggcttgtcacacatgtacaatgtcagcagcatttttggaatacagaatgggtacaagggtttctattctagcaactaccttcccctgacaccaaagagcgtcaatgacatccacaaaaggggtggtacagttcttggaacatcacgcggtggccatgataccaaaaagattgttgataacattcaagatcgtggaatcaaccaggtgtatatcattggaggagatggaactcagaagggagcatatgagatcttcaaggaaatccggaagcgtggcctcaaagtttctgttgctggagttccaaagacaatagataatgacattgcgatcatcgacaagtcttttggttttgatacggctgtggaagaggcccagcgtgccattgattcagctcatgtggaagcttgcagtgctgagaatggaataggtttagtaaaactgatgggccgttatagtgggttcattgcgatgtatgctactcttgctagtcgagatgtggactgctgtttgattccagagtctccattttatctggatggagagggtggattgcttcaatatgtagagaagaggctgaaagagaacaagcacatggttattgttgttgctgagggagcagggcaggatcttatcgcgaaaagtttagccacatcagatcaacaagatgcgtctggaaataagctgcttcttgatattggtctttggctgactcacaagataaaggactacttcaaaagcaaaaagatggagatgacgattaaatacatagatcctacatacatggtccgtgctattccaagcaatgcatcagacaatgtctactgtacacttctagcccacagtgctatccatggtgcaatggcggggtacagcttcactgttgggatggtcaacggaagacatacctatatacctttctacgtgagtaataaccccttacagacactacgagggtgacatccacaaggaacaaggttaaagtcactgacaggatgtgggcaaggcttctgtcgtccaccaaccagccaagtttcctgagtcagaaggatatcgacgaagcgagtgaggcggataggctggcaaacaggccaccactgccaacgggtgccagctctcgcgtggtgaggtctttcgatcaatcttcgtcgtgttcttccaatggagagatctaagtgattgctggtgcaccgcaattgtgtacagaacctacttactatcgttctgagctctggtgcttgggcagcttcgccacgcaacgagttttgctcttgttgttagtcgttatgcatatgccttgagttgtgtaggaggacacgcggatgtgggccctgttagcacgcgtaataaagaaacaccattgatgaagctacttactagaggctctccatctatcatgtatttgctgcagttattatgcaatcggctggtgttctatctgtcttcgcctatctgtactaccgtgcattttcctttggcaccgtgaaatttgtaaggacaattctacatatgccattttaattttatcttctagtatcttatttgtcgtctttctatac

SEQ ID NO: 63538 - DNA, 2295 bp, Zea Mays
tcaaaaccagcggcaactgccgacgactgcactctgaccgaccgaccgatcggggccctctcactttccgtgcctcgtcgttattaaaaaaacacaccggaggcgcgaccgcctcgtccgcgtctgcttctgcatctgcttctgcttgtgctgctgctgacatcgaatcaaagctgctaaacctcggtccatccatcacccgcggcgcgacacacccaaaggcctctccctcccgtcccgtgtcccgatcgcaccgctccccacgatggcgtcgcacatcatcctgccgccggacgacgccgacgagaaccacaaccaccaggcggcggcggcggcggaggaggaggaggaagagcgggacgagctggggcgcgacgacgacgacgacgagcacggggtgccaccggcgctgccgcccaaggcggcgctgccgttctcggccacgtgcgtgcggatctcccgcgactcgtaccccaacctccgcgcgctccgcaacgcctcctccgtcagcctcgctgacgccgcctacgtcaagatctccgaggccgactttggatacgtcctcgacgacgtgccgcacttcaccgactacctccccgacatcccgacttatcctaatccactacaagatcatccagcctattcaactgtcaagcagtattttgtcaatgaagatgacaccgttcctcaaaaggttgttgttcagaagaacagtcggcgtggtgttcacttccgtcgtgctgggcctcgtcagagggtttattttggcaccgatgaagtgaaagcctgcattgtaacttgtggaggcctgtgccctgggcttaacactgttatcagggaactggtgtgtggcttgtcacacatgtacaatgtcagcagcatttttggaatacagaatgggtacaagggtttctattctagcaactaccttcccctgacaccaaagagcgtcaatgacatccacaaaaggggtggtacagttcttggaacatcacgcggtggccatgataccaaaaagattgttgataacattcaagatcgtggaatcaaccaggtgtatatcattggaggagatggaactcagaagggagcatatgagatcttcaaggaaatccggaagcgtggcctcaaagtttctgttgctggagttccaaagacaatagataatgacattgcgatcatcgacaagtcttttggttttgatacggctgtggaagaggcccagcgtgccattgattcagctcatgtggaagcttgcagtgctgagaatggaataggtttagtaaaactgatgggccgttatagtgggttcattgcgatgtatgctactcttgctagtcgagatgtggactgctgtttgattccagagtctccattttatctggatggagagggtggattgcttcaatatgtagagaagaggctgaaagagaacaagcacatggttattgttgttgctgagggagcagggcaggatcttatcgcgaaaagtttagccacatcagatcaacaagatgcgtctggaaataagctgcttcttgatattggtctttggctgactcacaagataaaggactacttcaaaagcaaaaagatggagatgacgattaaatacatagatcctacatacatggtccgtgctattccaagcaatgcatcagacaatgtctactgtacacttctagcccacagtgctatccatggtgcaatggcggggtacagcttcactgttgggatggtcaacggaagacatacctatatacctttctacagggtgacatccacaaggaacaaggttaaagtcactgacaggatgtgggcaaggcttctgtcgtccaccaaccagccaagtttcctgagtcagaaggatatcgacgaagcgagtgaggcggataggctggcaaacaggccaccactgccaacgggtgccagctctcgcgtgaacctacttactatcgttctgagctctggtgcttgggcagcttcgccacgcaacgagttttgctcttgttgttagtcgttatgcatatgccttgagttgtgtaggaggacacgcggatgtgggccctgttagcacgcgtaataaagaaacaccattgatgaagctacttactagaggctctccatctatcatgtatttgctgcagttattatgcaatcggctggtgttctatctgtcttcgcctatctgtactaccgtgcattttcctttggcaccgtgaaatttgtaaggacaattctacatatgccattttaattttatcttctagtatcttatttgtcgtctttctatac

SEQ ID NO: 63539 - DNA, 1005 bp, Zea Mays
gggatttcccccctgagggaaccatatgctcatgggaggaggagggtccttctctgctggtgggcctggaaagggaatgcattctcgattgtatctccgtgtcttgaccaacttccaacagattgaatcattctctgctttcaatagcgtctataacaattcgggcctttttggaatttatgcagtcactagcccagacttttcatcgaaggctgtggatttggcagcaggggaactcctggagattgcgacacctggaaaagttacacaagaacaacttgatcgtgctaaagaggcaaccaaatctgcagttctgatgaacttggaatcaaggtctatagcatctgaagatattggaagacaggttcttacttatggggaaaggaagcccatcgagtatttcctgaaaacagttgaggagatcactttgaatgacattttgtcaaccgcaaaggagatgatgtctacaccactcacaatggcatcgtggggcgacgttattcatgttcctagctacgagtctgttagccgcaagtttcactcgaagtgagaggatccagcatcggacttgcatgacctgttccaacaactgatgtgaagcctgcaacggccctcagctgggacagttactccccccacagaataaaaaagcatgtggtttctagcgccccccctaattactccctctgcatgtatacgccaaacatgttttttttttgtggtaagaatcatcaagccccttggcgactcgtttctgagtttcgcagcggcgctagattttattttatgtggacaagcgagctttcggggtgcgctcgtgcagaaatattttgccaacgtattttgcagtttagaccagaagcagaaaggaccagcgtatcacttttcctgttgttggatgcatgagttcatgacgtccacatttttgcaattttggctgttaccgtttccatcgattctggtgtgcgcgcgcgctcgcgcacttgttattattgttgtgataag

SEQ ID NO: 63540 - DNA, 1993 bp, Zea Mays
gggaaagaaaaactttaggcccacggacccagcggcccaacgtgagaggcggaactcttggcctttttctctccaccccaaagcttgtgcacgcgcgcaccgtccctcaccgccggcctctgctcctcttccgccgccgcaggatctcgtatcgccggagaccatgtaccgcgccgccgggagccacctccgctccctcaagcatcatggtgcttctaggcttgccagtacaagtgttgcgaagcagtcctcagagccatctaagacaaaagtcactactcttccaaatggcgtcaagatcgcctcggagacatcatcgagcccagcagcatctgtgggtctgtacattgactgtggttccatttacgaaacacctgcttcatctggagtatcacatctgttggagagaatggccttcaagagcacagtgaatcggactcacttacggttagttcgtgaggtagaagccattggaggaaatgtctctgcatcagcttcccgtgaacaaatgagctatacctatgatgcattgaagagctatacaccagaaatggttgaagttctcattgacagtgtgaggaatccagcattcctcgattgggaggtcaaagagcagctccagaacataaaatctgaaatagctgatgcgtctgctaatcctcaaggtctacttctggaggcccttcattcggttggatattccggggcactggcaaaacctttgatggcttcagaatctgctgtaaaccggttggatgttagcagcttggaggaatttgttgctgatggttcttgcagcatcaggagttgatcatgatgcgctgatttcagttgtagaaccacttctgtctgaccttccgtgcgtgaaacgtcctgaagagccaaaatctgtgtacgtgggaggagactatcgctgccaagcagattctccaaacacacacatcgcacttgcttttgaggtgccaggtggttggaatcaagagaaaactgcaatggttgtgacagtgcttcagatgctcatgggaggaggagggtccttctctgctggtgggcctggaaagggaatgcattctcgattgtatctccgtgtcttgaccaacttccaacagattgaatcattctctgctttcaatagcgtctataacaattcgggcctttttggaatttatgcagtcactagcccagacttttcatcgaaggctgtggatttggcagcaggggaactcctggagattgcgacacctggaaaagttacacaagaacaacttgatcgtgctaaagaggcaaccaaatctgcagttctgatgaacttggaatcaaggtctatagcatctgaagatattggaagacaggttcttacttatggggaaaggaagcccatcgagtatttcctgaaaacagttgaggagatcactttgaatgacattttgtcaaccgcaaaggagatgatgtctacaccactcacaatggcatcgtggggcgacgttattcatgttcctagctacgagtctgttagccgcaagtttcactcgaagtgagaggatccagcatcggacttgcatgacctgttccaacaactgatgtgaagcctgcaacggccctcagctgggacagttactccccccacagaataaaaaagcatgtggtttctagcgccccccctaattactccctctgcatgtatacgccaaacatgttttttttttgtggtaagaatcatcaagccccttggcgactcgtttctgagtttcgcagcggcgctagattttattttatgtggacaagcgagctttcggggtgcgctcgtgcagaaatattttgccaacgtattttgcagtttagaccagaagcagaaaggaccagcgtatcacttttcctgttgttggatgcatgagttcatgacgtccacatttttgcaattttggctgttaccgtttccatcgattctggtgtgcgcgcgcgctcgcgcacttgttattattgttgtgataag

SEQ ID NO: 63541 - DNA, 1554 bp, Zea Mays
gggaaagaaaaactttaggcccacggacccagcggcccaacgtgagaggcggaactcttggcctttttctctccaccccaaagcttgtgcacgcgcgcaccgtccctcaccgccggcctctgctcctcttccgccgccgcaggatctcgtatcgccggagaccatgtaccgcgccgccgggagccacctccgctccctcaagcatcatggtgcttctaggcttgccagtacaagtgttgcgaagcagtcctcagagccatctaagacaaaagtcactactcttccaaatggcgtcaagatcgcctcggagacatcatcgagcccagcagcatctgtgggtctgtacattgactgtggttccatttacgaaacacctgcttcatctggagtatcacatctgttggagagaatggccttcaagagcacagtgaatcggactcacttacggttagttcgtgaggtagaagccattggaggaaatgtctctgcatcagcttcccgtgaacaaatgagctatacctatgatgcattgaagagctatacaccagaaatggttgaagttctcattgacagtatgctcatgggaggaggagggtccttctctgctggtgggcctggaaagggaatgcattctcgattgtatctccgtgtcttgaccaacttccaacagattgaatcattctctgctttcaatagcgtctataacaattcgggcctttttggaatttatgcagtcactagcccagacttttcatcgaaggctgtggatttggcagcaggggaactcctggagattgcgacacctggaaaagttacacaagaacaacttgatcgtgctaaagaggcaaccaaatctgcagttctgatgaacttggaatcaaggtctatagcatctgaagatattggaagacaggttcttacttatggggaaaggaagcccatcgagtatttcctgaaaacagttgaggagatcactttgaatgacattttgtcaaccgcaaaggagatgatgtctacaccactcacaatggcatcgtggggcgacgttattcatgttcctagctacgagtctgttagccgcaagtttcactcgaagtgagaggatccagcatcggacttgcatgacctgttccaacaactgatgtgaagcctgcaacggccctcagctgggacagttactccccccacagaataaaaaagcatgtggtttctagcgccccccctaattactccctctgcatgtatacgccaaacatgttttttttttgtggtaagaatcatcaagccccttggcgactcgtttctgagtttcgcagcggcgctagattttattttatgtggacaagcgagctttcggggtgcgctcgtgcagaaatattttgccaacgtattttgcagtttagaccagaagcagaaaggaccagcgtatcacttttcctgttgttggatgcatgagttcatgacgtccacatttttgcaattttggctgttaccgtttccatcgattctggtgtgcgcgcgcgctcgcgcacttgttattattgttgtgataag

SEQ ID NO: 63542 - DNA, 2069 bp, Zea Mays
gggaaagaaaaactttaggcccacggacccagcggcccaacgtgagaggcggaactcttggcctttttctctccaccccaaagcttgtgcacgcgcgcaccgtccctcaccgccggcctctgctcctcttccgccgccgcaggatctcgtatcgccggagaccatgtaccgcgccgccgggagccacctccgctccctcaagcatcatggtgcttctaggcttgccagtacaagtgttgcgaagcagtcctcaggtggtctgttcagctggcttcttggtggaaaatcaagcgaactccctccccttgatgttccactcccaggcattagcattccctcacctctaccagattttgtagagccatctaagacaaaagtcactactcttccaaatggcgtcaagatcgcctcggagacatcatcgagcccagcagcatctgtgggtctgtacattgactgtggttccatttacgaaacacctgcttcatctggagtatcacatctgttggagagaatggccttcaagagcacagtgaatcggactcacttacggttagttcgtgaggtagaagccattggaggaaatgtctctgcatcagcttcccgtgaacaaatgagctatacctatgatgcattgaagagctatacaccagaaatggttgaagttctcattgacagtgtgaggaatccagcattcctcgattgggaggtcaaagagcaggtctacttctggaggcccttcattcggttggatattccggggcactggcaaaacctttgatggcttcagaatctgctgtaaaccggttggatgttagcagcttggaggaatttgttgctgaacattacactgctcccaggatggttcttgcagcatcaggagttgatcatgatgcgctgatttcagttgtagaaccacttctgtctgaccttccgtgcgtgaaacgtcctgaagagccaaaatctgtgtacgtgggaggagactatcgctgccaagcagattctccaaacacacacatcgcacttgcttttgaggtgccaggtggttggaatcaagagaaaactgcaatggttgtgacagtgcttcagatgctcatgggaggaggagggtccttctctgctggtgggcctggaaagggaatgcattctcgattgtatctccgtgtcttgaccaacttccaacagattgaatcattctctgctttcaatagcgtctataacaattcgggcctttttggaatttatgcagtcactagcccagacttttcatcgaaggctgtggatttggcagcaggggaactcctggagattgcgacacctggaaaagttacacaagaacaacttgatcgtgctaaagaggcaaccaaatctgcagttctgatgaacttggaatcaaggtctatagcatctgaagatattggaagacaggttcttacttatggggaaaggaagcccatcgagtatttcctgaaaacagttgaggagatcactttgaatgacattttgtcaaccgcaaaggagatgatgtctacaccactcacaatggcatcgtggggcgacgttattcatgttcctagctacgagtctgttagccgcaagtttcactcgaagtgagaggatccagcatcggacttgcatgacctgttccaacaactgatgtgaagcctgcaacggccctcagctgggacagttactccccccacagaataaaaaagcatgtggtttctagcgccccccctaattactccctctgcatgtatacgccaaacatgttttttttttgtggtaagaatcatcaagccccttggcgactcgtttctgagtttcgcagcggcgctagattttattttatgtggacaagcgagctttcggggtgcgctcgtgcagaaatattttgccaacgtattttgcagtttagaccagaagcagaaaggaccagcgtatcacttttcctgttgttggatgcatgagttcatgacgtccacatttttgcaattttggctgttaccgtttccatcgattctggtgtgcgcgcgcgctcgcgcacttgttattattgttgtgataag

SEQ ID NO: 63543 - DNA, 491 bp, Zea Mays
cgcctaggtagcctggtctgctgcgcgcatctgctgctgctgagcaatattgaagctgagtattgagtattgactagtgactacagtgatggtcatacaggataggatatacatatataccttagtcgtctaactatcgcctaggcgtccaggcgccccggaggctgactggcctcgccggggtgcgtgataaccatgctgctacctgattgttgcagcccttgctttgagactgtctgaggcttttgatattctgtcgtatatggattcaagtaggagcgttagacaatatattatttgtttaacacttttcaatatggctcgcttgatgtttgaattgcttacttgcacaaagttttctatatcacatttgattgctgagtagtgcttttagttacatgttcttccaataagtgaaaagcacaatttttagattacagtcttgtttgcaatttcatattaacaccaggtcatcatacatgtatgttgat

SEQ ID NO: 63544 - DNA, 1691 bp, Zea Mays
gtttttgctcccctcctacgtcgtcccgttgcctcgtgaccgcgcccagggtccgaactcccgaagcgtcgcgccgccgcccatcacggacatcggacaggagaagagaagcgggagcaccggagcaggcaccaccgccgaggcgacgaggtcgccgtgctccccatccgctgaggtagctgcactccggcctccgcggctgccggctccgccaacgcccagtcccaaggcgagcaggcacccacggcagcacggctgtcgcggtagtatttaaggaacagggaaacatctgctaccgcccaatctttccccttcccggactgctcgctggacgccgaggacgggtgtgaactaattctctggcaatactcttttccttcttcaaatgtgtgaaaatataggcagtccggttagaagattttgaggatgatgacgaggatggtgaagcaggcggtggagatattctgtatgaagatttttttgagaatggacacaacaagcaagctaagaagagagatggttccacaaagaaagttcaattcaaggatgaagcacatgaagttgaactccatgacagtgagaatgatgatggaaatgatgaacaagaacatggtctctcaactcacgaaaaggagcgtctgaagatgcgtactaaaatagagcaaatggagaaagctaatcttgaacccagcacgtggaccatgcagggagaggttactgcttctaggaggcccaaaaacagtgccctagaagtggaccttgattttgagcacaatgtaagacctgcccctgtaataaccgaggaagtgacagcttcccttgaagaaatgataaagaaaagaatcgcagagagtcattttgatgatgttgagaagccgtctctcttgccatctaaagctccaaaggagcacaaggaactggatgaaactaagagcaagaagggtcttgctgaactgtatgaggatgactatgcacaaaaagcaggcattgcacctgccccactttctatttcagatgaactaaaggaagaggcaaatactttatttaagaggatatgtttgaaattggatgcgctatcgcatttccactttgctccaaagccagtcattgaggatatgtctgtgcaagcaaatgtgcctgctttagccatggaagagattgcacctgtagctgtttcggatgctgcaatgcttgcccctgaagagatatttgaaggaaaaggtgatgttaaggaagagggggaacttacacaggctgagcgcaagagaagaagagctaacaagaaaaggagatatgcagcatcccataaggagaggacagcgccagccaagttgcagaaagattaaactcaatgtttttttctcactagtttctaaatggtacaagagcgataaactggcaatacatattttccaaattttgtattgtaccctctgctagtagcttttacatgaacagtaaaatgtgaccatttatatttctacagaagcacacaagttcgagagttttgatttgctgaagtgcaattttgagagtgcaaaaaaagacttgtctgttgaaccctaggtatcggtagaaacatcatcctacgacctaaccgacctaaccgatggttatggttatgagtataattttctttccagctattgcaattgaagtcggtcatattcaatctaatttatttctgcacc

SEQ ID NO: 63545 - DNA, 1624 bp, Zea Mays
gtttttgctcccctcctacgtcgtcccgttgcctcgtgaccgcgcccagggtccgaactcccgaagcgtcgcgccgccgcccatcacggacatcggacaggagaagagaagcgggagcaccggagcaggcaccaccgccgaggcgacgaggtcgccgtgctccccatccgctgaggtagctgcactccggcctccgcggctgccggctccgccaacgcccagtcccaaggcgagcaggcacccacggcagcacggctgtcgcggtagtatttaaggaacagggaaacatctgctaccgcccaatctttccccttcccggactgctcgctggacgccgaggacgttagaagattttgaggatgatgacgaggatggtgaagcaggcggtggagatattctgtatgaagatttttttgagaatggacacaacaagcaagctaagaagagagatggttccacaaagaaagttcaattcaaggatgaagcacatgaagttgaactccatgacagtgagaatgatgatggaaatgatgaacaagaacatggtctctcaactcacgaaaaggagcgtctgaagatgcgtactaaaatagagcaaatggagaaagctaatcttgaacccagcacgtggaccatgcagggagaggttactgcttctaggaggcccaaaaacagtgccctagaagtggaccttgattttgagcacaatgtaagacctgcccctgtaataaccgaggaagtgacagcttcccttgaagaaatgataaagaaaagaatcgcagagagtcattttgatgatgttgagaagccgtctctcttgccatctaaagctccaaaggagcacaaggaactggatgaaactaagagcaagaagggtcttgctgaactgtatgaggatgactatgcacaaaaagcaggcattgcacctgccccactttctatttcagatgaactaaaggaagaggcaaatactttatttaagaggatatgtttgaaattggatgcgctatcgcatttccactttgctccaaagccagtcattgaggatatgtctgtgcaagcaaatgtgcctgctttagccatggaagagattgcacctgtagctgtttcggatgctgcaatgcttgcccctgaagagatatttgaaggaaaaggtgatgttaaggaagagggggaacttacacaggctgagcgcaagagaagaagagctaacaagaaaaggagatatgcagcatcccataaggagaggacagcgccagccaagttgcagaaagattaaactcaatgtttttttctcactagtttctaaatggtacaagagcgataaactggcaatacatattttccaaattttgtattgtaccctctgctagtagcttttacatgaacagtaaaatgtgaccatttatatttctacagaagcacacaagttcgagagttttgatttgctgaagtgcaattttgagagtgcaaaaaaagacttgtctgttgaaccctaggtatcggtagaaacatcatcctacgacctaaccgacctaaccgatggttatggttatgagtataattttctttccagctattgcaattgaagtcggtcatattcaatctaatttatttctgcacc

SEQ ID NO: 63546 - DNA, 2308 bp, Zea Mays
gtttttgctcccctcctacgtcgtcccgttgcctcgtgaccgcgcccagggtccgaactcccgaagcgtcgcgccgccgcccatcacggacatcggacaggagaagagaagcgggagcaccggagcaggcacccacggcagcacggctgtcgcggtagtatttaaggaacagggaaacatctgctaccgcccaatctttccccttcccggactgctcgctggacgccgaggacgggtgtgaactaattctctggcaatactcttttccttcttcaaatgtgtgaaaatataggcagtccggtacgtgtccgccgtctgtttccactcaccgtgtgatactgtgatggtggacttggacgagccgctcgatgcggctgtaactgcggagaagggcaaggcggcgctacaacggttacttgaggctgaccctgcactcttcctctccccctctgcggaccttgctgctgccgcccgagcggcctcgcagcacatctactcctcactggtgccactctaccctgctcagcctccaccgctccctaccctcctcacggaccctgccttcgatgccgagcagatttggtcccagatcgagctgcttgcccgcccactcctccctcagctgggccgccagctccgtcgcatcgtgcagcaaccctcctcgcaacagcctcctttgaaaatgcctgctgtcgcggagggtgagcagttggaggaggatggagaaagtagcgattcagaggaattgaagaatgcggaggagttggaggggacagaggatggggaggagttggaggggacagacgatgaggaggaaatgggtgacaaggaggaggaagaagcggagctggatgggagaggagggaatggtgtggaggatgaattcctgaagatagatgaattgacggagttcctggagaagggtgaagaagaggagtatggtgatggagccaaacggagagagaagtcagtgaaaaactggatggttgagagtgacactgaggatgaagatgaggatcaattggatttagaagattttgaggatgatgacgaggatggtgaagcaggcggtggagatattctgtatgaagatttttttgagaatggacacaacaagcaagctaagaagagagatggttccacaaagaaagttcaattcaaggatgaagcacatgaagttgaactccatgacagtgagaatgatgatggaaatgatgaacaagaacatggtctctcaactcacgaaaaggagcgtctgaagatgcgtactaaaatagagcaaatggagaaagctaatcttgaacccagcacgtggaccatgcagggagaggttactgcttctaggaggcccaaaaacagtgccctagaagtggaccttgattttgagcacaatgtaagacctgcccctgtaataaccgaggaagtgacagcttcccttgaagaaatgataaagaaaagaatcgcagagagtcattttgatgatgttgagaagccgtctctcttgccatctaaagctccaaaggagcacaaggaactggatgaaactaagagcaagaagggtcttgctgaactgtatgaggatgactatgcacaaaaagcaggcattgcacctgccccactttctatttcagatgaactaaaggaagaggcaaatactttatttaagaggatatgtttgaaattggatgcgctatcgcatttccactttgctccaaagccagtcattgaggatatgtctgtgcaagcaaatgtgcctgctttagccatggaagagattgcacctgtagctgtttcggatgctgcaatgcttgcccctgaagagatatttgaaggaaaaggtgatgttaaggaagagggggaacttacacaggctgagcgcaagagaagaagagctaacaagaaaaggagatatgcagcatcccataaggagaggacagcgccagccaagttgcagaaagattaaactcaatgtttttttctcactagtttctaaatggtacaagagcgataaactggcaatacatattttccaaattttgtattgtaccctctgctagtagcttttacatgaacagtaaaatgtgaccatttatatttctacagaagcacacaagttcgagagttttgatttgctgaagtgcaattttgagagtgcaaaaaaagacttgtctgttgaaccctaggtatcggtagaaacatcatcctacgacctaaccgacctaaccgatggttatggttatgagtataattttctttccagctattgcaattgaagtcggtcatattcaatctaatttatttctgcacc

SEQ ID NO: 63547 - DNA, 2171 bp, Zea Mays
gtttttgctcccctcctacgtcgtcccgttgcctcgtgaccgcgcccagggtccgaactcccgaagcgtcgcgccgccgcccatcacggacatcggacaggagaagagaagcgggagcaccggagcaggcaccaccgccgaggcgacgaggtcgccgtgctccccatccgctgaggtagctgcactccggcctccgcggctgccggctccgccaacgcccagtcccaaggcgagcaggcacccacggcagcacggctgtcgcggtagtatttaaggaacagggaaacatctgctaccgcccaatctttccccttcccggactgctcgctggacgccgaggacgtacgtgtccgccgtctgtttccactcaccgtgtgatactgtgatggtggacttggacgagccgctcgatgcggctgtaactgcggagaagggcaaggcggcgctacaacggttacttgaggctgaccctgcactcttcctctccccctctgcggaccttgctgctgccgcccgagcggcctcgcagcacatctactcctcactgatttggtcccagatcgagctgcttgcccgcccactcctccctcagctgggccgccagctccgtcgcatcgtgcagcaaccctcctcgcaacagcctcctttgaaaatgcctgctgtcgcggagggtgagcagttggaggaggatggagaaagtagcgattcagaggaattgaagaatgcggaggagttggaggggacagaggatggggaggagttggaggggacagacgatgaggaggaaatgggtgacaaggaggaggaagaagcggagctggatgggagaggagggaatggtgtggaggatgaattcctgaagatagatgaattgacggagttcctggagaagggtgaagaagaggagtatggtgatggagccaaacggagagagaagtcagtgaaaaactggatggttgagagtgacactgaggatgaagatgaggatcaattggatttagaagattttgaggatgatgacgaggatggtgaagcaggcggtggagatattctgtatgaagatttttttgagaatggacacaacaagcaagctaagaagagagatggttccacaaagaaagttcaattcaaggatgaagcacatgaagttgaactccatgacagtgagaatgatgatggaaatgatgaacaagaacatggtctctcaactcacgaaaaggagcgtctgaagatgcgtactaaaatagagcaaatggagaaagctaatcttgaacccagcacgtggaccatgcagggagaggttactgcttctaggaggcccaaaaacagtgccctagaagtggaccttgattttgagcacaatgtaagacctgcccctgtaataaccgaggaagtgacagcttcccttgaagaaatgataaagaaaagaatcgcagagagtcattttgatgatgttgagaagccgtctctcttgccatctaaagctccaaaggagcacaaggaactggatgaaactaagagcaagaagggtcttgctgaactgtatgaggatgactatgcacaaaaagcaggcattgcacctgccccactttctatttcagatgaactaaaggaagaggcaaatactttatttaagaggatatgtttgaaattggatgcgctatcgcatttccactttgctccaaagccagtcattgaggatatgtctgtgcaagcaaatgtgcctgctttagccatggaagagattgcacctgtagctgtttcggatgctgcaatgcttgcccctgaagagatatttgaaggaaaaggtgatgttaaggaagagggggaacttacacaggctgagcgcaagagaagaagagctaacaagaaaaggagatatgcagcatcccataaggagaggacagcgccagccaagttgcagaaagattaaactcaatgtttttttctcactagtttctaaatgaagcacacaagttcgagagttttgatttgctgaagtgcaattttgagagtgcaaaaaaagacttgtctgttgaaccctaggtatcggtagaaacatcatcctacgacctaaccgacctaaccgatggttatggttatgagtataattttctttccagctattgcaattgaagtcggtcatattcaatctaatttatttctgcacc

SEQ ID NO: 63548 - DNA, 1366 bp, Zea Mays
tcatcagccctctcggaggcagttttaatctgtcaaataacaggttaaaaagagagacgtgagtggaaacttagaacggaggaagtgaaagccaaaacaggggtttatgtcaatataacatatgttaagcaccatttgtgtcattggcatgccgggtcgtttcagggtttagggttagattgaatcatgcacaactaattctttttcgcattagtttatccctctaaacatacggttgctatttggagacgtctaagaataggtccagacacccctatatattaggggtacaaccaattgcaatcaccaacaatcgatcaacaatctactcctagggcaaatcgcggaacgatgtttctaaatccacctagcagctagcagcattagcatttaatggaatgtgttactatttaaaagaaaaattagaaagcatttaatttttcacgctatctcagttacaccagagggctttgggagcaagatactgctaaagtggttcgtcacaatgttcatgtggtagaatgtgatcagactagctcggacgacgaatcaaaggaagtgtaccctgctgagatggtttagccaaagcaggccaaatctccagtttgtttctccttacggccgtttcaaaataaacgacaagagaaggttaaaattacatttaatgttggcaaatatgataaaatatttgatgaattactcaagagcggcaacattaaaaaattatactattccatccgtcgacgaacttaagcgtcgtgcttcctgcaagtggcacaattcattatttcacgctactaatgattgtaacgtgcttcgatgatagatccaattggacattaacgagggccaattaaaatttcaagaaatgaaggtggacatagagctctttacaataaatatgatcaactttgatgataaaaatgttctggttgacgtccaaattgacgcagacaacataaataaattttatataaactcagcagagataaagttttgattttccataacgtgaagctaaagacaacttgaatctgcactgtacttaccagtccatgaggaagttcagagctttccatgaccctcagcctcttagcggtagaaacaaatacactgcagaattaaagaataggacaaccgtcctgttttttagttggtcttctcaaattttggtagaattagaaagtaatttcagttgttaagaacgccccataatcatgaaaaaaatattgtagccagaggcgatgcctatcaaatatactaacttaggtgttgaagtctcatattcatatacacggagaaaggagcagggatgacttacttccatggtaggtgcccaactagtgtcctgcctccttcactgtct

SEQ ID NO: 63549 - DNA, 1660 bp, Zea Mays
aatcaccctacaaagtggagtttcataatagtacatgaattcctcttccatatttgctccataaacccgatttaaggggtacctatgtagcattatgtacatcaccaggttggtgaagatgttgtttctgagttgagcagggccatggagaggcagggactagatatgaaagttacggcattggtcaatgatacagttggcacattggctggtgggagatatatggataacgatgtagttgcagccgtaatattgggcactggtacaaatgcagcatatgtggagcatgcaaatgcaattcctaaatggactgggttactgcctaaatctggaaacatggtaattaatacggaatggggaagctttaaatccggcaagcttcctctctcagaatacgacaaagccatggactttgaaagtttgaaccctggagagcagatatacgaaaaaatgatttctggcatgtatctgggagagattgttcgaagaattttactcaagttggcacatgacgcttctctatttggagatgttgttccaactaagctggagcagccatttatattgaggacgccagatatgtcagccatgcatcatgactcttcgcatgacctcaaaactcttggatctaaactgaaggatatagttggggtcgcagatacttccctggaagtaagatacattacccgtcacatctgtgaccttgtcgcagagcgtggagcacgcttggctgccgcaggtatatatagcatcctgaagaagataggccgggacaaagtaccaagcagtggcagtaaaatgccaaggactgtaattgccttggatggtgggctctatgagcattacaagaagttcagcagctgcgtcgaagcaactcttacagacttgctcggcgaagaggcctcttcctccgtggttgccaagctggccaacgatggctctggcattggagctgctctccttgcagcctcacactcccagtatggcgagagtgactagtcttgaaaactggtgtggatcgaacttcgagtgtagctctcatttttatctttttttcccttcaaaacatccctaatattctggctctcctcggggaatttttcggcttcctttcttggctattctgtggatgcacttaaggctctgcagcgggatatagctagtatagagccaatcagtttggaggttatctaatggcataaggtttggacggcaggaacatagaaatggaagctgaacaatgccattcatgttctgcccagtttttcttctccttgtatggtgttgtaaaccaatcaaaacttttaacctttttgtgttggcaataaagaggaggcacgataatttgaccatgtgttctcttcactgcttcgtcaaatatatgattggatttagttttatagtttcgctgttacagtacataaaaacctatattacggggtggcactgtccatcagtgttgttgtaatgagctgtgatgactatcctttgctctggcaaagagcgtgcacaagcacatggcgtcctatatgctaggttctggcctcaggtggtcagggttcccatagccattgctcattctgcttttcttcagacattgcagtcgaaaccgcccttcccatcgtcgtcgatcacttcggcatcggagagttgtttccgg

SEQ ID NO: 63550 - DNA, 2916 bp, Zea Mays
tgaagaaagagagctgttcgtccaccggggacacagacacagttgctggcagttgaccttgcaacctccacgcggatgacagcaccgtactacacgaatctccaacaggcccgcgaccgcgaggcatccccgtcctggcgtccggaatctcagctggggtccgaccgtccacgtgggacaagaccccccgctttgaatgcggcatccctcgtctaattaccttctgattcgagctcaaggccccgacgcaatctccgctgcctccctgatctgtggccccgagacggtaggaaccacctgtcagcctgtactggctaccacgacgcgccaccgactgtttggtgacccatttcttgcgcgagcagagtcgctaatcgatttccatcctccaactaatctcacaccaatcgggtaattagcgaatatatatatatccatatttactagacaagccccccgggtccccagatccgtccacccccacgctccgatccagcccgtccagttcgacgcgaagcggatcgtagccgtccgaatccgaggggtggacccgtgaattccgggaaggacgaggggtagttggctaccggttaaaacgcccgtgccagtggcccccgtcttcctcctctcctacgcgggcggggaagccaaggaagaagaagtagtagttcgctggaggagttggggcctcgtcctcggatccagagcgcggaaacccgtgcgcgcgtccggatcgacccgctcgctcgacggccgcgggcgcgaggctagggatcaggatcggcggcggcggcggcgatggggaagtccgtggtggtgggcgcggcggtcgtggcgtgcgcggcggtgggggtggcggcggtgctggtgcaccgccggcgcaagcgcgacgccgcgctcctggggtccgcggaggcggagaggaggcggcgcgcggccgcggtgatcgaggaggtggagcgcagcctcgccacgcccacggcgctgctgcggggcatcgcggacgccatggtcgccgagatggagcgcggcctgcgcggggacatccacgcgcagctcaagatgctcattagctacgtcgacaatctccccaccggagatgaacatgggctgttttatgcactggatcttggagggaccaacttccgtgtgctgcgagtccaactaggaggaagggagaaacgtgttgtcaaacaacagtacgaggaggtttccattccaccgcatttgatggtgaagatttccacctcccagagggtaggcagagagaacttggtttcacgttttccttcccagtgaaccaaacatcaatatcatcaggaacactcatcaagtggacaaagggcttttccatcaatggcacggttggtgaagatgttgtttctgagttgagcagggccatggagaggcagggactagatatgaaagttacggcattggtcaatgatacagttggcacattggctggtgggagatatatggataacgatgtagttgcagccgtaatattgggcactggtacaaatgcagcatatgtggagcatgcaaatgcaattcctaaatggactgggttactgcctaaatctggaaacatggtaattaatacggaatggggaagctttaaatccggcaagcttcctctctcagaatacgacaaagccatggactttgaaagtttgaaccctggagagcagatatacgaaaaaatgatttctggcatgtatctgggagagattgttcgaagaattttactcaagttggcacatgacgcttctctatttggagatgttgttccaactaagctggagcagccatttatattgaggacgccagatatgtcagccatgcatcatgactcttcgcatgacctcaaaactcttggatctaaactgaaggatatagttggggtcgcagatacttccctggaagtaagatacattacccgtcacatctgtgaccttgtcgcagagcgtggagcacgcttggctgccgcaggtatatatagcatcctgaagaagataggccgggacaaagtaccaagcagtggcagtaaaatgccaaggactgtaattgccttggatggtgggctctatgagcattacaagaagttcagcagctgcgtcgaagcaactcttacagacttgctcggcgaagaggcctcttcctccgtggttgccaagctggccaacgatggctctggcattggagctgctctccttgcagcctcacactcccagtatggcgagagtgactagtcttgaaaactggtgtggatcgaacttcgagtgtagctctcatttttatctttttttcccttcaaaacatccctaatattctggctctcctcggggaatttttcggcttcctttcttggctattctgtggatgcacttaaggctctgcagcgggatatagctagtatagagccaatcagtttggaggttatctaatggcataaggtttggacggcaggaacatagaaatggaagctgaacaatgccattcatgttctgcccagtttttcttctccttgtatggtgttgtaaaccaatcaaaacttttaacctttttgtgttggcaataaagaggaggcacgataatttgaccatgtgttctcttcactgcttcgtcaaatatatgattggatttagttttatagtttcgctgttacagtacataaaaacctatattacggggtggcactgtccatcagtgttgttgtaatgagctgtgatgactatcctttgctctggcaaagagcgtgcacaagcacatggcgtcctatatgctaggttctggcctcaggtggtcagggttcccatagccattgctcattctgcttttcttcagacattgcagtcgaaaccgcccttcccatcgtcgtcgatcacttcggcatcggagagttgtttccgg

SEQ ID NO: 63551 - DNA, 2370 bp, Zea Mays
tcgtgagccgcgtcattccgtccgtcgcgcgcgcacgcccgtgctctccttaaattcccccggccccgacgccatgccctccggaattataccacgggccgcttgctactagttattgcgggcaggtagctcagcggtgaccacaggccaccaccgccaccgagcgacgaccatggctttgccgtcgcgggcgcggctcctcctcctcctctgcttcgtcgccgccgcggcgctgctcgtcgcgccgggggaggtgtccgccaccgccgccgccgccgacgccggggggcacgggaagcggcgcgggcacagcacgcacacgaggcgcctgcggcccgggaagggcgcggcggccgcgaagccgtaccccgcgaacgcggcgcgggtggaggcgatcgagcggcagttcgcgcggtgggtgcggtccatgggcggccacggccacaacagcagtagcaccgcctacagccgggcgctcagccgcgcgtccctgcccgcgcgcacgctcgtcgtcgacaagaacccgggcgccgggaacttcacgtccatccaggccgccgtggactcgctcccgctcatcaacctcgcccgcgtcgtcatcagggtcaacgccggcacgtacacggagaaggtgagcatctcgccgatgcgcgcgttcgtcaccgtggagggcgccggcgccgacaagacggtggtgcagtggggcgacacggcggacacggccggggcctggggcaggcccatgggcacgttcggctccgccacgttcgccgtcaactccatgttcttcgtcgccaagaacattaccttcaagggggtggcgctgcggatatcggcggacagcgcggcgttcgtggggtgcaacttcctgggcgcgcaggacacgctgtacgaccacctcggccgccactactaccgggactgctacatcgagggctccgtcgacttcatctttggcaacgcgctctccctctacgaggtcagtagtacgcacgcaactcagatgcacgaaacgaaactgtcattgcggcacttgtaggacgcagacacgggacacagacagacactgttgaacctaatcaaccccctttcggtttttaatgggtaaactacagacacagacacagtagagtagagcgtagtagagtgagcgtgagccagtgaggtgaacgaaccttttccttgtcgttggcggcgggcacggttgcgggatgcggtttcctgaggcctgcaggttccctggccccagtccccagaccagaggcgtggtgtggtgccgcccgtgacgcctgcctgccagtgccagccatagctggaccgacgcctcgtcgccgtctcctcctgcctgcctgcctggccgctctgccctttacgcagagcaccacttgcttttcttgtgctctcgatcggaaacgactaacaaatggatgacggtgagaaaataaaaaccccgcaggggtgccatgtgcacgcgatcgcgcggaactacggcgcgctgacggcgcagagccggcagagcctgctggaggacacggggttctcgttcgtgagctgccgggtgacggggtccggcgcgctctacctgggccgcgcctggggcaccttctcccgcgtcgtcttcgcctacacctacatggacaacatcatcatcccgcgcggctggtacaactggggcgacccgacgcgggagatgacggtgttctacgggcagtataagtgcacggggccgggcgcgaactacgccggcagggtgcagtggtcgcgggagctcaccgacgacgaggccaagcccttcatctcactcgacttcatcgacggcttcgagtggctccggctgtagaattcattgttgacacactacatgaccttaattaatttctgtgaagaagaagaagaaaacaaaaatagaacgaaaatactgatgcaattgtttgagctgcgtaagatgagattggtgactgatgactcgatgaggactgcagacattgcagtgcatcgaaatcgaatcatcgctgcaactggcaactggcaagtgttaccatggactattgtgggctgaaagggccccataactggaacagactctcgtttacaaagggtttaatttatgaatctggcctggcttggcccaggcctagcgccaggtttggtgcacgttcctgacgtgcgtgcgcagccagtcaagcgggggcccatcactccactcgttccgagcattcatatttacagtcactgggaatagcgattttatagctaacataagcactgcaaaatgcacctatgctaattattgagtgatttcttaagtactttggtgtctagcgctaatgatccgtgaataaatttttttagtttcttcttggtttaaaa

SEQ ID NO: 63552 - DNA, 1707 bp, Zea Mays
gtcgtcactcgtgagccgcgtcattccgtccgtcgcgcgcgcacgcccgtgctctccttaaattcccccggccccgacgccatgccctccggaattataccacgggccgcttgctactagttattgcgggcaggtagctcagcggtgaccacaggccaccaccgccaccgagcgacgaccatggctttgccgtcgcgggcgcggctcctcctcctcctctgcttcgtcgccgccgcggcgctgctcgtcgcgccgggggaggtgtccgccaccgccgccgccgccgacgccggggggcacgggaagcggcgcgggcacagcacgcacacgaggcgcctgcggcccgggaagggcgcggcggccgcgaagccgtaccccgcgaacgcggcgcgggtggaggcgatcgagcggcagttcgcgcggtgggtgcggtccatgggcggccacggccacaacagcagtagcaccgcctacagccgggcgctcagccgcgcgtccctgcccgcgcgcacgctcgtcgtcgacaagaacccgggcgccgggaacttcacgtccatccaggccgccgtggactcgctcccgctcatcaacctcgcccgcgtcgtcatcagggtcaacgccggcacgtacacggagaaggtgagcatctcgccgatgcgcgcgttcgtcaccgtggagggcgccggcgccgacaagacggtggtgcagtggggcgacacggcggacacggccggggcctggggcaggcccatgggcacgttcggctccgccacgttcgccgtcaactccatgttcttcgtcgccaagaacattaccttcaagaacacggcccccgtgccgaggcccggcgccctgggcaagcagggggtggcgctgcggatatcggcggacagcgcggcgttcgtggggtgcaacttcctgggcgcgcaggacacgctgtacgaccacctcggccgccactactaccgggactgctacatcgagggctccgtcgacttcatctttggcaacgcgctctccctctacgaggacggtgttctacgggcagtataagtgcacggggccgggcgcgaactacgccggcagggtgcagtggtcgcgggagctcaccgacgacgaggccaagcccttcatctcactcgacttcatcgacggcttcgagtggctccggctgtagaattcattgttgacacactacatgaccttaattaatttctgtgaagaagaagaagaaaacaaaaatagaacgaaaatactgatgcaattgtttgagctgcgtaagatgagattggtgactgatgactcgatgaggactgcagacattgcagtgcatcgaaatcgaatcatcgctgcaactggcaactggcaagtgttaccatggactattgtgggctgaaagggccccataactggaacagactctcgtttacaaagggtttaatttatgaatctggcctggcttggcccaggcctagcgccaggtttggtgcacgttcctgacgtgcgtgcgcagccagtcaagcgggggcccatcactccactcgttccgagcattcatatttacagtcactgggaatagcgattttatagctaacataagcactgcaaaatgcacctatgctaattattgagtgatttcttaagtactttggtgtctagcgctaatgatccgtgaataaatttttttagtttcttcttggtttaaaa

SEQ ID NO: 63553 - DNA, 2488 bp, Zea Mays
gcgcatgcggcgcaacaaaaccagccaacgtaaacagcttctcgaccgccccccggcgcggcttcgtcgtcgtcactcgtgagccgcgtcattccgtccgtcgcgcgcgcacgcccgtgctctccttaaattcccccggccccgacgccatgccctccggaattataccacgggccgcttgctactagttattgcgggcaggtagctcagcggtgaccacaggccaccaccgccaccgagcgacgaccatggctttgccgtcgcgggcgcggctcctcctcctcctctgcttcgtcgccgccgcggcgctgctcgtcgcgccgggggaggtgtccgccaccgccgccgccgccgacgccggggggcacgggaagcggcgcgggcacagcacgcacacgaggcgcctgcggcccgggaagggcgcggcggccgcgaagccgtaccccgcgaacgcggcgcgggtggaggcgatcgagcggcagttcgcgcggtgggtgcggtccatgggcggccacggccacaacagcagtagcaccgcctacagccgggcgctcagccgcgcgtccctgcccgcgcgcacgctcgtcgtcgacaagaacccgggcgccgggaacttcacgtccatccaggccgccgtggactcgctcccgctcatcaacctcgcccgcgtcgtcatcagggtcaacgccggcacgtacacggagaaggtgagcatctcgccgatgcgcgcgttcgtcaccgtggagggcgccggcgccgacaagacggtggtgcagtggggcgacacggcggacacggccggggcctggggcaggcccatgggcacgttcggctccgccacgttcgccgtcaactccatgttcttcgtcgccaagaacattaccttcaagaacacggcccccgtgccgaggcccggcgccctgggcaagcagggggtggcgctgcggatatcggcggacagcgcggcgttcgtggggtgcaacttcctgggcgcgcaggacacgctgtacgaccacctcggccgccactactaccgggactgctacatcgagggctccgtcgacttcatctttggcaacgcgctctccctctacgaggtcagtagtacgcacgcaactcagatgcacgaaacgaaactgtcattgcggcacttgtaggacgcagacacgggacacagacagacactgttgaacctaatcaaccccctttcggtttttaatgggtaaactacagacacagacacagtagagtagagcgtagtagagtgagcgtgagccagtgaggtgaacgaaccttttccttgtcgttggcggcgggcacggttgcgggatgcggtttcctgaggcctgcaggttccctggccccagtccccagaccagaggcgtggtgtggtgccgcccgtgacgcctgcctgccagtgccagccatagctggaccgacgcctcgtcgccgtctcctcctgcctgcctgcctggccgctctgccctttacgcagagcaccacttgcttttcttgtgctctcgatcggaaacgactaacaaatggatgacggtgagaaaataaaaaccccgcaggggtgccatgtgcacgcgatcgcgcggaactacggcgcgctgacggcgcagagccggcagagcctgctggaggacacggggttctcgttcgtgagctgccgggtgacggggtccggcgcgctctacctgggccgcgcctggggcaccttctcccgcgtcgtcttcgcctacacctacatggacaacatcatcatcccgcgcggctggtacaactggggcgacccgacgcgggagatgacggtgttctacgggcagtataagtgcacggggccgggcgcgaactacgccggcagggtgcagtggtcgcgggagctcaccgacgacgaggccaagcccttcatctcactcgacttcatcgacggcttcgagtggctccggctgtagaattcattgttgacacactacatgaccttaattaatttctgtgaagaagaagaagaaaacaaaaatagaacgaaaatactgatgcaattgtttgagctgcgtaagatgagattggtgactgatgactcgatgaggactgcagacattgcagtgcatcgaaatcgaatcatcgctgcaactggcaactggcaagtgttaccatggactattgtgggctgaaagggccccataactggaacagactctcgtttacaaagggtttaatttatgaatctggcctggcttggcccaggcctagcgccaggtttggtgcacgttcctgacgtgcgtgcgcagccagtcaagcgggggcccatcactccactcgttccgagcattcatatttacagtcactgggaatagcgattttatagctaacataagcactgcaaaatgcacctatgctaattattgagtgatttcttaagtactttggtgtctagcgctaatgatccgtgaataaatttttttagtttcttcttggtttaaaa

SEQ ID NO: 63554 - DNA, 1072 bp, Zea Mays
ggcaagaccgcgtgagcacaaagtcggaagggggaatacgcgcaagctacggctagggtttctggaatggggaatacgcgcaagcaacagctagggtatctggatttgggatggcttctgtgaagcaagcaacggcggcgccaggattttaacggcgtgagcacaaagagaattaaacggtgaccccagacgcaaatgactgtctgatgtccatatcagcaaaagtatgacgggtgggtctccaaaacacagaagccatccccaacgcctccatttcgtcgaaaccgtgtctctcgtgtttcataatggcaattgtctctcccacgagaaggcccgtgcgggtgcgctttgctcctctccccgcgtgctctccctctctctcgcgcgcgcggcgacgactcggctagtcggctaccgccgccgccccctacgccagcttcccagctcttcgtcaggcccttctccgtcaacgagcacccagcacatatcctgagcccctccacacctcaacgatggcgggattcagaagccttgcacccaagaccaggaacctggtggtggctggggggcctgtcggccttcgtgctcggggtctactactacaccatgagagccgtgggaggcacggacgagctgcaggtggcgatcgacaagtttgaggagatgaagaagaaggacgctgccagaaactccagcacaggaggatcgtaaacgcggcgcccttctcgtctctgtactgaacctggatctgcaggctgacatgatacggtagtcaagtcgctcagtaggccaagaacatgcgtgcctctactgtgcaataaataatgtgtgatactctttatcagatagagcttggcagcttgtgttttaaggagagatgtacactcgagtgtttttgtcctatgatataatagtggtcgcaatgtctaaatttccctgatataacttggcgagacggaaattctttgggataagtatttgcttgtgtaattacctttctccagctccctggagactgtgaccacacattgcattgcttatttgctgcgttgataaagatcatctctctctc

SEQ ID NO: 63555 - DNA, 178 bp, Zea Mays
gcgctttgctcctctccccgcgtgctctccctctctctcgcgcgcgcggcgacgactcggctagtcggctaccgccgccgccccctacgccagcttcccagctcttcgtcaggcccttctccgtcaacgagcacccagacgcccaaaattggcctgcggttagttgtattctgctgca

SEQ ID NO: 63556 - DNA, 1759 bp, Zea Mays
cttaaaggaacaacaactctggaaagtcgggagataacaatggagatggagtggctagcacctctggaccattcacattcaataggtctctagcttcactgcacacataccttggcgaggttgacgatactcggggtagagttactcttttagatggtggcacaatcctcaacttgccaatgttttatcttcaaggcgttgttctatttcctggagctaccctgcctctcagagtaattcaggatagattagtagtaactattgacaaagctttgagactggtcgatgctccatgcacaattggggtggttctcatgcgacgactcccaaatcatcgacattatgctactgcttcagttggaacaaccgcagagatacgtcaatttggaaggttggaagatggttcattaaatgttgttgcccgtgggcagcaaagatttcgtttaaggaggcattggattgatgttgatcgggtggtgtggggtgaggtacaaattattgaagaagatactcccttgagaactcctagagatgcatttgctcaggtagctgcatgcaataccttcaatttgcatgcttcgtcatcagtcatcagtttggataggtctcctatgaaacaagatcatatagattcagaactagagtgcaacactccatcaccaaacagtaaaataagcaacccttcatcaatggattcaaggttgtgccatctaggttcacagtcaagtgactcgatgaaatcatcctcagatgaagacggggatttgatgcccaaacagttttggaagcggaaacaacattctgtgagggaaagtggtgcatcaagtcattccgacaagaagaccaacatgagaaatgataacaatctttgcttgacgcctctccagtcatcgccaatagcaaaaacaagagatgctaagcggcggcgacagtaccatgcttactcaaagcaggcttctcatgcaccattatcattttggcctcggtgggtatatgaaatgtatgattcatatacacttgctcgcagtgctgcagagttatggagacagataattgcaaacccaagcatggacgatcataaagaaattcagcttctcaaggccttcaatcatattaaatgtagaaattgccagtctcatatagcaaaacgtagtgacatggtggtgatgtctaccgacgggcctcttggtgcctatgtcaaccctcacggttgtgtccacgagacgattacagtcagcaatgcaactgggctagcactcattggcaatccttcgaaagtccacagctggtttcctgggtactcgtggacgattgcagcatgcatggcctgcgagtcccacataggctggctattcagagccaccaagaagaatctgcggcctaggtccttctgggggatccgcagctcacaaatcgcagacgacacacaagtagatcagggtgactgatgctccaaacttccatgcgtataaggccatagtagcagtggactactaagtcatatatgacctggtgttcccaatcctccagtcgtgtctggttcatacgcactgcctgccttttttgtgttggcatagtagggacggtggagttccctgtaaaacaatcactctttttctactgttgtagtagtgctctgcactgaagggatttactgaatctctctttttttggtctaaataagatatctgttttcaatagtatatgcatgattttcatttacagatgttccatggtgtggcatgggtgaagaaaactg

SEQ ID NO: 63557 - DNA, 1891 bp, Zea Mays
caatccttccttcaactccatgcgtgtattttaccctcctcctcctcctccaacgagataacaatggagatggagtggctagcacctctggaccattcacattcaataggtctctagcttcactgcacacataccttggcgaggttgacgatactcggggtagagttactcttttagatggtggcacaatcctcaacttgccaatgttttatcttcaaggcgttgttctatttcctggagctaccctgcctctcagagtaattcaggatagattagtagtaactattgacaaagctttgagactggtcgatgctccatgcacaattggggtggttctcatgcgacgactcccaaatcatcgacattatgctactgcttcagttggaacaaccgcagagatacgtcaatttggaaggttggaagatggttcattaaatgttgttgcccgtgggcagcaaagatttcgtttaaggaggcattggattgatgttgatcgggtggtgtggggtgaggtacaaattattgaagaagatactcccttgagaactcctagagatgcatttgctcaggtagctgcatgcaataccttcaatttgcatgcttcgtcatcagtcatcagtttggataggtctcctatgaaacaagatcatatagattcagaactagagtgcaacactccatcaccaaacagtaaaataagcaacccttcatcaatggattcaaggttgtgccatctaggttcacagtcaagtgactcgatgaaatcatcctcagatgaagacggggatttgatgcccaaacagttttggaagcggaaacaacattctgtgagggaaagtggtgcatcaagtcattccgacaagaagaccaacatgagaaatgataacaatctttgcttgacgcctctccagtcatcgccaatagcaaaaacaagagatgctaagcggcggcgacagtaccatgcttactcaaagcaggcttctcatgcaccattatcattttggcctcggtgggtatatgaaatgtatgattcatatacacttgctcgcagtgctgcagagttatggagacagataattgcaaacccaagcatggacgatcatgtaagaaagccagatattttgtcatttcacatcggaagcaaacttccagtctcagaatctgtgagacaaaaacttctggagattgatggagtttcatatcgcctacagaaagaaattcagcttctcaaggccttcaatcatattaaatgtagaaattgccagtctcatatagcaaaacgtagtgacatggtggtgatgtctaccgacgggcctcttggtgcctatgtcaaccctcacggttgtgtccacgagacgattacagtcagcaatgcaactgggctagcactcattggcaatccttcgaaagtccacagctggtttcctgggtactcgtggacgattgcagcatgcatggcctgcgagtcccacataggctggctattcagagccaccaagaagaatctgcggcctaggtccttctgggggatccgcagctcacaaatcgcagacgacacacaagtagatcagggtgactgatgctccaaacttccatgcgtataaggccatagtagcagtggactactaagtcatatatgacctggtgttcccaatcctccagtcgtgtctggttcatacgcactgcctgccttttttgtgttggcatagtagggacggtggagttccctgtaaaacaatcactctttttctactgttgtagtagtgctctgcactgaagggatttactgaatctctctttttttggtctaaataagatatctgttttcaatagtatatgcatgattttcatttacagatgttccatggtgtggcatgggtgaagaaaactg

SEQ ID NO: 63558 - DNA, 1845 bp, Zea Mays
ggcgaggagacgaaccgaagattggccaaatctcgcttgcgtttctggggtggtgtctctgactctctggctccgtccccggcaccggcgggcggtggcgtgatggcggactgggaggggatcccgccgcgggagcggcggcagatggaggagatcctgcagctcgacatggaggagctcaacgtggaggtcgtcgacgacaacgaagaagacgaggaggaagaggagggtgacggcaacgaggaggactacgacgtcgatgccttcctcagagataacaatggagatggagtggctagcacctctggaccattcacattcaataggtctctagcttcactgcacacataccttggcgaggttgacgatactcggggtagagttactcttttagatggtggcacaatcctcaacttgccaatgttttatcttcaaggcgttgttctatttcctggagctaccctgcctctcagagtaattcaggatagattagtagtaactattgacaaagctttgagactggtcgatgctccatgcacaattggggtggttctcatgcgacgactcccaaatcatcgacattatgctactgcttcagttggaacaaccgcagagatacgtcaatttggaaggttggaagatggttcattaaatgttgttgcccgtgggcagcaaagatttcgtttaaggaggcattggattgatgttgatcgggtggtgtggggtgaggtacaaattattgaagaagatactcccttgagaactcctagagatgcatttgctcaggttgtgccatctaggttcacagtcaagtgactcgatgaaatcatcctcagatgaagacggggatttgatgcccaaacagttttggaagcggaaacaacattctgtgagggaaagtggtgcatcaagtcattccgacaagaagaccaacatgagaaatgataacaatctttgcttgacgcctctccagtcatcgccaatagcaaaaacaagagatgctaagcggcggcgacagtaccatgcttactcaaagcaggcttctcatgcaccattatcattttggcctcggtgggtatatgaaatgtatgattcatatacacttgctcgcagtgctgcagagttatggagacagataattgcaaacccaagcatggacgatcataaagaaattcagcttctcaaggccttcaatcatattaaatgtagaaattgccagtctcatatagcaaaacgtagtgacatggtggtgatgtctaccgacgggcctcttggtgcctatgtcaaccctcacggttgtgtccacgagacgattacagtcagcaatgcaactgggctagcactcattggcaatccttcgaaagtccacagctggtttcctgggtactcgtggacgattgcagcatgcatggcctgcgagtcccacataggctggctattcagagccaccaagaagaatctgcggcctaggtccttctgggggatccgcagctcacaaatcgcagacgacacacaagtagatcagggtgactgatgctccaaacttccatgcgtataaggccatagtagcagtggactactaagtcatatatgacctggtgttcccaatcctccagtcgtgtctggttcatacgcactgcctgccttttttgtgttggcatagtagggacggtggagttccctgtaaaacaatcactctttttctactgttgtagtagtgctctgcactgaagggatttactgaatctctctttttttggtctaaataagatatctgttttcaatagtatatgcatgattttcatttacagatgttccatggtgtggcatgggtgaagaaaactg

SEQ ID NO: 63559 - DNA, 2077 bp, Zea Mays
ggcgaggagacgaaccgaagattggccaaatctcgcttgcgtttctggggtggtgtctctgactctctggctccgtccccggcaccggcgggcggtggcgtgatggcggactgggaggggatcccgccgcgggagcggcggcagatggaggagatcctgcagctcgacatggaggagctcaacgtggaggtcgtcgacgacaacgaagaagacgaggaggaagaggagggtgacggcaacgaggaggactacgacgtcgatgccttcctcagagataacaatggagatggagtggctagcacctctggaccattcacattcaataggtctctagcttcactgcacacataccttggcgaggttgacgatactcggggtagagttactcttttagatggtggcacaatcctcaacttgccaatgttttatcttcaaggcgttgttctatttcctggagctaccctgcctctcagagtaattcaggatagattagtagtaactattgacaaagctttgagactggtcgatgctccatgcacaattggggtggttctcatgcgacgactcccaaatcatcgacattatgctactgcttcagttggaacaaccgcagagatacgtcaatttggaaggttggaagatggttcattaaatgttgttgcccgtgggcagcaaagatttcgtttaaggaggcattggattgatgttgatcgggtggtaagtccaaacatgttatcattcttttgaaatatgaacattttaaagaatatagctagcttcatttactcttctcaataggtgtggggtgaggtacaaattattgaagaagatactcccttgagaactcctagagatgcatttgctcaggtagctgcatgcaataccttcaatttgcatgcttcgtcatcagtcatcagtttggataggtctcctatgaaacaagatcatatagattcagaactagagtgcaacactccatcaccaaacagtaaaataagcaacccttcatcaatggattcaaggttgtgccatctaggttcacagtcaagtgactcgatgaaatcatcctcagatgaagacggggatttgatgcccaaacagttttggaagcggaaacaacattctgtgagggaaagtggtgcatcaagtcattccgacaagaagaccaacatgagaaatgataacaatctttgcttgacgcctctccagtcatcgccaatagcaaaaacaagagatgctaagcggcggcgacagtaccatgcttactcaaagcaggcttctcatgcaccattatcattttggcctcggtgggtatatgaaatgtatgattcatatacacttgctcgcagtgctagttatggagacagataattgcaaacccaagcatggacgatcataaagaaattcagcttctcaaggccttcaatcatattaaatgtagaaattgccagtctcatatagcaaaacgtagtgacatggtggtgatgtctaccgacgggcctcttggtgcctatgtcaaccctcacggttgtgtccacgagacgattacagtcagcaatgcaactgggctagcactcattggcaatccttcgaaagtccacagctggtttcctgggtactcgtggacgattgcagcatgcatggcctgcgagtcccacataggctggctattcagagccaccaagaagaatctgcggcctaggtccttctgggggatccgcagctcacaaatcgcagacgacacacaagtagatcagggtgactgatgctccaaacttccatgcgtataaggccatagtagcagtggactactaagtcatatatgacctggtgttcccaatcctccagtcgtgtctggttcatacgcactgcctgccttttttgtgttggcatagtagggacggtggagttccctgtaaaacaatcactctttttctactgttgtagtagtgctctgcactgaagggatttactgaatctctctttttttggtctaaataagatatctgttttcaatagtatatgcatgattttcatttacagatgttccatggtgtggcatgggtgaagaaaactg

SEQ ID NO: 63560 - DNA, 1903 bp, Zea Mays
ggcgaggagacgaaccgaagattggccaaatctcgcttgcgtttctggggtggtgtctctgactctctggctccgtccccggcaccggcgggcggtggcgtgatggcggactgggaggggatcccgccgcgggagcggcggcagatggaggagatcctgcagctcgacatggaggagctcaacgtggaggtcgtcgacgacaacgaagaagacgaggaggaagaggagggtgacggcaacgaggaggactacgacgtcgatgccttcctcagagataacaatggagatggagtggctagcacctctggaccattcacattcaataggtctctagcttcactgcacacataccttggcgaggttgacgatactcggggtagagttactcttttagatggtggcacaatcctcaacttgccaatgttttatcttcaaggcgttgttctatttcctggagctaccctgcctctcagagtaattcaggatagattagtagtaactattgacaaagctttgagactggtcgatgctccatgcacaattggggtggttctcatgcgacgactcccaaatcatcgacattatgctactgcttcagttggaacaaccgcagagatacgtcaatttggaaggttggaagatggttcattaaatgttgttgcccgtgggcagcaaagatttcgtttaaggaggcattggattgatgttgatcgggtggtgtggggtgaggtacaaattattgaagaagatactcccttgagaactcctagagatgcatttgctcagatgaagacggggatttgatgcccaaacagttttggaagcggaaacaacattctgtgagggaaagtggtgcatcaagtcattccgacaagaagaccaacatgagaaatgataacaatctttgcttgacgcctctccagtcatcgccaatagcaaaaacaagagatgctaagcggcggcgacagtaccatgcttactcaaagcaggcttctcatgcaccattatcattttggcctcggtgggtatatgaaatgtatgattcatatacacttgctcgcagtgctgcagagttatggagacagataattgcaaacccaagcatggacgatcatgtaagaaagccagatattttgtcatttcacatcggaagcaaacttccagtctcagaatctgtgagacaaaaacttctggagattgatggagtttcatatcgcctacagaaagaaattcagcttctcaaggccttcaatcatattaaatgtagaaattgccagtctcatatagcaaaacgtagtgacatggtggtgatgtctaccgacgggcctcttggtgcctatgtcaaccctcacggttgtgtccacgagacgattacagtcagcaatgcaactgggctagcactcattggcaatccttcgaaagtccacagctggtttcctgggtactcgtggacgattgcagcatgcatggcctgcgagtcccacataggctggctattcagagccaccaagaagaatctgcggcctaggtccttctgggggatccgcagctcacaaatcgcagacgacacacaagtagatcagggtgactgatgctccaaacttccatgcgtataaggccatagtagcagtggactactaagtcatatatgacctggtgttcccaatcctccagtcgtgtctggttcatacgcactgcctgccttttttgtgttggcatagtagggacggtggagttccctgtaaaacaatcactctttttctactgttgtagtagtgctctgcactgaagggatttactgaatctctctttttttggtctaaataagatatctgttttcaatagtatatgcatgattttcatttacagatgttccatggtgtggcatgggtgaagaaaactg

SEQ ID NO: 63561 - DNA, 2094 bp, Zea Mays
ggcgaggagacgaaccgaagattggccaaatctcgcttgcgtttctggggtggtgtctctgactctctggctccgtccccggcaccggcgggcggtggcgtgatggcggactgggaggggatcccgccgcgggagcggcggcagatggaggagatcctgcagctcgacatggaggagctcaacgtggaggtcgtcgacgacaacgaagaagacgaggaggaagaggagggtgacggcaacgaggaggactacgacgtcgatgccttcctcagagataacaatggagatggagtggctagcacctctggaccattcacattcaataggtctctagcttcactgcacacataccttggcgaggttgacgatactcggggtagagttactcttttagatggtggcacaatcctcaacttgccaatgttttatcttcaaggcgttgttctatttcctggagctaccctgcctctcagagtaattcaggatagattagtagtaactattgacaaagctttgagactggtcgatgctccatgcacaattggggtggttctcatgcgacgactcccaaatcatcgacattatgctactgcttcagttggaacaaccgcagagatacgtcaatttggaaggttggaagatggttcattaaatgttgttgcccgtgggcagcaaagatttcgtttaaggaggcattggattgatgttgatcgggtggtgtggggtgaggtacaaattattgaagaagatactcccttgagaactcctagagatgcatttgctcaggtagctgcatgcaataccttcaatttgcatgcttcgtcatcagtcatcagtttggataggtctcctatgaaacaagatcatatagattcagaactagagtgcaacactccatcaccaaacagtaaaataagcaacccttcatcaatggattcaaggttgtgccatctaggttcacagtcaagtgactcgatgaaatcatcctcagatgaagacggggatttgatgcccaaacagttttggaagcggaaacaacattctgtgagggaaagtggtgcatcaagtcattccgacaagaagaccaacatgagaaatgataacaatctttgcttgacgcctctccagtcatcgccaatagcaaaaacaagagatgctaagcggcggcgacagtaccatgcttactcaaagcaggcttctcatgcaccattatcattttggcctcggtgggtatatgaaatgtatgattcatatacacttgctcgcagtgctgcagataattgcaaacccaagcatggacgatcatgtaagaaagccagatattttgtcatttcacatcggaagcaaacttccagtctcagaatctgtgagacaaaaacttctggagattgatggagtttcatatcgcctacagaaagaaattcagcttctcaaggccttcaatcatattaaatgtagaaattgccagtctcatatagcaaaacgtagtgacatggtggtgatgtctaccgacgggcctcttggtgcctatgtcaaccctcacggttgtgtccacgagacgattacagtcagcaatgcaactgggctagcactcattggcaatccttcgaaagtccacagctggtttcctgggtactcgtggacgattgcagcatgcatggcctgcgagtcccacataggctggctattcagagccaccaagaagaatctgcggcctaggtccttctgggggatccgcagctcacaaatcgcagacgacacacaagtagatcagggtgactgatgctccaaacttccatgcgtataaggccatagtagcagtggactactaagtcatatatgacctggtgttcccaatcctccagtcgtgtctggttcatacgcactgcctgccttttttgtgttggcatagtagggacggtggagttccctgtaaaacaatcactctttttctactgttgtagtagtgctctgcactgaagggatttactgaatctctctttttttggtctaaataagatatctgttttcaatagtatatgcatgattttcatttacagatgttccatggtgtggcatgggtgaagaaaactg

SEQ ID NO: 63562 - DNA, 1246 bp, Zea Mays
ggcgaggagacgaaccgaagattggccaaatctcgcttgcgtttctggggtggtgtctctgactctctggctccgtccccggcaccggcgggcggtggcgtgatggcggactgggaggggatcccgccgcgggagcggcggcagatggaggagatcctgcagctcgacatggaggagctcaacgtggaggtcgtcgacgacaacgaagaagacgaggaggaagaggagggtgacggcaacgaggaggactacgacgtcgatgccttcctcagagataacaatggagatggagtggctagcacctctggaccattcacattcaataggtctctagcttcactgcacacataccttggcgaggttgacgatactcggggtagagttactcttttagatggtggcacaatcctcaacttgccaatgttttatcttcaaggcgttgttctatttcctggagctaccctgcctctcagagtaattcaggatagattagtagtaactattgacaaagctttgagactggtcgatgctccatgcacaattggggtggttctcatgcgacgactcccaaatcatcgacattatgctactgcttcagttggaacaaccgcagagatacgtcaatttggaaggttggaagatggttcattaaatgttgttgcccgtgggcagcaaagatttcgtttaaggaggcattggattgatgttgatcgggtggtagctgcatgcaataccttcaatttgcatgcttcgtcatcagtcatcagtttggataggtctcctatgaaacaagatcatatagattcagaactagagtgcaacactccatcaccaaacagtaaaataagcaacccttcatcaatggattcaaggttgtgccatctaggttcacagtcaagtgactcgatgaaatcatcctcagatgaagacggggatttgatgcccaaacagttttggaagcggaaacaacattctgtgagggaaagtggtgcatcaagtcattccgacaagaagaccaacatgagaaatgataacaatctttgcttgacgcctctccagtcatcgccaatagcaaaaacaagagatgctaagcggcggcgacagtaccatgcttactcaaagcaggcttctcatgcaccattatcattttggcctcggtgggtatatgaaatgtatgattcatatacacttgctcgcagtgctgcagataagtgcaagctgcctgaggtctcattggaatatttgg

SEQ ID NO: 63563 - DNA, 1982 bp, Zea Mays
cgtcgtcctccactccgccctccaacgccacggacgcgggacgcgtcccaattaaacccttctccttctctctctctctcctctctctctctctctatttccgcctgccactctacgcgcgcagaaaaaaatcaggacagaaataagcggaggcgagggagtggaggaagggaacaacagacaaattctctgcggtgaatggaggtttcggccgagtgcgcgggcggcgggagtgtgaagaaggaggcggacctcttccttgtcgacgacctactcgacctgccgtgcgacgacgacgacgaggagacggtggtgggcgactgggaaggggacgggagtaagcaggctgcggtgttggaccggggttgtggcgccggcggggaggagggtgccgccggtaacgcgtcgaagaacgaatcgtcggcggtgactgcgctggacagctgcagcaattccatctcgggttccggcctcgccgacggggacttctccggcgggctgtgcgagccgtacgaccaactagcggagctggaatggctgtccaactacctgggcgaggacaactttcccacggaggatctgaagaagctgcagctcatcaccggcattccgccggctgcaaccgcgatggcgcccgcgcccgcgcccgccgccgcacaggcacagccggccgctggcgtgttgccacaggaggcgcccgtgctgggcaaggcacgcagcaagcggtcgcgcgtcgcgccatgcagctgggcctcccgcctggtcgtgctcccgccacctagtcccggctcgccgccgtccgcggccatctcgccgtccgagtccggctccggcaccgcggcgctggcgttcccggccaggaagccgttgaagcctgcgaagaagaaggaggcgccgtcgccgtcgctgccgccggtgccaaacaacgccgcggcggcgggcgcgggggaggggcggcggtgcctgcactgcgagaccgacaagacgcctcagtggaggacggggccgctgggccccaagacgctgtgcaacgcgtgcggcgtgcggtacaagtcgggccgcctcgtgccggagtaccggccggcggcgagcccgaccttcgtggtgtcgaagcactccaactcccaccggaaggtgctggagctgcagcgccagaaggaggcgcacccgcaccaccaccaccagtaccagccgcagcaggccctcgcccacgtcggcgccggcgggaccttgaacttgatgcacgcgccgagcccgctgctgttcgacgggccggcggcgccgctcatcggcgacgacttcttggtccacagccacatagggccggacttccgtcagctcatctagggacgccgtctggtcatttgctctctctagagtctgatccaatagcccaggaataataattcagcgcaaccaaaaactgatctttattttctaggagtttttccctccagtttttcctttgtattttcaccagactatcttttccgaaatcttcaatttttttttttgtttctctctcgatttctcgtgttttttttttgcttgaacctttcttctcggacctttgagtttctgacaccttagaaaataattctagggagttgtttttcttagcctcccccaccccggctttctttcttagcatgtttttgagatttgtataatgcagagctcctagaggaagagtaaacaagcaggtctaaagttcagacttcaaagctagtgtgagccttcatactgtactcctagttgtttcattgttttttgtgaaatcccaatcttgtctgcgtttcggcgagcaagacgacgattcgctctctgctgctgaaccgatcgctgtaatgataaagggggactcacggctcacaaattaaagccacaggacccacgatcagaagcgtgagagggtgagtgtggtgtgagcaaccaaaccaaaaagtagtacggagcactcctgctaaccagcagagagtagg

SEQ ID NO: 63564 - DNA, 1125 bp, Zea Mays
gttcgagccacatcctctgcatactatgcgggtctatggttttggtggagtgggtatggtcgttgaagttctaactgacaaaattacaagatcagttgctgacattagaaacgtggtgaaagactgcggagcaaaattggctgatcctggatctgttacctttagattcagacaagctcgagtggtgaacataaaagttactgatgcagataaggaccaactgctcaccgttgcgttagatgctggtgctgatgacgtccttgaaccaaattttgatgatgatgactctgaagaagaagcagaaaggttctacaagatagttactacatcagaaaactacccagttttgctatcgaagcttcaagaagaaggattgaagtttgaaactgataatggctacgaacttgttcctctgaacccaattgaggtggacgacgaggccgtggaactaaacaaggaacttgtttcaaatttgctagagcttgatgacgttgatgccgtctatacagaccaaaaatgagtgaattcatgagctacagctctcaattcaagacgcgctcggccaatggactttgttcgagtatattcacttttcattgatgggaaaaaaatgttaggtctttttatgaagcctggttgagcaccatcggctctacccaaaaacttaacctagttatccagcatctttttgatactttggcatttcgcaagctcatgtctataccttggtttcttcccagcccatcgtgttgggatggtttgatacatgttcagaaagcagatgtgagaaaccatagtaaaataatacgttgatgctgatccatttttgggtcttgttaaattgcaatggaaatgctatgattttggtaagcattgaaatgaaaatgctttggctctctgaataaatgaatgtgctcttcgctcctataagctggaaataggaatataaaatacttggaacaaacaatttttctgtcagtttcaatatccaccggaagatctcatcagattggcagttatgcgtaccactttcaccgagtggccacaagttccatagttccatactgtagcattcaggttatcccccaacaaggaaatgcattttcaaaaagtggtgtataaaat

SEQ ID NO: 63565 - DNA, 994 bp, Zea Mays
cgggttcgagccacatcctctgcatactatgcggattcagacaagctcgagtggtgaacataaaagttactgatgcagataaggaccaactgctcaccgttgcgttagatgctggtgctgatgacgtccttgaaccaaattttgatgatgatgactctgaagaagaagcagaaaggttctacaagatagttactacatcagaaaactacccagttttgctatcgaagcttcaagaagaaggattgaagtttgaaactgataatggctacgaacttgttcctctgaacccaattgaggtggacgacgaggccgtggaactaaacaaggaacttgtttcaaatttgctagagcttgatgacgttgatgccgtctatacagaccaaaaatgagtgaattcatgagctacagctctcaattcaagacgcgctcggccaatggactttgttcgagtatattcacttttcattgatgggaaaaaaatgttaggtctttttatgaagcctggttgagcaccatcggctctacccaaaaacttaacctagttatccagcatctttttgatactttggcatttcgcaagctcatgtctataccttggtttcttcccagcccatcgtgttgggatggtttgatacatgttcagaaagcagatgtgagaaaccatagtaaaataatacgttgatgctgatccatttttgggtcttgttaaattgcaatggaaatgctatgattttggtaagcattgaaatgaaaatgctttggctctctgaataaatgaatgtgctcttcgctcctataagctggaaataggaatataaaatacttggaacaaacaatttttctgtcagtttcaatatccaccggaagatctcatcagattggcagttatgcgtaccactttcaccgagtggccacaagttccatagttccatactgtagcattcaggttatcccccaacaaggaaatgcattttcaaaaagtggtgtataaaat

SEQ ID NO: 63566 - DNA, 2734 bp, Zea Mays
cacacccaggctcctcacctcaccaccgcggccgcctgcccaaagcagcccaccactcgggcgcagcaattcgtcgagcatccgccgcgctcgacggccaccggcccaccagggcaccatggcgtccgccacgcgtgctctgggggcgctcctccacagggcctcgtctctgtcttcctccgctcccgctctccggggagcctcgctcctccgcggggacgggcctattggaagcgccggactgttccggaggcatgcggcgaggcggcggatttcgtcgttccagccgctctgcatgggaagacgctcctgcaaaatcgctggaaggaaggtgatgttctcttgccatgatgcacaatgtcacattaacgaagttcgggacggctggctgtgcatattctggttggcaaagccgtggaaatatcccgtgcaatcaatcatgttgtgcatgcgtgcaatcaagcaatcaaattcccaatgaaaatccaatagtaactgctagtttacatttaactccttccgcgtgaaaccagcaacattgtacttatttttatatttaatcccatttcatatgaaaccgttagatctagattggattcctggatgatttgattgcatgcttgcaccaaatgtgtgattacagtggatatatccccggcaaagcctccatttggaataatagaaatggatgcaacaacaaatatcattgtgtttcgaattttcggttctcttgaggatctgagctagcttttgctgctaagtagttgttcgcttcggattaaagccgactgtttagactgctgcagctgtaatctatagagacaaaaacattgtagaaacagtagaagccggtacggattaaaaccaagcgaataagctcggtccattagcgtaattgagaatggaaaaactgaaaacagaaagtagctttagtttcttgtttataaaatgtagttagctttaacgtctcaatatgtatcctcagagcaactccaacagccttactaaattgaacaaaatcagtaaaaaaaagaaaagcctggttaaaaacgcatccaacaggctagctttctacctctcttctccatccggctcgtcatctactcccctcgctaggcatctttgccgagggcgtacggctcgccatttccttttatcgcgcccaactgccctcccgccgtcacggcaaattccagctcccgcgaccgcgacattgcaccctcgccaccgcgaccagcccgtgcctccacattcatccgtcgccatgtacaaacctgtacggccccattcgttgaacaagtgaagaaactggattgtggaatgctcctctttctcagtgttcgccaggaaggatagatccggaggcgcatcgtacgggtggagatttggaccaatccactgtaggattgatgcaccggcgtttgcttcctcctacaagcttcgaaggcctaatgtcagcaaatctgtcccatgccaatcgaataaacagggatgaatcctacacaggatgcccagaacttgaagaagatgaagcgcaacagcaaaattggaaaagaaattgttgcggcgtaggtgttgctggacactgtgaacttgcactatcattttaacagcttgcatcaagaagggtggcccaaacccttcatccaacacaactttatcagctatactagagaaagcaagggaacttgatgtccctagagaaattttggagcgcaacatcaaaagggcatcagaaaagggacaagatacttacacagaaaaggtttatgagattcagacaagctcgagtggtgaacataaaagttactgatgcagataaggaccaactgctcaccgttgcgttagatgctggtgctgatgacgtccttgaaccaaattttgatgatgatgactctgaagaagaagcagaaaggttctacaagatagttactacatcagaaaactacccagttttgctatcgaagcttcaagaagaaggattgaagtttgaaactgataatggctacgaacttgttcctctgaacccaattgaggtggacgacgaggccgtggaactaaacaaggaacttgtttcaaatttgctagagcttgatgacgttgatgccgtctatacagaccaaaaatgagtgaattcatgagctacagctctcaattcaagacgcgctcggccaatggactttgttcgagtatattcacttttcattgatgggaaaaaaatgttaggtctttttatgaagcctggttgagcaccatcggctctacccaaaaacttaacctagttatccagcatctttttgatactttggcatttcgcaagctcatgtctataccttggtttcttcccagcccatcgtgttgggatggtttgatacatgttcagaaagcagatgtgagaaaccatagtaaaataatacgttgatgctgatccatttttgggtcttgttaaattgcaatggaaatgctatgattttggtaagcattgaaatgaaaatgctttggctctctgaataaatgaatgtgctcttcgctcctataagctggaaataggaatataaaatacttggaacaaacaatttttctgtcagtttcaatatccaccggaagatctcatcagattggcagttatgcgtaccactttcaccgagtggccacaagttccatagttccatactgtagcattcaggttatcccccaacaaggaaatgcattttcaaaaagtggtgtataaaat

SEQ ID NO: 63567 - DNA, 3155 bp, Zea Mays
cacacccaggctcctcacctcaccaccgcggccgcctgcccaaagcagcccaccactcgggcgcagcaattcgtcgagcatccgccgcgctcgacggccaccggcccaccagggcaccatggcgtccgccacgcgtgctctgggggcgctcctccacagggcctcgtctctgtcttcctccgctcccgctctccggggagcctcgctcctccgcggggacgggcctattggaagcgccggactgttccggaggcatgcggcgaggcggcggatttcgtcgttccagccgctctgcatgggaagacgctcctgcaaaatcgctggaaggaaggtgatgttctcttgccatgatgcacaatgtcacattaacgaagttcgggacggctggctgtgcatattctggttggcaaagccgtggaaatatcccgtgcaatcaatcatgttgtgcatgcgtgcaatcaagcaatcaaattcccaatgaaaatccaatagtaactgctagtttacatttaactccttccgcgtgaaaccagcaacattgtacttatttttatatttaatcccatttcatatgaaaccgttagatctagattggattcctggatgatttgattgcatgcttgcaccaaatgtgtgattacagtggatatatccccggcaaagcctccatttggaataatagaaatggatgcaacaacaaatatcattgtgtttcgaattttcggttctcttgaggatctgagctagcttttgctgctaagtagttgttcgcttcggattaaagccgactgtttagactgctgcagctgtaatctatagagacaaaaacattgtagaaacagtagaagccggtacggattaaaaccaagcgaataagctcggtccattagcgtaattgagaatggaaaaactgaaaacagaaagtagctttagtttcttgtttataaaatgtagttagctttaacgtctcaatatgtatcctcagagcaactccaacagccttactaaattgaacaaaatcagtaaaaaaaagaaaagcctggttaaaaacgcatccaacaggctagctttctacctctcttctccatccggctcgtcatctactcccctcgctaggcatctttgccgagggcgtacggctcgccatttccttttatcgcgcccaactgccctcccgccgtcacggcaaattccagctcccgcgaccgcgacattgcaccctcgccaccgcgaccagcccgtgcctccacattcatccgtcgccatgtacaaacctgtacggccccattcgttgaacaagtgaagaaactggattgtggaatgctcctctttctcagtgttcgccaggaaggatagatccggaggcgcatcgtacgggtggagatttggaccaatccactgtaggattgatgcaccggcgtttgcttcctcctacaagcttcgaaggcctaatgtcagcaaatctgtcccatgccaatcgaataaacagggatgaatcctacacagggaggcaatcctttggatttcaaaatgtagttgatctaattcatgcatatgctgccaaagctgttactgaacaactagaccaaaatgagaaccttgtatcagtcaatgcagatgtctgcaatttctgggaaaaggatgttatgccgatgcttttctgtaggagttgcagatttttttttaaaaaaaaaacttcagccgaaacaggatgttatatcgaaacattgaattagcagtggatcgtgttcagaaagttgggttcattgtagggatcagcttccaggggttggttcgttgcaggatcaattgccaacctaccactgagtctaaatttagagtctgttggttacccacccttcaggaagttctatattttataaagccatctccaaaactctaaaattagctaggaattatagctatgctgttggagttgctctcagttccttacaccagttgtttctttaattcaggatgcccagaacttgaagaagatgaagcgcaacagcaaaattggaaaagaaattgttgcggccatcaagaagggtggcccaaacccttcatccaacacaactttatcagctatactagagaaagcaagggaacttgatgtccctagagaaattttggagcgcaacatcaaaagggcatcagaaaagggacaagatacttacacagaaaaggtttatgagattcagacaagctcgagtggtgaacataaaagttactgatgcagataaggaccaactgctcaccgttgcgttagatgctggtgctgatgacgtccttgaaccaaattttgatgatgatgactctgaagaagaagcagaaaggttctacaagatagttactacatcagaaaactacccagttttgctatcgaagcttcaagaagaaggattgaagtttgaaactgataatggctacgaacttgttcctctgaacccaattgaggtggacgacgaggccgtggaactaaacaaggaacttgtttcaaatttgctagagcttgatgacgttgatgccgtctatacagaccaaaaatgagtgaattcatgagctacagctctcaattcaagacgcgctcggccaatggactttgttcgagtatattcacttttcattgatgggaaaaaaatgttaggtctttttatgaagcctggttgagcaccatcggctctacccaaaaacttaacctagttatccagcatctttttgatactttggcatttcgcaagctcatgtctataccttggtttcttcccagcccatcgtgttgggatggtttgatacatgttcagaaagcagatgtgagaaaccatagtaaaataatacgttgatgctgatccatttttgggtcttgttaaattgcaatggaaatgctatgattttggtaagcattgaaatgaaaatgctttggctctctgaataaatgaatgtgctcttcgctcctataagctggaaataggaatataaaatacttggaacaaacaatttttctgtcagtttcaatatccaccggaagatctcatcagattggcagttatgcgtaccactttcaccgagtggccacaagttccatagttccatactgtagcattcaggttatcccccaacaaggaaatgcattttcaaaaagtggtgtataaaat

SEQ ID NO: 63568 - DNA, 2376 bp, Zea Mays
cacacccaggctcctcacctcaccaccgcggccgcctgcccaaagcagcccaccactcgggcgcagcaattcgtcgagcatccgccgcgctcgacggccaccggcccaccagggcaccatggcgtccgccacgcgtgctctgggggcgctcctccacagggcctcgtctctgtcttcctccgctcccgctctccggggagcctcgctcctccgcggggacgggcctattggaagcgccggactgttccggaggcatgcggcgaggcggcggatttcgtcgttccagccgctctgcatgggaagacgctcctgcaaaatcgctggaaggaagggaggcaatcctttggatttcaaaatgtagttgatctaattcatgcatatgctgccaaagctgttactgaacaactagaccaaaatgagaaccttgtatcagtcaatgcagatgtctgcaatttctgggaaaaggatgttatgccgatgcttttctgtaggagttgcagatttttttttaaaaaaaaaacttcagccgaaacaggatgttatatcgaaacattgaattagcagtggatcgtgttcagaaagttgggttcattgtagggatcagcttccaggggttggttcgttgcaggatcaattgccaacctaccactgagtctaaatttagagtctgttggttacccacccttcaggaagttctatattttataaagccatctccaaaactctaaaattagctaggaattatagctatgctgttggagttgctctcagttccttacaccagttgtttctttaattcaggatgcccagaacttgaagaagatgaagcgcaacagcaaaattggaaaagaaattgttgcggcgtaggtgttgctggacactgtgaacttgcactatcattttaacagcttggtatttcattgatttcataatttggattattttgagcatatggttaatccaacatgctgtcatctgctagtatatgttgacataagatgttttacctttttggccgtttaaacttaaatcattggacatctgttcccgtgctacagtgtctatatattctcagtctgtagcgtttcatgttattatgttgtgaaggtattgcggttgtatttagtaattagacattgcctgcttaatatctctgaagtgaatggcactatcttacccaagtggtaggccttgttaaaatgaaaaaaaagcaactgacaacaagaccaagcatcagactatcagagttctagtgccattcatttaaattaattaatctggtccgtttctggatatcacacagcatcaagaagggtggcccaaacccttcatccaacacaactttatcagctatactagagaaagcaagggaacttgatgtccctagagaaattttggagcgcaacatcaaaagggcatcagaaaagggacaagatacttacacagaaaaggtttatgagataaggaccaactgctcaccgttgcgttagatgctggtgctgatgacgtccttgaaccaaattttgatgatgatgactctgaagaagaagcagaaaggttctacaagatagttactacatcagaaaactacccagttttgctatcgaagcttcaagaagaaggattgaagtttgaaactgataatggctacgaacttgttcctctgaacccaattgaggtggacgacgaggccgtggaactaaacaaggaacttgtttcaaatttgctagagcttgatgacgttgatgccgtctatacagaccaaaaatgagtgaattcatgagctacagctctcaattcaagacgcgctcggccaatggactttgttcgagtatattcacttttcattgatgggaaaaaaatgttaggtctttttatgaagcctggttgagcaccatcggctctacccaaaaacttaacctagttatccagcatctttttgatactttggcatttcgcaagctcatgtctataccttggtttcttcccagcccatcgtgttgggatggtttgatacatgttcagaaagcagatgtgagaaaccatagtaaaataatacgttgatgctgatccatttttgggtcttgttaaattgcaatggaaatgctatgattttggtaagcattgaaatgaaaatgctttggctctctgaataaatgaatgtgctcttcgctcctataagctggaaataggaatataaaatacttggaacaaacaatttttctgtcagtttcaatatccaccggaagatctcatcagattggcagttatgcgtaccactttcaccgagtggccacaagttccatagttccatactgtagcattcaggttatcccccaacaaggaaatgcattttcaaaaagtggtgtataaaat

SEQ ID NO: 63569 - DNA, 1906 bp, Zea Mays
cacacccaggctcctcacctcaccaccgcggccgcctgcccaaagcagcccaccactcgggcgcagcaattcgtcgagcatccgccgcgctcgacggccaccggcccaccagggcaccatggcgtccgccacgcgtgctctgggggcgctcctccacagggcctcgtctctgtcttcctccgctcccgctctccggggagcctcgctcctccgcggggacgggcctattggaagcgccggactgttccggaggcatgcggcgaggcggcggatttcgtcgttccagccgctctgcatgggaagacgctcctgcaaaatcgctggaaggaaggatgcccagaacttgaagaagatgaagcgcaacagcaaaattggaaaagaaattgttgcggcgtaggtgttgctggacactgtgaacttgcactatcattttaacagcttggtatttcattgatttcataatttggattattttgagcatatggttaatccaacatgctgtcatctgctagtatatgttgacataagatgttttacctttttggccgtttaaacttaaatcattggacatctgttcccgtgctacagtgtctatatattctcagtctgtagcgtttcatgttattatgttgtgaaggtattgcggttgtatttagtaattagacattgcctgcttaatatctctgaagtgaatggcactatcttacccaagtggtaggccttgttaaaatgaaaaaaaagcaactgacaacaagaccaagcatcagactatcagagttctagtgccattcatttaaattaattaatctggtccgtttctggatatcacacagcatcaagaagggtggcccaaacccttcatccaacacaactttatcagctatactagagaaagcaagggaacttgatgtccctagagaaattttggagcgcaacatcaaaagggcatcagaaaagggacaagatacttacacagaaaaggtttatgagataaggaccaactgctcaccgttgcgttagatgctggtgctgatgacgtccttgaaccaaattttgatgatgatgactctgaagaagaagcagaaaggttctacaagatagttactacatcagaaaactacccagttttgctatcgaagcttcaagaagaaggattgaagtttgaaactgataatggctacgaacttgttcctctgaacccaattgaggtggacgacgaggccgtggaactaaacaaggaacttgtttcaaatttgctagagcttgatgacgttgatgccgtctatacagaccaaaaatgagtgaattcatgagctacagctctcaattcaagacgcgctcggccaatggactttgttcgagtatattcacttttcattgatgggaaaaaaatgttaggtctttttatgaagcctggttgagcaccatcggctctacccaaaaacttaacctagttatccagcatctttttgatactttggcatttcgcaagctcatgtctataccttggtttcttcccagcccatcgtgttgggatggtttgatacatgttcagaaagcagatgtgagaaaccatagtaaaataatacgttgatgctgatccatttttgggtcttgttaaattgcaatggaaatgctatgattttggtaagcattgaaatgaaaatgctttggctctctgaataaatgaatgtgctcttcgctcctataagctggaaataggaatataaaatacttggaacaaacaatttttctgtcagtttcaatatccaccggaagatctcatcagattggcagttatgcgtaccactttcaccgagtggccacaagttccatagttccatactgtagcattcaggttatcccccaacaaggaaatgcattttcaaaaagtggtgtataaaat

SEQ ID NO: 63570 - DNA, 3380 bp, Zea Mays
cacacccaggctcctcacctcaccaccgcggccgcctgcccaaagcagcccaccactcgggcgcagcaattcgtcgagcatccgccgcgctcgacggccaccggcccaccagggcaccatggcgtccgccacgcgtgctctgggggcgctcctccacagggcctcgtctctgtcttcctccgctcccgctctccggggagcctcgctcctccgcggggacgggcctattggaagcgccggactgttccggaggcatgcggcgaggcggcggatttcgtcgttccagccgctctgcatgggaagacgctcctgcaaaatcgctggaaggaaggtgatgttctcttgccatgatgcacaatgtcacattaacgaagttcgggacggctggctgtgcatattctggttggcaaagccgtggaaatatcccgtgcaatcaatcatgttgtgcatgcgtgcaatcaagcaatcaaattcccaatgaaaatccaatagtaactgctagtttacatttaactccttccgcgtgaaaccagcaacattgtacttatttttatatttaatcccatttcatatgaaaccgttagatctagattggattcctggatgatttgattgcatgcttgcaccaaatgtgtgattacagtggatatatccccggcaaagcctccatttggaataatagaaatggatgcaacaacaaatatcattgtgtttcgaattttcggttctcttgaggatctgagctagcttttgctgctaagtagttgttcgcttcggattaaagccgactgtttagactgctgcagctgtaatctatagagacaaaaacattgtagaaacagtagaagccggtacggattaaaaccaagcgaataagctcggtccattagcgtaattgagaatggaaaaactgaaaacagaaagtagctttagtttcttgtttataaaatgtagttagctttaacgtctcaatatgtatcctcagagcaactccaacagccttactaaattgaacaaaatcagtaaaaaaaagaaaagcctggttaaaaacgcatccaacaggctagctttctacctctcttctccatccggctcgtcatctactcccctcgctaggcatctttgccgagggcgtacggctcgccatttccttttatcgcgcccaactgccctcccgccgtcacggcaaattccagctcccgcgaccgcgacattgcaccctcgccaccgcgaccagcccgtgcctccacattcatccgtcgccatgtacaaacctgtacggccccattcgttgaacaagtgaagaaactggattgtggaatgctcctctttctcagtgttcgccaggaaggatagatccggaggcgcatcgtacgggtggagatttggaccaatccactgtaggattgatgcaccggcgtttgcttcctcctacaagcttcgaaggcctaatgtcagcaaatctgtcccatgccaatcgaataaacagggatgaatcctacacagattttggaaccggaaggcatatgtggaccagaacacttatgtgcagattgaagtggatttttgccagacaaatctctctgcttgcatgattgaagtgcatatgtggcccaatacacttatatgctcttattcctcactgccatctcatttctaaagttggaaagattgaactgaaccttgctctgaacttttttccttctttgttttcttattgttgcagggaggcaatcctttggatttcaaaatgtagttgatctaattcatgcatatgctgccaaagctgttactgaacaactagaccaaaatgagaaccttgtatcagtcaatgcagatgtctgcaatttctgggaaaaggatgttatgccgatgcttttctgtaggagttgcagatttttttttaaaaaaaaaacttcagccgaaacaggatgttatatcgaaacattgaattagcagtggatcgtgttcagaaagttgggttcattgtagggatcagcttccaggggttggttcgttgcaggatcaattgccaacctaccactgagtctaaatttagagtctgttggttacccacccttcaggaagttctatattttataaagccatctccaaaactctaaaattagctaggaattatagctatgctgttggagttgctctcagttccttacaccagttgtttctttaattcaggatgcccagaacttgaagaagatgaagcgcaacagcaaaattggaaaagaaattgttgcggcgtaggtgttgctggacactgtgaacttgcactatcattttaacagcttgcatcaagaagggtggcccaaacccttcatccaacacaactttatcagctatactagagaaagcaagggaacttgatgtccctagagaaattttggagcgcaacatcaaaagggcatcagaaaagggacaagatacttacacagaaaaggtttatgagataaggaccaactgctcaccgttgcgttagatgctggtgctgatgacgtccttgaaccaaattttgatgatgatgactctgaagaagaagcagaaaggttctacaagatagttactacatcagaaaactacccagttttgctatcgaagcttcaagaagaaggattgaagtttgaaactgataatggctacgaacttgttcctctgaacccaattgaggtggacgacgaggccgtggaactaaacaaggaacttgtttcaaatttgctagagcttgatgacgttgatgccgtctatacagaccaaaaatgagtgaattcatgagctacagctctcaattcaagacgcgctcggccaatggactttgttcgagtatattcacttttcattgatgggaaaaaaatgttaggtctttttatgaagcctggttgagcaccatcggctctacccaaaaacttaacctagttatccagcatctttttgatactttggcatttcgcaagctcatgtctataccttggtttcttcccagcccatcgtgttgggatggtttgatacatgttcagaaagcagatgtgagaaaccatagtaaaataatacgttgatgctgatccatttttgggtcttgttaaattgcaatggaaatgctatgattttggtaagcattgaaatgaaaatgctttggctctctgaataaatgaatgtgctcttcgctcctataagctggaaataggaatataaaatacttggaacaaacaatttttctgtcagtttcaatatccaccggaagatctcatcagattggcagttatgcgtaccactttcaccgagtggccacaagttccatagttccatactgtagcattcaggttatcccccaacaaggaaatgcattttcaaaaagtggtgtataaaat

SEQ ID NO: 63571 - DNA, 3331 bp, Zea Mays
cacacccaggctcctcacctcaccaccgcggccgcctgcccaaagcagcccaccactcgggcgcagcaattcgtcgagcatccgccgcgctcgacggccaccggcccaccagggcaccatggcgtccgccacgcgtgctctgggggcgctcctccacagggcctcgtctctgtcttcctccgctcccgctctccggggagcctcgctcctccgcggggacgggcctattggaagcgccggactgttccggaggcatgcggcgaggcggcggatttcgtcgttccagccgctctgcatgggaagacgctcctgcaaaatcgctggaaggaaggtgatgttctcttgccatgatgcacaatgtcacattaacgaagttcgggacggctggctgtgcatattctggttggcaaagccgtggaaatatcccgtgcaatcaatcatgttgtgcatgcgtgcaatcaagcaatcaaattcccaatgaaaatccaatagtaactgctagtttacatttaactccttccgcgtgaaaccagcaacattgtacttatttttatatttaatcccatttcatatgaaaccgttagatctagattggattcctggatgatttgattgcatgcttgcaccaaatgtgtgattacagtggatatatccccggcaaagcctccatttggaataatagaaatggatgcaacaacaaatatcattgtgtttcgaattttcggttctcttgaggatctgagctagcttttgctgctaagtagttgttcgcttcggattaaagccgactgtttagactgctgcagctgtaatctatagagacaaaaacattgtagaaacagtagaagccggtacggattaaaaccaagcgaataagctcggtccattagcgtaattgagaatggaaaaactgaaaacagaaagtagctttagtttcttgtttataaaatgtagttagctttaacgtctcaatatgtatcctcagagcaactccaacagccttactaaattgaacaaaatcagtaaaaaaaagaaaagcctggttaaaaacgcatccaacaggctagctttctacctctcttctccatccggctcgtcatctactcccctcgctaggcatctttgccgagggcgtacggctcgccatttccttttatcgcgcccaactgccctcccgccgtcacggcaaattccagctcccgcgaccgcgacattgcaccctcgccaccgcgaccagcccgtgcctccacattcatccgtcgccatgtacaaacctgtacggccccattcgttgaacaagtgaagaaactggattgtggaatgctcctctttctcagtgttcgccaggaaggatagatccggaggcgcatcgtacgggtggagatttggaccaatccactgtaggattgatgcaccggcgtttgcttcctcctacaagcttcgaaggcctaatgtcagcaaatctgtcccatgccaatcgaataaacagggatgaatcctacacagattttggaaccggaaggcatatgtggaccagaacacttatgtgcagattgaagtggatttttgccagacaaatctctctgcttgcatgattgaagtgcatatgtggcccaatacacttatatgctcttattcctcactgccatctcatttctaaagttggaaagattgaactgaaccttgctctgaacttttttccttctttgttttcttattgttgcagggaggcaatcctttggatttcaaaatgtagttgatctaattcatgcatatgctgccaaagctgttactgaacaactagaccaaaatgagaaccttgtatcagtcaatgcagatgtctgcaatttctgggaaaaggatgttatgccgatgcttttctgtaggagttgcagatttttttttaaaaaaaaaacttcagccgaaacaggatgttatatcgaaacattgaattagcagtggatcgtgttcagaaagttgggttcattgtagggatcagcttccaggggttggttcgttgcaggatcaattgccaacctaccactgagtctaaatttagagtctgttggttacccacccttcaggaagttctatattttataaagccatctccaaaactctaaaattagctaggaattatagctatgctgttggagttgctctcagttccttacaccagttgtttctttaattcaggatgcccagaacttgaagaagatgaagcgcaacagcaaaattggaaaagaaattgttgcggccatcaagaagggtggcccaaacccttcatccaacacaactttatcagctatactagagaaagcaagggaacttgatgtccctagagaaattttggagcgcaacatcaaaagggcatcagaaaagggacaagatacttacacagaaaaggtttatgagataaggaccaactgctcaccgttgcgttagatgctggtgctgatgacgtccttgaaccaaattttgatgatgatgactctgaagaagaagcagaaaggttctacaagatagttactacatcagaaaactacccagttttgctatcgaagcttcaagaagaaggattgaagtttgaaactgataatggctacgaacttgttcctctgaacccaattgaggtggacgacgaggccgtggaactaaacaaggaacttgtttcaaatttgctagagcttgatgacgttgatgccgtctatacagaccaaaaatgagtgaattcatgagctacagctctcaattcaagacgcgctcggccaatggactttgttcgagtatattcacttttcattgatgggaaaaaaatgttaggtctttttatgaagcctggttgagcaccatcggctctacccaaaaacttaacctagttatccagcatctttttgatactttggcatttcgcaagctcatgtctataccttggtttcttcccagcccatcgtgttgggatggtttgatacatgttcagaaagcagatgtgagaaaccatagtaaaataatacgttgatgctgatccatttttgggtcttgttaaattgcaatggaaatgctatgattttggtaagcattgaaatgaaaatgctttggctctctgaataaatgaatgtgctcttcgctcctataagctggaaataggaatataaaatacttggaacaaacaatttttctgtcagtttcaatatccaccggaagatctcatcagattggcagttatgcgtaccactttcaccgagtggccacaagttccatagttccatactgtagcattcaggttatcccccaacaaggaaatgcattttcaaaaagtggtgtataaaat

SEQ ID NO: 63572 - DNA, 4014 bp, Zea Mays
cacacccaggctcctcacctcaccaccgcggccgcctgcccaaagcagcccaccactcgggcgcagcaattcgtcgagcatccgccgcgctcgacggccaccggcccaccagggcaccatggcgtccgccacgcgtgctctgggggcgctcctccacagggcctcgtctctgtcttcctccgctcccgctctccggggagcctcgctcctccgcggggacgggcctattggaagcgccggactgttccggaggcatgcggcgaggcggcggatttcgtcgttccagccgctctgcatgggaagacgctcctgcaaaatcgctggaaggaaggtgatgttctcttgccatgatgcacaatgtcacattaacgaagttcgggacggctggctgtgcatattctggttggcaaagccgtggaaatatcccgtgcaatcaatcatgttgtgcatgcgtgcaatcaagcaatcaaattcccaatgaaaatccaatagtaactgctagtttacatttaactccttccgcgtgaaaccagcaacattgtacttatttttatatttaatcccatttcatatgaaaccgttagatctagattggattcctggatgatttgattgcatgcttgcaccaaatgtgtgattacagtggatatatccccggcaaagcctccatttggaataatagaaatggatgcaacaacaaatatcattgtgtttcgaattttcggttctcttgaggatctgagctagcttttgctgctaagtagttgttcgcttcggattaaagccgactgtttagactgctgcagctgtaatctatagagacaaaaacattgtagaaacagtagaagccggtacggattaaaaccaagcgaataagctcggtccattagcgtaattgagaatggaaaaactgaaaacagaaagtagctttagtttcttgtttataaaatgtagttagctttaacgtctcaatatgtatcctcagagcaactccaacagccttactaaattgaacaaaatcagtaaaaaaaagaaaagcctggttaaaaacgcatccaacaggctagctttctacctctcttctccatccggctcgtcatctactcccctcgctaggcatctttgccgagggcgtacggctcgccatttccttttatcgcgcccaactgccctcccgccgtcacggcaaattccagctcccgcgaccgcgacattgcaccctcgccaccgcgaccagcccgtgcctccacattcatccgtcgccatgtacaaacctgtacggccccattcgttgaacaagtgaagaaactggattgtggaatgctcctctttctcagtgttcgccaggaaggatagatccggaggcgcatcgtacgggtggagatttggaccaatccactgtaggattgatgcaccggcgtttgcttcctcctacaagcttcgaaggcctaatgtcagcaaatctgtcccatgccaatcgaataaacagggatgaatcctacacaggtgagatgctggtggcaattgctcatatttttttggtactttttcaagactagacagttttttgaaccaaagcagattttggaaccggaaggcatatgtggaccagaacacttatgtgcagattgaagtggatttttgccagacaaatctctctgcttgcatgattgaagtgcatatgtggcccaatacacttatatgctcttattcctcactgccatctcatttctaaagttggaaagattgaactgaaccttgctctgaacttttttccttctttgttttcttattgttgcagggaggcaatcctttggatttcaaaatgtagttgatctaattcatgcatatgctgccaaagctgttactgaacaactagaccaaaatgagaaccttgtatcagtcaatgcagatgtctgcaatttctgggaaaaggatgttatgccgatgcttttctgtaggagttgcagatttttttttaaaaaaaaaacttcagccgaaacaggatgttatatcgaaacattgaattagcagtggatcgtgttcagaaagttgggttcattgtagggatcagcttccaggggttggttcgttgcaggatcaattgccaacctaccactgagtctaaatttagagtctgttggttacccacccttcaggaagttctatattttataaagccatctccaaaactctaaaattagctaggaattatagctatgctgttggagttgctctcagttccttacaccagttgtttctttaattcaggatgcccagaacttgaagaagatgaagcgcaacagcaaaattggaaaagaaattgttgcggcgtaggtgttgctggacactgtgaacttgcactatcattttaacagcttggtatttcattgatttcataatttggattattttgagcatatggttaatccaacatgctgtcatctgctagtatatgttgacataagatgttttacctttttggccgtttaaacttaaatcattggacatctgttcccgtgctacagtgtctatatattctcagtctgtagcgtttcatgttattatgttgtgaaggtattgcggttgtatttagtaattagacattgcctgcttaatatctctgaagtgaatggcactatcttacccaagtggtaggccttgttaaaatgaaaaaaaagcaactgacaacaagaccaagcatcagactatcagagttctagtgccattcatttaaattaattaatctggtccgtttctggatatcacacagcatcaagaagggtggcccaaacccttcatccaacacaactttatcagctatactagagaaagcaagggaacttgatgtccctagagaaattttggagcgcaacatcaaaagggcatcagaaaagggacaagatacttacacagaaaaggtttatgaggtctatggttttggtggagtgggtatggtcgttgaagttctaactgacaaaattacaagatcagttgctgacattagaaacgtggtgaaagactgcggagcaaaattggctgatcctggatctgttacctttagattcagacaagctcgagtggtgaacataaaagttactgatgcagataaggaccaactgctcaccgttgcgttagatgctggtgctgatgacgtccttgaaccaaattttgatgatgatgactctgaagaagaagcagaaagatagttactacatcagaaaactacccagttttgctatcgaagcttcaagaagaaggattgaagtttgaaactgataatggctacgaacttgttcctctgaacccaattgaggtggacgacgaggccgtggaactaaacaaggaacttgtttcaaatttgctagagcttgatgacgttgatgccgtctatacagaccaaaaatgagtgaattcatgagctacagctctcaattcaagacgcgctcggccaatggactttgttcgagtatattcacttttcattgatgggaaaaaaatgttaggtctttttatgaagcctggttgagcaccatcggctctacccaaaaacttaacctagttatccagcatctttttgatactttggcatttcgcaagctcatgtctataccttggtttcttcccagcccatcgtgttgggatggtttgatacatgttcagaaagcagatgtgagaaaccatagtaaaataatacgttgatgctgatccatttttgggtcttgttaaattgcaatggaaatgctatgattttggtaagcattgaaatgaaaatgctttggctctctgaataaatgaatgtgctcttcgctcctataagctggaaataggaatataaaatacttggaacaaacaatttttctgtcagtttcaatatccaccggaagatctcatcagattggcagttatgcgtaccactttcaccgagtggccacaagttccatagttccatactgtagcattcaggttatcccccaacaaggaaatgcattttcaaaaagtggtgtataaaat

SEQ ID NO: 63573 - DNA, 1515 bp, Zea Mays
cacacccaggctcctcacctcaccaccgcggccgcctgcccaaagcagcccaccactcgggcgcagcaattcgtcgagcatccgccgcgctcgacggccaccggcccaccagggcaccatggcgtccgccacgcgtgctctgggggcgctcctccacagggcctcgtctctgtcttcctccgctcccgctctccggggagcctcgctcctccgcggggacgggcctattggaagcgccggactgttccggaggcatgcggcgaggcggcggatttcgtcgttccagccgctctgcatgggaagacgctcctgcaaaatcgctggaaggaaggatgcccagaacttgaagaagatgaagcgcaacagcaaaattggaaaagaaattgttgcggcgtaggtgttgctggacactgtgaacttgcactatcattttaacagcttgcatcaagaagggtggcccaaacccttcatccaacacaactttatcagctatactagagaaagcaagggaacttgatgtccctagagaaattttggagcgcaacatcaaaagggcatcagaaaagggacaagatacttacacagaaaaggtttatgagataaggaccaactgctcaccgttgcgttagatgctggtgctgatgacgtccttgaaccaaattttgatgatgatgactctgaagaagaagcagaaaggttctacaagatagttactacatcagaaaactacccagttttgctatcgaagcttcaagaagaaggattgaagtttgaaactgataatggctacgaacttgttcctctgaacccaattgaggtggacgacgaggccgtggaactaaacaaggaacttgtttcaaatttgctagagcttgatgacgttgatgccgtctatacagaccaaaaatgagtgaattcatgagctacagctctcaattcaagacgcgctcggccaatggactttgttcgagtatattcacttttcattgatgggaaaaaaatgttaggtctttttatgaagcctggttgagcaccatcggctctacccaaaaacttaacctagttatccagcatctttttgatactttggcatttcgcaagctcatgtctataccttggtttcttcccagcccatcgtgttgggatggtttgatacatgttcagaaagcagatgtgagaaaccatagtaaaataatacgttgatgctgatccatttttgggtcttgttaaattgcaatggaaatgctatgattttggtaagcattgaaatgaaaatgctttggctctctgaataaatgaatgtgctcttcgctcctataagctggaaataggaatataaaatacttggaacaaacaatttttctgtcagtttcaatatccaccggaagatctcatcagattggcagttatgcgtaccactttcaccgagtggccacaagttccatagttccatactgtagcattcaggttatcccccaacaaggaaatgcattttcaaaaagtggtgtataaaat

SEQ ID NO: 63574 - DNA, 3668 bp, Zea Mays
cacacccaggctcctcacctcaccaccgcggccgcctgcccaaagcagcccaccactcgggcgcagcaattcgtcgagcatccgccgcgctcgacggccaccggcccaccagggcaccatggcgtccgccacgcgtgctctgggggcgctcctccacagggcctcgtctctgtcttcctccgctcccgctctccggggagcctcgctcctccgcggggacgggcctattggaagcgccggactgttccggaggcatgcggcgaggcggcggatttcgtcgttccagccgctctgcatgggaagacgctcctgcaaaatcgctggaaggaaggtgatgttctcttgccatgatgcacaatgtcacattaacgaagttcgggacggctggctgtgcatattctggttggcaaagccgtggaaatatcccgtgcaatcaatcatgttgtgcatgcgtgcaatcaagcaatcaaattcccaatgaaaatccaatagtaactgctagtttacatttaactccttccgcgtgaaaccagcaacattgtacttatttttatatttaatcccatttcatatgaaaccgttagatctagattggattcctggatgatttgattgcatgcttgcaccaaatgtgtgattacagtggatatatccccggcaaagcctccatttggaataatagaaatggatgcaacaacaaatatcattgtgtttcgaattttcggttctcttgaggatctgagctagcttttgctgctaagtagttgttcgcttcggattaaagccgactgtttagactgctgcagctgtaatctatagagacaaaaacattgtagaaacagtagaagccggtacggattaaaaccaagcgaataagctcggtccattagcgtaattgagaatggaaaaactgaaaacagaaagtagctttagtttcttgtttataaaatgtagttagctttaacgtctcaatatgtatcctcagagcaactccaacagccttactaaattgaacaaaatcagtaaaaaaaagaaaagcctggttaaaaacgcatccaacaggctagctttctacctctcttctccatccggctcgtcatctactcccctcgctaggcatctttgccgagggcgtacggctcgccatttccttttatcgcgcccaactgccctcccgccgtcacggcaaattccagctcccgcgaccgcgacattgcaccctcgccaccgcgaccagcccgtgcctccacattcatccgtcgccatgtacaaaccttgttcgccaggaaggatagatccggaggcgcatcgtacgggtggagatttggaccaatccactgtaggattgatgcaccggcgtttgcttcctcctacaagcttcgaaggcctaatgtcagcaaatctgtcccatgccaatcgaataaacagggatgaatcctacacagggaggcaatcctttggatttcaaaatgtagttgatctaattcatgcatatgctgccaaagctgttactgaacaactagaccaaaatgagaaccttgtatcagtcaatgcagatgtctgcaatttctgggaaaaggatgttatgccgatgcttttctgtaggagttgcagatttttttttaaaaaaaaaacttcagccgaaacaggatgttatatcgaaacattgaattagcagtggatcgtgttcagaaagttgggttcattgtagggatcagcttccaggggttggttcgttgcaggatcaattgccaacctaccactgagtctaaatttagagtctgttggttacccacccttcaggaagttctatattttataaagccatctccaaaactctaaaattagctaggaattatagctatgctgttggagttgctctcagttccttacaccagttgtttctttaattcaggatgcccagaacttgaagaagatgaagcgcaacagcaaaattggaaaagaaattgttgcggcgtaggtgttgctggacactgtgaacttgcactatcattttaacagcttggtatttcattgatttcataatttggattattttgagcatatggttaatccaacatgctgtcatctgctagtatatgttgacataagatgttttacctttttggccgtttaaacttaaatcattggacatctgttcccgtgctacagtgtctatatattctcagtctgtagcgtttcatgttattatgttgtgaaggtattgcggttgtatttagtaattagacattgcctgcttaatatctctgaagtgaatggcactatcttacccaagtggtaggccttgttaaaatgaaaaaaaagcaactgacaacaagaccaagcatcagactatcagagttctagtgccattcatttaaattaattaatctggtccgtttctggatatcacacagcatcaagaagggtggcccaaacccttcatccaacacaactttatcagctatactagagaaagcaagggaacttgatgtccctagagaaattttggagcgcaacatcaaaagggcatcagaaaagggacaagatacttacacagaaaaggtttatgaggtctatggttttggtggagtgggtatggtcgttgaagttctaactgacaaaattacaagatcagttgctgacattagaaacgtggtgaaagactgcggagcaaaattggctgatcctggatctgttacctttagattcagacaagctcgagtggtgaacataaaagttactgatgcagataaggaccaactgctcaccgttgcgttagatgctggtgctgatgacgtccttgaaccaaattttgatgatgatgactctgaagaagaagcagaaaggttctacaagatagttactacatcagaaaactacccagttttgctatcgaagcttcaagaagaaggattgaagtttgaaactgataatggctacgaacttgttcctctgaacccaattgaggtggacgacgaggccgtggaactaaacaaggaacttgtttcaaatttgctagagcttgatgacgttgatgccgtctatacagaccaaaaatgagtgaattcatgagctacagctctcaattcaagacgcgctcggccaatggactttgttcgagtatattcacttttcattgatgggaaaaaaatgttaggtctttttatgaagcctggttgagcaccatcggctctacccaaaaacttaacctagttatccagcatctttttgatactttggcatttcgcaagctcatgtctataccttggtttcttcccagcccatcgtgttgggatggtttgatacatgttcagaaagcagatgtgagaaaccatagtaaaataatacgttgatgctgatccatttttgggtcttgttaaattgcaatggaaatgctatgattttggtaagcattgaaatgaaaatgctttggctctctgaataaatgaatgtgctcttcgctcctataagctggaaataggaatataaaatacttggaacaaacaatttttctgtcagtttcaatatccaccggaagatctcatcagattggcagttatgcgtaccactttcaccgagtggccacaagttccatagttccatactgtagcattcaggttatcccccaacaaggaaatgcattttcaaaaagtggtgtataaaat

SEQ ID NO: 63575 - DNA, 2545 bp, Zea Mays
cacacccaggctcctcacctcaccaccgcggccgcctgcccaaagcagcccaccactcgggcgcagcaattcgtcgagcatccgccgcgctcgacggccaccggcccaccagggcaccatggcgtccgccacgcgtgctctgggggcgctcctccacagggcctcgtctctgtcttcctccgctcccgctctccggggagcctcgctcctccgcggggacgggcctattggaagcgccggactgttccggaggcatgcggcgaggcggcggatttcgtcgttccagccgctctgcatgggaagacgctcctgcaaaatcgctggaaggaagtgttcgccaggaaggatagatccggaggcgcatcgtacgggtggagatttggaccaatccactgtaggattgatgcaccggcgtttgcttcctcctacaagcttcgaaggcctaatgtcagcaaatctgtcccatgccaatcgaataaacagggatgaatcctacacagggaggcaatcctttggatttcaaaatgtagttgatctaattcatgcatatgctgccaaagctgttactgaacaactagaccaaaatgagaaccttgtatcagtcaatgcagatgtctgcaatttctgggaaaaggatgttatgccgatgcttttctgtaggagttgcagatttttttttaaaaaaaaaacttcagccgaaacaggatgttatatcgaaacattgaattagcagtggatcgtgttcagaaagttgggttcattgtagggatcagcttccaggggttggttcgttgcaggatcaattgccaacctaccactgagtctaaatttagagtctgttggttacccacccttcaggaagttctatattttataaagccatctccaaaactctaaaattagctaggaattatagctatgctgttggagttgctctcagttccttacaccagttgtttctttaattcaggatgcccagaacttgaagaagatgaagcgcaacagcaaaattggaaaagaaattgttgcggcgtaggtgttgctggacactgtgaacttgcactatcattttaacagcttggtatttcattgatttcataatttggattattttgagcatatggttaatccaacatgctgtcatctgctagtatatgttgacataagatgttttacctttttggccgtttaaacttaaatcattggacatctgttcccgtgctacagtgtctatatattctcagtctgtagcgtttcatgttattatgttgtgaaggtattgcggttgtatttagtaattagacattgcctgcttaatatctctgaagtgaatggcactatcttacccaagtggtaggccttgttaaaatgaaaaaaaagcaactgacaacaagaccaagcatcagactatcagagttctagtgccattcatttaaattaattaatctggtccgtttctggatatcacacagcatcaagaagggtggcccaaacccttcatccaacacaactttatcagctatactagagaaagcaagggaacttgatgtccctagagaaattttggagcgcaacatcaaaagggcatcagaaaagggacaagatacttacacagaaaaggtttatgagataaggaccaactgctcaccgttgcgttagatgctggtgctgatgacgtccttgaaccaaattttgatgatgatgactctgaagaagaagcagaaaggttctacaagatagttactacatcagaaaactacccagttttgctatcgaagcttcaagaagaaggattgaagtttgaaactgataatggctacgaacttgttcctctgaacccaattgaggtggacgacgaggccgtggaactaaacaaggaacttgtttcaaatttgctagagcttgatgacgttgatgccgtctatacagaccaaaaatgagtgaattcatgagctacagctctcaattcaagacgcgctcggccaatggactttgttcgagtatattcacttttcattgatgggaaaaaaatgttaggtctttttatgaagcctggttgagcaccatcggctctacccaaaaacttaacctagttatccagcatctttttgatactttggcatttcgcaagctcatgtctataccttggtttcttcccagcccatcgtgttgggatggtttgatacatgttcagaaagcagatgtgagaaaccatagtaaaataatacgttgatgctgatccatttttgggtcttgttaaattgcaatggaaatgctatgattttggtaagcattgaaatgaaaatgctttggctctctgaataaatgaatgtgctcttcgctcctataagctggaaataggaatataaaatacttggaacaaacaatttttctgtcagtttcaatatccaccggaagatctcatcagattggcagttatgcgtaccactttcaccgagtggccacaagttccatagttccatactgtagcattcaggttatcccccaacaaggaaatgcattttcaaaaagtggtgtataaaat

SEQ ID NO: 63576 - DNA, 3771 bp, Zea Mays
cacacccaggctcctcacctcaccaccgcggccgcctgcccaaagcagcccaccactcgggcgcagcaattcgtcgagcatccgccgcgctcgacggccaccggcccaccagggcaccatggcgtccgccacgcgtgctctgggggcgctcctccacagggcctcgtctctgtcttcctccgctcccgctctccggggagcctcgctcctccgcggggacgggcctattggaagcgccggactgttccggaggcatgcggcgaggcggcggatttcgtcgttccagccgctctgcatgggaagacgctcctgcaaaatcgctggaaggaaggtgatgttctcttgccatgatgcacaatgtcacattaacgaagttcgggacggctggctgtgcatattctggttggcaaagccgtggaaatatcccgtgcaatcaatcatgttgtgcatgcgtgcaatcaagcaatcaaattcccaatgaaaatccaatagtaactgctagtttacatttaactccttccgcgtgaaaccagcaacattgtacttatttttatatttaatcccatttcatatgaaaccgttagatctagattggattcctggatgatttgattgcatgcttgcaccaaatgtgtgattacagtggatatatccccggcaaagcctccatttggaataatagaaatggatgcaacaacaaatatcattgtgtttcgaattttcggttctcttgaggatctgagctagcttttgctgctaagtagttgttcgcttcggattaaagccgactgtttagactgctgcagctgtaatctatagagacaaaaacattgtagaaacagtagaagccggtacggattaaaaccaagcgaataagctcggtccattagcgtaattgagaatggaaaaactgaaaacagaaagtagctttagtttcttgtttataaaatgtagttagctttaacgtctcaatatgtatcctcagagcaactccaacagccttactaaattgaacaaaatcagtaaaaaaaagaaaagcctggttaaaaacgcatccaacaggctagctttctacctctcttctccatccggctcgtcatctactcccctcgctaggcatctttgccgagggcgtacggctcgccatttccttttatcgcgcccaactgccctcccgccgtcacggcaaattccagctcccgcgaccgcgacattgcaccctcgccaccgcgaccagcccgtgcctccacattcatccgtcgccatgtacaaacctgtacggccccattcgttgaacaagtgaagaaactggattgtggaatgctcctctttctcagtgttcgccaggaaggatagatccggaggcgcatcgtacgggtggagatttggaccaatccactgtaggattgatgcaccggcgtttgcttcctcctacaagcttcgaaggcctaatgtcagcaaatctgtcccatgccaatcgaataaacagggatgaatcctacacagattttggaaccggaaggcatatgtggaccagaacacttatgtgcagattgaagtggatttttgccagacaaatctctctgcttgcatgattgaagtgcatatgtggcccaatacacttatatgctcttattcctcactgccatctcatttctaaagttggaaagattgaactgaaccttgctctgaacttttttccttctttgttttcttattgttgcagggaggcaatcctttggatttcaaaatgtagttgatctaattcatgcatatgctgccaaagctgttactgaacaactagaccaaaatgagaaccttgtatcagtcaatgcagatgtctgcaatttctgggaaaaggatgttatgccgatgcttttctgtaggagttgcagatttttttttaaaaaaaaaacttcagccgaaacaggatgttatatcgaaacattgaattagcagtggatcgtgttcagaaagttgggttcattgtagggatcagcttccaggggttggttcgttgcaggatcaattgccaacctaccactgagtctaaatttagagtctgttggttacccacccttcaggaagttctatattttataaagccatctccaaaactctaaaattagctaggaattatagctatgctgttggagttgctctcagttccttacaccagttgtttctttaattcaggatgcccagaacttgaagaagatgaagcgcaacagcaaaattggaaaagaaattgttgcggcgtaggtgttgctggacactgtgaacttgcactatcattttaacagcttggtatttcattgatttcataatttggattattttgagcatatggttaatccaacatgctgtcatctgctagtatatgttgacataagatgttttacctttttggccgtttaaacttaaatcattggacatctgttcccgtgctacagtgtctatatattctcagtctgtagcgtttcatgttattatgttgtgaaggtattgcggttgtatttagtaattagacattgcctgcttaatatctctgaagtgaatggcactatcttacccaagtggtaggccttgttaaaatgaaaaaaaagcaactgacaacaagaccaagcatcagactatcagagttctagtgccattcatttaaattaattaatctggtccgtttctggatatcacacagcatcaagaagggtggcccaaacccttcatccaacacaactttatcagctatactagagaaagcaagggaacttgatgtccctagagaaattttggagcgcaacatcaaaagggcatcagaaaagggacaagatacttacacagaaaaggtttatgagataaggaccaactgctcaccgttgcgttagatgctggtgctgatgacgtccttgaaccaaattttgatgatgatgactctgaagaagaagcagaaaggttctacaagatagttactacatcagaaaactacccagttttgctatcgaagcttcaagaagaaggattgaagtttgaaactgataatggctacgaacttgttcctctgaacccaattgaggtggacgacgaggccgtggaactaaacaaggaacttgtttcaaatttgctagagcttgatgacgttgatgccgtctatacagaccaaaaatgagtgaattcatgagctacagctctcaattcaagacgcgctcggccaatggactttgttcgagtatattcacttttcattgatgggaaaaaaatgttaggtctttttatgaagcctggttgagcaccatcggctctacccaaaaacttaacctagttatccagcatctttttgatactttggcatttcgcaagctcatgtctataccttggtttcttcccagcccatcgtgttgggatggtttgatacatgttcagaaagcagatgtgagaaaccatagtaaaataatacgttgatgctgatccatttttgggtcttgttaaattgcaatggaaatgctatgattttggtaagcattgaaatgaaaatgctttggctctctgaataaatgaatgtgctcttcgctcctataagctggaaataggaatataaaatacttggaacaaacaatttttctgtcagtttcaatatccaccggaagatctcatcagattggcagttatgcgtaccactttcaccgagtggccacaagttccatagttccatactgtagcattcaggttatcccccaacaaggaaatgcattttcaaaaagtggtgtataaaat

SEQ ID NO: 63577 - DNA, 3111 bp, Zea Mays
cacacccaggctcctcacctcaccaccgcggccgcctgcccaaagcagcccaccactcgggcgcagcaattcgtcgagcatccgccgcgctcgacggccaccggcccaccagggcaccatggcgtccgccacgcgtgctctgggggcgctcctccacagggcctcgtctctgtcttcctccgctcccgctctccggggagcctcgctcctccgcggggacgggcctattggaagcgccggactgttccggaggcatgcggcgaggcggcggatttcgtcgttccagccgctctgcatgggaagacgctcctgcaaaatcgctggaaggaaggtgatgttctcttgccatgatgcacaatgtcacattaacgaagttcgggacggctggctgtgcatattctggttggcaaagccgtggaaatatcccgtgcaatcaatcatgttgtgcatgcgtgcaatcaagcaatcaaattcccaatgaaaatccaatagtaactgctagtttacatttaactccttccgcgtgaaaccagcaacattgtacttatttttatatttaatcccatttcatatgaaaccgttagatctagattggattcctggatgatttgattgcatgcttgcaccaaatgtgtgattacagtggatatatccccggcaaagcctccatttggaataatagaaatggatgcaacaacaaatatcattgtgtttcgaattttcggttctcttgaggatctgagctagcttttgctgctaagtagttgttcgcttcggattaaagccgactgtttagactgctgcagctgtaatctatagagacaaaaacattgtagaaacagtagaagccggtacggattaaaaccaagcgaataagctcggtccattagcgtaattgagaatggaaaaactgaaaacagaaagtagctttagtttcttgtttataaaatgtagttagctttaacgtctcaatatgtatcctcagagcaactccaacagccttactaaattgaacaaaatcagtaaaaaaaagaaaagcctggttaaaaacgcatccaacaggctagctttctacctctcttctccatccggctcgtcatctactcccctcgctaggcatctttgccgagggcgtacggctcgccatttccttttatcgcgcccaactgccctcccgccgtcacggcaaattccagctcccgcgaccgcgacattgcaccctcgccaccgcgaccagcccgtgcctccacattcatccgtcgccatgtacaaacctgtacggccccattcgttgaacaagtgaagaaactggattgtggaatgctcctctttctcagtgttcgccaggaaggatagatccggaggcgcatcgtacgggtggagatttggaccaatccactgtaggattgatgcaccggcgtttgcttcctcctacaagcttcgaaggcctaatgtcagcaaatctgtcccatgccaatcgaataaacagggatgaatcctacacagggaggcaatcctttggatttcaaaatgtagttgatctaattcatgcatatgctgccaaagctgttactgaacaactagaccaaaatgagaaccttgtatcagtcaatgcagatgtctgcaatttctgggaaaaggatgttatgccgatgcttttctgtaggagttgcagatttttttttaaaaaaaaaacttcagccgaaacaggatgttatatcgaaacattgaattagcagtggatcgtgttcagaaagttgggttcattgtagggatcagcttccaggggttggttcgttgcaggatcaattgccaacctaccactgagtctaaatttagagtctgttggttacccacccttcaggaagttctatattttataaagccatctccaaaactctaaaattagctaggaattatagctatgctgttggagttgctctcagttccttacaccagttgtttctttaattcaggatgcccagaacttgaagaagatgaagcgcaacagcaaaattggaaaagaaattgttgcggccatcaagaagggtggcccaaacccttcatccaacacaactttatcagctatactagagaaagcaagggaacttgatgtccctagagaaattttggagcgcaacatcaaaagggcatcagaaaagggacaagatacttacacagaaaaggtttatgagataaggaccaactgctcaccgttgcgttagatgctggtgctgatgacgtccttgaaccaaattttgatgatgatgactctgaagaagaagcagaaaggttctacaagatagttactacatcagaaaactacccagttttgctatcgaagcttcaagaagaaggattgaagtttgaaactgataatggctacgaacttgttcctctgaacccaattgaggtggacgacgaggccgtggaactaaacaaggaacttgtttcaaatttgctagagcttgatgacgttgatgccgtctatacagaccaaaaatgagtgaattcatgagctacagctctcaattcaagacgcgctcggccaatggactttgttcgagtatattcacttttcattgatgggaaaaaaatgttaggtctttttatgaagcctggttgagcaccatcggctctacccaaaaacttaacctagttatccagcatctttttgatactttggcatttcgcaagctcatgtctataccttggtttcttcccagcccatcgtgttgggatggtttgatacatgttcagaaagcagatgtgagaaaccatagtaaaataatacgttgatgctgatccatttttgggtcttgttaaattgcaatggaaatgctatgattttggtaagcattgaaatgaaaatgctttggctctctgaataaatgaatgtgctcttcgctcctataagctggaaataggaatataaaatacttggaacaaacaatttttctgtcagtttcaatatccaccggaagatctcatcagattggcagttatgcgtaccactttcaccgagtggccacaagttccatagttccatactgtagcattcaggttatcccccaacaaggaaatgcattttcaaaaagtggtgtataaaat

SEQ ID NO: 63578 - DNA, 3375 bp, Zea Mays
cacacccaggctcctcacctcaccaccgcggccgcctgcccaaagcagcccaccactcgggcgcagcaattcgtcgagcatccgccgcgctcgacggccaccggcccaccagggcaccatggcgtccgccacgcgtgctctgggggcgctcctccacagggcctcgtctctgtcttcctccgctcccgctctccggggagcctcgctcctccgcggggacgggcctattggaagcgccggactgttccggaggcatgcggcgaggcggcggatttcgtcgttccagccgctctgcatgggaagacgctcctgcaaaatcgctggaaggaaggtgatgttctcttgccatgatgcacaatgtcacattaacgaagttcgggacggctggctgtgcatattctggttggcaaagccgtggaaatatcccgtgcaatcaatcatgttgtgcatgcgtgcaatcaagcaatcaaattcccaatgaaaatccaatagtaactgctagtttacatttaactccttccgcgtgaaaccagcaacattgtacttatttttatatttaatcccatttcatatgaaaccgttagatctagattggattcctggatgatttgattgcatgcttgcaccaaatgtgtgattacagtggatatatccccggcaaagcctccatttggaataatagaaatggatgcaacaacaaatatcattgtgtttcgaattttcggttctcttgaggatctgagctagcttttgctgctaagtagttgttcgcttcggattaaagccgactgtttagactgctgcagctgtaatctatagagacaaaaacattgtagaaacagtagaagccggtacggattaaaaccaagcgaataagctcggtccattagcgtaattgagaatggaaaaactgaaaacagaaagtagctttagtttcttgtttataaaatgtagttagctttaacgtctcaatatgtatcctcagagcaactccaacagccttactaaattgaacaaaatcagtaaaaaaaagaaaagcctggttaaaaacgcatccaacaggctagctttctacctctcttctccatccggctcgtcatctactcccctcgctaggcatctttgccgagggcgtacggctcgccatttccttttatcgcgcccaactgccctcccgccgtcacggcaaattccagctcccgcgaccgcgacattgcaccctcgccaccgcgaccagcccgtgcctccacattcatccgtcgccatgtacaaacctgtacggccccattcgttgaacaagtgaagaaactggattgtggaatgctcctctttctcagtgttcgccaggaaggatagatccggaggcgcatcgtacgggtggagatttggaccaatccactgtaggattgatgcaccggcgtttgcttcctcctacaagcttcgaaggcctaatgtcagcaaatctgtcccatgccaatcgaataaacagggatgaatcctacacagattttggaaccggaaggcatatgtggaccagaacacttatgtgcagattgaagtggatttttgccagacaaatctctctgcttgcatgattgaagtgcatatgtggcccaatacacttatatgctcttattcctcactgccatctcatttctaaagttggaaagattgaactgaaccttgctctgaacttttttccttctttgttttcttattgttgcagggaggcaatcctttggatttcaaaatgtagttgatctaattcatgcatatgctgccaaagctgttactgaacaactagaccaaaatgagaaccttgtatcagtcaatgcagatgtctgcaatttctgggaaaaggatgttatgccgatgcttttctgtaggagttgcagatttttttttaaaaaaaaaacttcagccgaaacaggatgttatatcgaaacattgaattagcagtggatcgtgttcagaaagttgggttcattgtagggatcagcttccaggggttggttcgttgcaggatcaattgccaacctaccactgagtctaaatttagagtctgttggttacccacccttcaggaagttctatattttataaagccatctccaaaactctaaaattagctaggaattatagctatgctgttggagttgctctcagttccttacaccagttgtttctttaattcaggatgcccagaacttgaagaagatgaagcgcaacagcaaaattggaaaagaaattgttgcggccatcaagaagggtggcccaaacccttcatccaacacaactttatcagctatactagagaaagcaagggaacttgatgtccctagagaaattttggagcgcaacatcaaaagggcatcagaaaagggacaagatacttacacagaaaaggtttatgagattcagacaagctcgagtggtgaacataaaagttactgatgcagataaggaccaactgctcaccgttgcgttagatgctggtgctgatgacgtccttgaaccaaattttgatgatgatgactctgaagaagaagcagaaaggttctacaagatagttactacatcagaaaactacccagttttgctatcgaagcttcaagaagaaggattgaagtttgaaactgataatggctacgaacttgttcctctgaacccaattgaggtggacgacgaggccgtggaactaaacaaggaacttgtttcaaatttgctagagcttgatgacgttgatgccgtctatacagaccaaaaatgagtgaattcatgagctacagctctcaattcaagacgcgctcggccaatggactttgttcgagtatattcacttttcattgatgggaaaaaaatgttaggtctttttatgaagcctggttgagcaccatcggctctacccaaaaacttaacctagttatccagcatctttttgatactttggcatttcgcaagctcatgtctataccttggtttcttcccagcccatcgtgttgggatggtttgatacatgttcagaaagcagatgtgagaaaccatagtaaaataatacgttgatgctgatccatttttgggtcttgttaaattgcaatggaaatgctatgattttggtaagcattgaaatgaaaatgctttggctctctgaataaatgaatgtgctcttcgctcctataagctggaaataggaatataaaatacttggaacaaacaatttttctgtcagtttcaatatccaccggaagatctcatcagattggcagttatgcgtaccactttcaccgagtggccacaagttccatagttccatactgtagcattcaggttatcccccaacaaggaaatgcattttcaaaaagtggtgtataaaat

SEQ ID NO: 63579 - DNA, 3289 bp, Zea Mays
cacacccaggctcctcacctcaccaccgcggccgcctgcccaaagcagcccaccactcgggcgcagcaattcgtcgagcatccgccgcgctcgacggccaccggcccaccagggcaccatggcgtccgccacgcgtgctctgggggcgctcctccacagggcctcgtctctgtcttcctccgctcccgctctccggggagcctcgctcctccgcggggacgggcctattggaagcgccggactgttccggaggcatgcggcgaggcggcggatttcgtcgttccagccgctctgcatgggaagacgctcctgcaaaatcgctggaaggaaggtgatgttctcttgccatgatgcacaatgtcacattaacgaagttcgggacggctggctgtgcatattctggttggcaaagccgtggaaatatcccgtgcaatcaatcatgttgtgcatgcgtgcaatcaagcaatcaaattcccaatgaaaatccaatagtaactgctagtttacatttaactccttccgcgtgaaaccagcaacattgtacttatttttatatttaatcccatttcatatgaaaccgttagatctagattggattcctggatgatttgattgcatgcttgcaccaaatgtgtgattacagtggatatatccccggcaaagcctccatttggaataatagaaatggatgcaacaacaaatatcattgtgtttcgaattttcggttctcttgaggatctgagctagcttttgctgctaagtagttgttcgcttcggattaaagccgactgtttagactgctgcagctgtaatctatagagacaaaaacattgtagaaacagtagaagccggtacggattaaaaccaagcgaataagctcggtccattagcgtaattgagaatggaaaaactgaaaacagaaagtagctttagtttcttgtttataaaatgtagttagctttaacgtctcaatatgtatcctcagagcaactccaacagccttactaaattgaacaaaatcagtaaaaaaaagaaaagcctggttaaaaacgcatccaacaggctagctttctacctctcttctccatccggctcgtcatctactcccctcgctaggcatctttgccgagggcgtacggctcgccatttccttttatcgcgcccaactgccctcccgccgtcacggcaaattccagctcccgcgaccgcgacattgcaccctcgccaccgcgaccagcccgtgcctccacattcatccgtcgccatgtacaaacctgtacggccccattcgttgaacaagtgaagaaactggattgtggaatgctcctctttctcagtgttcgccaggaaggatagatccggaggcgcatcgtacgggtggagatttggaccaatccactgtaggattgatgcaccggcgtttgcttcctcctacaagcttcgaaggcctaatgtcagcaaatctgtcccatgccaatcgaataaacagggatgaatcctacacagggaggcaatcctttggatttcaaaatgtagttgatctaattcatgcatatgctgccaaagctgttactgaacaactagaccaaaatgagaaccttgtatcagtcaatgcagatgtctgcaatttctgggaaaaggatgttatgccgatgcttttctgtaggagttgcagatttttttttaaaaaaaaaacttcagccgaaacaggatgttatatcgaaacattgaattagcagtggatcgtgttcagaaagttgggttcattgtagggatcagcttccaggggttggttcgttgcaggatcaattgccaacctaccactgagtctaaatttagagtctgttggttacccacccttcaggaagttctatattttataaagccatctccaaaactctaaaattagctaggaattatagctatgctgttggagttgctctcagttccttacaccagttgtttctttaattcaggatgcccagaacttgaagaagatgaagcgcaacagcaaaattggaaaagaaattgttgcggccatcaagaagggtggcccaaacccttcatccaacacaactttatcagctatactagagaaagcaagggaacttgatgtccctagagaaattttggagcgcaacatcaaaagggcatcagaaaagggacaagatacttacacagaaaaggtttatgaggtctatggttttggtggagtgggtatggtcgttgaagttctaactgacaaaattacaagatcagttgctgacattagaaacgtggtgaaagactgcggagcaaaattggctgatcctggatctgttacctttagattcagacaagctcgagtggtgaacataaaagttactgatgcagataaggaccaactgctcaccgttgcgttagatgctggtgctgatgacgtccttgaaccaaattttgatgatgatgactctgaagaagaagcagaaaggttctacaagatagttactacatcagaaaactacccagttttgctatcgaagcttcaagaagaaggattgaagtttgaaactgataatggctacgaacttgttcctctgaacccaattgaggtggacgacgaggccgtggaactaaacaaggaacttgtttcaaatttgctagagcttgatgacgttgatgccgtctatacagaccaaaaatgagtgaattcatgagctacagctctcaattcaagacgcgctcggccaatggactttgttcgagtatattcacttttcattgatgggaaaaaaatgttaggtctttttatgaagcctggttgagcaccatcggctctacccaaaaacttaacctagttatccagcatctttttgatactttggcatttcgcaagctcatgtctataccttggtttcttcccagcccatcgtgttgggatggtttgatacatgttcagaaagcagatgtgagaaaccatagtaaaataatacgttgatgctgatccatttttgggtcttgttaaattgcaatggaaatgctatgattttggtaagcattgaaatgaaaatgctttggctctctgaataaatgaatgtgctcttcgctcctataagctggaaataggaatataaaatacttggaacaaacaatttttctgtcagtttcaatatccaccggaagatctcatcagattggcagttatgcgtaccactttcaccgagtggccacaagttccatagttccatactgtagcattcaggttatcccccaacaaggaaatgcattttcaaaaagtggtgtataaaat

SEQ ID NO: 63580 - DNA, 1559 bp, Zea Mays
cacacccaggctcctcacctcaccaccgcggccgcctgcccaaagcagcccaccactcgggcgcagcaattcgtcgagcatccgccgcgctcgacggccaccggcccaccagggcaccatggcgtccgccacgcgtgctctgggggcgctcctccacagggcctcgtctctgtcttcctccgctcccgctctccggggagcctcgctcctccgcggggacgggcctattggaagcgccggactgttccggaggcatgcggcgaggcggcggatttcgtcgttccagccgctctgcatgggaagacgctcctgcaaaatcgctggaaggaaggatgcccagaacttgaagaagatgaagcgcaacagcaaaattggaaaagaaattgttgcggcgtaggtgttgctggacactgtgaacttgcactatcattttaacagcttgcatcaagaagggtggcccaaacccttcatccaacacaactttatcagctatactagagaaagcaagggaacttgatgtccctagagaaattttggagcgcaacatcaaaagggcatcagaaaagggacaagatacttacacagaaaaggtttatgagattcagacaagctcgagtggtgaacataaaagttactgatgcagataaggaccaactgctcaccgttgcgttagatgctggtgctgatgacgtccttgaaccaaattttgatgatgatgactctgaagaagaagcagaaaggttctacaagatagttactacatcagaaaactacccagttttgctatcgaagcttcaagaagaaggattgaagtttgaaactgataatggctacgaacttgttcctctgaacccaattgaggtggacgacgaggccgtggaactaaacaaggaacttgtttcaaatttgctagagcttgatgacgttgatgccgtctatacagaccaaaaatgagtgaattcatgagctacagctctcaattcaagacgcgctcggccaatggactttgttcgagtatattcacttttcattgatgggaaaaaaatgttaggtctttttatgaagcctggttgagcaccatcggctctacccaaaaacttaacctagttatccagcatctttttgatactttggcatttcgcaagctcatgtctataccttggtttcttcccagcccatcgtgttgggatggtttgatacatgttcagaaagcagatgtgagaaaccatagtaaaataatacgttgatgctgatccatttttgggtcttgttaaattgcaatggaaatgctatgattttggtaagcattgaaatgaaaatgctttggctctctgaataaatgaatgtgctcttcgctcctataagctggaaataggaatataaaatacttggaacaaacaatttttctgtcagtttcaatatccaccggaagatctcatcagattggcagttatgcgtaccactttcaccgagtggccacaagttccatagttccatactgtagcattcaggttatcccccaacaaggaaatgcattttcaaaaagtggtgtataaaat

SEQ ID NO: 63581 - DNA, 3949 bp, Zea Mays
cacacccaggctcctcacctcaccaccgcggccgcctgcccaaagcagcccaccactcgggcgcagcaattcgtcgagcatccgccgcgctcgacggccaccggcccaccagggcaccatggcgtccgccacgcgtgctctgggggcgctcctccacagggcctcgtctctgtcttcctccgctcccgctctccggggagcctcgctcctccgcggggacgggcctattggaagcgccggactgttccggaggcatgcggcgaggcggcggatttcgtcgttccagccgctctgcatgggaagacgctcctgcaaaatcgctggaaggaaggtgatgttctcttgccatgatgcacaatgtcacattaacgaagttcgggacggctggctgtgcatattctggttggcaaagccgtggaaatatcccgtgcaatcaatcatgttgtgcatgcgtgcaatcaagcaatcaaattcccaatgaaaatccaatagtaactgctagtttacatttaactccttccgcgtgaaaccagcaacattgtacttatttttatatttaatcccatttcatatgaaaccgttagatctagattggattcctggatgatttgattgcatgcttgcaccaaatgtgtgattacagtggatatatccccggcaaagcctccatttggaataatagaaatggatgcaacaacaaatatcattgtgtttcgaattttcggttctcttgaggatctgagctagcttttgctgctaagtagttgttcgcttcggattaaagccgactgtttagactgctgcagctgtaatctatagagacaaaaacattgtagaaacagtagaagccggtacggattaaaaccaagcgaataagctcggtccattagcgtaattgagaatggaaaaactgaaaacagaaagtagctttagtttcttgtttataaaatgtagttagctttaacgtctcaatatgtatcctcagagcaactccaacagccttactaaattgaacaaaatcagtaaaaaaaagaaaagcctggttaaaaacgcatccaacaggctagctttctacctctcttctccatccggctcgtcatctactcccctcgctaggcatctttgccgagggcgtacggctcgccatttccttttatcgcgcccaactgccctcccgccgtcacggcaaattccagctcccgcgaccgcgacattgcaccctcgccaccgcgaccagcccgtgcctccacattcatccgtcgccatgtacaaacctgtacggccccattcgttgaacaagtgaagaaactggattgtggaatgctcctctttctcagtgttcgccaggaaggatagatccggaggcgcatcgtacgggtggagatttggaccaatccactgtaggattgatgcaccggcgtttgcttcctcctacaagcttcgaaggcctaatgtcagcaaatctgtcccatgccaatcgaataaacagggatgaatcctacacagattttggaaccggaaggcatatgtggaccagaacacttatgtgcagattgaagtggatttttgccagacaaatctctctgcttgcatgattgaagtgcatatgtggcccaatacacttatatgctcttattcctcactgccatctcatttctaaagttggaaagattgaactgaaccttgctctgaacttttttccttctttgttttcttattgttgcagggaggcaatcctttggatttcaaaatgtagttgatctaattcatgcatatgctgccaaagctgttactgaacaactagaccaaaatgagaaccttgtatcagtcaatgcagatgtctgcaatttctgggaaaaggatgttatgccgatgcttttctgtaggagttgcagatttttttttaaaaaaaaaacttcagccgaaacaggatgttatatcgaaacattgaattagcagtggatcgtgttcagaaagttgggttcattgtagggatcagcttccaggggttggttcgttgcaggatcaattgccaacctaccactgagtctaaatttagagtctgttggttacccacccttcaggaagttctatattttataaagccatctccaaaactctaaaattagctaggaattatagctatgctgttggagttgctctcagttccttacaccagttgtttctttaattcaggatgcccagaacttgaagaagatgaagcgcaacagcaaaattggaaaagaaattgttgcggcgtaggtgttgctggacactgtgaacttgcactatcattttaacagcttggtatttcattgatttcataatttggattattttgagcatatggttaatccaacatgctgtcatctgctagtatatgttgacataagatgttttacctttttggccgtttaaacttaaatcattggacatctgttcccgtgctacagtgtctatatattctcagtctgtagcgtttcatgttattatgttgtgaaggtattgcggttgtatttagtaattagacattgcctgcttaatatctctgaagtgaatggcactatcttacccaagtggtaggccttgttaaaatgaaaaaaaagcaactgacaacaagaccaagcatcagactatcagagttctagtgccattcatttaaattaattaatctggtccgtttctggatatcacacagcatcaagaagggtggcccaaacccttcatccaacacaactttatcagctatactagagaaagcaagggaacttgatgtccctagagaaattttggagcgcaacatcaaaagggcatcagaaaagggacaagatacttacacagaaaaggtttatgaggtctatggttttggtggagtgggtatggtcgttgaagttctaactgacaaaattacaagatcagttgctgacattagaaacgtggtgaaagactgcggagcaaaattggctgatcctggatctgttacctttagattcagacaagctcgagtggtgaacataaaagttactgatgcagataaggaccaactgctcaccgttgcgttagatgctggtgctgatgacgtccttgaaccaaattttgatgatgatgactctgaagaagaagcagaaaggttctacaagatagttactacatcagaaaactacccagttttgctatcgaagcttcaagaagaaggattgaagtttgaaactgataatggctacgaacttgttcctctgaacccaattgaggtggacgacgaggccgtggaactaaacaaggaacttgtttcaaatttgctagagcttgatgacgttgatgccgtctatacagaccaaaaatgagtgaattcatgagctacagctctcaattcaagacgcgctcggccaatggactttgttcgagtatattcacttttcattgatgggaaaaaaatgttaggtctttttatgaagcctggttgagcaccatcggctctacccaaaaacttaacctagttatccagcatctttttgatactttggcatttcgcaagctcatgtctataccttggtttcttcccagcccatcgtgttgggatggtttgatacatgttcagaaagcagatgtgagaaaccatagtaaaataatacgttgatgctgatccatttttgggtcttgttaaattgcaatggaaatgctatgattttggtaagcattgaaatgaaaatgctttggctctctgaataaatgaatgtgctcttcgctcctataagctggaaataggaatataaaatacttggaacaaacaatttttctgtcagtttcaatatccaccggaagatctcatcagattggcagttatgcgtaccactttcaccgagtggccacaagttccatagttccatactgtagcattcaggttatcccccaacaaggaaatgcattttcaaaaagtggtgtataaaat

SEQ ID NO: 63582 - DNA, 1980 bp, Zea Mays
cacacccaggctcctcacctcaccaccgcggccgcctgcccaaagcagcccaccactcgggcgcagcaattcgtcgagcatccgccgcgctcgacggccaccggcccaccagggcaccatggcgtccgccacgcgtgctctgggggcgctcctccacagggcctcgtctctgtcttcctccgctcccgctctccggggagcctcgctcctccgcggggacgggcctattggaagcgccggactgttccggaggcatgcggcgaggcggcggatttcgtcgttccagccgctctgcatgggaagacgctcctgcaaaatcgctggaaggaagggaggcaatcctttggatttcaaaatgtagttgatctaattcatgcatatgctgccaaagctgttactgaacaactagaccaaaatgagaaccttgtatcagtcaatgcagatgtctgcaatttctgggaaaaggatgttatgccgatgcttttctgtaggagttgcagatttttttttaaaaaaaaaacttcagccgaaacaggatgttatatcgaaacattgaattagcagtggatcgtgttcagaaagttgggttcattgtagggatcagcttccaggggttggttcgttgcaggatcaattgccaacctaccactgagtctaaatttagagtctgttggttacccacccttcaggaagttctatattttataaagccatctccaaaactctaaaattagctaggaattatagctatgctgttggagttgctctcagttccttacaccagttgtttctttaattcaggatgcccagaacttgaagaagatgaagcgcaacagcaaaattggaaaagaaattgttgcggccatcaagaagggtggcccaaacccttcatccaacacaactttatcagctatactagagaaagcaagggaacttgatgtccctagagaaattttggagcgcaacatcaaaagggcatcagaaaagggacaagatacttacacagaaaaggtttatgagattcagacaagctcgagtggtgaacataaaagttactgatgcagataaggaccaactgctcaccgttgcgttagatgctggtgctgatgacgtccttgaaccaaattttgatgatgatgactctgaagaagaagcagaaaggttctacaagatagttactacatcagaaaactacccagttttgctatcgaagcttcaagaagaaggattgaagtttgaaactgataatggctacgaacttgttcctctgaacccaattgaggtggacgacgaggccgtggaactaaacaaggaacttgtttcaaatttgctagagcttgatgacgttgatgccgtctatacagaccaaaaatgagtgaattcatgagctacagctctcaattcaagacgcgctcggccaatggactttgttcgagtatattcacttttcattgatgggaaaaaaatgttaggtctttttatgaagcctggttgagcaccatcggctctacccaaaaacttaacctagttatccagcatctttttgatactttggcatttcgcaagctcatgtctataccttggtttcttcccagcccatcgtgttgggatggtttgatacatgttcagaaagcagatgtgagaaaccatagtaaaataatacgttgatgctgatccatttttgggtcttgttaaattgcaatggaaatgctatgattttggtaagcattgaaatgaaaatgctttggctctctgaataaatgaatgtgctcttcgctcctataagctggaaataggaatataaaatacttggaacaaacaatttttctgtcagtttcaatatccaccggaagatctcatcagattggcagttatgcgtaccactttcaccgagtggccacaagttccatagttccatactgtagcattcaggttatcccccaacaaggaaatgcattttcaaaaagtggtgtataaaat

SEQ ID NO: 63583 - DNA, 3338 bp, Zea Mays
cacacccaggctcctcacctcaccaccgcggccgcctgcccaaagcagcccaccactcgggcgcagcaattcgtcgagcatccgccgcgctcgacggccaccggcccaccagggcaccatggcgtccgccacgcgtgctctgggggcgctcctccacagggcctcgtctctgtcttcctccgctcccgctctccggggagcctcgctcctccgcggggacgggcctattggaagcgccggactgttccggaggcatgcggcgaggcggcggatttcgtcgttccagccgctctgcatgggaagacgctcctgcaaaatcgctggaaggaaggtgatgttctcttgccatgatgcacaatgtcacattaacgaagttcgggacggctggctgtgcatattctggttggcaaagccgtggaaatatcccgtgcaatcaatcatgttgtgcatgcgtgcaatcaagcaatcaaattcccaatgaaaatccaatagtaactgctagtttacatttaactccttccgcgtgaaaccagcaacattgtacttatttttatatttaatcccatttcatatgaaaccgttagatctagattggattcctggatgatttgattgcatgcttgcaccaaatgtgtgattacagtggatatatccccggcaaagcctccatttggaataatagaaatggatgcaacaacaaatatcattgtgtttcgaattttcggttctcttgaggatctgagctagcttttgctgctaagtagttgttcgcttcggattaaagccgactgtttagactgctgcagctgtaatctatagagacaaaaacattgtagaaacagtagaagccggtacggattaaaaccaagcgaataagctcggtccattagcgtaattgagaatggaaaaactgaaaacagaaagtagctttagtttcttgtttataaaatgtagttagctttaacgtctcaatatgtatcctcagagcaactccaacagccttactaaattgaacaaaatcagtaaaaaaaagaaaagcctggttaaaaacgcatccaacaggctagctttctacctctcttctccatccggctcgtcatctactcccctcgctaggcatctttgccgagggcgtacggctcgccatttccttttatcgcgcccaactgccctcccgccgtcacggcaaattccagctcccgcgaccgcgacattgcaccctcgccaccgcgaccagcccgtgcctccacattcatccgtcgccatgtacaaacctgtacggccccattcgttgaacaagtgaagaaactggattgtggaatgctcctctttctcagtgttcgccaggaaggatagatccggaggcgcatcgtacgggtggagatttggaccaatccactgtaggattgatgcaccggcgtttgcttcctcctacaagcttcgaaggcctaatgtcagcaaatctgtcccatgccaatcgaataaacagggatgaatcctacacagggaggcaatcctttggatttcaaaatgtagttgatctaattcatgcatatgctgccaaagctgttactgaacaactagaccaaaatgagaaccttgtatcagtcaatgcagatgtctgcaatttctgggaaaaggatgttatgccgatgcttttctgtaggagttgcagatttttttttaaaaaaaaaacttcagccgaaacaggatgttatatcgaaacattgaattagcagtggatcgtgttcagaaagttgggttcattgtagggatcagcttccaggggttggttcgttgcaggatcaattgccaacctaccactgagtctaaatttagagtctgttggttacccacccttcaggaagttctatattttataaagccatctccaaaactctaaaattagctaggaattatagctatgctgttggagttgctctcagttccttacaccagttgtttctttaattcaggatgcccagaacttgaagaagatgaagcgcaacagcaaaattggaaaagaaattgttgcggcgtaggtgttgctggacactgtgaacttgcactatcattttaacagcttgcatcaagaagggtggcccaaacccttcatccaacacaactttatcagctatactagagaaagcaagggaacttgatgtccctagagaaattttggagcgcaacatcaaaagggcatcagaaaagggacaagatacttacacagaaaaggtttatgaggtctatggttttggtggagtgggtatggtcgttgaagttctaactgacaaaattacaagatcagttgctgacattagaaacgtggtgaaagactgcggagcaaaattggctgatcctggatctgttacctttagattcagacaagctcgagtggtgaacataaaagttactgatgcagataaggaccaactgctcaccgttgcgttagatgctggtgctgatgacgtccttgaaccaaattttgatgatgatgactctgaagaagaagcagaaaggttctacaagatagttactacatcagaaaactacccagttttgctatcgaagcttcaagaagaaggattgaagtttgaaactgataatggctacgaacttgttcctctgaacccaattgaggtggacgacgaggccgtggaactaaacaaggaacttgtttcaaatttgctagagcttgatgacgttgatgccgtctatacagaccaaaaatgagtgaattcatgagctacagctctcaattcaagacgcgctcggccaatggactttgttcgagtatattcacttttcattgatgggaaaaaaatgttaggtctttttatgaagcctggttgagcaccatcggctctacccaaaaacttaacctagttatccagcatctttttgatactttggcatttcgcaagctcatgtctataccttggtttcttcccagcccatcgtgttgggatggtttgatacatgttcagaaagcagatgtgagaaaccatagtaaaataatacgttgatgctgatccatttttgggtcttgttaaattgcaatggaaatgctatgattttggtaagcattgaaatgaaaatgctttggctctctgaataaatgaatgtgctcttcgctcctataagctggaaataggaatataaaatacttggaacaaacaatttttctgtcagtttcaatatccaccggaagatctcatcagattggcagttatgcgtaccactttcaccgagtggccacaagttccatagttccatactgtagcattcaggttatcccccaacaaggaaatgcattttcaaaaagtggtgtataaaat

SEQ ID NO: 63584 - DNA, 2084 bp, Zea Mays
cacacccaggctcctcacctcaccaccgcggccgcctgcccaaagcagcccaccactcgggcgcagcaattcgtcgagcatccgccgcgctcgacggccaccggcccaccagggcaccatggcgtccgccacgcgtgctctgggggcgctcctccacagggcctcgtctctgtcttcctccgctcccgctctccggggagcctcgctcctccgcggggacgggcctattggaagcgccggactgttccggaggcatgcggcgaggcggcggatttcgtcgttccagccgctctgcatgggaagacgctcctgcaaaatcgctggaaggaaggatgcccagaacttgaagaagatgaagcgcaacagcaaaattggaaaagaaattgttgcggcgtaggtgttgctggacactgtgaacttgcactatcattttaacagcttggtatttcattgatttcataatttggattattttgagcatatggttaatccaacatgctgtcatctgctagtatatgttgacataagatgttttacctttttggccgtttaaacttaaatcattggacatctgttcccgtgctacagtgtctatatattctcagtctgtagcgtttcatgttattatgttgtgaaggtattgcggttgtatttagtaattagacattgcctgcttaatatctctgaagtgaatggcactatcttacccaagtggtaggccttgttaaaatgaaaaaaaagcaactgacaacaagaccaagcatcagactatcagagttctagtgccattcatttaaattaattaatctggtccgtttctggatatcacacagcatcaagaagggtggcccaaacccttcatccaacacaactttatcagctatactagagaaagcaagggaacttgatgtccctagagaaattttggagcgcaacatcaaaagggcatcagaaaagggacaagatacttacacagaaaaggtttatgaggtctatggttttggtggagtgggtatggtcgttgaagttctaactgacaaaattacaagatcagttgctgacattagaaacgtggtgaaagactgcggagcaaaattggctgatcctggatctgttacctttagattcagacaagctcgagtggtgaacataaaagttactgatgcagataaggaccaactgctcaccgttgcgttagatgctggtgctgatgacgtccttgaaccaaattttgatgatgatgactctgaagaagaagcagaaaggttctacaagatagttactacatcagaaaactacccagttttgctatcgaagcttcaagaagaaggattgaagtttgaaactgataatggctacgaacttgttcctctgaacccaattgaggtggacgacgaggccgtggaactaaacaaggaacttgtttcaaatttgctagagcttgatgacgttgatgccgtctatacagaccaaaaatgagtgaattcatgagctacagctctcaattcaagacgcgctcggccaatggactttgttcgagtatattcacttttcattgatgggaaaaaaatgttaggtctttttatgaagcctggttgagcaccatcggctctacccaaaaacttaacctagttatccagcatctttttgatactttggcatttcgcaagctcatgtctataccttggtttcttcccagcccatcgtgttgggatggtttgatacatgttcagaaagcagatgtgagaaaccatagtaaaataatacgttgatgctgatccatttttgggtcttgttaaattgcaatggaaatgctatgattttggtaagcattgaaatgaaaatgctttggctctctgaataaatgaatgtgctcttcgctcctataagctggaaataggaatataaaatacttggaacaaacaatttttctgtcagtttcaatatccaccggaagatctcatcagattggcagttatgcgtaccactttcaccgagtggccacaagttccatagttccatactgtagcattcaggttatcccccaacaaggaaatgcattttcaaaaagtggtgtataaaat

SEQ ID NO: 63585 - DNA, 2552 bp, Zea Mays
cacacccaggctcctcacctcaccaccgcggccgcctgcccaaagcagcccaccactcgggcgcagcaattcgtcgagcatccgccgcgctcgacggccaccggcccaccagggcaccatggcgtccgccacgcgtgctctgggggcgctcctccacagggcctcgtctctgtcttcctccgctcccgctctccggggagcctcgctcctccgcggggacgggcctattggaagcgccggactgttccggaggcatgcggcgaggcggcggatttcgtcgttccagccgctctgcatgggaagacgctcctgcaaaatcgctggaaggaagtgttcgccaggaaggatagatccggaggcgcatcgtacgggtggagatttggaccaatccactgtaggattgatgcaccggcgtttgcttcctcctacaagcttcgaaggcctaatgtcagcaaatctgtcccatgccaatcgaataaacagggatgaatcctacacagattttggaaccggaaggcatatgtggaccagaacacttatgtgcagattgaagtggatttttgccagacaaatctctctgcttgcatgattgaagtgcatatgtggcccaatacacttatatgctcttattcctcactgccatctcatttctaaagttggaaagattgaactgaaccttgctctgaacttttttccttctttgttttcttattgttgcagggaggcaatcctttggatttcaaaatgtagttgatctaattcatgcatatgctgccaaagctgttactgaacaactagaccaaaatgagaaccttgtatcagtcaatgcagatgtctgcaatttctgggaaaaggatgttatgccgatgcttttctgtaggagttgcagatttttttttaaaaaaaaaacttcagccgaaacaggatgttatatcgaaacattgaattagcagtggatcgtgttcagaaagttgggttcattgtagggatcagcttccaggggttggttcgttgcaggatcaattgccaacctaccactgagtctaaatttagagtctgttggttacccacccttcaggaagttctatattttataaagccatctccaaaactctaaaattagctaggaattatagctatgctgttggagttgctctcagttccttacaccagttgtttctttaattcaggatgcccagaacttgaagaagatgaagcgcaacagcaaaattggaaaagaaattgttgcggcgtaggtgttgctggacactgtgaacttgcactatcattttaacagcttgcatcaagaagggtggcccaaacccttcatccaacacaactttatcagctatactagagaaagcaagggaacttgatgtccctagagaaattttggagcgcaacatcaaaagggcatcagaaaagggacaagatacttacacagaaaaggtttatgaggtctatggttttggtggagtgggtatggtcgttgaagttctaactgacaaaattacaagatcagttgctgacattagaaacgtggtgaaagactgcggagcaaaattggctgatcctggatctgttacctttagattcagacaagctcgagtggtgaacataaaagttactgatgcagataaggaccaactgctcaccgttgcgttagatgctggtgctgatgacgtccttgaaccaaattttgatgatgatgactctgaagaagaagcagaaaggttctacaagatagttactacatcagaaaactacccagttttgctatcgaagcttcaagaagaaggattgaagtttgaaactgataatggctacgaacttgttcctctgaacccaattgaggtggacgacgaggccgtggaactaaacaaggaacttgtttcaaatttgctagagcttgatgacgttgatgccgtctatacagaccaaaaatgagtgaattcatgagctacagctctcaattcaagacgcgctcggccaatggactttgttcgagtatattcacttttcattgatgggaaaaaaatgttaggtctttttatgaagcctggttgagcaccatcggctctacccaaaaacttaacctagttatccagcatctttttgatactttggcatttcgcaagctcatgtctataccttggtttcttcccagcccatcgtgttgggatggtttgatacatgttcagaaagcagatgtgagaaaccatagtaaaataatacgttgatgctgatccatttttgggtcttgttaaattgcaatggaaatgctatgattttggtaagcattgaaatgaaaatgctttggctctctgaataaatgaatgtgctcttcgctcctataagctggaaataggaatataaaatacttggaacaaacaatttttctgtcagtttcaatatccaccggaagatctcatcagattggcagttatgcgtaccactttcaccgagtggccacaagttccatagttccatactgtagcattcaggttatcccccaacaaggaaatgcattttcaaaaagtggtgtataaaat

SEQ ID NO: 63586 - DNA, 3359 bp, Zea Mays
cacacccaggctcctcacctcaccaccgcggccgcctgcccaaagcagcccaccactcgggcgcagcaattcgtcgagcatccgccgcgctcgacggccaccggcccaccagggcaccatggcgtccgccacgcgtgctctgggggcgctcctccacagggcctcgtctctgtcttcctccgctcccgctctccggggagcctcgctcctccgcggggacgggcctattggaagcgccggactgttccggaggcatgcggcgaggcggcggatttcgtcgttccagccgctctgcatgggaagacgctcctgcaaaatcgctggaaggaaggtgatgttctcttgccatgatgcacaatgtcacattaacgaagttcgggacggctggctgtgcatattctggttggcaaagccgtggaaatatcccgtgcaatcaatcatgttgtgcatgcgtgcaatcaagcaatcaaattcccaatgaaaatccaatagtaactgctagtttacatttaactccttccgcgtgaaaccagcaacattgtacttatttttatatttaatcccatttcatatgaaaccgttagatctagattggattcctggatgatttgattgcatgcttgcaccaaatgtgtgattacagtggatatatccccggcaaagcctccatttggaataatagaaatggatgcaacaacaaatatcattgtgtttcgaattttcggttctcttgaggatctgagctagcttttgctgctaagtagttgttcgcttcggattaaagccgactgtttagactgctgcagctgtaatctatagagacaaaaacattgtagaaacagtagaagccggtacggattaaaaccaagcgaataagctcggtccattagcgtaattgagaatggaaaaactgaaaacagaaagtagctttagtttcttgtttataaaatgtagttagctttaacgtctcaatatgtatcctcagagcaactccaacagccttactaaattgaacaaaatcagtaaaaaaaagaaaagcctggttaaaaacgcatccaacaggctagctttctacctctcttctccatccggctcgtcatctactcccctcgctaggcatctttgccgagggcgtacggctcgccatttccttttatcgcgcccaactgccctcccgccgtcacggcaaattccagctcccgcgaccgcgacattgcaccctcgccaccgcgaccagcccgtgcctccacattcatccgtcgccatgtacaaacctgtacggccccattcgttgaacaagtgaagaaactggattgtggaatgctcctctttctcagtgttcgccaggaaggatagatccggaggcgcatcgtacgggtggagatttggaccaatccactgtaggattgatgcaccggcgtttgcttcctcctacaagcttcgaaggcctaatgtcagcaaatctgtcccatgccaatcgaataaacagggatgaatcctacacaggcatatgtggaccagaacacttatgtgcagattgaagtggatttttgccagacaaatctctctgcttgcatgattgaagtgcatatgtggcccaatacacttatatgctcttattcctcactgccatctcatttctaaagttggaaagattgaactgaaccttgctctgaacttttttccttctttgttttcttattgttgcagggaggcaatcctttggatttcaaaatgtagttgatctaattcatgcatatgctgccaaagctgttactgaacaactagaccaaaatgagaaccttgtatcagtcaatgcagatgtctgcaatttctgggaaaaggatgttatgccgatgcttttctgtaggagttgcagatttttttttaaaaaaaaaacttcagccgaaacaggatgttatatcgaaacattgaattagcagtggatcgtgttcagaaagttgggttcattgtagggatcagcttccaggggttggttcgttgcaggatcaattgccaacctaccactgagtctaaatttagagtctgttggttacccacccttcaggaagttctatattttataaagccatctccaaaactctaaaattagctaggaattatagctatgctgttggagttgctctcagttccttacaccagttgtttctttaattcaggatgcccagaacttgaagaagatgaagcgcaacagcaaaattggaaaagaaattgttgcggccatcaagaagggtggcccaaacccttcatccaacacaactttatcagctatactagagaaagcaagggaacttgatgtccctagagaaattttggagcgcaacatcaaaagggcatcagaaaagggacaagatacttacacagaaaaggtttatgagattcagacaagctcgagtggtgaacataaaagttactgatgcagataaggaccaactgctcaccgttgcgttagatgctggtgctgatgacgtccttgaaccaaattttgatgatgatgactctgaagaagaagcagaaaggttctacaagatagttactacatcagaaaactacccagttttgctatcgaagcttcaagaagaaggattgaagtttgaaactgataatggctacgaacttgttcctctgaacccaattgaggtggacgacgaggccgtggaactaaacaaggaacttgtttcaaatttgctagagcttgatgacgttgatgccgtctatacagaccaaaaatgagtgaattcatgagctacagctctcaattcaagacgcgctcggccaatggactttgttcgagtatattcacttttcattgatgggaaaaaaatgttaggtctttttatgaagcctggttgagcaccatcggctctacccaaaaacttaacctagttatccagcatctttttgatactttggcatttcgcaagctcatgtctataccttggtttcttcccagcccatcgtgttgggatggtttgatacatgttcagaaagcagatgtgagaaaccatagtaaaataatacgttgatgctgatccatttttgggtcttgttaaattgcaatggaaatgctatgattttggtaagcattgaaatgaaaatgctttggctctctgaataaatgaatgtgctcttcgctcctataagctggaaataggaatataaaatacttggaacaaacaatttttctgtcagtttcaatatccaccggaagatctcatcagattggcagttatgcgtaccactttcaccgagtggccacaagttccatagttccatactgtagcattcaggttatcccccaacaaggaaatgcattttcaaaaagtggtgtataaaat

SEQ ID NO: 63587 - DNA, 2163 bp, Zea Mays
cacacccaggctcctcacctcaccaccgcggccgcctgcccaaagcagcccaccactcgggcgcagcaattcgtcgagcatccgccgcgctcgacggccaccggcccaccagggcaccatggcgtccgccacgcgtgctctgggggcgctcctccacagggcctcgtctctgtcttcctccgctcccgctctccggggagcctcgctcctccgcggggacgggcctattggaagcgccggactgttccggaggcatgcggcgaggcggcggatttcgtcgttccagccgctctgcatgggaagacgctcctgcaaaatcgctggaaggaagggaggcaatcctttggatttcaaaatgtagttgatctaattcatgcatatgctgccaaagctgttactgaacaactagaccaaaatgagaaccttgtatcagtcaatgcagatgtctgcaatttctgggaaaaggatgttatgccgatgcttttctgtaggagttgcagatttttttttaaaaaaaaaacttcagccgaaacaggatgttatatcgaaacattgaattagcagtggatcgtgttcagaaagttgggttcattgtagggatcagcttccaggggttggttcgttgcaggatcaattgccaacctaccactgagtctaaatttagagtctgttggttacccacccttcaggaagttctatattttataaagccatctccaaaactctaaaattagctaggaattatagctatgctgttggagttgctctcagttccttacaccagttgtttctttaattcaggatgcccagaacttgaagaagatgaagcgcaacagcaaaattggaaaagaaattgttgcggcgtaggtgttgctggacactgtgaacttgcactatcattttaacagcttgcatcaagaagggtggcccaaacccttcatccaacacaactttatcagctatactagagaaagcaagggaacttgatgtccctagagaaattttggagcgcaacatcaaaagggcatcagaaaagggacaagatacttacacagaaaaggtttatgaggtctatggttttggtggagtgggtatggtcgttgaagttctaactgacaaaattacaagatcagttgctgacattagaaacgtggtgaaagactgcggagcaaaattggctgatcctggatctgttacctttagattcagacaagctcgagtggtgaacataaaagttactgatgcagataaggaccaactgctcaccgttgcgttagatgctggtgctgatgacgtccttgaaccaaattttgatgatgatgactctgaagaagaagcagaaaggttctacaagatagttactacatcagaaaactacccagttttgctatcgaagcttcaagaagaaggattgaagtttgaaactgataatggctacgaacttgttcctctgaacccaattgaggtggacgacgaggccgtggaactaaacaaggaacttgtttcaaatttgctagagcttgatgacgttgatgccgtctatacagaccaaaaatgagtgaattcatgagctacagctctcaattcaagacgcgctcggccaatggactttgttcgagtatattcacttttcattgatgggaaaaaaatgttaggtctttttatgaagcctggttgagcaccatcggctctacccaaaaacttaacctagttatccagcatctttttgatactttggcatttcgcaagctcatgtctataccttggtttcttcccagcccatcgtgttgggatggtttgatacatgttcagaaagcagatgtgagaaaccatagtaaaataatacgttgatgctgatccatttttgggtcttgttaaattgcaatggaaatgctatgattttggtaagcattgaaatgaaaatgctttggctctctgaataaatgaatgtgctcttcgctcctataagctggaaataggaatataaaatacttggaacaaacaatttttctgtcagtttcaatatccaccggaagatctcatcagattggcagttatgcgtaccactttcaccgagtggccacaagttccatagttccatactgtagcattcaggttatcccccaacaaggaaatgcattttcaaaaagtggtgtataaaat

SEQ ID NO: 63588 - DNA, 3437 bp, Zea Mays
ggcagcccgggtgcacacccaggctcctcacctcaccaccgcggccgcctgcccaaagcagcccaccactcgggcgcagcaattcgtcgagcatccgccgcgctcgacggccaccggcccaccagggcaccatggcgtccgccacgcgtgctctgggggcgctcctccacagggcctcgtctctgtcttcctccgctcccgctctccggggagcctcgctcctccgcggggacgggcctattggaagcgccggactgttccggaggcatgcggcgaggcggcggatttcgtcgttccagccgctctgcatgggaagacgctcctgcaaaatcgctggaaggaaggtgatgttctcttgccatgatgcacaatgtcacattaacgaagttcgggacggctggctgtgcatattctggttggcaaagccgtggaaatatcccgtgcaatcaatcatgttgtgcatgcgtgcaatcaagcaatcaaattcccaatgaaaatccaatagtaactgctagtttacatttaactccttccgcgtgaaaccagcaacattgtacttatttttatatttaatcccatttcatatgaaaccgttagatctagattggattcctggatgatttgattgcatgcttgcaccaaatgtgtgattacagtggatatatccccggcaaagcctccatttggaataatagaaatggatgcaacaacaaatatcattgtgtttcgaattttcggttctcttgaggatctgagctagcttttgctgctaagtagttgttcgcttcggattaaagccgactgtttagactgctgcagctgtaatctatagagacaaaaacattgtagaaacagtagaagccggtacggattaaaaccaagcgaataagctcggtccattagcgtaattgagaatggaaaaactgaaaacagaaagtagctttagtttcttgtttataaaatgtagttagctttaacgtctcaatatgtatcctcagagcaactccaacagccttactaaattgaacaaaatcagtaaaaaaaagaaaagcctggttaaaaacgcatccaacaggctagctttctacctctcttctccatccggctcgtcatctactcccctcgctaggcatctttgccgagggcgtacggctcgccatttccttttatcgcgcccaactgccctcccgccgtcacggcaaattccagctcccgcgaccgcgacattgcaccctcgccaccgcgaccagcccgtgcctccacattcatccgtcgccatgtacaaacctgtacggccccattcgttgaacaagtgaagaaactggattgtggaatgctcctctttctcagtgttcgccaggaaggatagatccggaggcgcatcgtacgggtggagatttggaccaatccactgtaggattgatgcaccggcgtttgcttcctcctacaagcttcgaaggcctaatgtcagcaaatctgtcccatgccaatcgaataaacagggatgaatcctacacagattttggaaccggaaggcatatgtggaccagaacacttatgtgcagattgaagtggatttttgccagacaaatctctctgcttgcatgattgaagtgcatatgtggcccaatacacttatatgctcttattcctcactgccatctcatttctaaagttggaaagattgaactgaaccttgctctgaacttttttccttctttgttttcttattgttgcagggaggcaatcctttggatttcaaaatgtagttgatctaattcatgcatatgctgccaaagctgttactgaacaactagaccaaaatgagaaccttgtatcagtcaatgcagatgtctgcaatttctgggaaaaggatgttatgccgatgcttttctgtaggagttgcagatttttttttaaaaaaaaaacttcagccgaaacaggatgttatatcgaaacattgaattagcagtggatcgtgttcagaaagttgggttcattgtagggatcagcttccaggggttggttcgttgcaggatcaattgccaacctaccactgagtctaaatttagagtctgttggttacccacccttcaggaagttctatattttataaagccatctccaaaactctaaaattagctaggaattatagctatgctgttggagttgctctcagttccttacaccagttgtttctttaattcaggatgcccagaacttgaagaagatgaagcgcaacagcaaaattggaaaagaaattgttgcggcgtaggtgttgctggacactgtgaacttgcactatcattttaacagcttgcatcaagaagggtggcccaaacccttcatccaacacaactttatcagctatactagagaaagcaagggaacttgatgtccctagagaaattttggagcgcaacatcaaaagggcatcagaaaagggacaagatacttacacagaaaaggtttatgagattcagacaagctcgagtggtgaacataaaagttactgatgcagataaggaccaactgctcaccgttgcgttagatgctggtgctgatgacgtccttgaaccaaattttgatgatgatgactctgaagaagaagcagaaaggttctacaagatagttactacatcagaaaactacccagttttgctatcgaagcttcaagaagaaggattgaagtttgaaactgataatggctacgaacttgttcctctgaacccaattgaggtggacgacgaggccgtggaactaaacaaggaacttgtttcaaatttgctagagcttgatgacgttgatgccgtctatacagaccaaaaatgagtgaattcatgagctacagctctcaattcaagacgcgctcggccaatggactttgttcgagtatattcacttttcattgatgggaaaaaaatgttaggtctttttatgaagcctggttgagcaccatcggctctacccaaaaacttaacctagttatccagcatctttttgatactttggcatttcgcaagctcatgtctataccttggtttcttcccagcccatcgtgttgggatggtttgatacatgttcagaaagcagatgtgagaaaccatagtaaaataatacgttgatgctgatccatttttgggtcttgttaaattgcaatggaaatgctatgattttggtaagcattgaaatgaaaatgctttggctctctgaataaatgaatgtgctcttcgctcctataagctggaaataggaatataaaatacttggaacaaacaatttttctgtcagtttcaatatccaccggaagatctcatcagattggcagttatgcgtaccactttcaccgagtggccacaagttccatagttccatactgtagcattcaggttatcccccaacaaggaaatgcattttcaaaaagtggtgtataaaat

SEQ ID NO: 63589 - DNA, 3522 bp, Zea Mays
ggcagcccgggtgcacacccaggctcctcacctcaccaccgcggccgcctgcccaaagcagcccaccactcgggcgcagcaattcgtcgagcatccgccgcgctcgacggccaccggcccaccagggcaccatggcgtccgccacgcgtgctctgggggcgctcctccacagggcctcgtctctgtcttcctccgctcccgctctccggggagcctcgctcctccgcggggacgggcctattggaagcgccggactgttccggaggcatgcggcgaggcggcggatttcgtcgttccagccgctctgcatgggaagacgctcctgcaaaatcgctggaaggaaggtgatgttctcttgccatgatgcacaatgtcacattaacgaagttcgggacggctggctgtgcatattctggttggcaaagccgtggaaatatcccgtgcaatcaatcatgttgtgcatgcgtgcaatcaagcaatcaaattcccaatgaaaatccaatagtaactgctagtttacatttaactccttccgcgtgaaaccagcaacattgtacttatttttatatttaatcccatttcatatgaaaccgttagatctagattggattcctggatgatttgattgcatgcttgcaccaaatgtgtgattacagtggatatatccccggcaaagcctccatttggaataatagaaatggatgcaacaacaaatatcattgtgtttcgaattttcggttctcttgaggatctgagctagcttttgctgctaagtagttgttcgcttcggattaaagccgactgtttagactgctgcagctgtaatctatagagacaaaaacattgtagaaacagtagaagccggtacggattaaaaccaagcgaataagctcggtccattagcgtaattgagaatggaaaaactgaaaacagaaagtagctttagtttcttgtttataaaatgtagttagctttaacgtctcaatatgtatcctcagagcaactccaacagccttactaaattgaacaaaatcagtaaaaaaaagaaaagcctggttaaaaacgcatccaacaggctagctttctacctctcttctccatccggctcgtcatctactcccctcgctaggcatctttgccgagggcgtacggctcgccatttccttttatcgcgcccaactgccctcccgccgtcacggcaaattccagctcccgcgaccgcgacattgcaccctcgccaccgcgaccagcccgtgcctccacattcatccgtcgccatgtacaaacctgtacggccccattcgttgaacaagtgaagaaactggattgtggaatgctcctctttctcagtgttcgccaggaaggatagatccggaggcgcatcgtacgggtggagatttggaccaatccactgtaggattgatgcaccggcgtttgcttcctcctacaagcttcgaaggcctaatgtcagcaaatctgtcccatgccaatcgaataaacagggatgaatcctacacagattttggaaccggaaggcatatgtggaccagaacacttatgtgcagattgaagtggatttttgccagacaaatctctctgcttgcatgattgaagtgcatatgtggcccaatacacttatatgctcttattcctcactgccatctcatttctaaagttggaaagattgaactgaaccttgctctgaacttttttccttctttgttttcttattgttgcagggaggcaatcctttggatttcaaaatgtagttgatctaattcatgcatatgctgccaaagctgttactgaacaactagaccaaaatgagaaccttgtatcagtcaatgcagatgtctgcaatttctgggaaaaggatgttatgccgatgcttttctgtaggagttgcagatttttttttaaaaaaaaaacttcagccgaaacaggatgttatatcgaaacattgaattagcagtggatcgtgttcagaaagttgggttcattgtagggatcagcttccaggggttggttcgttgcaggatcaattgccaacctaccactgagtctaaatttagagtctgttggttacccacccttcaggaagttctatattttataaagccatctccaaaactctaaaattagctaggaattatagctatgctgttggagttgctctcagttccttacaccagttgtttctttaattcaggatgcccagaacttgaagaagatgaagcgcaacagcaaaattggaaaagaaattgttgcggccatcaagaagggtggcccaaacccttcatccaacacaactttatcagctatactagagaaagcaagggaacttgatgtccctagagaaattttggagcgcaacatcaaaagggcatcagaaaagggacaagatacttacacagaaaaggtttatgaggtctatggttttggtggagtgggtatggtcgttgaagttctaactgacaaaattacaagatcagttgctgacattagaaacgtggtgaaagactgcggagcaaaattggctgatcctggatctgttacctttagattcagacaagctcgagtggtgaacataaaagttactgatgcagataaggaccaactgctcaccgttgcgttagatgctggtgctgatgacgtccttgaaccaaattttgatgatgatgactctgaagaagaagcagaaaggttctacaagatagttactacatcagaaaactacccagttttgctatcgaagcttcaagaagaaggattgaagtttgaaactgataatggctacgaacttgttcctctgaacccaattgaggtggacgacgaggccgtggaactaaacaaggaacttgtttcaaatttgctagagcttgatgacgttgatgccgtctatacagaccaaaaatgagtgaattcatgagctacagctctcaattcaagacgcgctcggccaatggactttgttcgagtatattcacttttcattgatgggaaaaaaatgttaggtctttttatgaagcctggttgagcaccatcggctctacccaaaaacttaacctagttatccagcatctttttgatactttggcatttcgcaagctcatgtctataccttggtttcttcccagcccatcgtgttgggatggtttgatacatgttcagaaagcagatgtgagaaaccatagtaaaataatacgttgatgctgatccatttttgggtcttgttaaattgcaatggaaatgctatgattttggtaagcattgaaatgaaaatgctttggctctctgaataaatgaatgtgctcttcgctcctataagctggaaataggaatataaaatacttggaacaaacaatttttctgtcagtttcaatatccaccggaagatctcatcagattggcagttatgcgtaccactttcaccgagtggccacaagttccatagttccatactgtagcattcaggttatcccccaacaaggaaatgcattttcaaaaagtggtgtataaaat

SEQ ID NO: 63590 - DNA, 2433 bp, Zea Mays
ggcagcccgggtgcacacccaggctcctcacctcaccaccgcggccgcctgcccaaagcagcccaccactcgggcgcagcaattcgtcgagcatccgccgcgctcgacggccaccggcccaccagggcaccatggcgtccgccacgcgtgctctgggggcgctcctccacagggcctcgtctctgtcttcctccgctcccgctctccggggagcctcgctcctccgcggggacgggcctattggaagcgccggactgttccggaggcatgcggcgaggcggcggatttcgtcgttccagccgctctgcatgggaagacgctcctgcaaaatcgctggaaggaagggaggcaatcctttggatttcaaaatgtagttgatctaattcatgcatatgctgccaaagctgttactgaacaactagaccaaaatgagaaccttgtatcagtcaatgcagatgtctgcaatttctgggaaaaggatgttatgccgatgcttttctgtaggagttgcagatttttttttaaaaaaaaaacttcagccgaaacaggatgttatatcgaaacattgaattagcagtggatcgtgttcagaaagttgggttcattgtagggatcagcttccaggggttggttcgttgcaggatcaattgccaacctaccactgagtctaaatttagagtctgttggttacccacccttcaggaagttctatattttataaagccatctccaaaactctaaaattagctaggaattatagctatgctgttggagttgctctcagttccttacaccagttgtttctttaattcaggatgcccagaacttgaagaagatgaagcgcaacagcaaaattggaaaagaaattgttgcggcgtaggtgttgctggacactgtgaacttgcactatcattttaacagcttggtatttcattgatttcataatttggattattttgagcatatggttaatccaacatgctgtcatctgctagtatatgttgacataagatgttttacctttttggccgtttaaacttaaatcattggacatctgttcccgtgctacagtgtctatatattctcagtctgtagcgtttcatgttattatgttgtgaaggtattgcggttgtatttagtaattagacattgcctgcttaatatctctgaagtgaatggcactatcttacccaagtggtaggccttgttaaaatgaaaaaaaagcaactgacaacaagaccaagcatcagactatcagagttctagtgccattcatttaaattaattaatctggtccgtttctggatatcacacagcatcaagaagggtggcccaaacccttcatccaacacaactttatcagctatactagagaaagcaagggaacttgatgtccctagagaaattttggagcgcaacatcaaaagggcatcagaaaagggacaagatacttacacagaaaaggtttatgagattcagacaagctcgagtggtgaacataaaagttactgatgcagataaggaccaactgctcaccgttgcgttagatgctggtgctgatgacgtccttgaaccaaattttgatgatgatgactctgaagaagaagcagaaaggttctacaagatagttactacatcagaaaactacccagttttgctatcgaagcttcaagaagaaggattgaagtttgaaactgataatggctacgaacttgttcctctgaacccaattgaggtggacgacgaggccgtggaactaaacaaggaacttgtttcaaatttgctagagcttgatgacgttgatgccgtctatacagaccaaaaatgagtgaattcatgagctacagctctcaattcaagacgcgctcggccaatggactttgttcgagtatattcacttttcattgatgggaaaaaaatgttaggtctttttatgaagcctggttgagcaccatcggctctacccaaaaacttaacctagttatccagcatctttttgatactttggcatttcgcaagctcatgtctataccttggtttcttcccagcccatcgtgttgggatggtttgatacatgttcagaaagcagatgtgagaaaccatagtaaaataatacgttgatgctgatccatttttgggtcttgttaaattgcaatggaaatgctatgattttggtaagcattgaaatgaaaatgctttggctctctgaataaatgaatgtgctcttcgctcctataagctggaaataggaatataaaatacttggaacaaacaatttttctgtcagtttcaatatccaccggaagatctcatcagattggcagttatgcgtaccactttcaccgagtggccacaagttccatagttccatactgtagcattcaggttatcccccaacaaggaaatgcattttcaaaaagtggtgtataaaat

SEQ ID NO: 63591 - DNA, 521 bp, Zea Mays
gtgtactttggagttcctatgatcgaacttgaggccggctattccattgagctgcccagcagcgctgaagcttctgatcgagcaatgttggtcctggcaaccagaaaggaggcctgagttccagcaaatagtttcagtccttgaaaacctcaagacagttcttgaaagagatggaacactcgacaagatcccaggctcgatctgccaggccctggaacccaatgaccagaacaagaagaaggctggcaactggatccagaggctgtcatacgctcaacctgctttctccggacctccacccccaaagttactctagttacacgtcttcttgttcttagcagcttggtatctggtactccagatagcaagtgtgtaaattgaatatttctttgtttcgctgggagaccagagatttcttcatggtatatactcggatacagtactgataatcgcctagaggggggtgaatagggcgaaactgaaatttacaaatataaacacaactacaagccgggttagcg

SEQ ID NO: 63592 - DNA, 1696 bp, Zea Mays
cttgcagcgtgctgtcgtgcgtcagtctccgcgacggcccgtgatctgccgaggatgcgccacacgcgcagttcggacgagggacgggtgacgaggtgtgcggtgcgcgtgagtgaggaggcaaggcttctccatctggcaaccggggaccggacgatcaactcatccgcgcgactccgcttcgtcacgcggcgtcgccggcctcctcccgtgcccgtggatgctgcatctacgaaggtgtccaagccgccgccgaaaccgaagcgaagagccaagtcccctatccccaagcgcgtcatctcggacgtgttcaaggaggcgaaagctgccaccaagaggttctccagcccgcagcggcagaggaagcccatgtccccgcggtcaccagacgacagccctccactcggcttcgcctcgctaagagcaccgagcaagctgaagatcaataccagagcatcctcatggccacgaacaaaccttgacagtggaccggcaagagttgctgcgccggagatccttgagaggtggacggtcgatcgctccgagttgctcatcggccatagatttgcatccggggcctatagccgattgttccacgggatctacaaggaccagcctgttgctgtgaagtttatcaggcagcccgacgatggcgaggacgacgaactgtctgctaagcttgacaagcagttcacttcagaggttacaattctggcaaggctccaacatcgtaatgtcattaagcttgttggggcctgtaattgcccgacggtcttctgtgtcatcaccgagtttctgtccggcggttctctgagggctttcttgcgaaagctggagcgtgaaactcttcctttggagaaggtcatttccatcgctctggatatcgcacgcggcctggaatatattcacctccaagggattgtgcaccgtgacatcaaacccgagaacatcttatttgatggagaattctgcgctaaagtcgtcgattttggagtggcgtgtgaagaaaaatactgcaatttgttaggcgatgatccaggtacttatagatggatggcaccagagatgtacaagcacaagccatatggccggaaggtcgatgtgtatagctttggacttgtcttgtgggaattggtcactggttcactcccttatcaagatatgactccgcttcaggcagcttttgcggttgttaataagaacttgaggccggctattccattgagctgcccagcagcgctgaagcttctgatcgagcaatgttggtcctggcaaccagaaaggaggcctgagttccagcaaatagtttcagtccttgaaaacctcaagacagttcttgaaagagatggaacactcgacaagatcccaggctcgatctgccaggccctggaacccaatgaccagaacaagaagaaggctggcaactggatccagaggctgtcatacgctcaacctgctttctccggacctccacccccaaagttactctagttacacgtcttcttgttcttagcagcttggtatctggtactccagatagcaagtgtgtaaattgaatatttctttgtttcgctgggagaccagagatttcttcatggtatatactcggatacagtactgataatcgcctagaggggggtgaatagggcgaaactgaaatttacaaatataaacacaactacaagccgggttagcg

SEQ ID NO: 63593 - DNA, 1922 bp, Zea Mays
cttgcagcgtgctgtcgtgcgtcagtctccgcgacggcccgtgatctgccgaggatgcgccacacgcgcagttcggacgagggacgggtgacgaggtgtgcggtgcgcgtgagtgaggaggcaaggcttctccatctggcaaccggggaccggacgatcaactcatccgcgcgactccgcttcgtcacgcggcgtcgccggcctcctcccgtgcccgtggatgcagagagtggcttgtcgcggcgcggaagggggaacgagcttgcagtcccagtcctggccgggggacggtagccactagcaagcgagtgcgcgtctgcctcggagcgacgtctcgctcgcctttcccccctttcctgcatcctgtgcgctgtgaggaatgacggtctccgcactcactcctccaacggtcgccatccccgaaccacatggattattgtgagtgcgcagtgcatctacgaaggtgtccaagccgccgccgaaaccgaagcgaagagccaagtcccctatccccaagcgcgtcatctcggacgtgttcaaggaggcgaaagctgccaccaagaggttctccagcccgcagcggcagaggaagcccatgtccccgcggtcaccagacgacagccctccactcggcttcgcctcgctaagagcaccgagcaagctgaagatcaataccagagcatcctcatggccacgaacaaaccttgacagtggaccggcaagagttgctgcgccggagatccttgagaggtggacggtcgatcgctccgagttgctcatcggccatagatttgcatccggggcctatagccgattgttccacgggatctacaaggaccagcctgttgctgtgaagtttatcaggcagcccgacgatggcgaggacgacgaactgtctgctaagcttgacaagcagttcacttcagaggttacaattctggcaaggctccaacatcgtaatgtcattaagcttgttggggcctgtaattgcccgacggtcttctgtgtcatcaccgagtttctgtccggcggttctctgagggctttcttgcgaaagctggagcgtgaaactcttcctttggagaaggtcatttccatcgctctggatatcgcacgcggcctggaatatattcacctccaagggattgtgcaccgtgacatcaaacccgagaacatcttatttgatggagaattctgcgctaaagtcgtcgattttggagtggcgtgtgaagaaaaatactgcaatttgttaggcgatgatccaggtacttatagatggatggcaccagagatgtacaagcacaagccatatggccggaaggtcgatgtgtatagctttggacttgtcttgtgggaattggtcactggttcactcccttatcaagatatgactccgcttcaggcagcttttgcggttgttaataagaacttgaggccggctattccattgagctgcccagcagcgctgaagcttctgatcgagcaatgttggtcctggcaaccagaaaggaggcctgagttccagcaaatagtttcagtccttgaaaacctcaagacagttcttgaaagagatggaacactcgacaagatcccaggctcgatctgccaggccctggaacccaatgaccagaacaagaagaaggctggcaactggatccagaggctgtcatacgctcaacctgctttctccggacctccacccccaaagttactctagttacacgtcttcttgttcttagcagcttggtatctggtactccagatagcaagtgtgtaaattgaatatttctttgtttcgctgggagaccagagatttcttcatggtatatactcggatacagtactgataatcgcctagaggggggtgaatagggcgaaactgaaatttacaaatataaacacaactacaagccgggttagcg

SEQ ID NO: 63594 - DNA, 1176 bp, Zea Mays
cttgcagcgtgctgtcgtgcgtcagtctccgcgacggcccgtgatctgccgaggatgcgccacacgcgcagttcggacgagggacgggtgacgaggtgtgcggtgcgcgtgagtgaggaggcaaggcttctccatctggcaaccggggaccggacgatcaactcatccgcgcgactccgcttcgtcacgcggcgtcgccggcctcctcccgtgcccgtggatgccttgttggggcctgtaattgcccgacggtcttctgtgtcatcaccgagtttctgtccggcggttctctgagggctttcttgcgaaagctggagcgtgaaactcttcctttggagaaggtcatttccatcgctctggatatcgcacgcggcctggaatatattcacctccaagggattgtgcaccgtgacatcaaacccgagaacatcttatttgatggagaattctgcgctaaagtcgtcgattttggagtggcgtgtgaagaaaaatactgcaatttgttaggcgatgatccaggtacttatagatggatggcaccagagatgtacaagcacaagccatatggccggaaggtcgatgtgtatagctttggacttgtcttgtgggaattggtcactggttcactcccttatcaagatatgactccgcttcaggcagcttttgcggttgttaataagaacttgaggccggctattccattgagctgcccagcagcgctgaagcttctgatcgagcaatgttggtcctggcaaccagaaaggaggcctgagttccagcaaatagtttcagtccttgaaaacctcaagacagttcttgaaagagatggaacactcgacaagatcccaggctcgatctgccaggccctggaacccaatgaccagaacaagaagaaggctggcaactggatccagaggctgtcatacgctcaacctgctttctccggacctccacccccaaagttactctagttacacgtcttcttgttcttagcagcttggtatctggtactccagatagcaagtgtgtaaattgaatatttctttgtttcgctgggagaccagagatttcttcatggtatatactcggatacagtactgataatcgcctagaggggggtgaatagggcgaaactgaaatttacaaatataaacacaactacaagccgggttagcg

SEQ ID NO: 63595 - DNA, 2416 bp, Zea Mays
cttgcagcgtgctgtcgtgcgtcagtctccgcgacggcccgtgatctgccgaggatgcgccacacgcgcagttcggacgagggacgggtgacgaggtgtgcggtgcgcgtgagtgaggaggcaaggcttctccatctggcaaccggggaccggacgatcaactcatccgcgcgactccgcttcgtcacgcggcgtcgccggcctcctcccgtgcccgtggatgcctgttcttgcgagttgttaatctaccgtatcgagggggggggggggggggggtccattgcggcgcctacttacttggtggtctggcactggctggagagctctagtgtcagccagtgttcctgctgtctcctgcctcatctaggtcccctcccttcgttcagctgttcttgcgagttgttaatctaccgtatcgaggaggggaagatggacgacgaggactactcgtgggtgcggcgcaccaggttctcgcagtctgtcgtcaggtccagctccggcagggagcggtatggcgcgttcatcatcgacccgttcggtcgtggcgccaagctgaggcaggacgggttgggcacgggccccggggtctctagctcggcaaggcggctgccgatccccaaggcgagaccggcagttgcccggtcggaacggaagctgaagcacgcgtcttcagagggccaattgaacagggcgaggaacggtgatcgctcgtcgcaaggatcaccggcgaagcagagccgggagggggtcggcctgagcttggacattccacagctgcatgatgtggctgttcgaccacccaaggagagcccagacgctgcgctggatttctctttccactcggacgagcacagccagaggctccagcgagtgtgttccagcccgtctcctttctttctgcaggatgcaacagtgacagctgatgatggttccagagtgcgcagtgcatctacgaaggtgtccaagccgccgccgaaaccgaagcgaagagccaagtcccctatccccaagcgcgtcatctcggacgtgttcaaggaggcgaaagctgccaccaagaggttctccagcccgcagcggcagaggaagcccatgtccccgcggtcaccagacgacagccctccactcggcttcgcctcgctaagagcaccgagcaagctgaagatcaataccagagcatcctcatggccacgaacaaaccttgacagtggaccggcaagagttgctgcgccggagatccttgagaggtggacggtcgatcgctccgagttgctcatcggccatagatttgcatccggggcctatagccgattgttccacgggatctacaaggaccagcctgttgctgtgaagtttatcaggcagcccgacgatggcgaggacgacgaactgtctgctaagcttgacaagcagttcacttcagaggttacaattctggcaaggctccaacatcgtaatgtcattaagcttgttggggcctgtaattgcccgacggtcttctgtgtcatcaccgagtttctgtccggcggttctctgagggctttcttgcgaaagctggagcgtgaaactcttcctttggagaaggtcatttccatcgctctggatatcgcacgcggcctggaatatattcacctccaagggattgtgcaccgtgacatcaaacccgagaacatcttatttgatggagaattctgcgctaaagtcgtcgattttggagtggcgtgtgaagaaaaatactgcaatttgttaggcgatgatccaggtacttatagatggatggcaccagagatgtacaagcacaagccatatggccggaaggtcgatgtgtatagctttggacttgtcttgtgggaattggtcactggttcactcccttatcaagatatgactccgcttcaggcagcttttgcggttgttaataagaacttgaggccggctattccattgagctgcccagcagcgctgaagcttctgatcgagcaatgttggtcctggcaaccagaaaggaggcctgagttccagcaaatagtttcagtccttgaaaacctcaagacagttcttgaaagagatggaacactcgacaagatcccaggctcgatctgccaggccctggaacccaatgaccagaacaagaagaaggctggcaactggatccagaggctgtcatacgctcaacctgctttctccggacctccacccccaaagttactctagttacacgtcttcttgttcttagcagcttggtatctggtactccagatagcaagtgtgtaaattgaatatttctttgtttcgctgggagaccagagatttcttcatggtatatactcggatacagtactgataatcgcctagaggggggtgaatagggcgaaactgaaatttacaaatataaacacaactacaagccgggttagcg

SEQ ID NO: 63596 - DNA, 2319 bp, Zea Mays
gtttaaaatgcccagccctagtacaaattaaagcagcaaggtgatcgtccctccccaccgtacaacttgcagcgtgctgtcgtgcgtcagtctccgcgacggcccgtgatctgccgaggatgcgccacacgcgcagttcggacgagggacgggtgacgaggtgtgcggtgcgcgtgagtgaggaggcaaggcttctccatctggcaaccggggaccggacgatcaactcatccgcgcgactccgcttcgtcacgcggcgtcgccggcctcctcccgtgcccgtggatgcctgttcttgcgagttgttaatctaccgtatcgaggaggggaagatggacgacgaggactactcgtgggtgcggcgcaccaggttctcgcagtctgtcgtcaggtccagctccggcagggagcggtatggcgcgttcatcatcgacccgttcggtcgtggcgccaagctgaggcaggacgggttgggcacgggccccggggtctctagctcggcaaggcggctgccgatccccaaggcgagaccggcagttgcccggtcggaacggaagctgaagcacgcgtcttcagagggccaattgaacagggcgaggaacggtgatcgctcgtcgcaaggatcaccggcgaagcagagccgggagggggtcggcctgagcttggacattccacagctgcatgatgtggctgttcgaccacccaaggagagcccagacgctgcgctggatttctctttccactcggacgagcacagccagaggctccagcgagtgtgttccagcccgtctcctttctttctgcaggatgcaacagtgacagctgatgatggttccagagtgcgcagtgcatctacgaaggtgtccaagccgccgccgaaaccgaagcgaagagccaagtcccctatccccaagcgcgtcatctcggacgtgttcaaggaggcgaaagctgccaccaagaggttctccagcccgcagcggcagaggaagcccatgtccccgcggtcaccagacgacagccctccactcggcttcgcctcgctaagagcaccgagcaagctgaagatcaataccagagcatcctcatggccacgaacaaaccttgacagtggaccggcaagagttgctgcgccggagatccttgagaggtggacggtcgatcgctccgagttgctcatcggccatagatttgcatccggggcctatagccgattgttccacgggatctacaaggaccagcctgttgctgtgaagtttatcaggcagcccgacgatggcgaggacgacgaactgtctgctaagcttgacaagcagttcacttcagaggttacaattctggcaaggctccaacatcgtaatgtcattaagcttgttggggcctgtaattgcccgacggtcttctgtgtcatcaccgagtttctgtccggcggttctctgagggctttcttgcgaaagctggagcgtgaaactcttcctttggagaaggtcatttccatcgctctggatatcgcacgcggcctggaatatattcacctccaagggattgtgcaccgtgacatcaaacccgagaacatcttatttgatggagaattctgcgctaaagtcgtcgattttggagtggcgtgtgaagaaaaatactgcaatttgttaggcgatgatccaggtacttatagatggatggcaccagagatgtacaagcacaagccatatggccggaaggtcgatgtgtatagctttggacttgtcttgtgggaattggtcactggttcactcccttatcaagatatgactccgcttcaggcagcttttgcggttgttaataagaacttgaggccggctattccattgagctgcccagcagcgctgaagcttctgatcgagcaatgttggtcctggcaaccagaaaggaggcctgagttccagcaaatagtttcagtccttgaaaacctcaagacagttcttgaaagagatggaacactcgacaagatcccaggctcgatctgccaggccctggaacccaatgaccagaacaagaagaaggctggcaactggatccagaggctgtcatacgctcaacctgctttctccggacctccacccccaaagttactctagttacacgtcttcttgttcttagcagcttggtatctggtactccagatagcaagtgtgtaaattgaatatttctttgtttcgctgggagaccagagatttcttcatggtatatactcggatacagtactgataatcgcctagaggggggtgaatagggcgaaactgaaatttacaaatataaacacaactacaagccgggttagcg

SEQ ID NO: 63597 - DNA, 2934 bp, Zea Mays
tcgggttcgggttcggttcgggttcggttctcgggtttaaaatgcccagccctagtacaaattaaagcagcaaggtgatcgtccctccccaccgtacaacttgcagcgtgctgtcgtgcgtcagtctccgcgacggcccgtgatctgccgaggatgcgccacacgcgcagttcggacgagggacgggtgacgaggtgtgcggtgcgcgtgagtgaggaggcaaggcttctccatctggcaaccggggaccggacgatcaactcatccgcgcgactccgcttcgtcacgcggcgtcgccggcctcctcccgtgcccgtggatgcagagagtggcttgtcgcggcgcggaagggggaacgagcttgcagtcccagtcctggccgggggacggtagccactagcaagcgagtgcgcgtctgcctcggagcgacgtctcgctcgcctttcccccctttcctgcatcctgtgcgctgtgaggaatgacggtctccgcactcactcctccaacggtcgccatccccgaaccacatggattattgtggtgagcgattggactctcttgttctctttggtttgttttcgtggtgggcgagcaagtcgaccttgggagatttcgtgtcgctctggaagggatcaaatgcggcgcctacttacttggtggtctggcactggctggagagctctagtgtcagccagtgttcctgctgtcgcctgcctcatctaggtcccctcccttcgttaagctgttcttgcgagttgttaatctaccgtatcgagggggggggggggggggggtccattgcggcgcctacttacttggtggtctggcactggctggagagctctagtgtcagccagtgttcctgctgtctcctgcctcatctaggtcccctcccttcgttcagctgttcttgcgagttgttaatctaccgtatcgaggaggggaagatggacgacgaggactactcgtgggtgcggcgcaccaggttctcgcagtctgtcgtcaggtccagctccggcagggagcggtatggcgcgttcatcatcgacccgttcggtcgtggcgccaagctgaggcaggacgggttgggcacgggccccggggtctctagctcggcaaggcggctgccgatccccaaggcgagaccggcagttgcccggtcggaacggaagctgaagcacgcgtcttcagagggccaattgaacagggcgaggaacggtgatcgctcgtcgcaaggatcaccggcgaagcagagccgggagggggtcggcctgagcttggacattccacagctgcatgatgtggctgttcgaccacccaaggagagcccagacgctgcgctggatttctctttccactcggacgagcacagccagaggctccagcgagtgtgttccagcccgtctcctttctttctgcaggatgcaacagtgacagctgatgatggttccagagtgcgcagtgcatctacgaaggtgtccaagccgccgccgaaaccgaagcgaagagccaagtcccctatccccaagcgcgtcatctcggacgtgttcaaggaggcgaaagctgccaccaagaggttctccagcccgcagcggcagaggaagcccatgtccccgcggtcaccagacgacagccctccactcggcttcgcctcgctaagagcaccgagcaagctgaagatcaataccagagcatcctcatggccacgaacaaaccttgacagtggaccggcaagagttgctgcgccggagatccttgagaggtggacggtcgatcgctccgagttgctcatcggccatagatttgcatccggggcctatagccgattgttccacgggatctacaaggaccagcctgttgctgtgaagtttatcaggcagcccgacgatggcgaggacgacgaactgtctgctaagcttgacaagcagttcacttcagaggttacaattctggcaaggctccaacatcgtaatgtcattaagcttgttggggcctgtaattgcccgacggtcttctgtgtcatcaccgagtttctgtccggcggttctctgagggctttcttgcgaaagctggagcgtgaaactcttcctttggagaaggtcatttccatcgctctggatatcgcacgcggcctggaatatattcacctccaagggattgtgcaccgtgacatcaaacccgagaacatcttatttgatggagaattctgcgctaaagtcgtcgattttggagtggcgtgtgaagaaaaatactgcaatttgttaggcgatgatccaggtacttatagatggatggcaccagagatgtacaagcacaagccatatggccggaaggtcgatgtgtatagctttggacttgtcttgtgggaattggtcactggttcactcccttatcaagatatgactccgcttcaggcagcttttgcggttgttaataagaacttgaggccggctattccattgagctgcccagcagcgctgaagcttctgatcgagcaatgttggtcctggcaaccagaaaggaggcctgagttccagcaaatagtttcagtccttgaaaacctcaagacagttcttgaaagagatggaacactcgacaagatcccaggctcgatctgccaggccctggaacccaatgaccagaacaagaagaaggctggcaactggatccagaggctgtcatacgctcaacctgctttctccggacctccacccccaaagttactctagttacacgtcttcttgttcttagcagcttggtatctggtactccagatagcaagtgtgtaaattgaatatttctttgtttcgctgggagaccagagatttcttcatggtatatactcggatacagtactgataatcgcctagaggggggtgaatagggcgaaactgaaatttacaaatataaacacaactacaagccgggttagcg

SEQ ID NO: 63598 - DNA, 1248 bp, Zea Mays
ccgctgggtacactctgttcttcgtatttatgcatgtttcattgctgtttactgcttatgcgagtagttatacacacatgcatatacatgtcattacatatatcgcactgattatctggattaaattaaaactaaaaatgcctaactttctaacactatacatcacctcccccttcctcttcttaatgagaccactccctctcgtccgccccctccgtgaaaccaacgcccctctctccccgcgcacgagacccatcgcgaatggaagttgctcctgcggtgaagcaactcctccccatggcgcagggccccaactccccgtcctcctccaccacctcgccctcgcccgccgcgccgtccccgccgccgcgccagcagcagtcgcaggcgcccgtgccgcgcatcatcgacaccacgcccttccccaccaccttcgtgcaggccgacaccgccaacttcaagcaggtcgtccagaggctcaccggctccgacacgccgccgcctgcccagaagcccgccaagacccacggccaccaccaccaccacggcggcggcgtcgggcccaagaagccggccttcaagctctacgagcgccggatcggcaagaacaacctcaagatgatcgcgccgctggcggggccgtcgccgcggaaggcggcgccggaggtgctgtcgcccagcgtgctcgacttcccttccctggcgctcggtagccccgtcacgccgctgctggccgaccccttcaaccggtcggcgtcggcgtccccgggcgagcaggacgaggccgaggccgcggccatcgcgcagaggggcttcttcctgcacccctcgccgaggggcgtcgagccgccgcggctgctgccgctgttccccgtcacgtcccccaagatggcgccgtggccgtcgcagcagtgatcgcgcggggcgggcccccgctgccggagaattcctagtactgccgcttcagatactacttgtttaattaactccttggaatgactacgcggaaaagtagatgtacaaggatcgagatggctcgcaactcggctggcttcttctccgacagcgacatgcgcaagtgaatccaaggagagtatatggttaaccaccgatgggagctctctcagccctgaaattaacgtcttgcagttaggcctgcaaatggggtgggtgcaaatgggtattttaggtgggtttaagaaatggttttgttttggtgggttgtgatggattttaattattaacggg

SEQ ID NO: 63599 - DNA, 5250 bp, Zea Mays
cttggggttccctggggattcttgattggagctgagctaaccatagcccaaagtcgtatctctttggttaataagatccaaaaggtttatcgatcccaaggggtacagatccataatagacatatagagattattatacgccaagtaacatcaaaagtaagggtttccgaagatggaatgtctaatgtttttttacctggggaattaataggactattgcgagcggaacgagcagggcgggctttagatgaatcgatctattatcgggcaatcttattgggaataacaagggcttccctgaatacccaaagtttcatatctgaagcaagttttcaagaaactgctcgagttttagcaaaagctgccctacgaggtcgtattgattggttgaaaggtctgaaagaaaacgtagttctgggggggattatacctgttggtaccggattccaaaaatttgtgcatcgttccccacaagacaagaacctttatttagaaattcaaaaaaaaaatctattcgcgtcggaaatgagagatattttgtttctccatacagaattagtttcttctgattctgacgtaacaaacaatttctatgaaacatcagagaccccgtttacccctatttatacgatttaagtatacataaagcaattttttttactttaatttaaactatacttttgaccttagaatgctaacaggtctgattttcgattttgtacttaaatttaaattgtattttaataagtaaaagaagtcagttaattcattaaggctatgtttataccgtgtatcaatggtcaagaaggttccattggaacaattattatttatttcaagctatttcggctctttcttaatcttcaaaaagaaatgaattccgtaatggtaacacgaaaaaagaaaaaaaaaggaagtgtggaaaaaatgacaagaagatattggaacatcaatttgaaagagatgatagaagcgggagttcattttggtcatggtattaagaaatggaatcccaaaatggccccttacatctcggcaaagcgtaaaggtactcatattacaaatcttgctagaacagctcgttttttatcagaagcttgtgatttagtttttgatgcagcaagtcagggaaaaagcttcttaattgttggtaccaaaaaaagagcagcggatttagtagcatcagctgcaataaggtctcgttgtcattatgttaataaaaagtggttcagcggtatgttaacgaattggtcgattaccaaaactagactttctcaatttagagacttaagagcagaagaaaaaatgggaaaattccaccatctcccaaaaagagatgcggcaatcttaaagagaaaattatctaccttgcaaagatatctcggcgggatcaaatatatgacgaggttgcctgacattgtgatcgtccttgatcagcaaaaagagtatatagctcttcaggaatgtgccattttggggattcctactatttctttagtcgatacaaattgtgacccagatcttgcgaatatatcgattcctgccaacgatgacactatgacttcaattcgattaattcttaacaaattagtatttgcaatttctgagggccgttctctctatataagaaatcgttgattaagaagaatagtgaattcttgagcaactgcgtagatttataggattaattactattcttttttgttttgcatagataaaagaagggaaatattgatatatattagagggtattgatatatattatgatctgatgtgatttcttggtatattaaatataagattaatacttcaagttgctgagttgagaaagagatgcttgaatcaaaagaattccttttttgaagttcaatttttatcagaggacaatatgaatattacaccatgttccattaaaacactcaaggggttatatgatatatcgggtgtagaagtagggcaacacttctattggcaaataggaggtttccaaattcatgcccaagtactcatcacttcttgggtcgtaattactattttgctagatcagttatcatagctgttcggaatccacaaaccatcccgaccgatgatcagaatttcttcgaatatgtccttgagtttattcgagacttgagcaaaactcagattggagaagaatatggtccctgggttccctttattggaactatgttcctttttatttttgtttcgaattggtcaggtgctcttttaccttggaaaattatagagttaccccatggggaattagcagcgcccacgaatgatataaatactactgttgctttagctttactaacatcagcggcatatttttatgcgggtcttagcaaaaaaggattgagttatttcgaaaaatatattaaaccaaccccaatccttttacctattaacatcctagaagatttcacaaaaccattatcacttagttttcgacttttcggaaatatattggcggatgaattagtcgttgttgttcttgtttctttagtccccttagtagtccctataccggtcatgtttcttggattatttacaagcggtattcaagctcttatttttgcaacgttagccgcagcctatataggtgaatccatggaaggtcatcattgaattaactagtttttgaaatagtctttctttttttagcttagcccaattcatgcatgattccggataatcctcttagttggaaaactaaatagttcgaaaggcgtatgaatatacaacctagagttgtaggagagagaatagactatattatggaagaggtaaagtatatatgcattcaggggggccaagtcaggttagatctatatctttaatgcctataagacagtcatcttttgtgtggctttctaaagaatgattttagaatcggattcaatagaaaatgagaaaataggcaaacaaaatagaagaaacaaatgtatatgggattttttttattcctaagttagattcattatctaatccgatatatagaattcccttctatatggaactggattccatatctagttctatgcagcatatttgttatcaattgtatatcttgatttgattcctattggattttggattagttcgatttcaataggggttcttcctgtattttcgtcttttaatatgttagatgaaggggaaaaaatgggaactcaaagatatcgaagagtaaaaaaaaggatggaataaaagagtgattggttgaaaagaaagagaaatagaataatgagaatcatatggatttacacaaacctctaatgattagaaactaaaaacgagatctcgaagtaattcgaacgatttcgattatcatttatttgtacttattagttacttctacccgatagagcttagaagttggaagtaataatttcttggttgattgtatccttaaccatttctttttttttgacacgaggaactcatcatgaatccactaattgctgctgcttccgttattgctgctggattggccgtagggcttgcttctattgggcccggagttggtcaaggtactgctgcaggacaagctgtagaaggtattgcgagacagccagaagcagaaggtaaaataagaggtactttattgcttagtctagcttttatggaagctttaacaatttatggactggttgtggcactagcgcttttatttgcgaacccttttgtttaatcctaaaaaagaaaatgagtcctttagattagatacttttttctttttttagtacattggcatttgcttatgtaattctaagtatatcaatactttactttactcctatttattatattatttcttttttatattattccggaaattttgtatttatcgggacagacaataccctaggaaccccaagaagggctgatttgagcatgatcaatttagaggatatgctcgccctcttccttcccgtccttagtttaggacagtggaaagtatttttccttttattttaggaattttgggaacatttcaacaaaggagatctttcacaggtcaaacgagacctaagacttaatctaaaagaaattattagattgaatctatttgcattaaaaaaaccgatcaaaaaaggacgagcgaagtaagtaatcgaaaaactttcttctttgttcgtcctatctataagaggagagcatatgaaaaatgtaacccattcttttgtttttttagctcactggccattcgctgggagtttcgggcttaataccgatattttagcaacaaatctaataaatctaactgtagtggttggtgtattgattttttttggaaagggagtgtgtgcgagttgtctatttcaagaatagattggatctatccggctgcactttagaatatttttagtattttttttgataaataagaaaaggtgcacgatctcgacgaattacttctgaataacttcagaaatcatatggaagaaccatagcatttcgcgattcattggtaaatttactttgattctctatagaccaataatgtgagaccatttacacggttaaagctaaactgcttgaagtccgggcaaaaaggggtactctttctacaactacattagtattagtctcgaaatgctttaaacgggaaatagctagtgtagaatttatctgatatagaacactcatatcgataaaatagtttgaactatttactagaagggcacgcagccctttttccaatgccaaatcgacgacctatgtataaaaaaaagagaaattttttggatttgaagaaaaaataaaaggaattctatcaatttttattttccatttatttagttagtttttcttaatgaaattgaaattattaactaacagagcaaacacaaataaagaaacaactttgctgaccatgatagatttttatctagttggaagagtcctcttaatattcatctagtcttatataagtttgggtatatagaaatacaaacagaaaagagaggatagaggataggctcattacataaaaaaaagatatggaaatagccataatacataacaaaaaagaaaaaaaggagcgggagagccaaatgaatcgaaagattcatgtttggttcgggaagagatcataaaaattgtaaacttaatagcaagataatctactttcattaaaagatttattagataatcgaaaacagaggattttaagtactattcgaaattcggaagaattgcgtaaagggacccttgaacaactcgaaaaagctcgtattcgat

SEQ ID NO: 63600 - DNA, 3076 bp, Zea Mays
agaacagccgagcgtgttctctgagggctcttttggcatctaatcacttaagagtgatggaagttcttgctcattttttaactaaaaagatcatcatctagtctaatagttttgcataatggggattggggaacaaataaaacctggtataaatcaggggtgtgtaagactaatagatacttgactgttgagcccatgtaaccgatattgattcatctttatttctttgctgtagatttcaaggtgctggtgaatctggcttggccacatagatcttttttattgttgtcctcagaagacaggtttgctgagactgctttctgtctactgtaaattgatgaaattttggtgatcatatactatggaaaaaaagacagttcacgttccggctgagggtaatggtgagattgaaaatggtacgagctctagtcagaatcctgagacccttgagcatccagttttgctgtctgcatctcaaactgtgccaaataacttggggataaggaaaaactataaaagggcagcaaacagaggtaaaaagggttcccaaggactaacaggtcaggcatatactttgaggtcatctgatattgatgtcagggtgcttcgctctacatcaggttcaaagacaacatctactgagcatgtgcagcctccaggacaaccagctgccaagagaagaaaaaggagcagagcctcaaacaaaaattcgacagatgagttctcacaaattcgtaaacgggttagatacattttgaaccgaatgaattatgagcaaagcctaattgaagcttatgctagtgaaggctggaaaaatcaaagtttggataagataagacctgagaaggagcttgaacgagccaaatcagaaatcttacgatgcaaattgagaatacgggaagtcttccaaaatattgattctcttctatccaaggggaaaattgacgaatctttatttgattctgaaggagaaatatcttgtgaagatatcttttgtgctacttgtggttcgaaaaatgctacattgggtaatgatatcattctctgtgatggagcttgtgacagagggttccaccagaactgtctaaatcctcctctgcgtactgaagatattcccatgggagatgaaggatggctctgcccagcatgtgattgcaagttagactgtatagatctaataaatgaactccagggcagtgacatctccattgaggacccttgggagaaagtttttccagaggcagctgctatggccaatagctctaagcaagatgaagcatttgatcttccatctgatgattcggatgacaatgattttgaccccaatatgcctgaagagcatgtggctagtaaggaagaaggatcttctgaagaggaagaggatgatgacggaggatcagactctgacgactctgacttcttaacctgttctgatgatttggaacctttgatagataaaaagaatgttgatgacctgggattaccttctgaagattcagaggatgatgactatgatccagcaggtcctgattcggataaagatgtcgaaaagaagtcaaattctgatgagtctgatttcatgtctgactcggatgatttttgtaaggagattaaaaaatctggtggacatgatgaagtttcatcgcctccattacccgatgtcaaggtgggtgatatggaaaagaacactgctcagtctaacacaacaagttctgctgacgaccctatggagactgaaatagaccagagtgtggttttaccagtatcaaggaggcgtcaagctgaacggttggactacaaaaggctgtatgatgaggcatatggtgaagcatcatctgattctagtgatgaagaagaatggtctgggaagaacacaccaataaaaagcaatgaagagggtgaagttggttctcctgcaggaaaaggctctagagttgcgcaccataatgaactgactacacaaaacactaaagaaagcttgcattctcttcatggttcagtagatgagaaacatggagatcttacttctaatggcagcaatatcaaagataggaaaggacattttggtccagtgattagtcagaagctacatgaacattttaagacacaaccataccctagtcgttctcttaaagaaagcttggcagaagaactagggctaacatttcatcagatggtttgaaaataggcgtcattttgcaaggttagcttcttccaggaaaggcatcagtccagataagcatagcccccaaaatactaatagcccagtgacacctagtatgcaacctaaagaaccagaggggactgtgatggaagaatctaatgtatgcataaacagggatgctaccatctctaaaaaagcggtttcttcaaaagtcggatcaagaaagaaccttagcaagagttcccctaaaagccgggtcagaagttgattctgccgcggatcagaatctgtggcctgaccttacagagaaggcagggcaggcaaaaagcaatacagcaggagttgaagaagaaaatgggacgatgaagtttgtagacaaagacatgagccagaatttggactgctcctgaaatttgcaggtctatgggccttgaaacttggcttgtatgactctacactggtagccaaaaaacatagatataccattgcaagtcagctagctctcattagatcatgccaatcaactaacaagcacgtcattcagtttttttcttctttttttttcctgtgggggctattgattcccgttctttgccaactgagggcttcctctgatttctgggtcgctctataggtattagctatcctacagatttgtttgcagcaattactgtcattgcaggaagagctcaattacaaaaccctaaggttcagtaacgacagcacgatgctgctatgacaggatgcagaagatgcattgttttcatcgatgttgattttcttgtaagatggaatgttgtaccaaacctgaacagatcactttgttgtgattcagtgtgcggctatggcctatggatttgtacttgttggactcacagagcatcgcgctttacatgcaaacggattttcggt

SEQ ID NO: 63601 - DNA, 2817 bp, Zea Mays
gagagccgccgggcctggaagcttctccgcggcgctgcgtcgccagctcgcagcgatttcaaggtgctggtgaatctggcttggccacatagatcttttttattgttgtcctcagaagacaggtttgctgagactgctttctgtctactgtaaattgatgaaattttggtgatcatatactatggaaaaaaagacagttcacgttctggctgagggtaatggtgagattgaaaatggtacgagctctagtcagaatcctgagacccttgagcatccagttttgctgtctgcatctcaaactgtgccaaataacttggggataaggaaaaactataaaagggcagcaaacagaggttcaaagacaacatctactgagcatgtgcagcctccaggacaaccagctgccaagagaagaaaaaggagcagagcctcaaacaaaaattcgacagatgagttctcacaaattcgtaaacgggttagatacattttgaaccgaatgaattatgagcaaagcctaattgaagcttatgctagtgaaggctggaaaaatcaaagtttggataagataagacctgagaaggagcttgaacgagccaaatcagaaatcttacgatgcaaattgagaatacgggaagtcttccaaaatattgattctcttctatccaaggggaaaattgacgaatctttatttgattctgaaggagaaatatcttgtgaagatatcttttgtgctacttgtggttcgaaaaatgctacattgggtaatgatatcattctctgtgatggagcttgtgacagagggttccaccagaactgtctaaatcctcctctgcgtactgaagatattcccatgggagatgaaggatggctctgcccagcatgtgattgcaagttagactgtatagatctaataaatgaactccagggcagtgacatctccattgaggacccttgggagaaagtttttccagaggcagctgctatggccaatagctctaagcaagatgaagcatttgatcttccatctgatgattcggatgacaatgattttgaccccaatatgcctgaagagcatgtggctagtaaggaagaaggatcttctgaagaggaagaggatgatgacggaggatcagactctgacgactctgacttcttaacctgttctgatgatttggaacctttgatagataaaaagaatgttgatgacctgggattaccttctgaagattcagaggatgatgactatgatccagcaggtcctgattcggataaagatgtcgaaaagaagtcaaattctgatgagtctgatttcatgtctgactcggatgatttttgtaaggagattaaaaaatctggtggacatgatgaagtttcatcgcctccattacccgatgtcaaggtgggtgatatggaaaagaacactgctcagtctaacacaacaagttctgctgacgaccctatggagactgaaatagaccagagtgtggttttaccagtatcaaggaggcgtcaagctgaacggttggactacaaaaggctgtatgatgaggcatatggtgaagcatcatctgattctagtgatgaagaagaatggtctgggaagaacacaccaataaaaagcaatgaagagggtgaagttggttctcctgcaggaaaaggctctagagttgcgcaccataatgaactgactacacaaaacactaaagaaagcttgcattctcttcatggttcagtagatgagaaacatggagatcttacttctaatggcagcaatatcaaagataggaaaggacattttggtccagtgattagtcagaagctacatgaacattttaagacacaaccataccctagtcgttctcttaaagaaagcttggcagaagaactagggctaacatttcatcaggtcaacagatggtttgaaaataggcgtcattttgcaaggttagcttcttccaggaaaggcatcagtccagataagcatagcccccaaaatactaatagcccagtgacacctagtatgcaacctaaagaaccagaggggactgtgatggaagaatctaatgtatgcataaacagggatgctaccatctctaaaaaagcggtttcttcaaaagtcggatcaagaaagaaccttagcaagagttcccctaaaagccgggtcagaagttgattctgccgcggatcagaatctgtggcctgaccttacagagaaggcagggcaggcaaaaagcaatacagcaggagttgaagaagaaaatgggacgatgaagtttgtagacaaagacatgagccagaatttggactgctcctgaaatttgcaggtctatgggccttgaaacttggcttgtatgactctacactggtagccaaaaaacatagatataccattgcaagtcagctagctctcattagatcatgccaatcaactaacaagcacgtcattcagtttttttcttctttttttttcctgtgggggctattgattcccgttctttgccaactgagggcttcctctgatttctgggtcgctctataggtattagctatcctacagatttgtttgcagcaattactgtcattgcaggaagagctcaattacaaaaccctaaggttcagtaacgacagcacgatgctgctatgacaggatgcagaagatgcattgttttcatcgatgttgattttcttgtaagatggaatgttgtaccaaacctgaacagatcactttgttgtgattcagtgtgcggctatggcctatggatttgtacttgttggactcacagagcatcgcgctttacatgcaaacggattttcggt

SEQ ID NO: 63602 - DNA, 2851 bp, Zea Mays
ctccccgccacactcgccccacgcaggagaggaggagagccgccgggcctggaagcttctccgcggcgctgcgtcgccagctcgcagcgatttcaaggtgctggtgaatctggcttggccacatagatcttttttattgttgtcctcagaagacaggtttgctgagactgctttctgtctactgtaaattgatgaaattttggtgatcatatactatggaaaaaaagacagttcacgttccggctgagggtaatggtgagattgaaaatggtacgagctctagtcagaatcctgagacccttgagcatccagttttgctgtctgcatctcaaactgtgccaaataacttggggataaggaaaaactataaaagggcagcaaacagaggttcaaagacaacatctactgagcatgtgcagcctccaggacaaccagctgccaagagaagaaaaaggagcagagcctcaaacaaaaattcgacagatgagttctcacaaattcgtaaacgggttagatacattttgaaccgaatgaattatgagcaaagcctaattgaagcttatgctagtgaaggctggaaaaatcaaagtttggataagataagacctgagaaggagcttgaacgagccaaatcagaaatcttacgatgcaaattgagaatacgggaagtcttccaaaatattgattctcttctatccaaggggaaaattgacgaatctttatttgattctgaaggagaaatatcttgtgaagatatcttttgtgctacttgtggttcgaaaaatgctacattgggtaatgatatcattctctgtgatggagcttgtgacagagggttccaccagaactgtctaaatcctcctctgcgtactgaagatattcccatgggagatgaaggatggctctgcccagcatgtgattgcaagttagactgtatagatctaataaatgaactccagggcagtgacatctccattgaggacccttgggagaaagtttttccagaggcagctgctatggccaatagctctaagcaagatgaagcatttgatcttccatctgatgattcggatgacaatgattttgaccccaatatgcctgaagagcatgtggctagtaaggaagaaggatcttctgaagaggaagaggatgatgacggaggatcagactctgacgactctgacttcttaacctgttctgatgatttggaacctttgatagataaaaagaatgttgatgacctgggattaccttctgaagattcagaggatgatgactatgatccagcaggtcctgattcggataaagatgtcgaaaagaagtcaaattctgatgagtctgatttcatgtctgactcggatgatttttgtaaggagattaaaaaatctggtggacatgatgaagtttcatcgcctccattacccgatgtcaaggtgggtgatatggaaaagaacactgctcagtctaacacaacaagttctgctgacgaccctatggagactgaaatagaccagagtgtggttttaccagtatcaaggaggcgtcaagctgaacggttggactacaaaaggctgtatgatgaggcatatggtgaagcatcatctgattctagtgatgaagaagaatggtctgggaagaacacaccaataaaaagcaatgaagagggtgaagttggttctcctgcaggaaaaggctctagagttgcgcaccataatgaactgactacacaaaacactaaagaaagcttgcattctcttcatggttcagtagatgagaaacatggagatcttacttctaatggcagcaatatcaaagataggaaaggacattttggtccagtgattagtcagaagctacatgaacattttaagacacaaccataccctagtcgttctcttaaagaaagcttggcagaagaactagggctaacatttcatcaggtcaacagatggtttgaaaataggcgtcattttgcaaggttagcttcttccaggaaaggcatcagtccagataagcatagcccccaaaatactaatagcccagtgacacctagtatgcaacctaaagaaccagaggggactgtgatggaagaatctaatgtatgcataaacagggatgctaccatctctaaaaaagcggtttcttcaaaagtcggatcaagaaagaaccttagcaagagttcccctaaaagccgggtcagaagttgattctgccgcggatcagaatctgtggcctgaccttacagagaaggcagggcaggcaaaaagcaatacagcaggagttgaagaagaaaatgggacgatgaagtttgtagacaaagacatgagccagaatttggactgctcctgaaatttgcaggtctatgggccttgaaacttggcttgtatgactctacactggtagccaaaaaacatagatataccattgcaagtcagctagctctcattagatcatgccaatcaactaacaagcacgtcattcagtttttttcttctttttttttcctgtgggggctattgattcccgttctttgccaactgagggcttcctctgatttctgggtcgctctataggtattagctatcctacagatttgtttgcagcaattactgtcattgcaggaagagctcaattacaaaaccctaaggttcagtaacgacagcacgatgctgctatgacaggatgcagaagatgcattgttttcatcgatgttgattttcttgtaagatggaatgttgtaccaaacctgaacagatcactttgttgtgattcagtgtgcggctatggcctatggatttgtacttgttggactcacagagcatcgcgctttacatgcaaacggattttcggt

SEQ ID NO: 63603 - DNA, 2813 bp, Zea Mays
ccgctcttcctccccgccacactcgccccacgcaggagaggaggagagccgccgggcctggaagcttctccgcggcgctgcgtcgccagctcgcagcgatttcaaggtgctggtgaatctggcttggccacatagatcttttttattgttgtcctcagaagacaggtttgctgagactgctttctgtctactgtaaattgatgaaattttggtgatcatatactatggaaaaaaagacagttcacgttccggctgagggtaatggtgagattgaaaatggtacgagctctagtcagaatcctgagacccttgagcatccagttttgctgtctgcatctcaaactgtgccaaataacttggggataaggaaaaactataaaagggcagcaaacagaggacaaccagctgccaagagaagaaaaaggagcagagcctcaaacaaaaattcgacagatgagttctcacaaattcgtaaacgggttagatacattttgaaccgaatgaattatgagcaaagcctaattgaagcttatgctagtgaaggctggaaaaatcaaagtttggataagataagacctgagaaggagcttgaacgagccaaatcagaaatcttacgatgcaaattgagaatacgggaagtcttccaaaatattgattctcttctatccaaggggaaaattgacgaatctttatttgattctgaaggagaaatatcttgtgaagatatcttttgtgctacttgtggttcgaaaaatgctacattgggtaatgatatcattctctgtgatggagcttgtgacagagggttccaccagaactgtctaaatcctcctctgcgtactgaagatattcccatgggagatgaaggatggctctgcccagcatgtgattgcaagttagactgtatagatctaataaatgaactccagggcagtgacatctccattgaggacccttgggagaaagtttttccagaggcagctgctatggccaatagctctaagcaagatgaagcatttgatcttccatctgatgattcggatgacaatgattttgaccccaatatgcctgaagagcatgtggctagtaaggaagaaggatcttctgaagaggaagaggatgatgacggaggatcagactctgacgactctgacttcttaacctgttctgatgatttggaacctttgatagataaaaagaatgttgatgacctgggattaccttctgaagattcagaggatgatgactatgatccagcaggtcctgattcggataaagatgtcgaaaagaagtcaaattctgatgagtctgatttcatgtctgactcggatgatttttgtaaggagattaaaaaatctggtggacatgatgaagtttcatcgcctccattacccgatgtcaaggtgggtgatatggaaaagaacactgctcagtctaacacaacaagttctgctgacgaccctatggagactgaaatagaccagagtgtggttttaccagtatcaaggaggcgtcaagctgaacggttggactacaaaaggctgtatgatgaggcatatggtgaagcatcatctgattctagtgatgaagaagaatggtctgggaagaacacaccaataaaaagcaatgaagagggtgaagttggttctcctgcaggaaaaggctctagagttgcgcaccataatgaactgactacacaaaacactaaagaaagcttgcattctcttcatggttcagtagatgagaaacatggagatcttacttctaatggcagcaatatcaaagataggaaaggacattttggtccagtgattagtcagaagctacatgaacattttaagacacaaccataccctagtcgttctcttaaagaaagcttggcagaagaactagggctaacatttcatcagatggtttgaaaataggcgtcattttgcaaggttagcttcttccaggaaaggcatcagtccagataagcatagcccccaaaatactaatagcccagtgacacctagtatgcaacctaaagaaccagaggggactgtgatggaagaatctaatgtatgcataaacagggatgctaccatctctaaaaaagcggtttcttcaaaagtcggatcaagaaagaaccttagcaagagttcccctaaaagccgggtcagaagttgattctgccgcggatcagaatctgtggcctgaccttacagagaaggcagggcaggcaaaaagcaatacagcaggagttgaagaagaaaatgggacgatgaagtttgtagacaaagacatgagccagaatttggactgctcctgaaatttgcaggtctatgggccttgaaacttggcttgtatgactctacactggtagccaaaaaacatagatataccattgcaagtcagctagctctcattagatcatgccaatcaactaacaagcacgtcattcagtttttttcttctttttttttcctgtgggggctattgattcccgttctttgccaactgagggcttcctctgatttctgggtcgctctataggtattagctatcctacagatttgtttgcagcaattactgtcattgcaggaagagctcaattacaaaaccctaaggttcagtaacgacagcacgatgctgctatgacaggatgcagaagatgcattgttttcatcgatgttgattttcttgtaagatggaatgttgtaccaaacctgaacagatcactttgttgtgattcagtgtgcggctatggcctatggatttgtacttgttggactcacagagcatcgcgctttacatgcaaacggattttcggt

SEQ ID NO: 63604 - DNA, 3647 bp, Zea Mays
gggattgttatgggccggtggctgaggtttcgacccagatttcaaggtgctggtgaatctggcttggccacatagatcttttttattgttgtcctcagaagacaggtttgctgagactgctttctgtctactgtaaattgatgaaattttggtgatcatatactatggaaaaaaagacagttcacgttctggctgagggtaatggtgagattgaaaatggtacgagctctagtcagaatcctgagacccttgagcatccagttttgctgtctgcatctcaaactgtgccaaataacttggggataaggaaaaactataaaagggcagcaaacagaggtaaaaagggttcccaaggactaacaggtcaggcatatactttgaggtcatctgatattgatgtcagggtgcttcgctctacatcaggttcaaagacaacatctactgagcatgtgcagcctccaggacaaccagctgccaagagaagaaaaaggagcagagcctcaaacaaaaattcgacagatgagttctcacaaattcgtaaacgggttagatacattttgaaccgaatgaattatgagcaaagcctaattgaagcttatgctagtgaaggctggaaaaatcaaagtttggataagataagacctgagaaggagcttgaacgagccaaatcagaaatcttacgatgcaaattgagaatacgggaagtcttccaaaatattgattctcttctatccaaggggaaaattgacgaatctttatttgattctgaaggagaaatatcttgtgaagatatcttttgtgctacttgtggttcgaaaaatgctacattgggtaatgatatcattctctgtgatggagcttgtgacagagggttccaccagaactgtctaaatcctcctctgcgtactgaagatattcccatgggagatgaaggatggctctgcccagcatgtgattgcaagttagactgtatagatctaataaatgaactccagggcagtgacatctccattgaggacccttgggagaaagtttttccagaggcagctgctatgaccaatggctctaagcaagatgaagcatttgatcttccatctgatgattcggatgacaatgattttgaccccaatatgcctgaagagcatgtggctagtaaggaagaaggatcttctgaagaggaagaggatgatgacggaggatcagactctgacgactctgacttcttaacctgttctgatgatttggaacctttgatagataaaaagaaggttgatgacctgggattaccttctgaagattcagaggatgatgactatgatccagcaggtcctgattcggataaagatgtcgaaaagaagtcaaattctgatgagtctgatttcacgtctgactcggatgatttttgtaaggagattaaaaaatctggtggacatgatgaagtttcatcgcctccattacccgatgtcagggtgggtgatatggaaaagaacactgctcagtctaacacaacaagttctgctgacgaccctatggagattgaaatagaccagagtgtggttttaccagcttccacttctcctcctcccgctcccgtttccgctcccgtcacccttgctgcaccagcttccactgcccctcctcccgctcccgttttcgctcctcttatcccacctgctcgcttccgggagcgcgatgagactgaggtgcgacctctagctgcagatcctaggttgtttgaccttcagcgtgctacagcagcacgggtacgtcggttcagatatgtacccgtggagtcttggttaccggctcagagggaccctgctgcagttgacctctttagcacccgtattcaggagtcctttttcagagcccagatgtctgcacagattgctctgcgagtgcaccggcttttggaccttcccgcttttctgctagccgccggtgctgactctgaggtgcacctctcttatctgcctggccttcttactcttttgactactagcggcaggtatgttgaggaatgggtccgagttttctacgcgactgtatggatcgaccctaatcaccactggatgaggtttcgttttgagcgagaggatgtcactatttatgccagccagattcgccagctatttggatttcacgagtcatcgactcgtcttcacagcttatgctatggcacctctgaccctcctcgtcgccctcacggcggtgttgctccgggtacagcttacgtcgcggctctgttccgaccgcccttctcagatgggtcgcgacgctcaccggcagatttcaccacaacagcaaagtttctctatcagcttatgagacggacacttctgccgcggatagggtccagggaggccaccactcatatccagctctggctccaagaagccaagatatctcactcagagttcgatgttgtggatttccttatttgtgagatcgaggacaccattctggatggtctgcgtgcacgacgacagctgccatatgctcactatctatgtcacatttttgctcagctgattcgacctccacagttccagggcacacttgaggtctcacgcctcgtctttgggtcctaccgtccagcgcctgaggatcctgtgccagcacctgctccagtatttgacactcaggccgaggatactgcccttcatcagttcgaagctcaggacacagcagttgataataatgattttgggattccgcctcctatgcctccacgctcacatgatcatgaggttgagagttctcgtgctacccctgctgcccctcctgccattgaccctgcttttgcttcgattctccagacacttactcagcaacaggctcacttggcagccgagcagacccgccaggcagcagcccatcagcagttgaccgagagaatgctctcgatgtttcagacaatacaggacaagcatgattctcttatgcagcagcttcttcaggatcgggctgagagaagggcattaatgactcttatgctacatcattctggtatattgattcccccggttcagtcagtcctgcctccacctcttcaggctcctgttgtgccaacgattcagccaggaccctctcttcctacagttggtccttcttcctctccgctccggtcggttaccctggctttcacgtcaccggtttttagctctgtctgccctcagccgtcagtgccaccagcttctgctgttcccactactgctatggcggtgtctgtgaccacttcagatccggcagcccctgcagcgcagcctcagtccgagtcagtatcagctctagcttctacagcagatcctggatccgagactgactctgaccctcagctagcgttcgctctactgcctcgaccgcgaccggatgtgcccccgccgcctcctccaacttctgatgcgtaggctcgggtacccttttggtgtttgacgccaaagggggagagatatgagttgtgagagctagggggagttagttagttagtagagagttattttgatgtaatatatgtgcttgcaattctctgtactagtttggtgcttttggctcacaaactctatatatactctcgatgcttatgttgactgtgtgtgtatattatgttttcaccttatatattatcaccagtcttttagttcttg

SEQ ID NO: 63605 - DNA, 3148 bp, Zea Mays
cgccgggcctggaagcttctccgcggcgctgcgtcgccagctcgcagcgtttggataagataagacctgagaaggagcttgaacgagccaaatcagaaatcttacgatgcaaattgagaatacgggaagtcttccaaaatattgattctcttctatccaaggggaaaattgacgaatctttatttgattctgaaggagaaatatcttgtgaagatatcttttgtgctacttgtggttcgaaaaatgctacattgggtaatgatatcattctctgtgatggagcttgtgacagagggttccaccagaactgtctaaatcctcctctgcgtactgaagatagtaatattcattttcctcttctatagtatcagtaattcttgttttggcattcattcattagcaccattcgtttgtagttcccatgggagatgaaggatggctctgcccagcatgtgattgcaagttagactgtatagatctaataaatgaactccagggcagtgacatctccattgaggacccttgggagaaagtttttccagaggcagctgctatgaccaatggctctaagcaagatgaagcatttgatcttccatctgatgattcggatgacaatgattttgaccccaatatgcctgaagagcatgtggctagtaaggaagaaggatcttctgaagaggaagaggatgatgacggaggatcagactctgacgactctgacttcttaacctgttctgatgatttggaacctttgatagataaaaagaaggttgatgacctgggattaccttctgaagattcagaggatgatgactatgatccagcaggtcctgattcggataaagatgtcgaaaagaagtcaaattctgatgagtctgatttcacgtctgactcggatgatttttgtaaggagattaaaaaatctggtggacatgatgaagtttcatcgcctccattacccgatgtcagggtgggtgatatggaaaagaacactgctcagtctaacacaacaagttctgctgacgaccctatggagattgaaatagaccagagtgtggttttaccagcttccacttctcctcctcccgctcccgtttccgctcccgtcacccttgctgcaccagcttccactgcccctcctcccgctcccgttttcgctcctcttatcccacctgctcgcttccgggagcgcgatgagactgaggtgcgacctctagctgcagatcctaggttgtttgaccttcagcgtgctacagcagcacgggtacgtcggttcagatatgtacccgtggagtcttggttaccggctcagagggaccctgctgcagttgacctctttagcacccgtattcaggagtcctttttcagagcccagatgtctgcacagattgctctgcgagtgcaccggcttttggaccttcccgcttttctgctagccgccggtgctgactctgaggtgcacctctcttatctgcctggccttcttactcttttgactactagcggcaggtatgttgaggaatgggtccgagttttctacgcgactgtatggatcgaccctaatcaccactggatgaggtttcgttttgagcgagaggatgtcactatttatgccagccagattcgccagctatttggatttcacgagtcatcgactcgtcttcacagcttatgctatggcacctctgaccctcctcgtcgccctcacggcggtgttgctccgggtacagcttacgtcgcggctctgttccgaccgcccttctcagatgggtcgcgacgctcaccggcagatttcaccacaacagcaaagtttctctatcagcttatgagacggacacttctgccgcggatagggtccagggaggccaccactcatatccagctctggctccaagaagccaagatatctcactcagagttcgatgttgtggatttccttatttgtgagatcgaggacaccattctggatggtctgcgtgcacgacgacagctgccatatgctcactatctatgtcacatttttgctcagctgattcgacctccacagttccagggcacacttgaggtctcacgcctcgtctttgggtcctaccgtccagcgcctgaggatcctgtgccagcacctgctccagtatttgacactcaggccgaggatactgcccttcatcagttcgaagctcaggacacagcagttgataataatgattttgggattccgcctcctatgcctccacgctcacatgatcatgaggttgagagttctcgtgctacccctgctgcccctcctgccattgaccctgcttttgcttcgattctccagacacttactcagcaacaggctcacttggcagccgagcagacccgccaggcagcagcccatcagcagttgaccgagagaatgctctcgatgtttcagacaatacaggacaagcatgattctcttatgcagcagcttcttcaggatcgggctgagagaagggcattaatgactcttatgctacatcattctggtatattgattcccccggttcagtcagtcctgcctccacctcttcaggctcctgttgtgccaacgattcagccaggaccctctcttcctacagttggtccttcttcctctccgctccggtcggttaccctggctttcacgtcaccggtttttagctctgtctgccctcagccgtcagtgccaccagcttctgctgttcccactactgctatggcggtgtctgtgaccacttcagatccggcagcccctgcagcgcagcctcagtccgagtcagtatcagctctagcttctacagcagatcctggatccgagactgactctgaccctcagctagcgttcgctctactgcctcgaccgcgaccggatgtgcccccgccgcctcctccaacttctgatgcgtaggctcgggtacccttttggtgtttgacgccaaagggggagagatatgagttgtgagagctagggggagttagttagttagtagagagttattttgatgtaatatatgtgcttgcaattctctgtactagtttggtgcttttggctcacaaactctatatatactctcgatgcttatgttgactgtgtgtgtatattatgttttcaccttatatattatcaccagtcttttagttcttg

SEQ ID NO: 63606 - DNA, 2837 bp, Zea Mays
aatcgtcccgcagaagtagaacgactccagagagcctctcgaaccttccaaattccgttgaaatcttccccgagccctaagattctctcgccggattcgcctgatccgacccgacacgcgatctctcggctcgccgcaatggccgacaaggagaagccggaggctgaggaggaggagtacgagagcgacctcgacgacgcgcccctctccgcgttgtggcgccgcgacgctgcgagcgacgacgagggcgaggacgaggatgaggacggagggacgcccttgaggcggaggaaagccggattcgatgcagattccgacgggcagggcgccgccgaggtttacgacgaggaaggcgaggaggagtacggggggttcgaagcagaggacggcggagtgcgcggggtggctgccgaagcggttgccggtgcggggcaggaggggggcgaggctggggatggggaagttgaaaaggcgggtgaggcagcgccacaggatgaagaggaggacaagaaggggaacgagccctacgctgttccgacgaccggcgccttctacatgcacgacgaccgcttccaggagggccggggccgtggacgtggccgtgggcgccaaaggagaatggtgaacagtagaaggttgtggagtcctaaagacgagcaagcctgggtccatgacagatttgatgagatggatctgcgtgattttcatggtgacaatccaaaaagaaagcagggaggtggttttagaggacgtgatggtggacaaggtggtagaactcgtggcattagccgtggtaacttcagaggcaacagagctagaacatactatcatgatggcagcaagaactacagctatgttccaaaggaatctcatgcataccatgataacaccaagaatgcccgtcattcttcatactctaatgggaaaaatagagttccaaaaccatctcgtgatcactatgatgatgttaaaggttatgacactgtcccaaatgaatctcgcacttactatggtgatgctaagggtcaaaagaatgcaccaagagtagttcaaggaagaggctccaagcattaccaaccacgcttgaaaaatatcactgatgtatcttcagtgcaaaataccaaatctctgactcttgaagacacttcgtcaaatgcaaacttgggaaaagaccgaactcaaggatcaaattcgcgacttgaacaagtccttcctactaagcaggctgttgcatcaaacttgaattcagcttcaccaccattttatcctgcaaggtcatccaatcaagagttcccagttgttcaaggagggaatgcacaacttagtaataacctactgagagggaaggcctttgtaccatcagttggacatgttgaagctgcattgaatggcatgaataaaccttcactgcttccagcatcatcatcatcaaatggtccatttcctttagccactgatcaagtcaatagagactatgggcagcctgcacatccaattgttcaacaaaactcagttcaatcccctacacaatctgcacccaggatgcctgcccagatgtttggtgcaaaattcagcaatagcagtaaaatatcaccagcacaacctacaactattctgggtgatgacactgaaatttcttcacctagtggatcaaacaaatatgattctcggttaacaattaaggggcaacctgatgaccaaggaacagagcattcttcgtttctccgtggtggggctcatgttcttggggctacaggtgcaatgggcattaaacttggtgatcaaaatttccatggtaccccagcattgctgccagttatgcagtttggaggtccgcgaccagttgggcgcggtgttccttcaatcggtatggctctgccaggatttgtgtctcaacaacaacttggtctcaataataattctgagatgacctggctaccaatattgactggtgcctctggagctctaggagcaccttatggttccccttatatagccatggatggaagttattactctcgacaatctgaacaagcatcttcatcagtttctattagagaacctagtgcaaataatgcttcttctctgttgaagtcccaagaaataacagaggttgcaagtgatgaaataactcaacgccaaaataagcctcgtcgatactcggagatgaactttggccaatgaacatagctgtgaccagtgaggattcattggagcttaggacccaagcttgacagttgaaggtgttgcaaccatatcagtatgatcatttgctgtgattattctgaagggctagtgttgttacactatgaggtgagatttacatggtactccacttcaccgcaatatcagacgtcgtatcagcatactgcatatgggggaggtcttgatggaaatcgtgagaggtctccgtgctgtaaagctcgtgttccatcgtacatcagtctgtgtacttttgggtgtgcgcttgctttgcttctgtgcctctgccttcagctcggtggcactcggctgacatgcatccgttatatttacttgttatatctgatccgatgtattgaagatggttagtagagcatgatttacggtggtgaatcttgctttggtcgtgttgacaaatcagggccttgcacgtaaaagaaccggtgcatccgagacgccagtgcacacagctcatggcgctgccgcaaaagccttgtctatttgcagagtgatgtgtgtaccgtgggcattacaaaataattgcagcctcctttggacggcggtaatattaagtttagcctgctttttttcgaacgttacccgatggctctgagcaaatgacaaaaaaaacttat

SEQ ID NO: 63607 - DNA, 2376 bp, Zea Mays
aatcgtcccgcagaagtagaacgactccagagagcctctcgaaccttccaaattccgttgaaatcttccccgagccctaagattctctcgccggattcgcctgatccgacccgacacgcgatctctcggctcgccgcaatggccgacaaggagaagccggaggctgaggaggaggagtacgagagcgacctcgacgacgcgcccctctccgcgttgtggcgccgcgacgctgcgagcgacgacgagggcgaggacgaggatgaggacggagggacgcccttgaggcggaggaaagccggattcgatgcagattccgacgggcagggcgccgccgaggtttacgacgaggaaggcgaggaggagtacggggggttcgaagcagaggacggcggagtgcgcggggtggctgccgaagcggttgccggtgcggggcaggaggggggcgaggctggggatggggaagttgaaaaggcgggtgaggcagcgccacaggatgaagaggaggacaagaaggggaacgagccctacgctgttccgacgaccggcgccttctacatgcacgacgaccgcttccaggagggccggggccgtggacgtggccgtgggcgccaaaggagaatggtgaacagtagaaggttgtggagtcctaaagacgagcaagcctgggtccatgacagatttgatgagatggatctgcgtgattttcatggtgacaatccaaaaagaaagcagggaggtggttttagaggacgtgatggtggacaaggtggtagaactcgtggcattagccgtggtaacttcagaggcaacagagctagaacatactatcatgatggcagcaagaactacagctatgttccaaaggaatctcatgcataccatgataacaccaagaatgcccgtcattcttcatactctaatgggaaaaatagagttccaaaaccatctcgtgatcactatgatgatgttaaaggttatgacactgtcccaaatgaatctcgcacttactatggtgatgctaagggtcaaaagaatgcaccaagagtagttcaaggaagaggctccaagcattaccaaccacgcttgaaaaatatcactgatgtatcttcagtgcaaaataccaaatctctgactcttgaagacacttcgtcaaatgcaaacttgggaaaagaccgaactcaaggatcaaattcgcgacttgaacaagtccttcctactaagcaggctgttgcatcaaacttgaattcagcttcaccaccattttatcctgcaaggtcatccaatcaagagttcccagttgttcaaggagggaatgcacaacttagtaataacctactgagagggaaggcctttgtaccatcagttggacatgttgaagctgcattgaatggcatgaataaaccttcactgcttccagcatcatcatcatcaaatggtccatttcctttagccactgatcaagtcaatagagactatgggcagcctgcacatccaattgttcaacaaaactcagttcaatcccctacacaatctgcacccaggatgcctgcccagatgtttggtgcaaaattcagcaatagcagtaaaatatcaccagcacaacctacaactattctgggtgatgacactgaaatttcttcacctagtggatcaaacaaatatgattctcggttaacaattaaggggcaacctgatgaccaaggaacagagcattcttcgtttctccgtggtggggctcatgttcttggggctacaggtgcaatgggcattaaacttggtgatcaaaatttccatggtaccccagcattgctgccagttatgcagtttggaggtccgcgaccagttgggcgcggtgttccttcaatcggtatggctctgccaggatttgtgtctcaacaacaacttggtctcaataataattctgagatgacctggctaccaatattgactggtgcctctggagctctaggagcaccttatggttccccttatatagccatggatggaagttattactctcgacaatctgaacaagcatcttcatcagtttctattagagaacctagtgcaaataatgcttcttctctgttgaagtcccaagaaataacagaggttgcaagtgatgaaataactcaacgccaaaataagcctcgtcgatactcggagatgaactttggccaatgaacatagctgtgaccagtgaggattcattggagcttaggacccaagtaagacctgtgcaagagacccaagccttactaagtccttgcaacatctcactgtctgatgtctagcactttcggctatcttgtaactcccaaaatgccagtgcttattatccacacggttggttgtgcttacaaaatctggacatcg

SEQ ID NO: 63608 - DNA, 1580 bp, Zea Mays
taaaaaggctcaaggatgccaaccttttcgtgtcacaaggagggctcatcattctggattttttgtgtgtttggcgtataacctcccattgtgattattcctaatttcagtagttatcagtagccccatgattatattattgaattgttgtgttcaagtgtactctaaataatatatcatgatagaaatttaaagcttgtgcagtatgtttcagtcctatggtagttatattttgcaccaaaccatttcaccatttttctttgcttcatgatatgactcccactctcttcggtctttgctaattatttgacccaaaagtgaccctatagtttgggtgaacttgtgatgttgttctttgtttcagctttctaatttctgttgtgattggtttgatatgtcattgatgctttcgttattaaacatgctgcttctattttatcttcatctatctaaatgatgtttcctttcaggtcactcttattggcagtctagaaatgccaaaggatgacatatggcttgtcacagctatcctatctggtctcattgaataatgtgcgaagatataagtcacatctttcttggcctcctatcttcgcctccagctgggatgagtctgtctcattacgatggggtgatcttgggctttctgtttcacatatcttcaggcctgtgcctggatgctgtaccatgcttggtcctatgaatattgaagtaaagcaacggaaagttgtagctgttggtaggaaacggactgcacggccaacagaaaatacctgtcctgaagagcttgctgagtcttcagaggaagtaaagacagacactgacaggaatgtcttagttatgtttgatatcctcaggcgaaagaagagcgcaaaattggaaaaccttgtgttgaataggctttcatttgcccaaacagttgaaaatgtttttgcactatctttcttagtgaaagatggtagggtggaaataactgtagatgatagcgggcatatagtacggccaaggaatgcacctgctgctagcgctatagcctcaggagaagtctcatacagtcattttgtttttagatttgacttgaaggactggaagcttatgaaagaagttgttacagagggagaagagctgttgccacataggacttcccagagcaatctttgcaacgaagaaaacgaccaaccaaatctggagttgtggcaacggaagttccaggccccgttgcagctgggagtggttttatactcgctgatgacatcaagtcttaggtgcttccattgatcaatgactcagggaaatatggagggatcatgatgtggttcaagtactatgatgatcaagatggctacaattcttgagtgaagagtgatgtttaggttgttgtctgtggtgtgtgacaatatctgtgtgttacttgtgtgtatgtgagaaattatgtgactctggagtctggatagtgcaataagtattactcaagtatatgattgaatcttatgtcatactattcaaattatgtcatatgtatcttttaaggtatgtaaacatccacttttagcgatgttaacaaaagaatagaacaataa

SEQ ID NO: 63609 - DNA, 1825 bp, Zea Mays
cggttctaccgtcaacgcgccgcggattccccgccctcctccccgtctgctccccgccatcaacgcgcacgcgacctctgctctccgccatcaacgctcactgcatgcctcaccctctccccgccatcaacgcgccgcagatcccccaccctctccccgccatcaacgcgcaagcggatgccacggatccgcctatccgccataaacgccgatccatagatccacgctcgccctgcctcctacgacaccaaccgaaccctcaacctctcctacgacaccttctccagcccgctccccgacgacatcgagcgcctggctttcacagcggcgggacatggaggatgaacgagcaccgggagagagtcggttagatctaaatttccgtggaggtgagcttggacgaggttcaaacaggcatatctctgaacaccttgggttctctaggctatgagatagatcatggatcgagatggagaatagcagtgtgtcattctaaactgggtgatcagccgaaaagatcccatggataatcattaatgattatgtgagggagggaaccaacaaaggcactccatgggggaatggttgtggccaggtttgttaatggtgttgcggctgcaagcgtcgtgtggcatctgtcgcgaccaagcattacgagacagtctcctccagcgctttgcactgctcctatcaaggtcactcttattggcagtctagaaatgccaaaggatgacatatggcttgtcacagctatcctatctggtctcattgaataatgtgcgaagatataagtcactggctatcaatttctgtgaatcagatctttcttggcctcctatcttcgcctccagctgggatgagtctgtctcattacgatggggtgatcttgggctttctgtttcacatatcttcaggcctgtgcctggatgctgtaccatgcttggtcctatgaatattgaagtaaagcaacggaaagttgtagctgttggtaggaaacggactgcacggccaacagaaaatacctgtcctgaagagcttgctgagtcttcagaggaagtaaagacagacactgacaggaatgtcttagttatgtttgatatcctcaggcgaaagaagagcgcaaaattggaaaaccttgtgttgaataggctttcatttgcccaaacagttgaaaatgtttttgcactatctttcttagtgaaagatggtagggtggaaataactgtagatgatagcgggcatataggccaaggaatgcacctgctgctagcgctatagcctcaggagaagtctcatacagtcattttgtttttagatttgacttgaaggactggaagcttatgaaagaagttgttacagagggagaagagctgttgccacataggacttcccagagcaatctttgcaacgaagaaaacgaccaaccaaatctggagttgtggcaacggaagttccaggccccgttgcagctgggagtggttttatactcgctgatgacatcaagtcttaggtgcttccattgatcaatgactcagggaaatatggagggatcatgatgtggttcaagtactatgatgatcaagatggctacaattcttgagtgaagagtgatgtttaggttgttgtctgtggtgtgtgacaatatctgtgtgttacttgtgtgtatgtgagaaattatgtgactctggagtctggatagtgcaataagtattactcaagtatatgattgaatcttatgtcatactattcaaattatgtcatatgtatcttttaaggtatgtaaacatccacttttagcgatgttaacaaaagaatagaacaataa

SEQ ID NO: 63610 - DNA, 1828 bp, Zea Mays
cggttctaccgtcaacgcgccgcggattccccgccctcctccccgtctgctccccgccatcaacgcgcacgcgacctctgctctccgccatcaacgctcactgcatgcctcaccctctccccgccatcaacgcgccgcagatcccccaccctctccccgccatcaacgcgcaagcggatgccacggatccgcctatccgccataaacgccgatccatagatccacgctcgccctgcctcctacgacaccaaccgaaccctcaacctctcctacgacaccttctccagcccgctccccgacgacatcgagcgcctggctttcacagcggcgggacatggaggatgaacgagcaccgggagagagtcggttagatctaaatttccgtggaggtgagcttggacgaggttcaaacaggcatatctctgaacaccttgggttctctaggctatgagatagatcatggatcgagatggagaatagcagtgtgtcattctaaactgggtgatcagccgaaaagatcccatggataatcattaatgattatgtgccaggttgtttctaatttaacagagggagggaaccaacaaaggcactccatgggggaatggttgtggccaggtttgttaatggtgttgcggctgcaagcgtcgtgtggcatctgtcgcgaccaagcattacgagacagtctcctccagcgctttgcactgctcctatcaaggtcactcttattggcagtctagaaatgccaaaggatgacatatggcttgtcacagctatcctatctggtctcattgaataatgtgcgaagatataagtcacatctttcttggcctcctatcttcgcctccagctgggatgagtctgtctcattacgatggggtgatcttgggctttctgtttcacatatcttcaggcctgtgcctggatgctgtaccatgcttggtcctatgaatattgaagtaaagcaacggaaagttgtagctgttggtaggaaacggactgcacggccaacagaaaatacctgtcctgaagagcttgctgagtcttcagaggaagtaaagacagacactgacaggaatgtcttagttatgtttgatatcctcaggcgaaagaagagcgcaaaattggaaaaccttgtgttgaataggctttcatttgcccaaacagttgaaaatgtttttgcactatctttcttagtgaaagatggtagggtggaaataactgtagatgatagcgggcatatagtacggccaaggaatgcacctgctgctagcgctatagcctcaggagaagtctcatacagtcattttgtttttagatttgacttgaaggactggaagcttatgaaagaagttgttacagagggagaagagctgttgccacataggacttcccagagcaatctttgcaacgaagaaaacgaccaaccaaatctggagttgtggcaacggaagttccaggccccgttgcagctgggagtggttttatactcgctgatgacatcaagtcttaggtgcttccattgatcaatgactcagggaaatatggagggatcatgatgtggttcaagtactatgatgatcaagatggctacaattcttgagtgaagagtgatgtttaggttgttgtctgtggtgtgtgacaatatctgtgtgttacttgtgtgtatgtgagaaattatgtgactctggagtctggatagtgcaataagtattactcaagtatatgattgaatcttatgtcatactattcaaattatgtcatatgtatcttttaaggtatgtaaacatccacttttagcgatgttaacaaaagaatagaacaataa

SEQ ID NO: 63611 - DNA, 1432 bp, Zea Mays
ctcccattgtgattattcctaatttcagtagttatcagtagccccatgattatattattgaattgttgtgttcaagtgtactctaaataatatatcatgatagaaatttaaagcttgtgcagtatgtttcagtcctatggtagttatattttgcaccaaaccatttcaccatttttctttgcttcatgatatgactcccactctcttcggtctttgctaattatttgacccaaaagtgaccctatagtttgggtgaacttgtgatgttgttctttgtttcagctttctaatttctgttgtgattggtttgatatgtcattgatgctttcgttattaaacatgctgcttctattttatcttcatctatctaaatgatgtttcctttcaggtcactcttattggcagtctagaaatgccaaaggatgacatatggcttgtcacagctatcctatctggtctcattgaataatgtgcgaagatataagtcacatctttcttggcctcctatcttcgcctccagctgggatgagtctgtctcattacgatggggtgatcttgggctttctgtttcacatatcttcaggcctgtgcctggatgctgtaccatgcttggtcctatgaatattgaagtaaagcaacggaaagttgtagctgttggtaggaaacggactgcacggccaacagaaaatacctgtcctgaagagcttgctgagtcttcagaggaagtaaagacagacactgacaggaatgtcttagttatgtttgatatcctcaggcgaaagaagagcgcaaaattggaaaaccttgtgttgaataggctttcatttgcccaaacagttgaaaatgtttttgcactatctttcttagtgaaagatggtagggtggaaataactgtagatgatagcgggcatatagtacggccaaggaatgcacctgctgctagcgctatagcctcaggagaagtctcatacagtcattttgtttttagatttgacttgaaggactggaagcttatgaaagaagttgttacagagggagaagagctgttgccacataggacttcccagagcaatctttgcaacgaagaaaacgaccaaccaaatctggaggtacgtgcacaaataatgcctatcaggaagaagagctcgtgcttatctgaacttccagttgtgccagcggagtagggctgtaattataaattgtttgaagttctggtcacatcttgcaactacagaatggtgtttgtagggctgagtgtaactagctagcttggctcgtgttgggtcattaagggtgtgtttggttggatgtatatggagggatggaaagggacgaccacatattctatagtgtttggattagagtcgcgtggggcgagataaacatcggagtaattttttggtggcggtgtgattcaaaaatttgactactt

SEQ ID NO: 63612 - DNA, 1763 bp, Zea Mays
cggttctaccgtcaacgcgccgcggattccccgccctcctccccgtctgctccccgccatcaacgcgcacgcgacctctgctctccgccatcaacgctcactgcatgcctcaccctctccccgccatcaacgcgccgcagatcccccaccctctccccgccatcaacgcgcaagcggatgccacggatccgcctatccgccataaacgccgatccatagatccacgctcgccctgcctcctacgacaccaaccgaaccctcaacctctcctacgacaccttctccagcccgctccccgacgacatcgagcgcctggctttcacagcggcgggacatggaggatgaacgagcaccgggagagagtcggttagatctaaatttccgtggaggtgagcttggacgaggtcaggttcaaacaggcatatctctgaacaccttgggttctctaggctatgagatagatcatggatcgagatggagaatagcagtgtgtcattctaaactgggtgatcagccgaaaagatcccatggataatcattaatgattatgtggttgtttctaatttaacagagggagggaaccaacaaaggcactccatgggggaatggttgtggccaggtttgttaatggtgttgcggctgcaagcgtcgtgtggcatctgtcgcgaccaagcattacgagacagtctcctccagcgctttgcactgctcctatcaaggtcactcttattggcagtctagaaatgccaaaggatgacatatggcttgtcacagctatcctatctggtctcattgaataatgtgcgaagatataagtcacatctttcttggcctcctatcttcgcctccagctgggatgagtctgtctcattacgatggggtgatcttgggctttctgtttcacatatcttcaggcctgtgcctggatgctgtaccatgcttggtcctatgaatattgaagtaaagcaacggaaagttgtagctgttggtaggaaacggactgcacggccaacagaaaatacctgtcctgaagagcttgctgagtcttcagaggaagtaaagacagacactgacaggaatgtcttagttatgtttgatatcctcaggcgaaagaagagcgcaaaattggaaaaccttgtgttgaataggctttcatttgcccaaacagttgaaaatgtttttgcactatctttcttagtgaaagatggtagggtggaaataactgtagatgatagcgggcatatagtacggccaaggaatgcacctgctgctagcgctatagcctcaggagaagtctcatacagtcattttgtttttagatttgacttgaaggactggaagcttatgaaagaagttgttacagagggagaagagctgttgccacataggacttcccagagcaatctttgcaacgaagaaaacgaccaaccaaatctggaggtacgtgcacaaataatgcctatcaggaagaagagctcgtgcttatctgaacttccagttgtgccagcggagtagggctgtaattataaattgtttgaagttctggtcacatcttgcaactacagaatggtgtttgtagggctgagtgtaactagctagcttggctcgtgttgggtcattaagggtgtgtttggttggatgtatatggagggatggaaagggacgaccacatattctatagtgtttggattagagtcgcgtggggcgagataaacatcggagtaattttttggtggcggtgtgattcaaaaatttgactactt

SEQ ID NO: 63613 - DNA, 1767 bp, Zea Mays
cggttctaccgtcaacgcgccgcggattccccgccctcctccccgtctgctccccgccatcaacgcgcacgcgacctctgctctccgccatcaacgctcactgcatgcctcaccctctccccgccatcaacgcgccgcagatcccccaccctctccccgccatcaacgcgcaagcggatgccacggatccgcctatccgccataaacgccgatccatagatccacgctcgccctgcctcctacgacaccaaccgaaccctcaacctctcctacgacaccttctccagcccgctccccgacgacatcgagcgcctggctttcacagcggcgggacatggaggatgaacgagcaccgggagagagtcggttagatctaaatttccgtggaggtgagcttggacgaggtcaggttcaaacaggcatatctctgaacaccttgggttctctaggctatgagatagatcatggatcgagatggagaatagcagtgtgtcattctaaactgggtgatcagccgaaaagatcccatggataatcattaatgattatgtgccaggttgtttctaatttaacagagggagggaaccaacaaaggcactccatgggggaatggttgtggccaggtttgttaatggtgttgcggctgcaagcgtcgtgtggcatctgtcgcgaccaagcattacgagacagtctcctccagcgctttgcactgctcctatcaaggtcactcttattggcagtctagaaatgccaaaggatgacatatggcttgtcacagctatcctatctggtctcattgaataatgtgcgaagatataagtcacatctttcttggcctcctatcttcgcctccagctgggatgagtctgtctcattacgatggggtgatcttgggctttctgtttcacatatcttcaggcctgtgcctggatgctgtaccatgcttggtcctatgaatattgaagtaaagcaacggaaagttgtagctgttggtaggaaacggactgcacggccaacagaaaatacctgtcctgaagagcttgctgagtcttcagaggaagtaaagacagacactgacaggaatgtcttagttatgtttgatatcctcaggcgaaagaagagcgcaaaattggaaaaccttgtgttgaataggctttcatttgcccaaacagttgaaaatgtttttgcactatctttcttagtgaaagatggtagggtggaaataactgtagatgatagcgggcatatagtacggccaaggaatgcacctgctgctagcgctatagcctcaggagaagtctcatacagtcattttgtttttagatttgacttgaaggactggaagcttatgaaagaagttgttacagagggagaagagctgttgccacataggacttcccagagcaatctttgcaacgaagaaaacgaccaaccaaatctggaggtacgtgcacaaataatgcctatcaggaagaagagctcgtgcttatctgaacttccagttgtgccagcggagtagggctgtaattataaattgtttgaagttctggtcacatcttgcaactacagaatggtgtttgtagggctgagtgtaactagctagcttggctcgtgttgggtcattaagggtgtgtttggttggatgtatatggagggatggaaagggacgaccacatattctatagtgtttggattagagtcgcgtggggcgagataaacatcggagtaattttttggtggcggtgtgattcaaaaatttgactactt

SEQ ID NO: 63614 - DNA, 1739 bp, Zea Mays
cggttctaccgtcaacgcgccgcggattccccgccctcctccccgtctgctccccgccatcaacgcgcacgcgacctctgctctccgccatcaacgctcactgcatgcctcaccctctccccgccatcaacgcgccgcagatcccccaccctctccccgccatcaacgcgcaagcggatgccacggatccgcctatccgccataaacgccgatccatagatccacgctcgccctgcctcctacgacaccaaccgaaccctcaacctctcctacgacaccttctccagcccgctccccgacgacatcgagcgcctggctttcacagcggcgggacatggaggatgaacgagcaccgggagagagtcggttagatctaaatttccgtggaggtgagcttggacgaggttcaaacaggcatatctctgaacaccttgggttctctaggctatgagatagatcatggatcgagatggagaatagcagtgtgtcattctaaactgggtgatcagccgaaaagatcccatggataatcattaatgattatgtgagggagggaaccaacaaaggcactccatgggggaatggttgtggccaggtttgttaatggtgttgcggctgcaagcgtcgtgtggcatctgtcgcgaccaagcattacgagacagtctcctccagcgctttgcactgctcctatcaaggtcactcttattggcagtctagaaatgccaaaggatgacatatggcttgtcacagctatcctatctggtctcattgaataatgtgcgaagatataagtcacatctttcttggcctcctatcttcgcctccagctgggatgagtctgtctcattacgatggggtgatcttgggctttctgtttcacatatcttcaggcctgtgcctggatgctgtaccatgcttggtcctatgaatattgaagtaaagcaacggaaagttgtagctgttggtaggaaacggactgcacggccaacagaaaatacctgtcctgaagagcttgctgagtcttcagaggaagtaaagacagacactgacaggaatgtcttagttatgtttgatatcctcaggcgaaagaagagcgcaaaattggaaaaccttgtgttgaataggctttcatttgcccaaacagttgaaaatgtttttgcactatctttcttagtgaaagatggtagggtggaaataactgtagatgatagcgggcatatagtacggccaaggaatgcacctgctgctagcgctatagcctcaggagaagtctcatacagtcattttgtttttagatttgacttgaaggactggaagcttatgaaagaagttgttacagagggagaagagctgttgccacataggacttcccagagcaatctttgcaacgaagaaaacgaccaaccaaatctggaggtacgtgcacaaataatgcctatcaggaagaagagctcgtgcttatctgaacttccagttgtgccagcggagtagggctgtaattataaattgtttgaagttctggtcacatcttgcaactacagaatggtgtttgtagggctgagtgtaactagctagcttggctcgtgttgggtcattaagggtgtgtttggttggatgtatatggagggatggaaagggacgaccacatattctatagtgtttggattagagtcgcgtggggcgagataaacatcggagtaattttttggtggcggtgtgattcaaaaatttgactactt

SEQ ID NO: 63615 - DNA, 1768 bp, Zea Mays
cggttctaccgtcaacgcgccgcggattccccgccctcctccccgtctgctccccgccatcaacgcgcacgcgacctctgctctccgccatcaacgctcactgcatgcctcaccctctccccgccatcaacgcgccgcagatcccccaccctctccccgccatcaacgcgcaagcggatgccacggatccgcctatccgccataaacgccgatccatagatccacgctcgccctgcctcctacgacaccaaccgaaccctcaacctctcctacgacaccttctccagcccgctccccgacgacatcgagcgcctggctttcacagcggcgggacatggaggatgaacgagcaccgggagagagtcggttagatctaaatttccgtggaggtgagcttggacgaggtcaggttcaaacaggcatatctctgaacaccttgggttctctaggctatgagatagatcatggatcgagatggagaatagcagtgtgtcattctaaactgggtgatcagccgaaaagatcccatggataatcattaatgattatgtgagggagggaaccaacaaaggcactccatgggggaatggttgtggccaggtttgttaatggtgttgcggctgcaagcgtcgtgtggcatctgtcgcgaccaagcattacgagacagtctcctccagcgctttgcactgctcctatcaaggtcactcttattggcagtctagaaatgccaaaggatgacatatggcttgtcacagctatcctatctggtctcattgaataatgtgcgaagatataagtcactggctatcaatttctgtgaatcagatctttcttggcctcctatcttcgcctccagctgggatgagtctgtctcattacgatggggtgatcttgggctttctgtttcacatatcttcaggcctgtgcctggatgctgtaccatgcttggtcctatgaatattgaagtaaagcaacggaaagttgtagctgttggtaggaaacggactgcacggccaacagaaaatacctgtcctgaagagcttgctgagtcttcagaggaagtaaagacagacactgacaggaatgtcttagttatgtttgatatcctcaggcgaaagaagagcgcaaaattggaaaaccttgtgttgaataggctttcatttgcccaaacagttgaaaatgtttttgcactatctttcttagtgaaagatggtagggtggaaataactgtagatgatagcgggcatatagtacggccaaggaatgcacctgctgctagcgctatagcctcaggagaagtctcatacagtcattttgtttttagatttgacttgaaggactggaagcttatgaaagaagttgttacagagggagaagagctgttgccacataggacttcccagagcaatctttgcaacgaagaaaacgaccaaccaaatctggaggtacgtgcacaaataatgcctatcaggaagaagagctcgtgcttatctgaacttccagttgtgccagcggagtagggctgtaattataaattgtttgaagttctggtcacatcttgcaactacagaatggtgtttgtagggctgagtgtaactagctagcttggctcgtgttgggtcattaagggtgtgtttggttggatgtatatggagggatggaaagggacgaccacatattctatagtgtttggattagagtcgcgtggggcgagataaacatcggagtaattttttggtggcggtgtgattcaaaaatttgactactt

SEQ ID NO: 63616 - DNA, 1779 bp, Zea Mays
cggttctaccgtcaacgcgccgcggattccccgccctcctccccgtctgctccccgccatcaacgcgcacgcgacctctgctctccgccatcaacgctcactgcatgcctcaccctctccccgccatcaacgcgccgcagatcccccaccctctccccgccatcaacgcgcaagcggatgccacggatccgcctatccgccataaacgccgatccatagatccacgctcgccctgcctcctacgacaccaaccgaaccctcaacctctcctacgacaccttctccagcccgctccccgacgacatcgagcgcctggctttcacagcggcgggacatggaggatgaacgagcaccgggagagagtcggttagatctaaatttccgtggaggttcaaacaggcatatctctgaacaccttgggttctctaggctatgagatagatcatggatcgagatggagaatagcagtgtgtcattctaaactgggtgatcagccgaaaagatcccatggataatcattaatgattatgtgcttgatcaaacgagaggtactgtcatatccagccaggttgtttctaatttaacagagggagggaaccaacaaaggcactccatgggggaatggttgtggccaggtttgttaatggtgttgcggctgcaagcgtcgtgtggcatctgtcgcgaccaagcattacgagacagtctcctccagcgctttgcactgctcctatcaaggtcactcttattggcagtctagaaatgccaaaggatgacatatggcttgtcacagctatcctatctggtctcattgaataatgtgcgaagatataagtcacatctttcttggcctcctatcttcgcctccagctgggatgagtctgtctcattacgatggggtgatcttgggctttctgtttcacatatcttcaggcctgtgcctggatgctgtaccatgcttggtcctatgaatattgaagtaaagcaacggaaagttgtagctgttggtaggaaacggactgcacggccaacagaaaatacctgtcctgaagagcttgctgagtcttcagaggaagtaaagacagacactgacaggaatgtcttagttatgtttgatatcctcaggcgaaagaagagcgcaaaattggaaaaccttgtgttgaataggctttcatttgcccaaacagttgaaaatgtttttgcactatctttcttagtgaaagatggtagggtggaaataactgtagatgatagcgggcatatagtacggccaaggaatgcacctgctgctagcgctatagcctcaggagaagtctcatacagtcattttgtttttagatttgacttgaaggactggaagcttatgaaagaagttgttacagagggagaagagctgttgccacataggacttcccagagcaatctttgcaacgaagaaaacgaccaaccaaatctggaggtacgtgcacaaataatgcctatcaggaagaagagctcgtgcttatctgaacttccagttgtgccagcggagtagggctgtaattataaattgtttgaagttctggtcacatcttgcaactacagaatggtgtttgtagggctgagtgtaactagctagcttggctcgtgttgggtcattaagggtgtgtttggttggatgtatatggagggatggaaagggacgaccacatattctatagtgtttggattagagtcgcgtggggcgagataaacatcggagtaattttttggtggcggtgtgattcaaaaatttgactactt

SEQ ID NO: 63617 - DNA, 1110 bp, Zea Mays
cttcagccagtactgctcgaacctctgcctagcgtaatccttatagtcgaagtcgatatcgttgacatgatcctgcagccagagcccagaggatgtcagatttagatgaatggctattctggttcctaggtggggcgaataatggaagctatgcatgagcaaacccaccgaaattattccccataggccccaaactaggtggctggcgagggtgtacttctcaatgcttttgatcaggttctctacctcctcttcagattcctcacctggtagggattgcaggaagagaatttatttcttcttctaaaactgatatatagacatatcctaaaaatccgtaaactagaggtgatcaggcataaatcaacaaacattagatttacctgaggagctcaggtatgtccgcacaaattgcttccgctcatcggtatctgtcgtgatatgagcagtaaggtaggatgagtgaacaaataacagtgcagaaatccaaaggcttcaaatatgtatatatatcacctggatatttgctgtagtccaatatgtgaggcttttctgaatggtagtctgcggccatttcacagaaatggtttgcgatgtcataagcaactgggttaaaacctgcatactcgtagtcctgcaaaggtggcaggcaagaaattaagcgagatcatagcaatgtatttttttccaagcattcaggataagtcagaaatggttcagaaattaagcatcggaaatgcagcagcgcctatgaaagagcagaatcagtgaaccaaattaacacacgccaaggtagcaagagcttacaatgatggtcagtagcctcgtctcttcgtcgatcatgatgttcccatactggagatcgttatggcaaaatcctacgcgctcgcactcccctgagaactcgttctccagcgcagcgatctcctcctccatgctatccaagcagaactcttcggtttcatcagaggaggagtacaggctcttggcagttctgagccagttcctagcggaaacgatgcaactgtggcaatcagcacttcgcttcgacgataagttttgctttacaacatgctgtaccagagcaactgtgtaggcgggaaaaaaaac

SEQ ID NO: 63618 - DNA, 2977 bp, Zea Mays
cttggacccactcttattacccgataacacctcaacgaaaacgtcattgaaaatataacgtaacattggatccaatattttaccaaatactccctgcccagcgccaccgccacggcagcaaatgtggcagcccggtcccgccgccgccttcacggccgcgtccctccacgagcatgttctccgcctccattgcggcggcagcctcctcctccgccgtgcccacgccgcctcccttgtctccggcgccctcaccgcctccttcccgcttgcaggcgcgctgcttctctcatatgccgcgctaccggacatcccgtcggcgcacctcatcctccgccaccacccgttccgcctccgctccgccttcctctggaactcgctctcccgcgcgctcgcctctgctgccctcccctgcgaggccctgcgggtgtacaaccgcatggtccgctccggcgtgcgcccggatgaccgcaccttccccttcgccctgcacgccgccgccgccgttgcccaggcggagcaccctgccaagggcgccgagctacacgccgccgctcttcgacggggcctcctcctcgcggacgtctttgctggcaacacgctcgtcacgttttacgcggtatgtggccgcgcggccgacgcgcgcagggtgttcgacgagatgcctgcgcgggacgtcgtctcgtggaactcacttgtgtctgcattgctgacgaatgggatgctggaggatgcaaaacgcgcagtggtggggatgatgaggagcggggtcccggtgaatgtcgcgagtttggtgtcaatcttgcctgcctgtggtacggagcgtgatgaggggtttgggttgtgtgtccatggtttggtgttgaaatttggactcaactctgtggtgaacctcggcaatgcattggtggatatgtatgggaaatttggagacttggagtcatcaatgcatgtgtttaatggaatgcaagagaagaatgaggtttcttggaattctgcaataggttgctttgctcatgcagggtttcatgaagatgtgctggaaatgtttaggttaatgtcagaacatgatgtcacaccaggatctgttaccctatcaagtttgctgcctgctttggttgatcttggttattttcatttggggaaggagcttcatggatatagtataaggagagcagtggaatctgatattttcattgctaacacactaatggatatgtatgctaagtttggttgttcggagaaagcatctgctatctttgaaaatatcgaggtacgaaatgtggtctcatggaatgcaatgattgcaaatcttacacaaaatggagctgaggctgaggctttcaggcttgtcatcgagatgcagaagaatggggaatgcccaaattcgttcacccttgtgaatctgcttccagcctgttcaagggtggcctctgtaaagatggggaagcagatccatgcatggtcaatacgcagaagcttgatgtctgatctgtttgtatcgaatgctctgattgatgtatatgccaagtgtgggcaactgaatttggcacgatatatctttgacaggtcagagaaggatggtgtgtcatacaacactttgatcgtgggttactcgcagagtcaatgctgttttgaatctcttcatctctttcagcagatgagattggctggaattgagcatgatgctgtttccttcatgggttgtctctcagcatgttctaatctttctgcctttaagcaaggcaaagaaatccatggtgttttagtgaagagattgttagattctcacccttttctagctaattcgttgctagatgtgtacactaaaggtggaatgcttgatacagcttcaaagatcttcaataggattacgcagaaggatgttgcttcatggaacactatgatcttgggatatgggatgcatggtcaaattgatgttgcatttgaattatttgatttaatgaaggatgatggcatcgaatatgatcatgtatcttatattgcagtattgtcagtatgtagccatggtgggcttgtagacagaggaaagaagtacttcagtcaaatgatcgctcaaaatattaagcctcagcagatgcactatgcttgtatggtagatcttcttgggcgtgctggacaactgagtgaatctgctgaaataatcagaaacatgccttttcgtgctaattctgatgtttggggagcattgcttggctcttgccgtatacatggagacattgaactagcacgactggcagcagagcatttgtttgagttgaagcctgagaactcaggctactatactctgcttagaaacatgtattctgagtctgggatgtggaatgaagcaaatggggtcaagaaattaatgaaatcaaggaaggtgcagaaaaatccagcctatagctgggtgcagagcggcaacaagctacaagcttttcttgttggggatgaatagtgatttttggatgatttggcattaaatggaagtgccgcagattttgacatggtgcgcctatatggaggcatgaaatggataaagtggatacagaaataccatgtgtagcattgttgatagtaacatcatctagcaatattgcagaaaaagggtttgcacgcagaagaccataattcatgcaattttcagtgaccaactaaaatcgtgacatttgacattcatgtgatgataggcagtggggtgccaacccttgcagaatgattaaccctagacaaggatccgaggcagaactcagcatggttaacaccactatcttttcaaggggaatggtaataaggagaatgagccgtttattagtgatgtaaccggcatcactgattctgccattctctcaggattaaagaacgacatgcaccaaatacagaggtacagaacctgcaggaatctttatctgatttccaatacgtatgttttgcatacactgaagcgcgcacagaggcagatgcagcactaatctag

SEQ ID NO: 63619 - DNA, 1812 bp, Zea Mays
ctatgagctatatatatttttctctttatcgaaagaaaatctgcaatacatttgcatgtctggtttgaatcatgccctatgtaacgaagaaaggatattaggtggattgggtgcaagcacgactggtgacgaaatgagcgatttaccttactgccttagaatgcacagatcagagatcagtcgtgctcagtatgttgatgttagagaactcaggatttatgtagggacatggaatgttggaggcagatttccacccagtgacttggacattgaagaatggctggctacggaggagccagctgaaatttatgttatcggctttcaagagattgttccactcaatgctgggaatatatttggtgctgaagacaatcgtccagttgcagtatgggagcacatcatccgtgaaactttgaataagaattgttcagataaatcagggtttaagtgccatagtgatcctctttcaccatcaaggtttaatccatcagatgttgttctttccatggaacatggattgcttagtgagtctgacaaggatagtgatggggagcttcatccattgattgaacgagaccataattgtggacttcaagctaaaacaaatgaaaatcttgaagctttcccagaagataatttagcctgtgatgccatcattgataatagaacaaaaaggaaaaggccagagtttgtacgtataataagcaagcaaatggtcgggatatttctttcgatttgggttcggagaagcctgcggaagcacattaagaatttgagagtatcaacagttggtgtaggcgcaataggttatattggtaacaagggatcaatatcggtcagcatgtctgtacatgagactcctttctgctttgtttgttgccacctgactgctggtgaaaaagatggagatgacctaaaaaggaattcaaatgccgaagaaatacttcgaagaacagtgtttaacccagagaatgttgtaggcatgcctatgagaatatatgaccataagcggattatatggttaggagacctcaactatcggatcaacttatcctatgaaagggcacatgaactaatctccaaacaggactgggatggattgttcgagagggatcagctgaaaagagaattgaggaaaggatgcacatttgacggttggttcgaaggagttatcagctttgccccaacatacaaatatgagtttgactcagaaaactatgtaagcgatgagagtgaatctgggagaagaactcctgcatggtgtgaccgcattctctcatacgggaagggaatcaggctactttcgtacaagaggggggagcttacactttctgatcaccgccctgtggctgcagtctacgtggcagagattgaagttttccactgatgcagagagcaggaccatctatcatcagagaaggatggatggactggttgaacaaagaggtcgccgaaccacgagatatgcaatttcctagcacaagttccaagtgaggtggtgccatgccaatgacagtttttagaattcagtcagacattgttgatttgcattattgtatcatccttcacaagcagcatatttgccatggattattttttctgcacgcttgtttgatgaagagcatctcaagcactatgctccatgacatagtatcctttgaaaaaaatgtcaaatttgttcatataatgttcttttcttgttttgaactaggaagggatggttcaacatgcttcgtgtgtcgtgcttgccaaataaccatgtttgcacgataatatgattgtctgctgctcaaaccaagacaccatccaaaa

SEQ ID NO: 63620 - DNA, 1916 bp, Zea Mays
agtccctccattttattccactttagttcctaaattgttaaatacggaaactaaaatagagttatagtttccgtatttagcaatttatgaactaaagtgaaataaaatggagggactagtaaccaaacactccctaagttcactattgcctctaaaggcatgtctggtttgaatcatgccctatgtaacgaagaaaggatattaggtggattgggtgcaagcacgactggtgacgaaatgagcgatttaccttactgccttagaatgcacagatcagagatcagtcgtgctcagtatgttgatgttagagaactcaggatttatgtagggacatggaatgttggaggcagatttccacccagtgacttggacattgaagaatggctggctacggaggagccagctgaaatttatgttatcggctttcaagagattgttccactcaatgctgggaatatatttggtgctgaagacaatcgtccagttgcagtatgggagcacatcatccgtgaaactttgaataagaattgttcagataaatcagggtttaagtgccatagtgatcctctttcaccatcaaggtttaatccatcagatgttgttctttccatggaacatggattgcttagtgagtctgacaaggatagtgatggggagcttcatccattgattgaacgagaccataattgtggacttcaagctaaaacaaatgaaaatcttgaagctttcccagaagataatttagcctgtgatgccatcattgataatagaacaaaaaggaaaaggccagagtttgtacgtataataagcaagcaaatggtcgggatatttctttcgatttgggttcggagaagcctgcggaagcacattaagaatttgagagtatcaacagttggtgtaggcgcaataggttatattggtaacaagggatcaatatcggtcagcatgtctgtacatgagactcctttctgctttgtttgttgccacctgactgctggtgaaaaagatggagatgacctaaaaaggaattcaaatgccgaagaaatacttcgaagaacagtgtttaacccagagaatgttgtaggcatgcctatgagaatatatgaccataagcggattatatggttaggagacctcaactatcggatcaacttatcctatgaaagggcacatgaactaatctccaaacaggactgggatggattgttcgagagggatcagctgaaaagagaattgaggaaaggatgcacatttgacggttggttcgaaggagttatcagctttgccccaacatacaaatatgagtttgactcagaaaactatgtaagcgatgagagtgaatctgggagaagaactcctgcatggtgtgaccgcattctctcatacgggaagggaatcaggctactttcgtacaagaggggggagcttacactttctgatcaccgccctgtggctgcagtctacgtggcagagattgaagttttccactgatgcagagagcaggaccatctatcatcagagaaggatggatggactggttgaacaaagaggtcgccgaaccacgagatatgcaatttcctagcacaagttccaagtgaggtggtgccatgccaatgacagtttttagaattcagtcagacattgttgatttgcattattgtatcatccttcacaagcagcatatttgccatggattattttttctgcacgcttgtttgatgaagagcatctcaagcactatgctccatgacatagtatcctttgaaaaaaatgtcaaatttgttcatataatgttcttttcttgttttgaactaggaagggatggttcaacatgcttcgtgtgtcgtgcttgccaaataaccatgtttgcacgataatatgattgtctgctgctcaaaccaagacaccatccaaaa

SEQ ID NO: 63621 - DNA, 2381 bp, Zea Mays
tggggtcgagagctacgatgagatggttgatgtacttcagcagaatgagaagttagaggatgcacttaagctgttcgatagaatgatgtaggagcacgaccctccacctccactgcgtccgcgcgcgccagcgcaaagaactttcgaacagcagagacgccaaccgagccccaccacggttcttgaagatagactggtcggtctatttcttggctttctagactagaaaagggaatccaactagccaaggtccaagtgaccatcacgtttcagtttcattctctgggtaggggagctgctgcagccgtgtgtatggcgtcctcttcctcctccctgacgcggttatttatcccgcctcaccgagcgcaccatgaggcagccatggccgcttcggccggcgcctctctgcgtaacggcggcgggatgcagatgctgacgaaggatcttgtgatgcagaggtgggccgagatggtgttgtgctgcggcgcggattggaattgcgtgtcgcagctgtggaacagggtggtgctgcgcaagtggctaaacatcggcgcggggtccggggattccgacttcagcgccgacgagcacgatacctcggagggcgagaccgaccgcgaaggcatgtctggtttgaatcatgccctatgtaacgaagaaaggatattaggtggattgggtgcaagcacgactggtgacgaaatgagcgatttaccttactgccttagaatgcacagatcagagatcagtcgtgctcagtatgttgatgttagagaactcaggatttatgtagggacatggaatgttggaggcagatttccacccagtgacttggacattgaagaatggctggctacggaggagccagctgaaatttatgttatcggctttcaagagattgttccactcaatgctgggaatatatttggtgctgaagacaatcgtccagttgcagtatgggagcacatcatccgtgaaactttgaataagaattgttcagataaatcagggtttaagtgccatagtgatcctctttcaccatcaaggtttaatccatcagatgttgttctttccatggaacatggattgcttagtgagtctgacaaggatagtgatggggagcttcatccattgattgaacgagaccataattgtggacttcaagctaaaacaaatgaaaatcttgaagctttcccagaagataatttagcctgtgatgccatcattgataatagaacaaaaaggaaaaggccagagtttgtacgtataataagcaagcaaatggtcgggatatttctttcgatttgggttcggagaagcctgcggaagcacattaagaatttgagagtatcaacagttggtgtaggcgcaataggttatattggtaacaagggatcaatatcggtcagcatgtctgtacatgagactcctttctgctttgtttgttgccacctgactgctggtgaaaaagatggagatgacctaaaaaggaattcaaatgccgaagaaatacttcgaagaacagtgtttaacccagagaatgttgtaggcatgcctatgagaatatatgaccataagcggattatatggttaggagacctcaactatcggatcaacttatcctatgaaagggcacatgaactaatctccaaacaggactgggatggattgttcgagagggatcagctgaaaagagaattgaggaaaggatgcacatttgacggttggttcgaaggagttatcagctttgccccaacatacaaatatgagtttgactcagaaaactatgtaagcgatgagagtgaatctgggagaagaactcctgcatggtgtgaccgcattctctcatacgggaagggaatcaggctactttcgtacaagaggggggagcttacactttctgatcaccgccctgtggctgcagtctacgtggcagagattgaagttttccactgatgcagagagcaggaccatctatcatcagagaaggatggatggactggttgaacaaagaggtcgccgaaccacgagatatgcaatttcctagcacaagttccaagtgaggtggtgccatgccaatgacagtttttagaattcagtcagacattgttgatttgcattattgtatcatccttcacaagcagcatatttgccatggattattttttctgcacgcttgtttgatgaagagcatctcaagcactatgctccatgacatagtatcctttgaaaaaaatgtcaaatttgttcatataatgttcttttcttgttttgaactaggaagggatggttcaacatgcttcgtgtgtcgtgcttgccaaataaccatgtttgcacgataatatgattgtctgctgctcaaaccaagacaccatccaaaa

SEQ ID NO: 63622 - DNA, 2460 bp, Zea Mays
ctgttaaatttttatgacatttctgtgttctaaaggacccctcattgggccacatcccaaaatcgacgataaggtttggggtcgagagctacgatgagatggttgatgtacttcagcagaatgagaagttagaggatgcacttaagctgttcgatagaatgatgtaggagcacgaccctccacctccactgcgtccgcgcgcgccagcgcaaagaactttcgaacagcagagacgccaaccgagccccaccacggttcttgaagatagactggtcggtctatttcttggctttctagactagaaaagggaatccaactagccaaggtccaagtgaccatcacgtttcagtttcattctctgggtaggggagctgctgcagccgtgtgtatggcgtcctcttcctcctccctgacgcggttatttatcccgcctcaccgagcgcaccatgaggcagccatggccgcttcggccggcgcctctctgcgtaacggcggcgggatgcagatgctggatcttgtgatgcagaggtgggccgagatggtgttgtgctgcggcgcggattggaattgcgtgtcgcagctgtggaacagggtggtgctgcgcaagtggctaaacatcggcgcggggtccggggattccgacttcagcgccgacgagcacgatacctcggagggcgagaccgaccgcgaaggcatgtctggtttgaatcatgccctatgtaacgaagaaaggatattaggtggattgggtgcaagcacgactggtgacgaaatgagcgatttaccttactgccttagaatgcacagatcagagatcagtcgtgctcagtatgttgatgttagagaactcaggatttatgtagggacatggaatgttggaggcagatttccacccagtgacttggacattgaagaatggctggctacggaggagccagctgaaatttatgttatcggctttcaagagattgttccactcaatgctgggaatatatttggtgctgaagacaatcgtccagttgcagtatgggagcacatcatccgtgaaactttgaataagaattgttcagataaatcagggtttaagtgccatagtgatcctctttcaccatcaaggtttaatccatcagatgttgttctttccatggaacatggattgcttagtgagtctgacaaggatagtgatggggagcttcatccattgattgaacgagaccataattgtggacttcaagctaaaacaaatgaaaatcttgaagctttcccagaagataatttagcctgtgatgccatcattgataatagaacaaaaaggaaaaggccagagtttgtacgtataataagcaagcaaatggtcgggatatttctttcgatttgggttcggagaagcctgcggaagcacattaagaatttgagagtatcaacagttggtgtaggcgcaataggttatattggtaacaagggatcaatatcggtcagcatgtctgtacatgagactcctttctgctttgtttgttgccacctgactgctggtgaaaaagatggagatgacctaaaaaggaattcaaatgccgaagaaatacttcgaagaacagtgtttaacccagagaatgttgtaggcatgcctatgagaatatatgaccataagtaagctgggcggattatatggttaggagacctcaactatcggatcaacttatcctatgaaagggcacatgaactaatctccaaacaggactgggatggattgttcgagagggatcagctgaaaagagaattgaggaaaggatgcacatttgacggttggttcgaaggagttatcagctttgccccaacatacaaatatgagtttgactcagaaaactatgtaagcgatgagagtgaatctgggagaagaactcctgcatggtgtgaccgcattctctcatacgggaagggaatcaggctactttcgtacaagaggggggagcttacactttctgatcaccgccctgtggctgcagtctacgtggcagagattgaagttttccactgatgcagagagcaggaccatctatcatcagagaaggatggatggactggttgaacaaagaggtcgccgaaccacgagatatgcaatttcctagcacaagttccaagtgaggtggtgccatgccaatgacagtttttagaattcagtcagacattgttgatttgcattattgtatcatccttcacaagcagcatatttgccatggattattttttctgcacgcttgtttgatgaagagcatctcaagcactatgctccatgacatagtatcctttgaaaaaaatgtcaaatttgttcatataatgttcttttcttgttttgaactaggaagggatggttcaacatgcttcgtgtgtcgtgcttgccaaataaccatgtttgcacgataatatgattgtctgctgctcaaaccaagacaccatccaaaa

SEQ ID NO: 63623 - DNA, 1404 bp, Zea Mays
gtccgactcgactgctctcttcctctctgttgcatttcccgtcctgtccttccacccggcggcttaaaccctagttctcactcccatcgccgcttcagctccgccgctgcagatggagttctggggtctcgaggtcaagcctggttccactgttaagtgtgagcctggatatggctttgtgctgcacctttcccaggctgctcttggggaatcgaagaagagtgataatgccttgatgtatgtcaaaattgatgatcagaaacttgccattggaaccctctctgttgacaagaacccacacatacaatttgatctgattttcgataaagagtttgagctgtcgcacacatcaaaaactaccagcgttttcttcactggctacaaggttgagcagccattcgaggaagatgaaatggatcttgattctgaagatgaagacgaggagctgaatgttccagtagtcaaggaaaatgctgatgagaagaaacagaaaagtcaagaaaaggcagttgctgcaccttcaaaatcaagtccggattccaagaagagcaaggatgacgacgattctgatgaggacgagactgatgattctgatgaggatgagacggacgattctgatgagggtttgtctcctgaagaaggcgatgatgattcaagtgatgaagatgataccagtgacgatgaggaggaagacactccaactcctaagaagcctgaggtaggcaagaagagagctgctgaaagttccgtgctgaaaactcctctatctgataagaaagcaaaggttgccacaccgtcatctcagaagacaggtggcaagaagggcgccgccgtccatgtggcaactccacacccagcaaaaggcaagaccattgtaaacaatgacaaatcggtcaagtctccaaaatctgcgccaaaatctggtgtcccttgcaaatcgtgcagcaagtcattcatcagtgagacggcacttcaggctcactcgaaggcgaagcatgggggcaagtgagtcgcaggtccaatagagtcaacaacaaatgcgaaacatgggagaggagggtaagcgagagtctcgaaagagtgtcggtggaagtaggcctaaccttattttgtttagagacgggctatgcgttcgatgtagcaaaacaaggctgtggtttgtgtacttcaatatttgggttgtgtgtttcgaatttttttttgaacgtgtctcggattgttgtggtgcgaattggttgtttctgtcgctatggtgagatagtgtcacgtttctttctctatttgaaagacctgtcgcattctatttcttgggaactgccagtgcttgccttgttgatttttctgcgttcgaggtagcctatgaatgtgatgatggaccaaacaaaggaaaacaccgggatctaa

SEQ ID NO: 63624 - DNA, 4603 bp, Zea Mays
ctggcgtagtggcgtgctcggagttggagtgagatcgcaaaaaccttcggcgaccacgcttcgaagtcgaagcaacccgagcgtcgcccctcgcggaccttcccgggtgcaggcggccaaggcgccaagccgcacaattaattagcataggaccgggattcgtcgttgaaggggacagcatcgtcacaggagtcttccgcggcaatggatccaggtggctgtggctctgcaatttgctcccggtatcttcgcgccatctcttcagcctcagaaaacaccttctgtagccagaaaacaacggaaaacgcgagagatcctgagcactggaacgggcatgtataaccgaaaacggtgtgtgtgtatttcttttttcagcgcaagataaaatggtgagtttttggacacccaaagttttctcacctctttgttagtgataagcaatccaggttcgctctcgaggtcctttgtgctgcacaaagccaaatagatgttgtcaggtacaccacagacttgtcgaggatcgagcagatgacctttttccatgacaagcagtagagcctacgagctatacttttgctatgttatacctcagagcaattctgtctggagttgattttatgacaagagctttcaccgtctcgccgactttcagcacatcagccacagatctcagcttgccatgtgtcatgttcgagatatgtagtaaaccactgcaaagcattacatgcttgtgaactccagatgcaaaaggcggcatacgtagaacacaacaaaaagaagcaaagtagctcatgatccagccatcgaaagaagtttatcaaaagaattggcagttttaaggcgtcaaacagatagacatgttcaggagatcaaagctacaagtaactcaaatcagtaagcttcacttattaatagcactgatgaaaggaaagatgacacctatatcaactcttagctaaagcaaagcacaattgccctctagacctaagggcagagatccttgttaacttggtgcatcttgtcattttttaaagaaaggcattgatttcaggattggtcggtaaatctcatgccacatttaatgcctttgttcaaataatccagtccaaaatgcaactcacactatctaattctaaactactcatgtatattatactctaaaatcaaatattttatgttggcttgtaaatagttgtgcatatctgaaggagtaaatcatatgaaaacatgcacaagtaagaataatttggacatgaggtgcgtagatttaccagaaaggaaattccagcatcactggtgagtggtgacaaatattgaaatggcaaggaaatggggacatggggtgcattggtgcaccagttctgaacgtacattcaggttcagccgaacaagaagaaaaatggcatctccgaaacacaggctaggtttgtacatatactcctttcttacttatgaggtgtttggtttctaaggactaatttttagtccctcaattttattccattttagtccataaattgccaaacacggaaactaaggtactaaaatggaataaaatagatggcctaaaaattagtccctagaaaccaaacacccccttaattgaaaggcagagcttctgccactttattaaaaaaaaacactagggtcttgagatgtgttaccctctgttagtctcgccaatcctaatttgtgcaccgtatggaaacaacttgcgtactgtgccttgcaagagagtcccttctctaaggcatgtcaccgcctaaagaaaattttattaagtaaaaaccatcactcatacaagttaaaatctgaaatatgtattgcaaaagctataaagatgctttacaattggagagtacttgttaaacagctctaaaatcaaagttgaagagtttcttgccttcacaagcaaccagataagttgcttaaacaaataaataacaaatatgtacttcaaacagatattgcacaagaaaaacataaaactacatggtccaggcttcaaataattagtagcagaggccaatgtagctaactcacccatgcctctttttcactaattatcaattcgttggtctcttcatcaatcctcgtaatgcagacatgcatttcttgatcaacctgtgagtgaaaaaagtttcaattcgcgaatcacattattatacttgcaagttcaaaaggtgactttgaaacagtcaatcctgatataccaagtatggaacagcataaaaccatacaagctttactttatagaacacatatgatgcataacttactttgttctttaggtcagtgaaatttcttggtctagtcatcatctcaggtttgggaaggaatgcccgaaggccctgagaaggcaaaggtgctttagctataaaattacaaaactgaaacaagtattgtagtacatatactcgtacctcaattctagatagcaagccactagcattccactcataaattttgatcttgatgggtacatttagctgttttatctgaacattggtgtgtacaaaaatagtcaaatatatatgtgaaaaggattagcatacagaaggcagtcattgatctaaaaaaattagatcaaactttctgatagagcagtagaaacgcagagctaatcacaattatgcctgttgttgtcatcaaagcaagccataatggaagcacaattgtttccatagaaaacgtttagcagacagttattacttctacaaacttcaataccccatacattttattaaaaccattctcggaacctaagatacaaatttgtataagatatatcaacaacccaccacgctttaacagcttgagcttcaagcctttgagagcaggaaataagtatattagagttatattatctggcaacaataagatggtcgagtggtcatgaactagtagtttcttttttttctcgaaaatgcaggagaattgtgtgtcaatatattaagaagaaaaaggattaaggtcctagaggaccagtacaacaacaaagggcctccttacggtggccaacaacatgcatacaagaaaccatacatgacaaataaaaactaccaaacagcaaaaagaacctgccaccccctccaaatttatttccaaaaggactaaggccatactttcctcaggccagcagccccaaccaggcaccacagcctaccatcaattttgatgtcctgagtaatagcattgggtctatttgtttcagcttataatatgcccagattatataatctagcttaaataatctaaatggaaaaaacaaacaaattattatgccaaaatacccactattgccacaccttaaacaaaaaattgttttctctattttttattgctcctgccacacaacacatgactaaaatcaacaatcaaactttcaattagttaggttgtcaaacaactacacccaaattatttaacatagattatataatccatattatttaatctcttatataatccaggttatataatctataagctgaaacaaacaggcacattgatgcttggtcatgaactagtagtttctaataatccagctctactggtagctcgaatataagcagttggtttgaactggtagtttctaatggtccagctctacttgggcagtgcgtcaaactattgataagagatcgttcgaaggacttccaacaacaaaagaaaggagcggcatagaggacctgcctcgctctgtgccacgcgacgcgccggaacagtctgcgcgctgacagcagcggccgcccgccaagtgttcggccgagaacctcagcgaacacgatcgtaccggcgcgcagcaccggcgcaactttctccttcccattcctcccgatgatcgcctccccgtccccctctcctcctcccctgaattgcctgaccacgacgccgacccgcccttccgctgcaaactccgccgcacacttggacgcgacgtcgcacgctaggtacccgaactcctccgcgggcaccggcgccgactccttggccagcatcagcgctggttcgccgctggaaccgatgtcgacgtcgagcgtcctcccgtcactccggaccacgacgccggcgacgaagtccccgggcttggggtcgtagtaactaaccccacgctcaccagcggcggacaatacatctctccttgacgcctcctccggcacctcgccatccgcggtgtctgcgcccacgtcggggtcggtgctcttcacctggaagaacttgagaaaaggcgcgagcgcttcttctgttgatgacaccggagcagactcgagctcctcctcggcctcgttatcctctgcgacggcaggtaacggcttctcgagaaggtggagctcgtcgctcccgctcccgccggcagcggagggggagatcgaggcgtggcgcggcggttgggacacaagtcttcgggagaagaagggatggctcgcggtgggggtcttggggtgctttgcttggcgtcttcgtggcgagatggacgcggcggggaggatggagacgagggagggcggcggcatggcgagcggggtagcgaacttgtgagcggacggccgtcacgcggttatctcatcccaactcgacaagcccacgaggccacgacgca

SEQ ID NO: 63625 - DNA, 708 bp, Zea Mays
gcgcgtccagatccagcggcctcagtcaccatcaccacccgcaccacacacgagcatacgcgacgactgacaaggcgaggggagcactcggcggcgatgggcggcggcggcgcacatggcggcaccacctacaagggctacaccatcccgcacaacaagcgctggcacaccgtcgccggcaagggcctctgcgccgtgatgtggttctgggttttctacagggctaagcaggatggtgctacgctcttgggtttgcgtcatccttgggatggacatgatgaccactctcatggtcatggacacgggcatgaggcatcatcatcgtcatcttcacattaagttccttactggctgcggacgatgcttggcatgttccaacagctaaagtttgattaatatgctgtggaaaagaatctggtgcacgttgatgttctttatgatctgttgttcagtacattgctctgcttcgttgctacgttaagaatatatatatactaacatcagaaaaatgtatgtattttatgggcttaatagattcagaactgggaagatgaatgggcagctatgctggtgttttcctttttggtcgatgttgggcgaagttttgccagcacgcttggcagcgaagtactaatcgataacccggaaattctgatacgccacaagcacttccgaggtcgacctcatctggtcctaagctacaggaca

SEQ ID NO: 63626 - DNA, 2003 bp, Zea Mays
atcgcactgatggtggtgggcagtgcggaccctgtggtggcgatagggtttcgtgccctgctaaggtggctgcacacgccgtcattcgcgacggtttctccgcaagaggtttcaggttccagcccagcggaagtgcagaattttgtgcagggcagctggacagcatctgctaactggaactggatagtcgatcccctgaacggtgataaattcatcaaagttgctgaggttcagggaacagaaataaagccattcgtggagagtttatctaaatgcccaaagcatggacttcacaacccacttaaagctccagagaggtacctcatgtatggagatatatctgcaaaagctgcgcatatgctgggccaacctgcagtcttagatttctttgctaaacttatccagagggtatctcccaagagctaccaacaagctcttgcagaagttcaagtttctcaaaagtttttggaaaacttttgtggagaccaggtacgctttctggcaaggtcatttgctgtaccaggtaaccatcttggacaaagaagtaatggctaccgttggccatatggcccagttgcaattatcacaccattcaattttccgttggagatccccttactacaattgatgggagcactatacatgggaaataaaccagtactcaaggttgacagcaaggttagcattgtgatggaacaaatgattaggttgcttcatgattgtggattgccagcagaggatatggatttcataaattctgatggtgccgtaatgaacaagcttctgttagaggctaatccgaaaatgacccttttcactgggagttcacgggtagcagagaaattggctgctgatttgaaaggccgagttaaattggaggatgctggttttgattggaaaattcttggtccagatgttcaagaggttgattatgttgcatgggtttgcgatcaggatgcttatgcttgtagcggtcagaaatgctctgctcagtctgttctattcatgcacaagaattggtcttctagtggtctgcttgagaaaatgaagaaactttctgaaagaaggaagcttgaagatttaacaattggtccagtccttacagttactacagaagccatgatagagcacatgaacaaccttctcaaaataagaggatcaaaggttctgtttggtggtgaaccgttagcgaatcactcaattcccaaaatttatggtgccatgaagcctactgctgtatttgttcctctagaagaaattctaaaaagtgggaacttcgagcttgtgacaaaggagatatttggtccattccaggtagtcacagaatactctgaggatcagcttgagttggtcttagaagcctgcgaaaggatgaatgcgcatctgacagctgcagttgtctcaaacgacccgctattcctgcaggatgtacttgggagatccgttaacgggacaacctacgccggaattcgagcgaggaccacgggcgctccacagaaccactggtttggcccggccggtgatccgcgaggcgcagggatcgggactccggaagccatcaaacttgtctggtcctgccacagggaagtcatatatgacgtcgggcccgtgcccgagagctgggcgcttccttccgcgacctgattagctagacgaggatagactattccatgtcatcacgagaaataaaaggggaagataagcgaagccagcaggactggagcgaccgaccgagagcgagtggctgcatgcctaggcattcattctctgcacgcaactgcactttcaaccctggagaaaacataataaatgctcgttcccctgtacttgagatacatggtacttggaccggaacgtcggacaactcgtctgttcgcagctgcactgggttatcttcttaggccttatttgtttattatatattctaacaaattttatattaacacttagtttaaaatttgttagattatataatctaaatagattataattttaaacaaaca

SEQ ID NO: 63627 - DNA, 2180 bp, Zea Mays
aacacgaggagagactgcggcagcggagtgcagagagcggacgcaacgcaacaccgcccactctctgtcactgacgatcgaagtgaggagcgcactgaagccagccgccgatgagtcgcctcctctcgcggcagcaccttgccgccgtccgtcgatctgcaccctttgcgtgcgtgtccaggtggctgcacacgccgtcattcgcgacggtttctccgcaagaggtttcaggttccagcccagcggaagtgcagaattttgtgcagggcagctggacagcatctgctaactggaactggatagtcgatcccctgaacggtgataaattcatcaaagttgctgaggttcagggaacagaaataaagccattcgtggagagtttatctaaatgcccaaagcatggacttcacaacccacttaaagctccagagagctctaatgtgcaggtacctcatgtatggagatatatctgcaaaagctgcgcatatgctgggccaacctgcagtcttagatttctttgctaaacttatccagagggtatctcccaagagctaccaacaagctcttgcagaagttcaagtttctcaaaagtttttggaaaacttttgtggagaccaggtacgctttctggcaaggtcatttgctgtaccaggtaaccatcttggacaaagaagtaatggctaccgttggccatatggcccagttgcaattatcacaccattcaattttccgttggagatccccttactacaattgatgggagcactatacatgggaaataaaccagtactcaaggttgacagcaaggttagcattgtgatggaacaaatgattaggttgcttcatgattgtggattgccagcagaggatatggatttcataaattctgatggtgccgtaatgaacaagcttctgttagaggctaatccgaaaatgacccttttcactgggagttcacgggtagcagagaaattggctgctgatttgaaaggccgagttaaattggaggatgctggttttgattggaaaattcttggtccagatgttcaagaggttgattatgttgcatgggtttgcgatcaggatgcttatgcttgtagcggtcagaaatgctctgctcagtctgttctattcatgcacaagaattggtcttctagtggtctgcttgagaaaatgaagaaactttctgaaagaaggaagcttgaagatttaacaattggtccagtccttacagtaagtcaggggcggagccagcccttttttgggggtcagctgaccccggttactacagaagccatgatagagcacatgaacaaccttctcaaaataagaggatcaaaggttctgtttggtggtgaaccgttagcgaatcactcaattcccaaaatttatggtgccatgaagcctactgctgtatttgttcctctagaagaaattctaaaaagtgggaacttcgagcttgtgacaaaggagatatttggtccattccaggtagtcacagaatactctgaggatcagcttgagttggtcttagaagcctgcgaaaggatgaatgcgcatctgacagctgcagttgtctcaaacgacccgctattcctgcaggatgtacttgggagatccgttaacgggacaacctacgccggaattcgagcgaggaccacgggcgctccacagaaccactggtttggcccggccggtgatccgcgaggcgcagggatcgggactccggaagccatcaaacttgtctggtcctgccacagggaagtcatatatgacgtcgggcccgtgcccgagagctgggcgcttccttccgcgacctgattagctagacgaggatagactattccatgtcatcacgagaaataaaaggggaagataagcgaagccagcaggactggagcgaccgaccgagagcgagtggctgcatgcctaggcattcattctctgcacgcaactgcactttcaaccctggagaaaacataataaatgctcgttcccctgtacttgagatacatggtacttggaccggaacgtcggacaactcgtctgttcgcagctgcactgggttatcttcttaggccttatttgtttattatatattctaacaaattttatattaacacttagtttaaaatttgttagattatataatctaaatagattataattttaaacaaaca

SEQ ID NO: 63628 - DNA, 2114 bp, Zea Mays
aacacgaggagagactgcggcagcggagtgcagagagcggacgcaacgcaacaccgcccactctctgtcactgacgatcgaagtgaggagcgcactgaagccagccgccgatgagtcgcctcctctcgcggcagcaccttgccgccgtccgtcgatctgcaccctttgcgtgcgtgtccaggtggctgcacacgccgtcattcgcgacggtttctccgcaagaggtttcaggttccagcccagcggaagtgcagaattttgggcagctggacagcatctgctaactggaactggatagtcgatcccctgaacggtgataaattcatcaaagttgctgaggttcagggaacagaaataaagccattcgtggagagtttatctaaatgcccaaagcatggacttcacaacccacttaaagctccagagaggtacctcatgtatggagatatatctgcaaaagctgcgcatatgctgggccaacctgcagtcttagatttctttgctaaacttatccagagggtatctcccaagagctaccaacaagctcttgcagaagttcaagtttctcaaaagtttttggaaaacttttgtggagaccaggtacgctttctggcaaggtcatttgctgtaccaggtaaccatcttggacaaagaagtaatggctaccgttggccatatggcccagttgcaattatcacaccattcaattttccgttggagatccccttactacaattgatgggagcactatacatgggaaataaaccagtactcaaggttgacagcaaggttagcattgtgatggaacaaatgattaggttgcttcatgattgtggattgccagcagaggatatggatttcataaattctgatggtgccgtaatgaacaagcttctgttagaggctaatccgaaaatgacccttttcactgggagttcacgggtagcagagaaattggctgctgatttgaaaggccgagttaaattggaggatgctggttttgattggaaaattcttggtccagatgttcaagaggttgattatgttgcatgggtttgcgatcaggatgcttatgcttgtagcggtcagaaatgctctgctcagtctgttctattcatgcacaagaattggtcttctagtggtctgcttgagaaaatgaagaaactttctgaaagaaggaagcttgaagatttaacaattggtccagtccttacagttactacagaagccatgatagagcacatgaacaaccttctcaaaataagaggatcaaaggttctgtttggtggtgaaccgttagcgaatcactcaattcccaaaatttatggtgccatgaagcctactgctgtatttgttcctctagaagaaattctaaaaagtgggaacttcgagcttgtgacaaaggagatatttggtccattccaggtagtcacagaatactctgaggatcagcttgagttggtcttagaagcctgcgaaaggatgaatgcgcatctgacagctgcagttgtctcaaacgacccgctattcctgcaggatgtacttgggagatccgttaacgggacaacctacgccggaattcgagcgaggaccacgggcgctccacagaaccactggtttggcccggccggtgatccgcgaggcgcagggatcgggactccggaagccatcaaacttgtctggtcctgccacagggaagtcatatatgacgtcgggcccgtgcccgagagctgggcgcttccttccgcgacctgattagctagacgaggatagactattccatgtcatcacgagaaataaaaggggaagataagcgaagccagcaggactggagcgaccgaccgagagcgagtggctgcatgcctaggcattcattctctgcacgcaactgcactttcaaccctggagaaaacataataaatgctcgttcccctgtacttgagatacatggtacttggaccggaacgtcggacaactcgtctgttcgcagctgcactgggttatcttcttaggccttatttgtttattatatattctaacaaattttatattaacacttagtttaaaatttgttagattatataatctaaatagattataattttaaacaaaca

SEQ ID NO: 63629 - DNA, 2127 bp, Zea Mays
aacacgaggagagactgcggcagcggagtgcagagagcggacgcaacgcaacaccgcccactctctgtcactgacgatcgaagtgaggagcgcactgaagccagccgccgatgagtcgcctcctctcgcggcagcaccttgccgccgtccgtcgatctgcaccctttgcgtgcgtgtccaggtggctgcacacgccgtcattcgcgacggtttctccgcaagaggtttcaggttccagcccagcggaagtgcagaattttgggcagctggacagcatctgctaactggaactggatagtcgatcccctgaacggtgataaattcatcaaagttgctgaggttcagggaacagaaataaagccattcgtggagagtttatctaaatgcccaaagcatggacttcacaacccacttaaagctccagagagctctaatgtgcaggtacctcatgtatggagatatatctgcaaaagctgcgcatatgctgggccaacctgcagtcttagatttctttgctaaacttatccagagggtatctcccaagagctaccaacaagctcttgcagaagttcaagtttctcaaaagtttttggaaaacttttgtggagaccaggtacgctttctggcaaggtcatttgctgtaccaggtaaccatcttggacaaagaagtaatggctaccgttggccatatggcccagttgcaattatcacaccattcaattttccgttggagatccccttactacaattgatgggagcactatacatgggaaataaaccagtactcaaggttgacagcaaggttagcattgtgatggaacaaatgattaggttgcttcatgattgtggattgccagcagaggatatggatttcataaattctgatggtgccgtaatgaacaagcttctgttagaggctaatccgaaaatgacccttttcactgggagttcacgggtagcagagaaattggctgctgatttgaaaggccgagttaaattggaggatgctggttttgattggaaaattcttggtccagatgttcaagaggttgattatgttgcatgggtttgcgatcaggatgcttatgcttgtagcggtcagaaatgctctgctcagtctgttctattcatgcacaagaattggtcttctagtggtctgcttgagaaaatgaagaaactttctgaaagaaggaagcttgaagatttaacaattggtccagtccttacagttactacagaagccatgatagagcacatgaacaaccttctcaaaataagaggatcaaaggttctgtttggtggtgaaccgttagcgaatcactcaattcccaaaatttatggtgccatgaagcctactgctgtatttgttcctctagaagaaattctaaaaagtgggaacttcgagcttgtgacaaaggagatatttggtccattccaggtagtcacagaatactctgaggatcagcttgagttggtcttagaagcctgcgaaaggatgaatgcgcatctgacagctgcagttgtctcaaacgacccgctattcctgcaggatgtacttgggagatccgttaacgggacaacctacgccggaattcgagcgaggaccacgggcgctccacagaaccactggtttggcccggccggtgatccgcgaggcgcagggatcgggactccggaagccatcaaacttgtctggtcctgccacagggaagtcatatatgacgtcgggcccgtgcccgagagctgggcgcttccttccgcgacctgattagctagacgaggatagactattccatgtcatcacgagaaataaaaggggaagataagcgaagccagcaggactggagcgaccgaccgagagcgagtggctgcatgcctaggcattcattctctgcacgcaactgcactttcaaccctggagaaaacataataaatgctcgttcccctgtacttgagatacatggtacttggaccggaacgtcggacaactcgtctgttcgcagctgcactgggttatcttcttaggccttatttgtttattatatattctaacaaattttatattaacacttagtttaaaatttgttagattatataatctaaatagattataattttaaacaaaca

SEQ ID NO: 63630 - DNA, 2107 bp, Zea Mays
aacacgaggagagactgcggcagcggagtgcagagagcggacgcaacgcaacaccgcccactctctgtcactgacgatcgaagtgaggagcgcactgaagccagccgccgatgagtcgcctcctctcgcggcagcaccttgccgccgtccgtcgatctgcaccctttgcgtggctgcacacgccgtcattcgcgacggtttctccgcaagaggtttcaggttccagcccagcggaagtgcagaattttgtgcagggcagctggacagcatctgctaactggaactggatagtcgatcccctgaacggtgataaattcatcaaagttgctgaggttcagggaacagaaataaagccattcgtggagagtttatctaaatgcccaaagcatggacttcacaacccacttaaagctccagagaggtacctcatgtatggagatatatctgcaaaagctgcgcatatgctgggccaacctgcagtcttagatttctttgctaaacttatccagagggtatctcccaagagctaccaacaagctcttgcagaagttcaagtttctcaaaagtttttggaaaacttttgtggagaccaggtacgctttctggcaaggtcatttgctgtaccaggtaaccatcttggacaaagaagtaatggctaccgttggccatatggcccagttgcaattatcacaccattcaattttccgttggagatccccttactacaattgatgggagcactatacatgggaaataaaccagtactcaaggttgacagcaaggttagcattgtgatggaacaaatgattaggttgcttcatgattgtggattgccagcagaggatatggatttcataaattctgatggtgccgtaatgaacaagcttctgttagaggctaatccgaaaatgacccttttcactgggagttcacgggtagcagagaaattggctgctgatttgaaaggccgagttaaattggaggatgctggttttgattggaaaattcttggtccagatgttcaagaggttgattatgttgcatgggtttgcgatcaggatgcttatgcttgtagcggtcagaaatgctctgctcagtctgttctattcatgcacaagaattggtcttctagtggtctgcttgagaaaatgaagaaactttctgaaagaaggaagcttgaagatttaacaattggtccagtccttacagttactacagaagccatgatagagcacatgaacaaccttctcaaaataagaggatcaaaggttctgtttggtggtgaaccgttagcgaatcactcaattcccaaaatttatggtgccatgaagcctactgctgtatttgttcctctagaagaaattctaaaaagtgggaacttcgagcttgtgacaaaggagatatttggtccattccaggtagtcacagaatactctgaggatcagcttgagttggtcttagaagcctgcgaaaggatgaatgcgcatctgacagctgcagttgtctcaaacgacccgctattcctgcaggatgtacttgggagatccgttaacgggacaacctacgccggaattcgagcgaggaccacgggcgctccacagaaccactggtttggcccggccggtgatccgcgaggcgcagggatcgggactccggaagccatcaaacttgtctggtcctgccacagggaagtcatatatgacgtcgggcccgtgcccgagagctgggcgcttccttccgcgacctgattagctagacgaggatagactattccatgtcatcacgagaaataaaaggggaagataagcgaagccagcaggactggagcgaccgaccgagagcgagtggctgcatgcctaggcattcattctctgcacgcaactgcactttcaaccctggagaaaacataataaatgctcgttcccctgtacttgagatacatggtacttggaccggaacgtcggacaactcgtctgttcgcagctgcactgggttatcttcttaggccttatttgtttattatatattctaacaaattttatattaacacttagtttaaaatttgttagattatataatctaaatagattataattttaaacaaaca

SEQ ID NO: 63631 - DNA, 2167 bp, Zea Mays
aacacgaggagagactgcggcagcggagtgcagagagcggacgcaacgcaacaccgcccactctctgtcactgacgatcgaagtgaggagcgcactgaagccagccgccgatgagtcgcctcctctcgcggcagcaccttgccgccgtccgtcgatctgcaccctttgcgtgcgtgtccaggtggctgcacacgccgtcattcgcgacggtttctccgcaagaggtttcaggttccagcccagcggaagtgcagaattttgtgcagggcagctggacagcatctgctaactggaactggatagtcgatcccctgaacggtgataaattcatcaaagttgctgaggttcagggaacagaaataaagccattcgtggagagtttatctaaatgcccaaagcatggacttcacaacccacttaaagctccagagaggtacctcatgtatggagatatatctgcaaaagctgcgcatatgctgggccaacctgcagtcttagatttctttgctaaacttatccagagggtatctcccaagagctaccaacaagctcttgcagaagttcaagtttctcaaaagtttttggaaaacttttgtggagaccaggtacgctttctggcaaggtcatttgctgtaccaggtaaccatcttggacaaagaagtaatggctaccgttggccatatggcccagttgcaattatcacaccattcaattttccgttggagatccccttactacaattgatgggagcactatacatgggaaataaaccagtactcaaggttgacagcaaggttagcattgtgatggaacaaatgattaggttgcttcatgattgtggattgccagcagaggatatggatttcataaattctgatggtgccgtaatgaacaagcttctgttagaggctaatccgaaaatgacccttttcactgggagttcacgggtagcagagaaattggctgctgatttgaaaggccgagttaaattggaggatgctggttttgattggaaaattcttggtccagatgttcaagaggttgattatgttgcatgggtttgcgatcaggatgcttatgcttgtagcggtcagaaatgctctgctcagtctgttctattcatgcacaagaattggtcttctagtggtctgcttgagaaaatgaagaaactttctgaaagaaggaagcttgaagatttaacaattggtccagtccttacagtaagtcaggggcggagccagcccttttttgggggtcagctgaccccggttactacagaagccatgatagagcacatgaacaaccttctcaaaataagaggatcaaaggttctgtttggtggtgaaccgttagcgaatcactcaattcccaaaatttatggtgccatgaagcctactgctgtatttgttcctctagaagaaattctaaaaagtgggaacttcgagcttgtgacaaaggagatatttggtccattccaggtagtcacagaatactctgaggatcagcttgagttggtcttagaagcctgcgaaaggatgaatgcgcatctgacagctgcagttgtctcaaacgacccgctattcctgcaggatgtacttgggagatccgttaacgggacaacctacgccggaattcgagcgaggaccacgggcgctccacagaaccactggtttggcccggccggtgatccgcgaggcgcagggatcgggactccggaagccatcaaacttgtctggtcctgccacagggaagtcatatatgacgtcgggcccgtgcccgagagctgggcgcttccttccgcgacctgattagctagacgaggatagactattccatgtcatcacgagaaataaaaggggaagataagcgaagccagcaggactggagcgaccgaccgagagcgagtggctgcatgcctaggcattcattctctgcacgcaactgcactttcaaccctggagaaaacataataaatgctcgttcccctgtacttgagatacatggtacttggaccggaacgtcggacaactcgtctgttcgcagctgcactgggttatcttcttaggccttatttgtttattatatattctaacaaattttatattaacacttagtttaaaatttgttagattatataatctaaatagattataattttaaacaaaca

SEQ ID NO: 63632 - DNA, 3254 bp, Zea Mays
gaccctccccagcggcgtgacgagtcgtggagacctgcccgctacggcgcagccagccccaggccaatcccctcttcccacctcgctcgcttcttcttccttcccttcccctccccgttcccccccacctgctctgcctgcttctttccccctccccacgcgcgcgcaccatcggcttcctcatcacccaccccaccgagactgtactctgtagccataccacacccctcctaccactgcaaggccggccggcccgcccgctcgccgcttcctcgcgtctcgagtccgtgcctgcctggtgcgtcgatcgaccccgagtcccgaccccggccgcctctcacggtggtggtggtggttcttcgacgccgcggtgggcggggggcacgcgtgtggttcgtgcaagccggagggagggggttctgctgtgactgtgatggcggcggcgatgtgcgtggatgacgaggccgcctccgccgccgcggaaagcgcgggggtcgacaagctggatctcggcgcggccgcgggcggcaagaggagcgtctacctcatggactgcgcgccggtctggggctgcgcgtccacgcgcggccgcagcgccgagatggaggacgcctgcgccgcggccccgcggttcgccgacgtgccggtgcgcctcctcgccagccgcagggacctcgacggcctgggcctcgacgccggcgcgctccgcctgccggcgcacctgttcggcgtcttcgacggccacggcggtgccgaggtggccaactactgccgggagaggctccaggtactcttgaggcaggagctgaggctactcggcgaggatttggggcagattagctgcgacgtggacatgaaggagcactgggacgagctgttcaccggatgcttccagaggctggatgacgaggtgtcagggcaggcgagcaggctcgtcggtgccgtccaggagtcacggccggtggccgccgagaacgtgggctccactgcggttgtcgccgtcgtgtgctcatcccatgtggtggtcgccaactgcggggattcgcgtgccgttctctgccgtgggaaggagccagtagagctgtcgattgatcacaaggtgagcctttgcttttgcttggagcgaggcatgatggcgatcgtgcgattcacccgtggttgtttcagcctgacaggaaggatgagcgcgcgaggattgaggccctgggaggcaaggtcatccaatggaacggctatagggtctccggtatacttgctatgtcaagatcgattggtatgtatattggttcctcagctagatcttggtagaatgactctttttaagtgagatggaaattatagttgtagcaacatgaaaatgcttatgctgttgcaaccactttttattctgagttccatagtttaaccactttttttattcgagttccatggtataagatgagctctcaagacacctacatcaatgcaaccctaccgttgttatgagacatctaagaagctcaatcatacaatggagggtttttaaaatcaaccatattataaatgctctcaagagattatgttgtgtatgaagagtcgtgtagagacgcgctattcgcgaatagccgtttcttgtgttttttacatttaacccctagagacccctcaaaagacgggtattaaatgaggttatacataccattaagaaacagagaataaaaatacattctttgtaattcgatctagaaatagttatgcctcatatactagtacggagggagtagtcaagtacactctgtagcgtggtgactttgtgtaagttaggatcaaaatctaagcaaccagttgctgtaggaattgtttttttggtggtattattatctctatctatacgatctagagaaccatgttcaatctaatggaataaggtttcgtattgacctaggcaattttccctgggattagtcattttgttgaaagactctgtactatactctgtagcgtggtgatttttgctagatggcatgcttccatttaggaagaagagatacttttcatctgccctcatgtttacaattaccatgctgtagttgttctatataataaaataagtgtttactctatcagcgatttggtttaaacagcttgtttcgatccgagatagggagcatgatagatttaaagcgctactgaaatcatgttctgggatttgactgtctggatattggctataatccaatcagtgaagttgtaaaaatgagcttttaagtatatttctatggcatagaacacagaatgcagatgtgattaggaaaagaagttcttcgctgttgaaaagccatctttaatcgacacgacaaaggggaccgatatttgaaaccattcgtcattccaaaaccagaagtcaccgttgttcctagggcgaaagatgacgactgcctcattcttgcaagtgatgggctgtgggatgtagtgtcgaatgaagaggcatgcaaagctgcgcgtcggcagatccagctgtggcacaagaacaacggtgtcacatcatcattgtgtgacgagggtgatgaatccaatgatcctgctgcacaagctgctgctgattatcttatgaggctcgcactgaagaagggtaccgaggacaatatcactgtcattgtggttgacttgaaacctcgaaagaaggccaagagcaactcataacactgggatggatccatcacggtagagctgaccatgatatgtccaaaggcttctgctgctagttgttggtcgtccgcaagagacttgaccccacaggtttttttcgttgggcctcaagaactgtaggtgcattttccatggagggttatgatgcttaaccccactctggtttctgatggctaaaacattctctccagtcggcttctaccatgagccctggcacttagtatatccctaatgttgtatgatagttgaacttgtaaagagacaagcggctgagacggtcactaaaattaacatattgttacttcatgattcaaggactatccatctgcctgaatccgatgaaagttttgtattgcagcttcaagtgtgtgcccacctatatatacagtttgattgggtacatatacatgattagttgggtgtacctccctaacatggctctttgtatgcgttgactagctccgagagcatgttgggttaactgcacgcactcgattagacatgcatgatgcaactcacgtatttgcggtagctttttgcctacatacgccgatacaggtaaaaat

SEQ ID NO: 63633 - DNA, 2477 bp, Zea Mays
ggaaacgccgttttcagctacagcctacagatcctgcgtacgtgagcaacggaacagttggctgcatacccgtacagtacgtgccctgcgtaccaggaaaaaagtcaggaaaaaatccgtaccccctccgagtgtcaggcttctcgtgaagatcggacacgcagggccagagcagagcagtgccactgctacactgagtcactgacaaaccggcacgaagtggtcagtcagtcagtcgcacaggaacagcgacccacatgcgagcgaatgggagcgcaacaggtagcagagacgaggggaggcgcgcacgcgagcaagcactggtacggtacaagacaaataatatcaagcgccacgcggaccctccccagcggcgtgacgagtcgtggagacctgcccgctacggcgcagccagccccaggccaatcccctcttcccacctcgctcgcttcttcttccttcccttcccctccccgttcccccccacctgctctgcctgcttctttccccctccccacgcgcgcgcaccatcggcttcctcatcacccaccccaccgagactgtactctgtagccataccacacccctcctaccactgcaaggccggccggcccgcccgctcgccgcttcctcgcgtctcgagtccgtgcctgcctggtgcgtcgatcgaccccgagtcccgaccccggccgcctctcacggtggtggtggtggttcttcgacgccgcggtgggcggggggcacgcgtgtggttcgtgcaagccggagggagggggttctgctgtgactgtgatggcggcggcgatgtgcgtggatgacgaggccgcctccgccgccgcggaaagcgcgggggtcgacaagctggatctcggcgcggccgcgggcggcaagaggagcgtctacctcatggactgcgcgccggtctggggctgcgcgtccacgcgcggccgcagcgccgagatggaggacgcctgcgccgcggccccgcggttcgccgacgtgccggtgcgcctcctcgccagccgcagggacctcgacggcctgggcctcgacgccggcgcgctccgcctgccggcgcacctgttcggcgtcttcgacggccacggcggtgccgaggtggccaactactgccgggagaggctccaggtactcttgaggcaggagctgaggctactcggcgaggatttggggcagattagctgcgacgtggacatgaaggagcactgggacgagctgttcaccggatgcttccagaggctggatgacgaggtgtcagggcaggcgagcaggctcgtcggtgccgtccaggagtcacggccggtggccgccgagaacgtgggctccactgcggttgtcgccgtcgtgtgctcatcccatgtggtggtcgccaactgcggggattcgcgtgccgttctctgccgtgggaaggagccagtagagctgtcgattgatcacaagcctgacaggaaggatgagcgcgcgaggattgaggccctgggaggcaaggtcatccaatggaacggctatagggtctccggtatacttgctatgtcaagatcgattggggaccgatatttgaaaccattcgtcattccaaaaccagaagtcaccgttgttcctagggcgaaagatgacgactgcctcattcttgcaagtgatgggctgtgggatgtagtgtcgaatgaagaggcatgcaaagctgcgcgtcggcagatccagctgtggcacaagaacaacggtgtcacatcatcattgtgtgacgagggtgatgaatccaatgatcctgctgcacaagctgctgctgattatcttatgaggctcgcactgaagaagggtaccgaggacaatatcactgtcattgtggttgacttgaaacctcgaaagaaggccaagagcaactcataacactgggatggatccatcacggtagagctgaccatgatatgtccaaaggcttctgctgctagttgttggtcgtccgcaagagacttgaccccacaggtttttttcgttgggcctcaagaactgtaggtgcattttccatggagggttatgatgcttaaccccactctggtttctgatggctaaaacattctctccagtcggcttctaccatgagccctggcacttagtatatccctaatgttgtatgatagttgaacttgtaaagagacaagcggctgagacggtcactaaaattaacatattgttacttcatgattcaaggactatccatctgcctgaatccgatgaaagttttgtattgcagcttcaagtgtgtgcccacctatatatacagtttgattgggtacatatacatgattagttgggtgtacctccctaacatggctctttgtatgcgttgactagctccgagagcatgttgggttaactgcacgcactcgattagacatgcatgatgcaactcacgtatttgcggtagctttttgcctacatacgccgatacaggtaaaaat

SEQ ID NO: 63634 - DNA, 3282 bp, Zea Mays
gctagttgtgccactgccgtgcctacggccgattgggcgtctatagcagcagcagtgagcacgggtgcacggccatcactcccatcggcagcagggtcaaccactgccaccggcgcacgcagctgtgcacgaggtctcctcacccaccggccgccgcgtccggacccagcccggcaactcgcacctcctcctcctgctgccgcccgcgcgcttggccccgtgctcacacggggggtcgatcagtagaacatcctgctcacggcgttccccgacgcgtggctcgtaaggcactcttcccgcggtacaagtgcgacccacggtgctggcggagaggaacctagcagcggaagatcgagttcagggatggcttctggtggaaccttccggaaccttctcctggtgctccccctctacctcgcgctcgcctcgttggtcggtggcgaggcctcgaggaggttctggatcgagaacgatacctttaggaaggatggagtaccgttccaaatcgtcggtggcgatgttcactatttccgcattgttcctgagtactggaaggatcgccttttaagagcaaaagcattaggcttgaacacaattcaaacatatgtaccttggaatttgcatgagccagaaccacagagctggaaattcaagggcttcacagacattgaatcatatctgagacttgctcaagaactagaaatgctggtcatgcttcgtgtagggccatacatttgtggagaatgggacttaggaggttttccaccttggttgctcaccatagaaccagcccttaaactgcgttcatcagattcgtcctatctttccttggtggagagatggtggggagtactacttctgaaagtggcaccattattatacaataatggaggtccagttattatggttcagattgaaaatgaatttggttcttttggagatgataagaattaccttcatcaccttgttcaactggccaggagatatcttggaaacgacattattctgactataaattcactacttctgctcctaccattctgaagtgtgcctttgagattattctttatggttaagtaaatgggccaagctcaataaattccaacaatcccccaccagatcttgaaggaacaacataaccaactctccgcatttcctcaaatattgtttatatactagttttatggtagagattgttaagttaaacatccatctagactcaagagttatacaactgatgggggcgccttgggtaatttaaagaatggatcaattcctcaagatgacgtttttgctgctgttgattttgaaactggatccaatccatggcccatattcaaattacagaagaaatacaacttgccaggaaaatcagtccctttaagttcggaattttatactggatggctaacacactggggtgaaagaatcgcaacaacagatgctactagtacagctaaagcccttaaaaccattttgtgccacaatggttctgctgtactttatgtctgtcactggagcccattcatcagtgcattgcatttgcagtctaggtctattaattctatttcttcatgaggttgtccagatggctcatggcgggaccaattttggattttataatggtgcaaacactggtcaagatgaatctgattacaaggcagacctcacttcttatgactatgatgcaccgattaaggagcatggagatgtgcataatgcaaaatacaaagcgctaagaagagtaatacatgagtgtactgggactcctctccatccacttcctgctaacattaaaaaagcaagttacgggattatgaaattacaaaaggttgtttctctgtttgacatcattgataatatcaatgatcctctgaaagtttctgtttcggagcatccactttatatggaacagataggccagatgtttggatttctcctgtacatgtcagaataccaagggaaactcccatcaagcatcctgtcaattccaaaggtacatgacagagctcaggtgtttgtgtcttgctcagctggtgttagaaccctaagatattgtggtgtaattgaaagatggtctaataaaacactagagataccgaacttaagatgttcatctaagaccagcctatatatcctggtagaaaatatgggtcgtgtaaattatgggccatatatttttgaccggaagtgaccagttttgaaatacagggaatactatctcctattcaaatagatggcattactctccgtcactggaaaatgtatccactggcactcaattcactggacatccttccaaaacttcaactaatcactcaaataccttatgctggagccagtaaaatgtccattcatggagactcagaaaagattttacaggactcgtcatgctgttcaaatgaaagcacttctgcggagcctgcgttttatgaaggccatttccgtattgacaacgagactgagataaaggatacattcatatcgtttcgtggttggaacaaaggtgttgcttttgtgaacaacttcaacattggaagattttggccggcatgcggaccacagtgtaccctttatgttccagcgcctatcctcagacctggggataacattgttgtaatctttgaactgcatgctccaaatcatgagctcactatcgattttaccacggatccggatttcacgtgcggtccagaacagtgaaaaagggttgcacgtggacgtggtgtacatactgttacatagcagtacagtgcagtgttctgtccttcctcttgcttttctacgtcggtgctggtatagaatgggtaaatctgctctaggacactactctataaacgtggtattggctactggacactgctcaattgtgtacctttgatagctggatttgctgttgggtaccaaagaaaaaataaaatatcagggacagatcgtgaattctccactttgctccctgtccaaatgggggcccagcagtcacttctccattttggcaagccacaccgagctccgctacgccctgcgggggtgcagcacgatgtggattcctatgcacggggaacggctgtccgttacgacgacggacacggccgtggcggcgatgcccgggcacgacgcacgcgagatgctcgacgttagattgcctccaacaagacaatgtaaatgacactgaacgctaaatttagaggagaaagacatccgttatctctctaacaacagactgcaaacgaatcggtaaaatatagcgcacgtacggtgtactctaaatctagagtactt

SEQ ID NO: 63635 - DNA, 3176 bp, Zea Mays
gctagttgtgccactgccgtgcctacggccgattgggcgtctatagcagcagcagtgagcacgggtgcacggccatcactcccatcggcagcagggtcaaccactgccaccggcgcacgcagctgtgcacgaggtctcctcacccaccggccgccgcgtccggacccagcccggcaactcgcacctcctcctcctgctgccgcccgcgcgcttggccccgtgctcacacggggggtcgatcagtagaacatcctgctcacggcgttccccgacgcgtggctcgtaaggcactcttcccgcggtacaagtgcgacccacggtgctggcggagaggaacctagcagcggaagatcgagttcagggatggcttctggtggaaccttccggaaccttctcctggtgctccccctctacctcgcgctcgcctcgttggtcggtggcgaggcctcgaggaggttctggatcgagaacgatacctttaggaaggatggagtaccgttccaaatcgtcggtggcgatgttcactatttccgcattgttcctgagtactggaaggatcgccttttaagagcaaaagcattaggcttgaacacaattcaaacatatgtaccttggaatttgcatgagccagaaccacagagctggaaattcaagggcttcacagacattgaatcatatctgagacttgctcaagaactagaaatgctggtcatgcttcgtgtagggccatacatttgtggagaatgggacttaggaggttttccaccttggttgctcaccatagaaccagcccttaaactgcgttcatcagattcgtcctatctttccttggtggagagatggtggggagtactacttctgaaagtggcaccattattatacaataatggaggtccagttattatggttcagattgaaaatgaatttggttcttttggagatgataagaattaccttcatcaccttgttcaactggccaggagatatcttggaaacgacattattctgactataaattcactacttctgctcctaccattctgaagtgtgcctttgagattattctttatggttaagtaaatgggccaagctcaataaattccaacaatcccccaccagatcttgaaggaacaacataaccaactctccgcatttcctcaaatattgtttatatactagttttatggtagagattgttaagttaaacatccatctagactcaagagttatacaactgatgggggcgccttgggtaatttaaagaatggatcaattcctcaagatgacgtttttgctgctgttgattttgaaactggatccaatccatggcccatattcaaattacagaagaaatacaacttgccaggaaaatcagtccctttaaggaattttatactggatggctaacacactggggtgaaagaatcgcaacaacagatgctactagtacagctaaagcccttaaaaccattttgtgccacaatggttctgctgtactttatatggctcatggcgggaccaattttggattttataatggtgcaaacactggtcaagatgaatctgattacaaggcagacctcacttcttatgactatgatgcaccgattaaggagcatggagatgtgcataatgcaaaatacaaagcgctaagaagagtaatacatgagtgtactgggactcctctccatccacttcctgctaacattaaaaaagcaagttacgggattatgaaattacaaaaggttgtttctctgtttgacatcattgataatatcaatgatcctctgaaagtttctgtttcggagcatccactttatatggaacagataggccagatgtttggatttctcctgtacatgtcagaataccaagggaaactcccatcaagcatcctgtcaattccaaaggtacatgacagagctcaggtgtttgtgtcttgctcagctggtgttagaaccctaagatattgtggtgtaattgaaagatggtctaataaaacactagagataccgaacttaagatgttcatctaagaccagcctatatatcctggtagaaaatatgggtcgtgtaaattatgggccatatatttttgaccggaagggaatactatctcctattcaaatagatggcattactctccgtcactggaaaatgtatccactggcactcaattcactggacatccttccaaaacttcaactaatcactcaaataccttatgctggagccagtaaaatgtccattcatggagactcagaaaagattttacaggactcgtcatgctgttcaaatgaaagcacttctgcggagcctgcgttttatgaaggccatttccgtattgacaacgagactgagataaaggatacattcatatcgtttcgtggttggaacaaaggtgttgcttttgtgaacaacttcaacattggaagattttggccggcatgcggaccacagtgtaccctttatgttccagcgcctatcctcagacctggggataacattgttgtaatctttgaactgcatgctccaaatcatgagctcactatcgattttaccacggatccggatttcacgtgcggtccagaacagtgaaaaagggttgcacgtggacgtggtgtacatactgttacatagcagtacagtgcagtgttctgtccttcctcttgcttttctacgtcggtgctggtatagaatgggtaaatctgctctaggacactactctataaacgtggtattggctactggacactgctcaattgtgtacctttgatagctggatttgctgttgggtaccaaagaaaaaataaaatatcagggacagatcgtgaattctccactttgctccctgtccaaatgggggcccagcagtcacttctccattttggcaagccacaccgagctccgctacgccctgcgggggtgcagcacgatgtggattcctatgcacggggaacggctgtccgttacgacgacggacacggccgtggcggcgatgcccgggcacgacgcacgcgagatgctcgacgttagattgcctccaacaagacaatgtaaatgacactgaacgctaaatttagaggagaaagacatccgttatctctctaacaacagactgcaaacgaatcggtaaaatatagcgcacgtacggtgtactctaaatctagagtactt

SEQ ID NO: 63636 - DNA, 3307 bp, Zea Mays
gctagttgtgccactgccgtgcctacggccgattgggcgtctatagcagcagcagtgagcacgggtgcacggccatcactcccatcggcagcagggtcaaccactgccaccggcgcacgcagctgtgcacgaggtctcctcacccaccggccgccgcgtccggacccagcccggcaactcgcacctcctcctcctgctgccgcccgcgcgcttggccccgtgctcacacggggggtcgatcagtagaacatcctgctcacggcgttccccgacgcgtggctcgtaaggcactcttcccgcggtacaagtgcgacccacggtgctggcggagaggaacctagcagcggaagatcgagttcagggatggcttctggtggaaccttccggaaccttctcctggtgctccccctctacctcgcgctcgcctcgttggtcggtggcgaggcctcgaggaggttctggatcgagaacgatacctttaggaaggatggagtaccgttccaaatcgtcggtggcgatgttcactatttccgcattgttcctgagtactggaaggatcgccttttaagagcaaaagcattaggcttgaacacaattcaaacatatgtaccttggaatttgcatgagccagaaccacagagctggaaattcaagggcttcacagacattgaatcatatctgagacttgctcaagaactagaaatgctggtcatgcttcgtgtagggccatacatttgtggagaatgggacttaggaggttttccaccttggttgctcaccatagaaccagcccttaaactgcgttcatcagattcgtcctatctttccttggtggagagatggtggggagtactacttctgaaagtggcaccattattatacaataatggaggtccagttattatggttcagattgaaaatgaatttggttcttttggagatgataagaattaccttcatcaccttgttcaactggccaggagatatcttggaaacgacattattctgactataaattcactacttctgctcctaccattctgaagtgtgcctttgagattattctttatggttaagtaaatgggccaagctcaataaattccaacaatcccccaccagatcttgaaggaacaacataaccaactctccgcatttcctcaaatattgtttatatactagttttatggtagagattgttaagttaaacatccatctagactcaagagttatacaactgatgggggcgccttgggtaatttaaagaatggatcaattcctcaagatgacgtttttgctgctgttgattttgaaactggatccaatccatggcccatattcaaattacagaagaaatacaacttgccaggaaaatcagtccctttaagttcggaattttatactggatggctaacacactggggtgaaagaatcgcaacaacagatgctactagtacagctaaagcccttaaaaccattttgtgccacaatggttctgctgtactttatgtctgtcactggagcccattcatcagtgcattgcatttgcagtctaggtctattaattctatttcttcatgaggttgtccagatggctcatggcgggaccaattttggattttataatggtgcaaacactggtcaagatgaatctgattacaaggcagacctcacttcttatgactatgatgcaccgattaaggagcatggagatgtgcataatgcaaaatacaaagtgttttatttctatattttgatttatcattacaattatcaagcagcgctaagaagagtaatacatgagtgtactgggactcctctccatccacttcctgctaacattaaaaaagcaagttacgggattatgaaattacaaaaggttgtttctctgtttgacatcattgataatatcaatgatcctctgaaagtttctgtttcggagcatccactttatatggaacagataggccagatgtttggatttctcctgtacatgtcagaataccaagggaaactcccatcaagcatcctgtcaattccaaaggtacatgacagagctcaggtgtttgtgtcttgctcagctggtgttagaaccctaagatattgtggtgtaattgaaagatggtctaataaaacactagagataccgaacttaagatgttcatctaagaccagcctatatatcctggtagaaaatatgggtcgtgtaaattatgggccatatatttttgaccggaagggaatactatctcctattcaaatagatggcattactctccgtcactggaaaatgtatccactggcactcaattcactggacatccttccaaaacttcaactaatcactcaaataccttatgctggagccagtaaaatgtccattcatggagactcagaaaagattttacaggactcgtcatgctgttcaaatgaaagcacttctgcggagcctgcgttttatgaaggccatttccgtattgacaacgagactgagataaaggatacattcatatcgtttcgtggttggaacaaaggtgttgcttttgtgaacaacttcaacattggaagattttggccggcatgcggaccacagtgtaccctttatgttccagcgcctatcctcagacctggggataacattgttgtaatctttgaactgcatgctccaaatcatgagctcactatcgattttaccacggatccggatttcacgtgcggtccagaacagtgaaaaagggttgcacgtggacgtggtgtacatactgttacatagcagtacagtgcagtgttctgtccttcctcttgcttttctacgtcggtgctggtatagaatgggtaaatctgctctaggacactactctataaacgtggtattggctactggacactgctcaattgtgtacctttgatagctggatttgctgttgggtaccaaagaaaaaataaaatatcagggacagatcgtgaattctccactttgctccctgtccaaatgggggcccagcagtcacttctccattttggcaagccacaccgagctccgctacgccctgcgggggtgcagcacgatgtggattcctatgcacggggaacggctgtccgttacgacgacggacacggccgtggcggcgatgcccgggcacgacgcacgcgagatgctcgacgttagattgcctccaacaagacaatgtaaatgacactgaacgctaaatttagaggagaaagacatccgttatctctctaacaacagactgcaaacgaatcggtaaaatatagcgcacgtacggtgtactctaaatctagagtactt

SEQ ID NO: 63637 - DNA, 3187 bp, Zea Mays
caggactgctagttgtgccactgccgtgcctacggccgattgggcgtctatagcagcagcagtgagcacgggtgcacggccatcactcccatcggcagcagggtcaaccactgccaccggcgcacgcagctgtgcacgaggtctcctcacccaccggccgccgcgtccggacccagcccggcaactcgcacctcctcctcctgctgccgcccgcgcgcttggccccgtgctcacacggggggtcgatcagtagaacatcctgctcacggcgttccccgacgcgtggctcgtaaggcactcttcccgcggtacaagtgcgacccacggtgctggcggagaggaacctagcagcggaagatcgagttcagggatggcttctggtggaaccttccggaaccttctcctggtgctccccctctacctcgcgctcgcctcgttggtcggtggcgaggcctcgaggaggttctggatcgagaacgatacctttaggaaggatggagtaccgttccaaatcgtcggtggcgatgttcactatttccgcattgttcctgagtactggaaggatcgccttttaagagcaaaagcattaggcttgaacacaattcaaacatatgtaccttggaatttgcatgagccagaaccacagagctggaaattcaagggcttcacagacattgaatcatatctgagacttgctcaagaactagaaatgctggtcatgcttcgtgtagggccatacatttgtggagaatgggacttaggaggttttccaccttggttgctcaccatagaaccagcccttaaactgcgttcatcagattcgtcctatctttccttggtggagagatggtggggagtactacttctgaaagtggcaccattattatacaataatggaggtccagttattatggttcagattgaaaatgaatttggttcttttggagatgataagaattaccttcatcaccttgttcaactggccaggagatatcttggaaacgacattattctgactataaattcactacttctgctcctaccattctgaagtgtgcctttgagattattctttatggttaagtaaatgggccaagctcaataaattccaacaatcccccaccagatcttgaaggaacaacataaccaactctccgcatttcctcaaatattgtttatatactagttttatggtagagattgttaagttaaacatccatctagactcaagagttatacaactgatgggggcgccttgggtaatttaaagaatggatcaattcctcaagatgacgtttttgctgctgttgattttgaaactggatccaatccatggcccatattcaaattacagaagaaatacaacttgccaggaaaatcagtccctttaagttcggaattttatactggatggctaacacactggggtgaaagaatcgcaacaacagatgctactagtacagctaaagcccttaaaaccattttgtgccacaatggttctgctgtactttatatggctcatggcgggaccaattttggattttataatggtgcaaacactggtcaagatgaatctgattacaaggcagacctcacttcttatgactatgatgcaccgattaaggagcatggagatgtgcataatgcaaaatacaaagcgctaagaagagtaatacatgagtgtactgggactcctctccatccacttcctgctaacattaaaaaagcaagttacgggattatgaaattacaaaaggttgtttctctgtttgacatcattgataatatcaatgatcctctgaaagtttctgtttcggagcatccactttatatggaacagataggccagatgtttggatttctcctgtacatgtcagaataccaagggaaactcccatcaagcatcctgtcaattccaaaggtacatgacagagctcaggtgtttgtgtcttgctcagctggtgttagaaccctaagatattgtggtgtaattgaaagatggtctaataaaacactagagataccgaacttaagatgttcatctaagaccagcctatatatcctggtagaaaatatgggtcgtgtaaattatgggccatatatttttgaccggaagggaatactatctcctattcaaatagatggcattactctccgtcactggaaaatgtatccactggcactcaattcactggacatccttccaaaacttcaactaatcactcaaataccttatgctggagccagtaaaatgtccattcatggagactcagaaaagattttacaggactcgtcatgctgttcaaatgaaagcacttctgcggagcctgcgttttatgaaggccatttccgtattgacaacgagactgagataaaggatacattcatatcgtttcgtggttggaacaaaggtgttgcttttgtgaacaacttcaacattggaagattttggccggcatgcggaccacagtgtaccctttatgttccagcgcctatcctcagacctggggataacattgttgtaatctttgaactgcatgctccaaatcatgagctcactatcgattttaccacggatccggatttcacgtgcggtccagaacagtgaaaaagggttgcacgtggacgtggtgtacatactgttacatagcagtacagtgcagtgttctgtccttcctcttgcttttctacgtcggtgctggtatagaatgggtaaatctgctctaggacactactctataaacgtggtattggctactggacactgctcaattgtgtacctttgatagctggatttgctgttgggtaccaaagaaaaaataaaatatcagggacagatcgtgaattctccactttgctccctgtccaaatgggggcccagcagtcacttctccattttggcaagccacaccgagctccgctacgccctgcgggggtgcagcacgatgtggattcctatgcacggggaacggctgtccgttacgacgacggacacggccgtggcggcgatgcccgggcacgacgcacgcgagatgctcgacgttagattgcctccaacaagacaatgtaaatgacactgaacgctaaatttagaggagaaagacatccgttatctctctaacaacagactgcaaacgaatcggtaaaatatagcgcacgtacggtgtactctaaatctagagtactt

SEQ ID NO: 63638 - DNA, 1510 bp, Zea Mays
aaccagcgcagccctcaattcctcactctttttttatcccctcctctgccattccctccctctcccctcaacccagcgcccccctcccgccgccactagggtttctcctccccgcccacccccaaaccatccccgaagcttccagtgcgtcgcgccgcaaccatgagcgacggtaaggactccctcgacctctccgccctcggcgccgccatccccaactcggccgagctcagcgcggaagacaaggctaaccttgtggcgtcgatcaagaacacgctcgagggattggcatcgcggcataccgacgtgctcgagaacctcgagcccaaggtcaggaagcgcgttgagaagctcagggagatccagggcgaacacgatgaacttgaggcgaagtttttcgaagagagagctgctctagaagctaagtatcagaagttgtatgaaccactttactcaaagcgttatgaaattgtcaatggtgtggtcgagattgagggtatcacaaaagaaagtgcagctgaaaccccagaggagcaaaaaagtggagatgagacctctgctgagcaaaaagaagaaaaaggtgtaccagctttctggcttaatgcaatgaagaatcatgaaattttagctgaggagatccaggagagggatgaggaagctctcaagtacctcaaggacatcaagtggtacaggatcagcgagccgaagggttttaagcttgaatttcactttggtacgaatatgttcttcaagaattcggtgcttacaaaaacatatcacatgatcgatgaggatgaaccaattctggagaaagccattggtactgaaattgaatggtaccctgggaagtgcttgacacaaaaagtgctaaaaaagaagccacggaaggggtcaaagaacacgaaacctatcacaaaaaccgaagattgtgagagcttcttcaacttcttcagtccacctcaagtccctgatgacgacgaggaaattgatgaggacacagctgaacagttgcagaaccaaatggagcaagattatgatattggatctaccatagaaacaaaattatcccacatgctgtctcgtggttcactggagaggctgctcaagatgaggactttgaagttatggatggcgaggacgacgacgatgaagacgacgatgatgaagacgacgaggatgaagatgacgatgattatgatacaaagaccaagggaactgctggaggggaagggcagcagggtgaacgacctgcagagtgcaagcaacagtgaggtgtgatgtcattaagttggttttgtggggccgttgggtgggggttcttgttggttttattttatggaactggcggggggatttttctgggacatgttacatgtgggtctgtattgggtttcagatgttatatttttttttttttttttggagtgaagatagtccatggttgccactctgggtgtcttattgttcaggtcactggcattgtgtactgttctttaagcgtgccgatgcc

SEQ ID NO: 63639 - DNA, 1507 bp, Zea Mays
aaccagcgcagccctcaattcctcactctttttttatcccctcctctgccattccctccctctcccctcaacccagcgcccccctcccgccgccactagggtttctcctccccgcccacccccaaaccatccccgaagcttccagtgcgtcgcgccgcaaccatgagcgacggtaaggactccctcgacctctccgccctcggcgccgccatccccaactcggccgagctcagcgcggaagacaaggctaaccttgtggcgtcgatcaagaacacgctcgagggattggcatcgcggcataccgacgtgctcgagaacctcgagcccaaggtcaggaagcgcgttgagaagctcagggagatccagggcgaacacgatgaacttgaggcgaagtttttcgaagagagagctgctctagaagctaagtatcagaagttgtatgaaccactttactcaaagcgttatgaaattgtcaatggtgtggtcgagattgagggtatcacaaaagaaagtgcagctgaaaccccagaggagcaaaaaagtggagatgagacctctgctgagcaaaaagaagaaaaaggtgtaccagctttctggcttaatgcaatgaagaatcatgaaattttagctgaggaggagagggatgaggaagctctcaagtacctcaaggacatcaagtggtacaggatcagcgagccgaagggttttaagcttgaatttcactttggtacgaatatgttcttcaagaattcggtgcttacaaaaacatatcacatgatcgatgaggatgaaccaattctggagaaagccattggtactgaaattgaatggtaccctgggaagtgcttgacacaaaaagtgctaaaaaagaagccacggaaggggtcaaagaacacgaaacctatcacaaaaaccgaagattgtgagagcttcttcaacttcttcagtccacctcaagtccctgatgacgacgaggaaattgatgaggacacagctgaacagttgcagaaccaaatggagcaagattatgatattggatctaccatagaaacaaaattatcccacatgctgtctcgtggttcactggagaggctgctcaagatgaggactttgaagttatggatggcgaggacgacgacgatgaagacgacgatgatgaagacgacgaggatgaagatgacgatgattatgatacaaagaagaccaagggaactgctggaggggaagggcagcagggtgaacgacctgcagagtgcaagcaacagtgaggtgtgatgtcattaagttggttttgtggggccgttgggtgggggttcttgttggttttattttatggaactggcggggggatttttctgggacatgttacatgtgggtctgtattgggtttcagatgttatatttttttttttttttttggagtgaagatagtccatggttgccactctgggtgtcttattgttcaggtcactggcattgtgtactgttctttaagcgtgccgatgcc

SEQ ID NO: 63640 - DNA, 1459 bp, Zea Mays
aaccagcgcagccctcaattcctcactctttttttatcccctcctctgccattccctccctctcccctcaacccagcgcccccctcccgccgccactagggtttctcctccccgcccacccccaaaccatccccgaagcttccagtgcgtcgcgccgcaaccatgagcgacgagctcagcgcggaagacaaggctaaccttgtggcgtcgatcaagaacacgctcgagggattggcatcgcggcataccgacgtgctcgagaacctcgagcccaaggtcaggaagcgcgttgagaagctcagggagatccagggcgaacacgatgaacttgaggcgaagtttttcgaagagagagctgctctagaagctaagtatcagaagttgtatgaaccactttactcaaagcgttatgaaattgtcaatggtgtggtcgagattgagggtatcacaaaagaaagtgcagctgaaaccccagaggagcaaaaaagtggagatgagacctctgctgagcaaaaagaagaaaaaggtgtaccagctttctggcttaatgcaatgaagaatcatgaaattttagctgaggagatccaggagagggatgaggaagctctcaagtacctcaaggacatcaagtggtacaggatcagcgagccgaagggttttaagcttgaatttcactttggtacgaatatgttcttcaagaattcggtgcttacaaaaacatatcacatgatcgatgaggatgaaccaattctggagaaagccattggtactgaaattgaatggtaccctgggaagtgcttgacacaaaaagtgctaaaaaagaagccacggaaggggtcaaagaacacgaaacctatcacaaaaaccgaagattgtgagagcttcttcaacttcttcagtccacctcaagtccctgatgacgacgaggaaattgatgaggacacagctgaacagttgcagaaccaaatggagcaagattatgatattggatctaccatagaaacaaaattatcccacatgctgtctcgtggttcactggagaggctgctcaagatgaggactttgaagttatggatggcgaggacgacgacgatgaagacgacgatgatgaagacgacgaggatgaagatgacgatgattatgatacaaagaagaccaagggaactgctggaggggaagggcagcagggtgaacgacctgcagagtgcaagcaacagtgaggtgtgatgtcattaagttggttttgtggggccgttgggtgggggttcttgttggttttattttatggaactggcggggggatttttctgggacatgttacatgtgggtctgtattgggtttcagatgttatatttttttttttttttttggagtgaagatagtccatggttgccactctgggtgtcttattgttcaggtcactggcattgtgtactgttctttaagcgtgccgatgcc

SEQ ID NO: 63641 - DNA, 1664 bp, Zea Mays
aactgtagctgccgcggcgcctgcttctccccgatgcgtcaaacacttgacctgcacacggacagcggcggtggcgtcccgatcctgtccacccacccatctaatgcggccgcgaggaggatccacctgattctgctgctcctgctcctccttctacttgagtggggcttgatacttttcaggtcgagagaccatgacacggaagtcagcagtagcggattatgtttagtggcacaaggatcattcgtgtagctgaaaggatttgccttcaatggagcttgaagctgctcctgacgataaagtattctgttcagatgatgagatgcagacgctgtggcctctgggacaagtagacccaaagagcgtgaggttcccttgctgcatcgtgtggactcctctcccagtagtttcatggctggctccctacatagggcacgtggggattgctcgggaggatggaaccgtcttggactttgcaggttcgaatttagtgagtgtggatgatctggcttatggttctgtcgccagatgcctgcagcttgacagggcaaagtgctgcttccctgccaacccggcgtcgcacgtgtgcttgaggtcccacgagcactcggatgccgggacggcgatctcgtgggacgacgcgctgcggtcggggagccggcgcttcgagcacaagtgctacaacctcttcacctgcaacagccactcgttcgtggccgactgcctcaaccggctggcttacggcggctccgttgggtggaacgtgctgaacctggccgcgctcgtctggctgcgcggccggtggctggaccccatggccgccgtccggtccttcctcccgttcgccgtcgtctcctgcgtcggcgtcctgatggccggctggtccttcctcctgggcatgaccgcgttcacgctgctcttgctcggctggttcgtgctcggcgtctactgcatgaagggcctcgtcgtctgacgcacgctggctcggagccgaacgtgtgcccagcttcttcactgagcatcggggtcatgtagtagatgaatgaaggatcgaaatcttgaaaggggtgtgagtcggaggggagagacaacgggaaaacaaaatttgagcccgtttttaatagcggaaacccaaatccagatatttataaaatcgaagtttctatttgaaacaaagtagaagtacaagataaaaggaaggagggggaaatagcacaaaaacaaaattgggctagagtcttagaaccgttggaggccgaaactcacgccctccttgctgcgaagctgtcgatctgcagaatgcagctctgttaactgacagtctcctgttacgaggcaatcagaggctttttctagactggacctcgccatatccaccatatagatataggaggtaccagaagggggtgttctatatagcaagctgtagctgaactcattggattagacatatcagggcgatcaatccaatagcatctcagtgtcctgtcatttcataaaaaaacagcttcaacgatatacaattttacatttctatcaaaaaactataaagatatatcataaaatgatctaaatatacgtacacctgaataagagttggtatctaaattgttataacaaatttgataatttaaattagatatgtatgaacattgatctttttt

SEQ ID NO: 63642 - DNA, 1733 bp, Zea Mays
cacgctataaactgtagctgccgcggcgcctgcttctccccgatgcgtcaaacacttgacctgcacacggacagcggcggtggcgtcccgatcctgtccacccacccatctaatgcggccgcgaggaggatccacctgattctgctgctcctgctcctccttctagtgagttctattcccgtccccctccctacccgctgcgcgctgctaggatcttcgcctgcgaaaattttcggttcagtcgtcaggaggtcgagagaccatgacacggaagtcagcagtagcggattatgtttagtggcacaaggatcattcgtgtagctgaaaggatttgccttcaatggagcttgaagctgctcctgacgataaagtattctgttcagatgatgagatgcagacgctgtggcctctgggacaagtagacccaaagagcgtgaggttcccttgctgcatcgtgtggactcctctcccagtagtttcatggctggctccctacatagggcacgtggggattgctcgggaggatggaaccgtcttggactttgcaggttcgaatttagtgagtgtggatgatctggcttatggttctgtcgccagatgcctgcagcttgacagggcaaagtgctgcttccctgccaacccggcgtcgcacgtgtgcttgaggtcccacgagcactcggatgccgggacggcgatctcgtgggacgacgcgctgcggtcggggagccggcgcttcgagcacaagtgctacaacctcttcacctgcaacagccactcgttcgtggccgactgcctcaaccggctggcttacggcggctccgttgggtggaacgtgctgaacctggccgcgctcgtctggctgcgcggccggtggctggaccccatggccgccgtccggtccttcctcccgttcgccgtcgtctcctgcgtcggcgtcctgatggccggctggtccttcctcctgggcatgaccgcgttcacgctgctcttgctcggctggttcgtgctcggcgtctactgcatgaagggcctcgtcgtctgacgcacgctggctcggagccgaacgtgtgcccagcttcttcactgagcatcggggtcatgtagtagatgaatgaaggatcgaaatcttgaaaggggtgtgagtcggaggggagagacaacgggaaaacaaaatttgagcccgtttttaatagcggaaacccaaatccagatatttataaaatcgaagtttctatttgaaacaaagtagaagtacaagataaaaggaaggagggggaaatagcacaaaaacaaaattgggctagagtcttagaaccgttggaggccgaaactcacgccctccttgctgcgaagctgtcgatctgcagaatgcagctctgttaactgacagtctcctgttacgaggcaatcagaggctttttctagactggacctcgccatatccaccatatagatataggaggtaccagaagggggtgttctatatagcaagctgtagctgaactcattggattagacatatcagggcgatcaatccaatagcatctcagtgtcctgtcatttcataaaaaaacagcttcaacgatatacaattttacatttctatcaaaaaactataaagatatatcataaaatgatctaaatatacgtacacctgaataagagttggtatctaaattgttataacaaatttgataatttaaattagatatgtatgaacattgatctttttt

SEQ ID NO: 63643 - DNA, 1549 bp, Zea Mays
cctcccctcccctcccctcccctcccggctcccgcacgctataaactgtagctgccgcggcgcctgcttctccccgatgcgtcaaacacttgacctgcacacggacagcggcggtggcgtcccgatcctgtccacccacccatctaatgcggccgcgaggaggatccacctgattctgctgctcctgctcctccttctaatgatgagatgcagacgctgtggcctctgggacaagtagacccaaagagcgtgaggttcccttgctgcatcgtgtggactcctctcccagtagtttcatggctggctccctacatagggcacgtggggattgctcgggaggatggaaccgtcttggactttgcaggttcgaatttagtgagtgtggatgatctggcttatggttctgtcgccagatgcctgcagcttgacagggcaaagtgctgcttccctgccaacccggcgtcgcacgtgtgcttgaggtcccacgagcactcggatgccgggacggcgatctcgtgggacgacgcgctgcggtcggggagccggcgcttcgagcacaagtgctacaacctcttcacctgcaacagccactcgttcgtggccgactgcctcaaccggctggcttacggcggctccgttgggtggaacgtgctgaacctggccgcgctcgtctggctgcgcggccggtggctggaccccatggccgccgtccggtccttcctcccgttcgccgtcgtctcctgcgtcggcgtcctgatggccggctggtccttcctcctgggcatgaccgcgttcacgctgctcttgctcggctggttcgtgctcggcgtctactgcatgaagggcctcgtcgtctgacgcacgctggctcggagccgaacgtgtgcccagcttcttcactgagcatcggggtcatgtagtagatgaatgaaggatcgaaatcttgaaaggggtgtgagtcggaggggagagacaacgggaaaacaaaatttgagcccgtttttaatagcggaaacccaaatccagatatttataaaatcgaagtttctatttgaaacaaagtagaagtacaagataaaaggaaggagggggaaatagcacaaaaacaaaattgggctagagtcttagaaccgttggaggccgaaactcacgccctccttgctgcgaagctgtcgatctgcagaatgcagctctgttaactgacagtctcctgttacgaggcaatcagaggctttttctagactggacctcgccatatccaccatatagatataggaggtaccagaagggggtgttctatatagcaagctgtagctgaactcattggattagacatatcagggcgatcaatccaatagcatctcagtgtcctgtcatttcataaaaaaacagcttcaacgatatacaattttacatttctatcaaaaaactataaagatatatcataaaatgatctaaatatacgtacacctgaataagagttggtatctaaattgttataacaaatttgataatttaaattagatatgtatgaacattgatctttttt

SEQ ID NO: 63644 - DNA, 1560 bp, Zea Mays
atttgatagcgcaaggcagtcggctacctcctccaccaccagtcaaccttccgctctacctcaagacaataataacaggtcgagagaccatgacacggaagtcagcagtagcggattatgtttagtggcacaaggatcattcgtgtagctgaaaggatttgccttcaatggagcttgaagctgctcctgacgataaagtattctgttcagatgatgagatgcagacgctgtggcctctgggacaagtagacccaaagagcgtgaggttcccttgctgcatcgtgtggactcctctcccagtagtttcatggctggctccctacatagggcacgtggggattgctcgggaggatggaaccgtcttggactttgcaggttcgaatttagtgagtgtggatgatctggcttatggttctgtcgccagatgcctgcagcttgacagggcaaagtgctgcttccctgccaacccggcgtcgcacgtgtgcttgaggtcccacgagcactcggatgccgggacggcgatctcgtgggacgacgcgctgcggtcggggagccggcgcttcgagcacaagtgctacaacctcttcacctgcaacagccactcgttcgtggccgactgcctcaaccggctggcttacggcggctccgttgggtggaacgtgctgaacctggccgcgctcgtctggctgcgcggccggtggctggaccccatggccgccgtccggtccttcctcccgttcgccgtcgtctcctgcgtcggcgtcctgatggccggctggtccttcctcctgggcatgaccgcgttcacgctgctcttgctcggctggttcgtgctcggcgtctactgcatgaagggcctcgtcgtctgacgcacgctggctcggagccgaacgtgtgcccagcttcttcactgagcatcggggtcatgtagtagatgaatgaaggatcgaaatcttgaaaggggtgtgagtcggaggggagagacaacgggaaaacaaaatttgagcccgtttttaatagcggaaacccaaatccagatatttataaaatcgaagtttctatttgaaacaaagtagaagtacaagataaaaggaaggagggggaaatagcacaaaaacaaaattgggctagagtcttagaaccgttggaggccgaaactcacgccctccttgctgcgaagctgtcgatctgcagaatgcagctctgttaactgacagtctcctgttacgaggcaatcagaggctttttctagactggacctcgccatatccaccatatagatataggaggtaccagaagggggtgttctatatagcaagctgtagctgaactcattggattagacatatcagggcgatcaatccaatagcatctcagtgtcctgtcatttcataaaaaaacagcttcaacgatatacaattttacatttctatcaaaaaactataaagatatatcataaaatgatctaaatatacgtacacctgaataagagttggtatctaaattgttataacaaatttgataatttaaattagatatgtatgaacattgatctttttt

SEQ ID NO: 63645 - DNA, 1252 bp, Zea Mays
cttcctttcatctattgccactttatgtttttgatggcaagcctcctgatatgaagaaacaagagcttgctaaaagatactcaaaaagagatgatgcaaccaaagatctgactgaggcagtagaggtaggagataaagatgcgattgaaaaattgagcaagaggactgtaaaggtcacaaggcaacacaacgaagattgtaaacggctattaagacttatgggggttcctgttgtagaggcaccttctgaagcagaagcagaatgtgcagccctttgcataaacgataaggtgttcgctgttgcttcagaagatatggactcccttacttttggggctccacggttccttcgtcatttaatggatccaagttccaagaaaatacctgtgatggaatttgatgttgccaaggttttggaggagcttgaactcaccatggaccagttcattgatttgtgcatcctgtgtggatgtgactattgtgatagcatcaaaggtatcggggggcaaacagctctgaaacttattcgtcaacatgggtccatagaaagcatcttggagaatcttaataaagacagatatcaaattcctgaggactggccttaccaagaagctcgacgcttgttcaaggagcctaatgtcacattggatattcctgagctaaaatggactgcacctgatgaggagggtctcataagtttcctggtaaaagataatggtttcaacgaagatcgggtgacaaaggccatagagaagatcaaatctgccaagaataaatcgtcgcaaggaagactcgagtcctttttcaagccaactgccaccacatcagcaccgctaaaacggaaggagacttcggataaaacaagcaaggcagctgcgaacaagaaaacaaaggctggtggaaagaagaaataatcttggatgcttgatgtacaactacgactacgaaagcagcggtggcgtgatcacttcgcttagattatttaactccctgttttaactcagagctttggtaaaagtttgctcatgtttcaagctggggtaagttagttgtgtttgaagagattggtgtaccaagtaacaaaacttatcgctgttttttacttcttgtcctttgaagtatgtatgccagtcctcgtccttttaagtatctgtgttgcaacaaaaatttaaggccttgttttgatgcataggctcactttaagatttagtttaaatttcacaccaagctactttaacacgcatggattacg

SEQ ID NO: 63646 - DNA, 1492 bp, Zea Mays
aatcgctaatcatcattgtggatatgtactagtagcaaccatttctgcaaacggtgaaaaggaaattggagatctaatatcaaaagccatggaaaaagttggaaaggatggagtcattactattgttgatggcaaaacattggacaatgagcttgaagcagtacagggaatgaagctgtccagaggatacatatctccttactttgtgactgatcaaaagactcagaaatgtgagatggagaaccctcttattcttatccatgacaagaaaatctcaaacatggattctctccttccagcattagaaatttctatcaagaatcgcaagcctcttctcattgttgctgaggatgttgaaggagatgctctgtcaatgcttgtactgaacaagcatcgtgctggactcaaggtatgtgctgtcaaagctcctggatttggtgaaaatagaaggcacaatctagatgacatggctgtgatgactggaggagaggttattagcgaggaacgcggtcttgatcttggcaaagttcaattacaaatgcttggcactgctaaaaaggtaactgtatcccttgatgatactatcatcctagatggtggaggtgacaaacagcagatagatgagaggtgccaacagcttagagaatcaattgacacaagcactgctgtattcgacaaagaaaaggcccaagagcgtttatctaagttatctggaggtgttgctgtactcaagattggtggagctagtgaagctgaagttggtgagaaaaaagatagggtgacagatgctctaaatgctgcaagggctgctgtggaggagggcattgtgccaggtggtggagttgcccttctttatgccaccaaggagcttgacaagattagcacagcaaacgaggacgaaaagattggagttcaaattatcaagaattctttgaaggctcccttgatgaccatagctgcaaatgctggcattgatggagctatagtcatagggaagctgattgaacaagaggacctcagtttgggctatgatgcagcaaaaggggagtacgtagacatgatcaaggccggcatcatcgatcccgtgaaggtgatccgcaccgcacttcaagacgctgcaagtgtttccctgctgatggcaaccacggaggccgctgtctccgagctcccggcaaccaagtccagaatagccagccgtatgccgcagatgagcgggatggacttctgaggaaattcaggcgccgtgtatgatgctgatctgtgacctgtaaggctaggaattgggaggttggggacgaactttgtttccctagcggatagtcggatacgtctacggagttcattcgaaacgaggtgcagaactgtcaccgagttgcagtttttgatgcagtgcggcgttcgatggtggggtaataaagctggactgatagcgccttccattttgaatgctctgtctgaggcatcgtttggtgccgtcgaagcagctgaattc

SEQ ID NO: 63647 - DNA, 2308 bp, Zea Mays
cccgcaaaaacggacggaataagctctctcccgtttccgtcccgtttccatatttttccgtaaatacggaaacggtcgggtcaaatgtagaaaacggtacgggtcgggacgggattttttccgtccgttttcaaccctagtttctggattagaaaaaaaatgaaaaatgaaaaaacaaagtcctacaaacagaaaaattagcgtagtgtcaaatcaaaatttgaaaaaacgtataaatctctcgaatcaaacggtgcccgaagaatggatctcgcggttgagccgaagcttccagaacccaaacccctgcgcatctaaaaccctcctcccgagtcccgacccgacggcaaaaagcaaattcgacgcgaccatgtaccgggcggcggctgtcatctcgaggtcctcatcagcactgcggaggcagctcgcgcggggcgtggccggggagctgccgcgtctgttggcgcgagggtatgcggccacggcgaaggaggtgtccttcggcgttggcgcccgcgccgccatgctgcagggcgtcaacgacctcgccgacgccgtcaaggtcaccatgggccccaaggggcgcactgtgatcatcgaggggtcccataaaggtcccaaggtcacgaaggacggggtcactgttgcaaaaagcgtggagttcgaggatagcgcgaagaatgttggggcgaatctggtgaagcaagttgctgatgctacgaacaaagctgcaggggatggtaccacctgtgcaactgtgcttacacaggcaattcttactgaaggatgcaaggccgtggcagccggtgtcaacgttatggacttgcggaatggtataaacaaggcaataaatgctatcactgctcacctcaaaagtaaagcgtggaagattaattctccagaagaaattaaccaggtagcaaccatttctgcaaacggtgaaaaggaaattggagatctaatatcaaaagccatggaaaaagttggaaaggatggagtcattactattgttgatggcaaaacattggacaatgagcttgaagcagtacagggaatgaagctgtccagaggatacatatctccttactttgtgactgatcaaaagactcagaaatgtgagatggagaaccctcttattcttatccatgacaagaaaatctcaaacatggattctctccttccagcattagaaatttctatcaagaatcgcaagcctcttctcattgttgctgaggatgttgaaggagatgctctgtcaatgcttgtactgaacaagcatcgtgctggactcaaggtatgtgctgtcaaagctcctggatttggtgaaaatagaaggcacaatctagatgacatggctgtgatgactggaggagaggtaactgtatcccttgatgatactatcatcctagatggtggaggtgacaaacagcagatagatgagaggtgccaacagcttagagaatcaattgacacaagcactgctgtattcgacaaagaaaaggcccaagagcgtttatctaagttatctggaggtgttgctgtactcaagattggtggagctagtgaagctgaagttggtgagaaaaaagatagggtgacagatgctctaaatgctgcaagggctgctgtggaggagggcattgtgccaggtggtggagttgcccttctttatgccaccaaggagcttgacaagattagcacagcaaacgaggacgaaaagattggagttcaaattatcaagaattctttgaaggctcccttgatgaccatagctgcaaatgctggcattgatggagctatagtcatagggaagctgattgaacaagaggacctcagtttgggctatgatgcagcaaaaggggagtacgtagacatgatcaaggccggcatcatcgatcccgtgaaggtgatccgcaccgcacttcaagacgctgcaagtgtttccctgctgatggcaaccacggaggccgctgtctccgagctcccggcaaccaagtccagaatagccagccgtatgccgcagatgagcgggatggacttctgaggaaattcaggcgccgtgtatgatgctgatctgtgacctgtaaggctaggaattgggaggttggggacgaactttgtttccctagcggatagtcggatacgtctacggagttcattcgaaacgaggtgcagaactgtcaccgagttgcagtttttgatgcagtgcggcgttcgatggtggggtaataaagctggactgatagcgccttccattttgaatgctctgtctgaggcatcgtttggtgccgtcgaagcagctgaattc

SEQ ID NO: 63648 - DNA, 2254 bp, Zea Mays
cccgcaaaaacggacggaataagctctctcccgtttccgtcccgtttccatatttttccgtaaatacggaaacggtcgggtcaaatgtagaaaacggtacgggtcgggacgggattttttccgtccgttttcaaccctagtttctggattagaaaaaaaatgaaaaatgaaaaaacaaagtcctacaaacagaaaaattagcgtagtgtcaaatcaaaatttgaaaaaacgtataaatctctcgaatcaaacggtgcccgaagaatggatctcgcggttgagccgaagcttccagaacccaaacccctgcgcatctaaaaccctcctcccgagtcccgacccgacggcaaaaagcaaattcgacgcgaccatgtaccgggcggcggctgtcatctcgaggtcctcatcagcactgcggaggcagctcgcgcggggcgtggccggggagctgccgcgtctgttggcgcgagggtatgcggccacggcgaaggaggtgtccttcggcgttggcgcccgcgccgccatgctgcagggcgtcaacgacctcgccgacgccgtcaaggtcaccatgggccccaaggggcgcactgtgatcatcgaggggtcccataaaggtcccaaggtcacgaaggacggggtcactgttgcaaaaagcgtggagttcgaggatagcgcgaagaatgttggggcgaatctggtgaagcaagttgctgatgctacgaacaaagctgcaggggatggtaccacctgtgcaactgtgcttacacaggcaattcttactgaaggatgcaaggccgtggcagccggtgtcaacgttatggacttgcggaatggtataaacaaggcaataaatgctatcactgctcacctcaaaagtaaagcgtggaagattaattctccagaagaaattaaccaggtagcaaccatttctgcaaacggtgaaaaggaaattggagatctaatatcaaaagccatggaaaaagttggaaaggatggagtcattactattgttgatggcaaaacattggacaatgagcttgaagcagtacagggaatgaagctgtccagaggatacatatctccttactttgtgactgatcaaaagactcagaaatgtgagatggagaaccctcttattcttatccatgacaagaaaatctcaaacatggattctctccttccagcattagaaatttctatcaagaatcgcaagcctcttctcattgttgctgaggatgttgaaggagatgctctgtcaatgcttgtactgaacaagcatcgtgctggactcaaggtatgtgctgtcaaagctcctggatttggtgaaaatagaaggcacaatctagatgacatggctgtgatgactggaggagaggttattagcgaggaacgcggtcttgatcttggcaaagttcaattacaaatgcttggcactgctaaaaaggtaactgtatcccttgatgatactatcatcctagatggtggaggtgacaaacagcagatagatgagaggtgccaacagcttagagaatcaattgacacaagcactgctgtattcgacaaagaaaaggcccaagagcgtttatctaagttatctggaggtgttgctgtactcaagattggtggagctagtgaagctgaagttggtgagaaaaaagatagggtgacagatgctctaaatgctgcaagggctgctgtggaggagggcattgtgccaggtggtggagttgcccttctttatgccaccaaggagcttgacaagattagcacagcaaacgaggacgaaaagattggagttcaaattatcaagaattctttgaaggctcccttgatgaccatagctgcaaatgctggcattgatggagctatagtcatagggaagctgattgaacaagaggacctcagtttgggctatgatgcagcaaaaggggagtacgtagacatgatcaaggccggcatcatcgatcccgtgaaggtgatccgcaccgcacttcaagacgctgcaagtgtttccctgctgatggcaaccacggaggccgctgtctccgagctcccggcaaccaagtccagaatagccagccgtatgccgcagatgagcgggatggacttctgaggaaattcaggcgccgtgtatgatgctgatctgtgaccttgcggcgttcgatggtggggtaataaagctggactgatagcgccttccattttgaatgctctgtctgaggcatcgtttggtgccgtcgaagcagctgaattc

SEQ ID NO: 63649 - DNA, 2578 bp, Zea Mays
gagggtcgagacgtccgtctcctgtctctgcgagcggccgaagaacgggaaaaaaagaagcgtcggtctgatagatcaacatctagacatgcccagataacatatagcttggtgactatactatggataaccggacgggacaggacaggtcgatcacactctgaagtgtttggtttgagatatcacagtcatataggaggtccacttatccgagaactgaaagacaaatggtcagaattcagatggcgctgctttcacgctagcgcttgtctagactctgaacataatctcggttcaaacatctaccaaatcatgctgaaatccgcaggtgttaaaatttgaacaacctgctgttccacaaccaaaaaaaaatcagtgaacgttacaccgtttccctttttattacttgcaaacactacaagctcaccgtagttgtggtagtctaggaaaatctcgtggtcatgggtagctgctacctattttgccgcttgcttctgcctcagtgctctccaaccaatgtcgtgcctgaagaacccttctggccactcgacagcgtctaccgcaccatatgctcttgcccttgcttcttcaatgtccttgcccttggcagtgacaccaagaactcgccctccaacggcaacaaggttgccgtctccatctagtgctgtcccagcatggaatatcttgacagccggagacacctgctcagccttgtccacgttttttatcacggtcccctttttataagggcccgggtatccctggcttgccatcacaaccaccattgccatttcgggtgaccaggttagtgaaacattgcctaactctccctggcaagcagataacagaacttgtgccaaatcagattctaatcgcatcatcagaacctataatgacacaaaaaatagatcagtagagaaaaggatagttggaataccatgagaaaaatatttcagtcacaggtcaagcacacgatttcagctaaatgattcgtctgaaatgtgtgtggtgtacttcgaagatgtactactagaaaggcataatgaagatgcagcaaaggaaattatccataaagttcaagttcaaacatatattacaatgtagtaacccattaggatttttagaacagtagtttgaactgatagagacctataatttggattcatattacttaggcgaacagaacagctatgaacaactccaagaaacaatcgtacgttttctattagcaaaagggcttctagcttgagttggttgggtggcttgagtagcactcctcaaatttttttggctggagttaagaaaaacatgggcaacggtgccgctacgtatgggtaggacaggagttcagaggttttcttgactggcgagagaatgttacattctatcttaagcggaatgcccagaagccatcttaaccccaccccctctccacttacagtttctcatatttaattttgatgttgtactacttctactggtcctgcatgttgaatgttccagtagccttatggtttgtttttattcaaaaataagattatgttgatttgtttctttaatttcagagaatagttccttaaggtccagttgtcccatctataggatggccttgtatcttctctcgttaagcaacaaatctctctaagtttctatttttctagtacctcatgtgttccagatcttctggtgcggctgctgagtgtcagcatggtgacgctgcttgggttcagggacatctaaagtatgcccatgacattaatatatccttagatattactgaataaaataagcggtccaagctagacatgtaagactgtcattggtaaaaaagaaatggaaatgatttttttctgcagcagatagagtaaaaaattggacattctgcactggtcaagaaatgtgagcttccaaatttacaaccaaagaaactttaatttgtctgatattgatcaaacagatagtgaggaatagtataatggctaccagatggtcctaaataggcagttatatagatcttaaataggcgtgcattgcaatttttcatttcactatacatcatatctcctttttcagattgtaataatatatctgatcacctagactaatccaatatgctattttatgacacagaaatgcaccattccacttgcgttacagtaatcaagtctactcagctcatccactggaagagaagagaatgaaaatttttgggcaaaagtgcagcacaagcacagacttagttggaaagatatacatatcctttgcattctattgtctaacgaaaatacattgatcatattaaccaaaacccaaattggaattataaatttagacatgtataaactataatgcatcgttccgctaatctgaaagtttactaaacagttggatgtttctcttccaaaagatcatgttctgaactttctgtctgtactgaattattgattgatgcattccgacactccgctatacacttatattgtatgaagcttttgttcagatcttgtttttaaaatcaattttgtggaatttcttgttcgttcctctacaaaaatgaatactggatactggagatggg

SEQ ID NO: 63650 - DNA, 1144 bp, Zea Mays
gctgaattcaattcagcggcagaatcagccgactgctccactctgctccagtggacgcgtcgccatcaacagcctactgtgcacagtgagcaaccgcgagcagggatcgggtcaccggctagcaccccagcaagtgcaaagccgccggccatggatccagacgcaatcctcgcccagaaaccgccaccggctgatcggcgacgtgacgagcctgtcccgcggtcccgtacctcatgtgttccagatcttctggtgcggctgctgagtgtcagcatggtgacgctgcttgggttcagggacatctaaagtatgcccatgacattaatatatccttagatattactgaataaaataagcggtccaagctagacatgtaagactgtcattggtaaaaaagaaatggaaatgatttttttctgcagcagatagagtaaaaaattggacattctgcactggtcaagaaatgtgagcttccaaatttacaaccaaagaaactttaatttgtctgatattgatcaaacagatagtgaggaatagtataatggctaccagatggtcctaaataggcagttatatagatcttaaataggcgtgcattgcaatttttcatttcactatacatcatatctcctttttcagattgtaataatatatctgatcacctagactaatccaatatgctattttatgacacagaaatgcaccattccacttgcgttacagtaatcaagtctactcagctcatccactggaagagaagagaatgaaaatttttgggcaaaagtgcagcacaagcacagacttagttggaaagatatacatatcctttgcattctattgtctaacgaaaatacattgatcatattaaccaaaacccaaattggaattataaatttagacatgtataaactataatgcatcgttccgctaatctgaaagtttactaaacagttggatgtttctcttccaaaagatcatgttctgaactttctgtctgtactgaattattgattgatgcattccgacactccgctatacacttatattgtatgaagcttttgttcagatcttgtttttaaaatcaattttgtggaatttcttgttcgttcctctacaaaaatgaatactggatactggagatggg

SEQ ID NO: 63651 - DNA, 1838 bp, Zea Mays
gggcagatgtcatgaagaaaggcatgggcgtcagctggctctctctgcctgcaatcccggcgggtcggctcgcgcgggcacgaggggcggcacttggattcccacgttttccacccaccaagtcagcaccagagcatccgctcctccgcggcgcgccgcgtgctccccgcagccccagccaccatttaacgccgggtcaccagacgccaatccaatccccctgcaccagacgccaatcccgatcaccgccgcccaacctcacctcccctccgtcccccgagccacctctgtaaccctgttcggtgcctctcactccggctgccagatggacagcgccgacgcggcgacggcgctgggcgcgtggatccggggctacttcacgccggccacgttcttcctcgtcgtcaacctcgtcatcggcaccatcgcgctcacctcccgcgccaccaagcagcgccgccgcagggagaactactaccacgacgacggcaacggccaccaggaaacgctgcacccgcagatggagcagccggggtacggccactactaccacccggaccccacgctgtacgcggcgccgcctccgcccgcgccgctcgcgcgcacgtcctctgtcctcgaccgcctcaggtcgctcggcctgtaccgcttccgctccggggacttcccgcccgaggtaaagaagtcgggctcggaggtgaggaagtcgcaggtgtcgcgggcggcgcccaggatcgtccaggcggtcaccgaggacgacgtctccgtcgaggaagccgaaggcggcggtttcaggcggaggccgtcgccaccccagcaagagtaccactaccggcaagaatacgtcactccgccgccgccggcacccgccccgctgcagcgcacgtcgtccgtgctggacaggctccgctcgctgggcctctacggcttcctcgctcccgacgaacccgccgccgccgcgtcagttccagcgagcgacggcttcgccaccccggcggacgagaagaggcacgcgcacacgcactacgacatcggccggtccgagccggcacgggagcagcaggacaagaaggagaagacgcaggggggcaactcaacaagggccaagtcgagctcgggggctaggaagacgcccgctcagaggcaggcggaggccggcgccgagtgcgtggacgcgagggcggaggcattcatcgacagcttcaggcagcagcagcaggtgcaccactaccaggaggaggaatacgtcccgcctccggcgcccgcgccgccgctgtcgcgcacgtcgtccgtcctggaccgcctccgctccttcggcctgtaccgcttccgctccggcgacctcggccccgaccttccctccgccaccgccgccacggagacggacaaggagaagcagcaggcggcgcactacgggcggagccggtcggagccggcgcgggagcagggcaagaagcaggacacgaggatgaacaagtcgagctcgagcggcgtcgtggcggaggcggacgcgcatcagtgcgtgaacgcgcgcgcggacgacttcatcaacaagttcaggcagcagctacagctgcagcgactgaactcgctgctcaactacaaggagatgctcaaccgcggcggtgacaagcagtagccggagcgtgcaaggcggagggagaagggtagctagctgtaggatccaatccaaaaccatactgaaaaaaaaatcgatctttggtccatcaaccactagacctcgagtgtggattatgcagtgttgttcttattagcatcgttatgtaagaatcgctattttttcagcttgttaatttcaattggtttgtgttgctggc

SEQ ID NO: 63652 - DNA, 628 bp, Zea Mays
aacaaacaaaatggatcgtggcccactggaccacggtcgtagacgggctgggcgtcgaagtctctccgctcaagacacgggcccacgtccacagatcggaggagagcactggcttgtatccctctggcctctctcgtctccagcgacggcagcgggcgagggttacgcgaaggcgaagcggagtagtggaagcagaggcggcagccatggcggtgatggagaagctcaagatctttgtcgttaaggagcccgtagtcgcggcctcctgcctcatcgctggattcggtctctttcttccagcagttgtccggccaatcctggattcatggcagaccgcggaacaagttcctccacctcttctaaatgatgtggttgcaggtgtcaccggcaagaaaaagtagtaaacttgcattgttttctcatgccaatattgccccacattttcttccccgtgttttttctggcgaccagattggaaggcttttcccaagagtgtcttgaactctagatggtatccgcggaataatcattgtacctgaatcatatactgcaatgtggcagttatgaaaatctttcccctcctacaaaggttgatagaatgccataccctttgaactgtaaaaaaaat

SEQ ID NO: 63653 - DNA, 863 bp, Zea Mays
tcgatcgctagaaactagggtttacgagcacgccctggtataaaagaggcgagggtcactgatgcaggacctcccgcagccgccacctcaacccaggaacagagcgaggcgacgccgcggcacctcttctccgttgatattgattatttaggcgaagggaaatggcaaccgttccaggggatctgatctggcaggttgtgaggaagaacaactccttccttgtgaagcagttcggcaacggcaatgccaaggtgcagttcaccaaggagccgaacaacctctacaacatccactccttcaaacactcgggtttggcgaacaagaagactgtgacgatccagccagctgcaaaggactcggctgtggtcctctctactaccaagaccaagaagcagaacgcacctgcgaagctcagccacaagtctgtgatgcgcaaggagttccgcaagatggccaaggctgtgaaaaaccagcctccaggttgccaagtccggtgtcaagaagaagaacaggcagtcctaagcgctaagtttgtgttctgtcagggggcatgttggtgctcgtagtcccagcttatatttatctatgttccaacagttgagacttgttagaactgagcaaaccatgttaagatgctgctgtgtgtcattccttaaaaaaattgccttgcactttgtgattactgtctcgttgctgtgtgtcattctatgacaaatcgtttgtcgcttgattgtgctttgtttgtaaacttgcttgtcgtgactagcacttgttatcgcatttttgattggttctgtaaacaatatccgataaacaagattagtatcctgcacgagtgcatgtttaaactatttttaacaata

SEQ ID NO: 63654 - DNA, 596 bp, Zea Mays
aacaaacaaaatggatcgtggcccactggaccacggtcgtagacgggctgggcgtcgaagtctctccgctcaagacacgggcccacgtccacagatcggaggagagcactggcttgtatccctctggcctctctcgtctccagcgacggcagcgggcgagggttacgcgaaggcgaagcggagtagtggaagcagaggcggcagccatggcggtgatggagaagctcaagatctttgtcgttaaggagcccgtagtcgcggcctcctgcctcatcgctggattcggtctctttcttccagcagttgtccggccaatcctggattcatggcagaccgcggaacaagttcctccacctcttctaaatgatgtggttgcaggtgtcaccggcaagaaaaagtagtaaacttgcattgttttctcatgccaatattgccccacattttcttccccgtgttttttctggcgaccagattggaaggcttttcccaagagtgtcttgaactctagatggtatccgcggaataatcattgtacctgaatcatatactgcaatgtggcagttatgaaaatctttcccctcctacaaaggtaccgt

SEQ ID NO: 63655 - DNA, 444 bp, Zea Mays
ataagtttttactggcaaccactgtagttcaaatttatggagcatcataagcaccaggtctctttcttccagcagttgtccggccaatcctggattcatggcagaccgcggaacaagttcctccacctcttctaaatgatgtggttgcaggtgtcaccggcaagaaaaagtagtaaacttgcattgttttctcatgccaatattgccccacattttcttccccgtgttttttctggcgaccagattggaaggcttttcccaagagtgtcttgaactctagatggtatccgcggaataatcattgtacctgaatcatatactgcaatgtggcagttatgaaaatctttcccctcctacaaaggttgatagaatgccataccctttgaactgtgttcgagatgtcatcgtttatgatttctcggtcgagctgtatagatttcgttt

SEQ ID NO: 63656 - DNA, 2027 bp, Zea Mays
tccgacggctataaataaccgccccccttcctccgcagctctgctctgctcccccgcgtctttccctctttttccaagcggtcaaagccaaatcagtcgcgagcggcggcggtaacgagaacgagacgcgcgcgctagctgaatcaggagcagggcccagggaggagagtggagagccgccggcgagcagcaatgccttactgcgaggtgggcaggtacgcggacggcgacaagtgggagggcgtccgcctcttctaccgccgctacggcagcggcgccaccaaggtgctcctcgtcatcggattggcggggacgcacgactcgtggggcccgcagataaaggggctgaccgggtcgctggagccctccgacgacgaggccctgcggccggacgaggaggccggcgtcggcgcggcggaggccgcgccggcggaagcggacgacggcatcgaggtctgctgcttcgacaaccgcggtgtcggccgcagctccgtgctccccaacaaatcctactactcgacggcaatcatggccacggatgccttggccttgatcgatcatttggggtggaagaaggctcacgtcttcggccactccatgggtgccatgattgcttgcaagctagctgccatggcacctcacaggctatgttcgctggcattgcttaatgtcaccggaggtggctttcagtgcttcccaaaggtagacgcgcagatgctatctcttgcattccgtttcttaagggcaaaaactccagaggaaagagcccttgtggacctggaaacacattatacgaaggaataccttgaggagactgtcgggtcatgtactagaagaatggtcctctatcaagaatatgtgaagggcatatcgtcaacagggatgcaatccaattgtggttttgaagggcaagttaatgcatgctggactcacaaaatgactactaaggaactagatacaatacggtacgatatcattgcacaattgtgccatgcaaaacgtctagcagaaaggcttcttcctgttgcaagaatggtagtgcctcatggtgcacatctagtgagccatgaaagaccagacgaggtgaacaatgcacttatggatttgataaaggccaccaaatctgagataaaacctgaagagtggtcagcccagcccgagaacacgtcggaaaccggggcgctcatttctgcgagacccatcaccgtcatggtgcgaacagatgcaggcgtagacgctaccgcagcggtctataacttgcttgggaagctgcaactgagcttcctttatctcataggcatgatactcatggggtttgaactcatgaggaacattgtaagggtgatgaagccagtaagggttgcagcaattgagtcgtaagtcataagaaccaaatacatgtacactgttcttgagaccttgtggtagtcgagatgggagatgatgattttagagtagcatctgctaacacatgtgaaactcggcctgctcctagtagcagaataatacgaaacactgagaaaacagtgcgcgcctggacagaaatgtctatggcaaggttgcccgttggcgtatgtacctataagagtatctgtaccataccgagatttggaatcgaagctttgctgcttatttcgtgtcgcgtcgctgggcatcttctttcctacatggcgctttacaacgctgcaaggtgacaaatagtagcgtaaaactgaagagagaacgaaagtggcagccacaactgggtttgttttgggtgtgacgtgtgcggtacctaataaaagtttagccacgtcaattctcttgccgtgctttcgggggaaaaaagaactgggtttcactggtgcaaatggcacgaaatatttttcctggtctgaatttgtttgtagtcgatcgtatctgagtgtaaattcgtttatttgagtttagatcggttaggataggagcctgaatatttaacatttgataccgtacctgaacttagatatttgtatttatatattcatgtatatggatagttggatact

SEQ ID NO: 63657 - DNA, 2012 bp, Zea Mays
tccgacggctataaataaccgccccccttcctccgcagctctgctctgctcccccgcgtctttccctctttttccaagcggtcaaagccaaatcagtcgcgagcggcggcggtaacgagaacgagacgcgcgcgctagctgaatcaggagcagggcccagggaggagagtggagagccgccggcgagcagcaatgccttactgcgaggtgggcaggtacgcggacggcgacaagtgggagggcgtccgcctcttctaccgccgctacggcagcggcgccaccaagataaaggggctgaccgggtcgctggagccctccgacgacgaggccctgcggccggacgaggaggccggcgtcggcgcggcggaggccgcgccggcggaagcggacgacggcatcgaggtctgctgcttcgacaaccgcggtgtcggccgcagctccgtgctccccaacaaatcctactactcgacggcaatcatggccacggatgccttggccttgatcgatcatttggggtggaagaaggctcacgtcttcggccactccatgggtgccatgattgcttgcaagctagctgccatggcacctcacaggctatgttcgctggcattgcttaatgtcaccggaggtggctttcagtgcttcccaaaggtagacgcgcagatgctatctcttgcattccgtttcttaagggcaaaaactccagaggaaagagcccttgtggacctggaaacacattatacgaaggaataccttgaggagactgtcgggtcatgtactagaagaatggtcctctatcaagaatatgtgaagggcatatcgtcaacagggatgcaatccaattgtggttttgaagggcaagttaatgcatgctggactcacaaaatgactactaaggaactagatacaatacggtctgccggttttctagtttcagttattcatggaaggtacgatatcattgcacaattgtgccatgcaaaacgtctagcagaaaggcttcttcctgttgcaagaatggtagtgcctcatggtgcacatctagtgagccatgaaagaccagacgaggtgaacaatgcacttatggatttgataaaggccaccaaatctgagataaaacctgaagagtggtcagcccagcccgagaacacgtcggaaaccggggcgctcatttctgcgagacccatcaccgtcatggtgcgaacagatgcaggcgtagacgctaccgcagcggtctataacttgcttgggaagctgcaactgagcttcctttatctcataggcatgatactcatggggtttgaactcatgaggaacattgtaagggtgatgaagccagtaagggttgcagcaattgagtcgtaagtcataagaaccaaatacatgtacactgttcttgagaccttgtggtagtcgagatgggagatgatgattttagagtagcatctgctaacacatgtgaaactcggcctgctcctagtagcagaataatacgaaacactgagaaaacagtgcgcgcctggacagaaatgtctatggcaaggttgcccgttggcgtatgtacctataagagtatctgtaccataccgagatttggaatcgaagctttgctgcttatttcgtgtcgcgtcgctgggcatcttctttcctacatggcgctttacaacgctgcaaggtgacaaatagtagcgtaaaactgaagagagaacgaaagtggcagccacaactgggtttgttttgggtgtgacgtgtgcggtacctaataaaagtttagccacgtcaattctcttgccgtgctttcgggggaaaaaagaactgggtttcactggtgcaaatggcacgaaatatttttcctggtctgaatttgtttgtagtcgatcgtatctgagtgtaaattcgtttatttgagtttagatcggttaggataggagcctgaatatttaacatttgataccgtacctgaacttagatatttgtatttatatattcatgtatatggatagttggatact

SEQ ID NO: 63658 - DNA, 1846 bp, Zea Mays
tccgacggctataaataaccgccccccttcctccgcagctctgctctgctcccccgcgtctttccctctttttccaagcggtcaaagccaaatcagtcgcgagcggcggcggtaacgagaacgagacgcgcgcgctagctgaatcaggagcagggcccagggaggagagtggagagccgccggcgagcagcaatgccttactgcgaggtgggcaggtacgcggacggcgacaagtgggagggcgtccgcctcttctaccgccgctacggcagcggcgccaccaaggtgctcctcgtcatcggacggcaatcatggccacggatgccttggccttgatcgatcatttggggtggaagaaggctcacgtcttcggccactccatgggtgccatgattgcttgcaagctagctgccatggcacctcacaggctatgttcgctggcattgcttaatgtcaccggaggtggctttcagtgcttcccaaaggtagacgcgcagatgctatctcttgcattccgtttcttaagggcaaaaactccagaggaaagagcccttgtggacctggaaacacattatacgaaggaataccttgaggagactgtcgggtcatgtactagaagaatggtcctctatcaagaatatgtgaagggcatatcgtcaacagggatgcaatccaattgtggttttgaagggcaagttaatgcatgctggactcacaaaatgactactaaggaactagatacaatacggtctgccggttttctagtttcagttattcatggaaggtacgatatcattgcacaattgtgccatgcaaaacgtctagcagaaaggcttcttcctgttgcaagaatggtagtgcctcatggtgcacatctagtgagccatgaaagaccagacgaggtgaacaatgcacttatggatttgataaaggccaccaaatctgagataaaacctgaagagtggtcagcccagcccgagaacacgtcggaaaccggggcgctcatttctgcgagacccatcaccgtcatggtgcgaacagatgcaggcgtagacgctaccgcagcggtctataacttgcttgggaagctgcaactgagcttcctttatctcataggcatgatactcatggggtttgaactcatgaggaacattgtaagggtgatgaagccagtaagggttgcagcaattgagtcgtaagtcataagaaccaaatacatgtacactgttcttgagaccttgtggtagtcgagatgggagatgatgattttagagtagcatctgctaacacatgtgaaactcggcctgctcctagtagcagaataatacgaaacactgagaaaacagtgcgcgcctggacagaaatgtctatggcaaggttgcccgttggcgtatgtacctataagagtatctgtaccataccgagatttggaatcgaagctttgctgcttatttcgtgtcgcgtcgctgggcatcttctttcctacatggcgctttacaacgctgcaaggtgacaaatagtagcgtaaaactgaagagagaacgaaagtggcagccacaactgggtttgttttgggtgtgacgtgtgcggtacctaataaaagtttagccacgtcaattctcttgccgtgctttcgggggaaaaaagaactgggtttcactggtgcaaatggcacgaaatatttttcctggtctgaatttgtttgtagtcgatcgtatctgagtgtaaattcgtttatttgagtttagatcggttaggataggagcctgaatatttaacatttgataccgtacctgaacttagatatttgtatttatatattcatgtatatggatagttggatact

SEQ ID NO: 63659 - DNA, 1545 bp, Zea Mays
atacctttcccctatatgatctcttggtcagatcatgaatttcgtgacgaccagagctaaccaaagtagccgaaaaggaaccaatgcgagagcagtagaacttgcgccatgccatccacctgagacagtccggccggcccttttcaaccttgtctcaaatgattcgacaccttcctttctgacctttggcaagcactctgctaccacgagacgtgctgctgcccgcctttttgcttgtcaaaatcaagcgcctcgcacgtttcctgtctctagataaaaaaggcatcaattgggtcaaatcatcggttggattaaagataaaacggcatttgttttaagttttatgacttcttcctttggttattataagtcagtttcatctatgaatcgtttagggaaaaaaaatgaatgaatatgatatgatgtcaatcttaatctacggagtacaaatcgaaatgagaaacacgaactaccggggggtattccatcgattttattgtggggtactgtatgtacggccttttattattggggcacacaagtttttttttcagtactgatgcaggattttttttgggggacgaagaaatgaggccttcttttccaggacgaaatgcagttcagacttcagacacgtctaatgtctgctctgtttaaagaagaaaaaaatttcacaagaggcagcttctaaaaacgattcctcactgcaaagtctggaacttgcagctgttgaatcgtggttgtttgaactttgaactgctcctaaaaacgattcccctctctctgcctttttttccccttccttctactactactacgtcggaaacggaaagttccaacacgctgccgccagaaaatcgatctcgcggcagatgtggaacgctgaaggaatccggatccggagtccagcttttcaactcgtcaaagaaagcaggccaccgcgcgcgatcgtcgtcgtcgtcagtgagtggcgtgaggcagaagagtggtgtggacgattccatgcgtaaaacgagaagcggagggaagcgtgaaggaaggaacatatctgttggtgattccgaactggagaaacagccaaacgagcttatctgaaagctgcgtgtcatctgctctgttccctcgaatgtgcacaagaacagagaacacaaagcacgatcagatccatgggagctgggagctggcactactggcaactggattcacttgtgcggttgcactctacacagtcatctcagatacaagattacagagacgagggggggaaaaaactaagcactccgtcataaattattctaattttcttgtagggtcaaaatgtctctgtgtcagaaatttctgtgattttttcttgtaattttaatgaagcgaccgttacagtggctttaatttggaataacatacgaaagctaccgaattctgttccgatcgatcggagccggaggtggtacgcacaagatcagtcagtggcgcctgcccttggctttggcgttgccgccatccttgccctttccgccgccgaagagcctgcagaagccgcagacg

SEQ ID NO: 63660 - DNA, 1753 bp, Zea Mays
aaaaaatgttatttcatcatattccaaactgtgtagggtgttctaattttctaggaacagagtatacataaatatatagaaaatcttatgtatataaataaataaaaattaacatggaaggagtatatattactgttggatgatcaattcggtggaccgagtagacctaacaagaattttctatcttttttcagtgtggttctgatacctttcccctatatgatctcttggtcagatcatgaatttcgtgacgaccagagctaaccaaagtagccgaaaaggaaccaatgcgagagcagtagaacttgcgccatgccatccacctgagacagtccggccggcccttttcaaccttgtctcaaatgattcgacaccttcctttctgacctttggcaagcactctgctaccacgagacgtgctgctgcccgcctttttgcttgtcaaaatcaagcgcctcgcacgtttcctgtctctagataaaaaaggcatcaattgggtcaaatcatcggttggattaaagataaaacggcatttgttttaagttttatgacttcttcctttggttattataagtcagtttcatctatgaatcgtttagggaaaaaaaatgaatgaatatgatatgatgtcaatcttaatctacggagtacaaatcgaaatgagaaacacgaactaccggggggtattccatcgattttattgtggggtactgtatgtacggccttttattattggggcacacaagtttttttttcagtactgatgcaggattttttttgggggacgaagaaatgaggccttcttttccaggacgaaatgcagttcagacttcagacacgtctaatgtctgctctgtttaaagaagaaaaaaatttcacaagaggcagcttctaaaaacgattcctcactgcaaagtctggaacttgcagctgttgaatcgtggttgtttgaactttgaactgctcctaaaaacgattcccctctctctgcctttttttccccttccttctactactactacgtcggaaacggaaagttccaacacgctgccgccagaaaatcgatctcgcggcagatgtggaacgctgaaggaatccggatccggagtccagcttttcaactcgtcaaagaaagcaggccaccgcgcgcgatcgtcgtcgtcgtcagtgagtggcgtgaggcagaagagtggtgtggacgattccatgcgtaaaacgagaagcggagggaagcgtgaaggaaggaacatatctgttggtgattccgaactggagaaacagccaaacgagcttatctgaaagctgcgtgtcatctgctctgttccctcgaatgtgcacaaggaagaacagagaacacaaagcacgatcagatccatgggagctgggagctggcactactggcaactggattcacttgtgcggttgcactctacacagtcatctcagatacaagattacagagacgagggggggaaaaaactaagcactccgtcataaattattctaattttcttgtagggtcaaaatgtctctgtgtcagaaatttctgtgattttttcttgtaattttaatgaagcgaccgttacagtggctttaatttggaataacatacgaaagctaccgaattctgttccgatcgatcggagccggaggtggtacgcacaagatcagtcagtggcgcctgcccttggctttggcgttgccgccatccttgccctttccgccgccgaagagcctgcagaagccgcagacg

SEQ ID NO: 63661 - DNA, 1217 bp, Zea Mays
cagcatccaagttttcatccataggggccaaaacataaccagctaatcaacctgacgtggacttcagagctgaaactaaaccaacatgaccggagtccaaaaggaacttggagaggcttatcaagtcctaagtgatcctgggaaaaaggaggcgtatgataattatggaaaggagggtattccccaggataacatggtggatcctgctgctgtctttgggatgctttttggaagtgactattttgaagattacgttggccagcttgctctagcatctatagcttcagtggaggttgaggaaaactcaaatagtcaagaggcaagagcaaaagttcaagaaaagataaaagaattacaaagagaaagagaacaaaagcttactcagagtctgaaggaccgacttcaatcatatgtagatgggagaaatgatgaatttgtgagctatgcaagcgcagaagctaggcgtttatccgaagcagcatttggcgaggctatgcttcacaccattggttatatttatgtccggcaagcagcaagagaactcgggaaaagtagaatttacatgggtgtaccttttatagctgaatgggttagagacaaaggacaccacattaaatcacaggttaatgctgcttcaggtgctatttctctaatacaacttcaagaagggatgaaaaagatggaggggagtgaggacagcgaggagcaacttatgaagagttttgaggagaaaaaagatgccatgctcagctcgctttggaaaatcaatgtggttgatatcgagtccacgctctcacgtgtctgccaagcagttctgagagatagcatggtctccaaagatgtcctgaagctgcgagccaaagcgttgaaaaagctcggaacgatattccaaggcgcagagtctatgtaccgtcgtgaaaacagcctgcgcgttgaaacgagcacagaccaacaagccgcttcgtcacactgaagccacctgtggaccaccgtgtaggaatggatttggtgttttgtgtgtgtgtgtggctttcttctttgtttgtaattgtgtatgctatattaattttcttgtagaagatgtgaaacatttaacacaaagattttaactgctattgatgcagaaatataacctgcagctgccttttttctttcttgatggtagaattgtatttgtacacttatttgccaagtgtgttggcttcattgttcactat

SEQ ID NO: 63662 - DNA, 1512 bp, Zea Mays
acgaaactgacgcgagggcccagctcacggacctgtcctgtgtcctccgcagcacagcacgaccccatcggcgtcaccccggcgacttctgcgtcctctgccctccacgctcccccgctctgccaggcttcccagaagatttggttgatttccccccaatccagtgattccatccctgttctccacttccaccggaacctcccagagacttccagaaggctctagcgacccccgccgctttagagctacccgcggcgagattcaggagctgcctgccatggtgaaggacagcgcctactacgatgtcctggggctcagcgtcgacgcgtcccccgccgagatcaagaaggcgtattacattaaggcgaagctggtgcatccggacaagaatcccgggaaccctgacgcggcactcaagttccaggaacttggagaggcttatcaagtcctaagtgatcctgggaaaaaggaggcgtatgataattatggaaaggaggggataacatggtggatcctgctgctgtctttgggatgctttttggaagtgactattttgaagattacgttggccagcttgctctagcatctatagcttcagtggaggttgaggaaaactcaaatagtcaagaggcaagagcaaaagttcaagaaaagataaaagaattacaaagagaaagagaacaaaagcttactcagagtctgaaggaccgacttcaatcatatgtagatgggagaaatgatgaatttgtgagctatgcaagcgcagaagctaggcgtttatccgaagcagcatttggcgaggctatgcttcacaccattggttatatttatgtccggcaagcagcaagagaactcgggaaaagtagaatttacatgggtgtaccttttatagctgaatgggttagagacaaaggacaccacattaaatcacaggtgctatttctctaatacaacttcaagaagggatgaaaaagatggaggggagtgaggacagcgaggagcaacttatgaagagttttgaggagaaaaaagatgccatgctcagctcgctttggaaaatcaatgtggttgatatcgagtccacgctctcacgtgtctgccaagcagttctgagagatagcatggtctccaaagatgtcctgaagctgcgagccaaagcgttgaaaaagctcggaacgatattccaaggcgcagagtctatgtaccgtcgtgaaaacagcctgcgcgttgaaacgagcacagaccaacaagccgcttcgtcacactgaagccacctgtggaccaccgtgtaggaatggatttggtgttttgtgtgtgtgtgtggctttcttctttgtttgtaattgtgtatgctatattaattttcttgtagaagatgtgaaacatttaacacaaagattttaactgctattgatgcagaaatataacctgcagctgccttttttctttcttgatggtagaattgtatttgtacacttatttgccaagtgtgttggcttcattgttcactat

SEQ ID NO: 63663 - DNA, 1871 bp, Zea Mays
gacgaaactgacgcgagggcccagctcacggacctgtcctgtgtcctccgcagcacagcacgaccccatcggcgtcaccccggcgacttctgcgtcctctgccctccacgctcccccgctctgccaggcttcccagaagatttggttgatttccccccaatccagtgattccatccctgttctccacttccaccggaacctcccagagacttccagaaggctctagcgacccccgccgctttagagctacccgcggcgagattcaggagctgcctgccatggtgaaggacagcgcctactacgatgtcctggggctcagcgtcgacgcgtcccccgccgagatcaagaaggcgtattacattaaggcgaagctggtgcatccggacaagaatcccgggaaccctgacgcggcactcaagttccaggaacttggagaggcttatcaagtcctaagtgatcctgggaaaaaggaggcgtatgataattatggaaaggagggtattccccagtaagccatgcgttgtttctgatattttgcaaatattttctgtaaaaaggcagtctgttcatgattattcagattgaagtggtttatctgctttggggcatagagcatgatagtgcttaggatggatagatacttagatggcatcacaatgtgtgagctataaaagaatgcctgttttagggagaacagagagctgaatgctgttcaaaaggtcaattgcaatgttaacactctttttgaaacataatcttttcaaataaagctacagatgcttctatgaaaaaatgatgtaaattacttgtgacttgttctgtaaatcgtttcttagttgttttacaactcattcagggataacatggtggatcctgctgctgtctttgggatgctttttggaagtgactattttgaagattacgttggccagcttgctctagcatctatagcttcagtggaggttgaggaaaactcaaatagtcaagaggcaagagcaaaagttcaagaaaagataaaagaattacaaagagaaagagaacaaaagcttactcagagtctgaaggaccgacttcaatcatatgtagatgggagaaatgatgaatttgtgagctatgcaagcgcagaagctaggcgtttatccgaagcagcatttggcgaggctatgcttcacaccattggttatatttatgtccggcaagcagcaagagaactcgggaaaagtagaatttacatgggtgtaccttttatagctgaatgggttagagacaaaggacaccacattaaatcacaggtgctatttctctaatacaacttcaagaagggatgaaaaagatggaggggagtgaggacagcgaggagcaacttatgaagagttttgaggagaaaaaagatgccatgctcagctcgctttggaaaatcaatgtggttgatatcgagtccacgctctcacgtgtctgccaagcagttctgagagatagcatggtctccaaagatgtcctgaagctgcgagccaaagcgttgaaaaagctcggaacgatattccaaggcgcagagtctatgtaccgtcgtgaaaacagcctgcgcgttgaaacgagcacagaccaacaagccgcttcgtcacactgaagccacctgtggaccaccgtgtaggaatggatttggtgttttgtgtgtgtgtgtggctttcttctttgtttgtaattgtgtatgctatattaattttcttgtagaagatgtgaaacatttaacacaaagattttaactgctattgatgcagaaatataacctgcagctgccttttttctttcttgatggtagaattgtatttgtacacttatttgccaagtgtgttggcttcattgttcactat

SEQ ID NO: 63664 - DNA, 1741 bp, Zea Mays
cacctatctgcacgggattccacggaaaccagaaatcaccttgcccgaccgccccaagacgtccatgcccggtgtccgcgtgccaccgagtgacgcgacgaaactgacgcgagggcccagctcacggacctgtcctgtgtcctccgcagcacagcacgaccccatcggcgtcaccccggcgacttctgcgtcctctgccctccacgctcccccgctctgccaggcttcccagaagatttggttgatttccccccaatccagtgattccatccctgttctccacttccaccggaacctcccagagacttccagaaggctctagcgacccccgccggtatcgacctctgcctctccttcgtggcggaagatccggcccttctccccccgtcgattaccgtcggcctcctccattgccgctggcattaaccgtctcttggtgcctgtagctttagagctacccgcggcgagattcaggagctgcctgccatggtgaaggacagcgcctactacgatgtcctggggctcagcgtcgacgcgtcccccgccgagatcaagaaggcgtattacattaagctggtgcatccggacaagaatcccgggaaccctgacgcggcactcaagttccaggaacttggagaggcttatcaagtcctaagtgatcctgggaaaaaggaggcgtatgataattatggaaaggagggtattccccaggataacatggtggatcctgctgctgtctttgggatgctttttggaagtgactattttgaagattacgttggccagcttgctctagcatctatagcttcagtggaggttgaggaaaactcaaatagtcaagaggcaagagcaaaagttcaagaaaagataaaagaattacaaagagaaagagaacaaaagcttactcagagtctgaaggaccgacttcaatcatatgtagatgggagaaatgatgaatttgtgagctatgcaagcgcagaagctaggcgtttatccgaagcagcatttggcgaggctatgcttcacaccattggttatatttatgtccggcaagcagcaagagaactcgggaaaagtagaatttacatgggtgtaccttttatagctgaatgggttagagacaaaggacaccacattaaatcacaggttaatgctgcttcaggtgctatttctctaatacaacttcaagaagggatgaaaaagatggaggggagtgaggacagcgaggagcaacttatgaagagttttgaggagaaaaaagatgccatgctcagctcgctttggaaaatcaatgtggttgatatcgagtccacgctctcacgtgtctgccaagcagttctgagagatagcatggtctccaaagatgtcctgaagctgcgagccaaagcgttgaaaaagctcggaacgatattccaaggcgcagagtctatgtaccgtcgtgaaaacagcctgcgcgttgaaacgagcacagaccaacaagccgcttcgtcacactgaagccacctgtggaccaccgtgtaggaatggatttggtgttttgtgtgtgtgtgtggctttcttctttgtttgtaattgtgtatgctatattaattttcttgtagaagatgtgaaacatttaacacaaagattttaactgctattgatgcagaaatataacctgcagctgccttttttctttcttgatggtagaattgtatttgtacacttatttgccaagtgtgttggcttcattgttcactat

SEQ ID NO: 63665 - DNA, 2056 bp, Zea Mays
atttcaaacccgaattcatgtccaccgggtacgaaacccgtgggtatccatacccacgggtccaattgccatccctatgtgggtggagctcgctggtgcacggctggaggcagttgcagccttgcaggtgatgatggcgtggaaccccaggacgacctcatgcagtcctgcttgcattttgagtgggccgtattttacttgttgagctggacctagacacgtgagaaccaggtcgtgaagagatgaagacgtatgggacacactggccattggatttgcagcggatggcagtgatcgcgtgactgcagaggccagtcgatgagcgcgactgcagacaatcttgttccccgtccgcgaggcgcggagccccgactccatcgccgggagcccgggacccctacgccgcgccgctgccaccaacagcgacagccgagagggcgagccgcctgccgcggggccgcgacacgaccggcaaccggccgaggggcgaagcaacaggccagcgtggacgccgatcgtgccaagcgcccagtcccgattccgccctgtctaacagtacgagactctaagtccgccctggtgagtgtgcttcactgcttctccggttcttcccctcgcactggtcccgatggaatccgacgccgaggaggcggcggcggcggcggcggtggacccaggcgctggacggctgaaggggagcccggagctgactgtggacgcggacatgcgggaggtggcgaagagggccgcgtggagcgtcagttccttcaaggacggcaacggcgtcgcagccctgcgcgacgacaacctcgacgcctactggcagtctgatggggcggagccgcacctggtgaacatccggttccagaagaaggtgcagctgcagcttgttgctctctacgtggatttcaagctcgacgagagctacacgcccagcaagatctccatccgggccggggatggcttccacaacctcaaggagattaaaactgtggagcttgcaaagccagttggatgggttcatatatcattatccggggctgatccacggtatgcattgtaacttgaagatgaatggtagttcccaaaattatgagtatactctccctttatacatgtgggaggacaaaacaaatgtttgtggacaaagcaaatgtgcagacttaagctaacagccttggtttcttgttttggtttgagtctatgtgttgaattcgaaaagacttggatatcatgtcaggttagtcgtcagatactgacaaggtgtcgcttaatactgacacatttgaggcagataatactgcatctataatctcaccaggaaagagttaatatattttatctagtgaatgcttgaaggattttgtcatcgtaataatttaggaagtgaaactgttttttttaagttattggaagtgacactttgtttaaaccttgtactactttgattatacttttgtaatgtagacatatatattactctcgttttgggtatgtgtatgcagcgaaacattcattcacacatttatgctccaaattgcggttttatccaatcatctgaatgggagggatactcatgtccgacagatcaagatctatgggccaagaccgagccctgtcccccaccagccgttccatttcatttccagggagttcatcacgtactccactattagatgacagtgggtgcgcaaccaggagaaggaaacactgaggatcagtcggcagctcatggctctggatgatggtgcgcagttagggagtgtttggttaaaagaaccacttcatcgaagatgagatggtgcatcgtgaatctattgatcaaatttgatgagataacctcattgctcgtattaatactaactaactatgaggtggggtggtgatggatcaactcgttttattccacaaactaaaaaaaatgagaagtgagaaaatgatggtctagcttatttctcaaactaaacaccctattaatctctttgccttactccgtactgtctgtccggtcttgggcctgtagtagtggttaaggaggtataacatatttttgaac

SEQ ID NO: 63666 - DNA, 1496 bp, Zea Mays
atttcaaacccgaattcatgtccaccgggtacgaaacccgtgggtatccatacccacgggtccaattgccatccctatgtgggtggagctcgctggtgcacggctggaggcagttgcagccttgcaggtgatgatggcgtggaaccccaggacgacctcatgcagtcctgcttgcattttgagtgggccgtattttacttgttgagctggacctagacacgtgagaaccaggtcgtgaagagatgaagacgtatgggacacactggccattggatttgcagcggatggcagtgatcgcgtgactgcagaggccagtcgatgagcgcgactgcagacaatcttgttccccgtccgcgaggcgcggagccccgactccatcgccgggagcccgggacccctacgccgcgccgctgccaccaacagcgacagccgagagggcgagccgcctgccgcggggccgcgacacgaccggcaaccggccgaggggcgaagcaacaggccagcgtggacgccgatcgtgccaagcgcccagtcccgattccgccctgtctaacagtacgagactctaagtccgccctggtgagtgtgcttcactgcttctccggttcttcccctcgcactggtcccgatggaatccgacgccgaggaggcggcggcggcggcggcggtggacccaggcgctggacggctgaaggggagcccggagctgactgtggacgcggacatgcgggaggtggcgaagagggccgcgtggagcgtcagttccttcaaggacggcaacggcgtcgcagccctgcgcgacgacaacctcgacgcctactggcagtctgatggggcggagccgcacctggtgaacatccggttccagaagaaggtgcagctgcagcttgttgctctctacgtggatttcaagctcgacgagagctacacgcccagcaagatctccatccgggccggggatggcttccacaacctcaaggagattaaaactgtggagcttgcaaagccagttggatgggttcatatatcattatccggggctgatccacggagccctgtcccccaccagccgttccatttcatttccagggagttcatcacgtactccactattagatgacagtgggtgcgcaaccaggagaaggaaacactgaggatcagtcggcagctcatggctctggatgatggtgcgcagttagggagtgtttggttaaaagaaccacttcatcgaagatgagatggtgcatcgtgaatctattgatcaaatttgatgagataacctcattgctcgtattaatactaactaactatgaggtggggtggtgatggatcaactcgttttattccacaaactaaaaaaaatgagaagtgagaaaatgatggtctagcttatttctcaaactaaacaccctattaatctctttgccttactccgtactgtctgtccggtcttgggcctgtagtagtggttaaggaggtataacatatttttgaac

SEQ ID NO: 63667 - DNA, 1589 bp, Zea Mays
atttcaaacccgaattcatgtccaccgggtacgaaacccgtgggtatccatacccacgggtccaattgccatccctatgtgggtggagctcgctggtgcacggctggaggcagttgcagccttgcaggtgatgatggcgtggaaccccaggacgacctcatgcagtcctgcttgcattttgagtgggccgtattttacttgttgagctggacctagacacgtgagaaccaggtcgtgaagagatgaagacgtatgggacacactggccattggatttgcagcggatggcagtgatcgcgtgactgcagaggccagtcgatgagcgcgactgcagacaatcttgttccccgtccgcgaggcgcggagccccgactccatcgccgggagcccgggacccctacgccgcgccgctgccaccaacagcgacagccgagagggcgagccgcctgccgcggggccgcgacacgaccggcaaccggccgaggggcgaagcaacaggccagcgtggacgccgatcgtgccaagcgcccagtcccgattccgccctgtctaacagtacgagactctaagtccgccctggtgagtgtgcttcactgcttctccggttcttcccctcgcactggtcccgatggaatccgacgccgaggaggcggcggcggcggcggcggtggacccaggcgctggacggctgaaggggagcccggagctgactgtggacgcggacatgcgggaggtggcgaagagggccgcgtggagcgtcagttccttcaaggacggcaacggcgtcgcagccctgcgcgacgacaacctcgacgcctactggcagtctgatggggcggagccgcacctggtgaacatccggttccagaagaagcttgttgctctctacgtggatttcaagctcgacgagagctacacgcccagcaagatctccatccgggccggggatggcttccacaacctcaaggagattaaaactgtggagcttgcaaagccagttggatgggttcatatatcattatccggggctgatccacgcgaaacattcattcacacatttatgctccaaattgcggttttatccaatcatctgaatgggagggatactcatgtccgacagatcaagatctatgggccaagaccgagccctgtcccccaccagccgttccatttcatttccagggagttcatcacgtactccactattagatgacagtgggtgcgcaaccaggagaaggaaacactgaggatcagtcggcagctcatggctctggatgatggtgcgcagttagggagtgtttggttaaaagaaccacttcatcgaagatgagatggtgcatcgtgaatctattgatcaaatttgatgagataacctcattgctcgtattaatactaactaactatgaggtggggtggtgatggatcaactcgttttattccacaaactaaaaaaaatgagaagtgagaaaatgatggtctagcttatttctcaaactaaacaccctattaatctctttgccttactccgtactgtctgtccggtcttgggcctgtagtagtggttaaggaggtataacatatttttgaac

SEQ ID NO: 63668 - DNA, 1503 bp, Zea Mays
atttcaaacccgaattcatgtccaccgggtacgaaacccgtgggtatccatacccacgggtccaattgccatccctatgtgggtggagctcgctggtgcacggctggaggcagttgcagccttgcaggtgatgatggcgtggaaccccaggacgacctcatgcagtcctgcttgcattttgagtgggccgtattttacttgttgagctggacctagacacgtgagaaccaggtcgtgaagagatgaagacgtatgggacacactggccattggatttgcagcggatggcagtgatcgcgtgactgcagaggccagtcgatgagcgcgactgcagacaatcttgttccccgtccgcgaggcgcggagccccgactccatcgccgggagcccgggacccctacgccgcgccgctgccaccaacagcgacagccgagagggcgagccgcctgccgcggggccgcgacacgaccggcaaccggccgaggggcgaagcaacaggccagcgtggacgccgatcgtgccaagcgcccagtcccgattccgccctgtctaacagtacgagactctaagtccgccctggcgctggacggctgaaggggagcccggagctgactgtggacgcggacatgcgggaggtggcgaagagggccgcgtggagcgtcagttccttcaaggacggcaacggcgtcgcagccctgcgcgacgacaacctcgacgcctactggcagtctgatggggcggagccgcacctggtgaacatccggttccagaagaaggtgcagctgcagcttgttgctctctacgtggatttcaagctcgacgagagctacacgcccagcaagatctccatccgggccggggatggcttccacaacctcaaggagattaaaactgtggagcttgcaaagccagttggatgggttcatatatcattatccggggctgatccacgcgaaacattcattcacacatttatgctccaaattgcggttttatccaatcatctgaatgggagggatactcatgtccgacagatcaagatctatgggccaagaccgagccctgtcccccaccagccgttccatttcatttccagggagttcatcacgtactccactattagatgacagtgggtgcgcaaccaggagaaggaaacactgaggatcagtcggcagctcatggctctggatgatggtgcgcagttagggagtgtttggttaaaagaaccacttcatcgaagatgagatggtgcatcgtgaatctattgatcaaatttgatgagataacctcattgctcgtattaatactaactaactatgaggtggggtggtgatggatcaactcgttttattccacaaactaaaaaaaatgagaagtgagaaaatgatggtctagcttatttctcaaactaaacaccctattaatctctttgccttactccgtactgtctgtccggtcttgggcctgtagtagtggttaaggaggtataacatatttttgaac

SEQ ID NO: 63669 - DNA, 3686 bp, Zea Mays
gttccttccccaactatcgttaggcttctccaccccgccctccccgccctccccgccgaacgcgcctcactctccctccatgcagatcaatgcgtccttccaccccaaccgtgctcctcgcccttctctcgtcgtcctcgttccccctagactggcgtggagtgaagatccatccggactccgattgatttcttctcctgctgaagaaacggagagattcggccaagattgggatcaatctgcgcatgggtcggtatcgtataagaacgtatagttgcaggtgatcaagatccaatacttgaaaataggatgttgacatgttactgtttagatgacaccagatgataatgcccttatagctctcaaaaaaggcagtaaacttatcaagtatagtaggaagggaagacccaagattcgtgagttcagactttctagtgatgaaacatcattggtttggtattcccatagcaaagtgaagtaccttgtactgtcttctgtctctagaatcattcctggacaaagaactgctgtatttaggaggtttttacgccctgagaaggactacctatcattttctttgatatacaagaacggacaacgttcccttgacctggtttgcaaggatcaagcagaagttgaggtctggttttcaacgcttgaggcacttattacttcatgccgtaaaagttattcagctgatggtccaagtgatagattatcagtttctgacgaagtatcacattaccaagatacttttcatgatacaacactagatattgcatcgagtatcacacgtacttttaactcagcaaaaacagatgttgtatctgatcgtgcaaatatgctaagagcaagtacagacagtagccggcttagtatttccagtgcccctagttcttcaagtcaaggttctggacaagatgacattgaatcccttggtgatgtttatgtgtggggtgaggtgtggactgatatgatccctgcagaaggatccgcaaactatttgtgctccaaagcagacattttaattcccaaaccacttgaatcagatgttgtcttggacgtacaacagatagcgtgtggttataggcacattgcactcactactaggcaaggagaagtatttgcatggggcgaagaacttggcggacgacttggtcatgggaccgatgcagatattagccgtcctaaacttgtcgaagccttagcagtgtcaaatgtagaatatgttgcgtgcggcgagttccatacttgtgctataactgcctctggtgatttgtacacttggggtgatggatactacaatgctggattgcttggacatggtgctggaactagtcactggcttccaaaacgagtctcaggacctttagaaggggttcaggtattgtctgtttcatgtggttcatggcattcagcactgaccacatcaagtggtaaagtgttcacctttggtgatgggacatttggtgcccttggacatgggaatcgtcatactgtcgcatatccaaaggaagtcgaaactttgagtggatttagaacaataaaagttgcctgtggactctggcattctgcagcgattgtggagaccactaatcaggcaggtgtgaatgtgatatccaggaagctatttacctggggtgctggtgataagaatcccctaggtcacggggataaagatgctaggctagttcctacttgtgttcaatctctcattgattataatttccatcaggtagcttgtggacatagtatgaccattgccctttctacatctggtcatgttttcacaatgggcagctctagcaatggccagcttgggaatccaaaatctgatggtaaacatcctaccccagtacaagataggctggctggagaattggttgaagagatctcatgtggctcatgccatgttgcagtcttgacttcacgaagcgaagtatatacatggggaatgggagccaatgggaggctgggacatggtggtgttgaagataagaaaaaaccaactcttgtggaagcattaaaagatcgtcacgttaaaagtatagcatgtggttctaatttcacgacctgcatttgtatacataagtgggtttcaggtgctgatcagtctgtctgctcaggttgtaggcaaccatttggcttcacaagaaagagacataattgttacaattgtgggcttgttcattgccatgcatgtagttcaaaaaaagttctgaaagctgctttggcaccaactcctggcaaaccacatcgcgtatgtgattcatgcttcatgaagcttaaggcagcggagaccagcagcaacagctcacatagcaaaagaaatgccattgctcgtcgctctgttgatagcaaagacaggtcagagagaccagaaataaggtcttccaggcttgcaactggatcaacagcagaaccactcaagcaagctgagctgaaagcagttagaaacgagataaaaccagatcctatgtccacgatgagggcaccccaagttccttccatgctaccttttaacaatcttgcttttggcgcaacatttggtggtccagctagtctgaagcccatgacaatggctccaatgccaatggccatgcctatgtcaccagctcctctcacaaagaagccaactccagcagcagcaactcctctttgtggtaaaagtgataccgataacttgaagatggctaaacaggtgctgaatgaagatatctcaaagttgcaatctcaggttaataaactgaaacaaaaatgtgatgcccaagaagagcaactgcagaaagcggaaaggagagctgaacattctgcctctacagctgcagaagagtcttcaaggcgtaatggtgtcttggagttcattaggttccttgacaatgagctcaagagcatcgcagatagggtgcccagcgacgctgccgacggcttaaaagccttgcaaaaccattcggagaggtttctcacagaacaaggtgttcgtccactggaagccacaggtatgcatcgtaagtgcgcaagcataggcaacctcgtaatgtctcaggacggcagtgctggaaacgcgagcagctcggctgcttccttggcgagcgagtctccatgccaccgtatcatggagaacagctcgagagctaacggcgacttagcaccgaagctcggtggtacccatggagaagtgcagctgattgagcagtttgaaccgggggtgtatgtgacgctcatccagcttagagatggcactaaggtgttcaagcgtgtccggttcagcaagaggaggtttgcggagcagcaggccgaggaatggtggagggagaaccaggagagagtgttcaggaaatacaaccacccggccaactaaccagcctcaccagacttcaccattggacacttcaagaagaaggcaaagttttcttcatgttgcttggggcattgctcctgcggctgtgtgccgtgggcctgtggcgatgtagaattaggttgtggatggggaagatgctgatgtagattctcattctgttgttgtttacctcctacagtttaccctttctctagctcacctcctacagtttactgtttcgcagttttgatatctcaaattattcattcaacagccgtgtgtttggttggaatgtgtttcgttggatcgcggcggtgaaaaaaactgacgtggaccgtgagttatg

SEQ ID NO: 63670 - DNA, 3680 bp, Zea Mays
gttccttccccaactatcgttaggcttctccaccccgccctccccgccctccccgccgaacgcgcctcactctccctccatgcagatcaatgcgtccttccaccccaaccgtgctcctcgcccttctctcgtcgtcctcgttccccctagactggcgtggagtgaagatccatccggactccgattgatttcttctcctgctgaagaaacggagagattcggccaagattgggatcaatctgcgcatgggtcggtatcgtataagaacttgcaggtgatcaagatccaatacttgaaaataggatgttgacatgttactgtttagatgacaccagatgataatgcccttatagctctcaaaaaaggcagtaaacttatcaagtatagtaggaagggaagacccaagattcgtgagttcagactttctagtgatgaaacatcattggtttggtattcccatagcaaagtgaagtaccttgtactgtcttctgtctctagaatcattcctggacaaagaactgctgtatttaggaggtttttacgccctgagaaggactacctatcattttctttgatatacaagaacggacaacgttcccttgacctggtttgcaaggatcaagcagaagttgaggtctggttttcaacgcttgaggcacttattacttcatgccgtaaaagttattcagctgatggtccaagtgatagattatcagtttctgacgaagtatcacattaccaagatacttttcatgatacaacactagatattgcatcgagtatcacacgtacttttaactcagcaaaaacagatgttgtatctgatcgtgcaaatatgctaagagcaagtacagacagtagccggcttagtatttccagtgcccctagttcttcaagtcaaggttctggacaagatgacattgaatcccttggtgatgtttatgtgtggggtgaggtgtggactgatatgatccctgcagaaggatccgcaaactatttgtgctccaaagcagacattttaattcccaaaccacttgaatcagatgttgtcttggacgtacaacagatagcgtgtggttataggcacattgcactcactactaggcaaggagaagtatttgcatggggcgaagaacttggcggacgacttggtcatgggaccgatgcagatattagccgtcctaaacttgtcgaagccttagcagtgtcaaatgtagaatatgttgcgtgcggcgagttccatacttgtgctataactgcctctggtgatttgtacacttggggtgatggatactacaatgctggattgcttggacatggtgctggaactagtcactggcttccaaaacgagtctcaggacctttagaaggggttcaggtattgtctgtttcatgtggttcatggcattcagcactgaccacatcaagtggtaaagtgttcacctttggtgatgggacatttggtgcccttggacatgggaatcgtcatactgtcgcatatccaaaggaagtcgaaactttgagtggatttagaacaataaaagttgcctgtggactctggcattctgcagcgattgtggagaccactaatcaggcaggtgtgaatgtgatatccaggaagctatttacctggggtgctggtgataagaatcccctaggtcacggggataaagatgctaggctagttcctacttgtgttcaatctctcattgattataatttccatcaggtagcttgtggacatagtatgaccattgccctttctacatctggtcatgttttcacaatgggcagctctagcaatggccagcttgggaatccaaaatctgatggtaaacatcctaccccagtacaagataggctggctggagaattggttgaagagatctcatgtggctcatgccatgttgcagtcttgacttcacgaagcgaagtatatacatggggaatgggagccaatgggaggctgggacatggtggtgttgaagataagaaaaaaccaactcttgtggaagcattaaaagatcgtcacgttaaaagtatagcatgtggttctaatttcacgacctgcatttgtatacataagtgggtttcaggtgctgatcagtctgtctgctcaggttgtaggcaaccatttggcttcacaagaaagagacataattgttacaattgtgggcttgttcattgccatgcatgtagttcaaaaaaagttctgaaagctgctttggcaccaactcctggcaaaccacatcgcgtatgtgattcatgcttcatgaagcttaaggcagcggagaccagcagcaacagctcacatagcaaaagaaatgccattgctcgtcgctctgttgatagcaaagacaggtcagagagaccagaaataaggtcttccaggcttgcaactggatcaacagcagaaccactcaagcaagctgagctgaaagcagttagaaacgagataaaaccagatcctatgtccacgatgagggcaccccaagttccttccatgctaccttttaacaatcttgcttttggcgcaacatttggtggtccagctagtctgaagcccatgacaatggctccaatgccaatggccatgcctatgtcaccagctcctctcacaaagaagccaactccagcagcagcaactcctctttgtggtaaaagtgataccgataacttgaagatggctaaacaggtgctgaatgaagatatctcaaagttgcaatctcaggttaataaactgaaacaaaaatgtgatgcccaagaagagcaactgcagaaagcggaaaggagagctgaacattctgcctctacagctgcagaagagtcttcaaggcgtaatggtgtcttggagttcattaggttccttgacaatgagctcaagagcatcgcagatagggtgcccagcgacgctgccgacggcttaaaagccttgcaaaaccattcggagaggtttctcacagaacaaggtgttcgtccactggaagccacaggtatgcatcgtaagtgcgcaagcataggcaacctcgtaatgtctcaggacggcagtgctggaaacgcgagcagctcggctgcttccttggcgagcgagtctccatgccaccgtatcatggagaacagctcgagagctaacggcgacttagcaccgaagctcggtggtacccatggagaagtgcagctgattgagcagtttgaaccgggggtgtatgtgacgctcatccagcttagagatggcactaaggtgttcaagcgtgtccggttcagcaagaggaggtttgcggagcagcaggccgaggaatggtggagggagaaccaggagagagtgttcaggaaatacaaccacccggccaactaaccagcctcaccagacttcaccattggacacttcaagaagaaggcaaagttttcttcatgttgcttggggcattgctcctgcggctgtgtgccgtgggcctgtggcgatgtagaattaggttgtggatggggaagatgctgatgtagattctcattctgttgttgtttacctcctacagtttaccctttctctagctcacctcctacagtttactgtttcgcagttttgatatctcaaattattcattcaacagccgtgtgtttggttggaatgtgtttcgttggatcgcggcggtgaaaaaaactgacgtggaccgtgagttatg

SEQ ID NO: 63671 - DNA, 3658 bp, Zea Mays
gttccttccccaactatcgttaggcttctccaccccgccctccccgccctccccgccgaacgcgcctcactctccctccatgcagatcaatgcgtccttccaccccaaccgtgctcctcgcccttctctcgtcgtcctcgttccccctagactggcgtggagtgaagatccatccggactccgattgatttcttctcctgctgaaacggagagattcggccaagattgggatcaatctgcgcatggttgcaggtgatcaagatccaatacttgaaaataggatgttgacatgttactgtttagatgacaccagatgataatgcccttatagctctcaaaaaaggcagtaaacttatcaagtatagtaggaagggaagacccaagattcgtgagttcagactttctagtgatgaaacatcattggtttggtattcccatagcaaagtgaagtaccttgtactgtcttctgtctctagaatcattcctggacaaagaactgctgtatttaggaggtttttacgccctgagaaggactacctatcattttctttgatatacaagaacggacaacgttcccttgacctggtttgcaaggatcaagcagaagttgaggtctggttttcaacgcttgaggcacttattacttcatgccgtaaaagttattcagctgatggtccaagtgatagattatcagtttctgacgaagtatcacattaccaagatacttttcatgatacaacactagatattgcatcgagtatcacacgtacttttaactcagcaaaaacagatgttgtatctgatcgtgcaaatatgctaagagcaagtacagacagtagccggcttagtatttccagtgcccctagttcttcaagtcaaggttctggacaagatgacattgaatcccttggtgatgtttatgtgtggggtgaggtgtggactgatatgatccctgcagaaggatccgcaaactatttgtgctccaaagcagacattttaattcccaaaccacttgaatcagatgttgtcttggacgtacaacagatagcgtgtggttataggcacattgcactcactactaggcaaggagaagtatttgcatggggcgaagaacttggcggacgacttggtcatgggaccgatgcagatattagccgtcctaaacttgtcgaagccttagcagtgtcaaatgtagaatatgttgcgtgcggcgagttccatacttgtgctataactgcctctggtgatttgtacacttggggtgatggatactacaatgctggattgcttggacatggtgctggaactagtcactggcttccaaaacgagtctcaggacctttagaaggggttcaggtattgtctgtttcatgtggttcatggcattcagcactgaccacatcaagtggtaaagtgttcacctttggtgatgggacatttggtgcccttggacatgggaatcgtcatactgtcgcatatccaaaggaagtcgaaactttgagtggatttagaacaataaaagttgcctgtggactctggcattctgcagcgattgtggagaccactaatcaggcaggtgtgaatgtgatatccaggaagctatttacctggggtgctggtgataagaatcccctaggtcacggggataaagatgctaggctagttcctacttgtgttcaatctctcattgattataatttccatcaggtagcttgtggacatagtatgaccattgccctttctacatctggtcatgttttcacaatgggcagctctagcaatggccagcttgggaatccaaaatctgatggtaaacatcctaccccagtacaagataggctggctggagaattggttgaagagatctcatgtggctcatgccatgttgcagtcttgacttcacgaagcgaagtatatacatggggaatgggagccaatgggaggctgggacatggtggtgttgaagataagaaaaaaccaactcttgtggaagcattaaaagatcgtcacgttaaaagtatagcatgtggttctaatttcacgacctgcatttgtatacataagtgggtttcaggtgctgatcagtctgtctgctcaggttgtaggcaaccatttggcttcacaagaaagagacataattgttacaattgtgggcttgttcattgccatgcatgtagttcaaaaaaagttctgaaagctgctttggcaccaactcctggcaaaccacatcgcgtatgtgattcatgcttcatgaagcttaaggcagcggagaccagcagcaacagctcacatagcaaaagaaatgccattgctcgtcgctctgttgatagcaaagacaggtcagagagaccagaaataaggtcttccaggcttgcaactggatcaacagcagaaccactcaagcaagctgagctgaaagcagttagaaacgagataaaaccagatcctatgtccacgatgagggcaccccaagttccttccatgctaccttttaacaatcttgcttttggcgcaacatttggtggtccagctagtctgaagcccatgacaatggctccaatgccaatggccatgcctatgtcaccagctcctctcacaaagaagccaactccagcagcagcaactcctctttgtggtaaaagtgataccgataacttgaagatggctaaacaggtgctgaatgaagatatctcaaagttgcaatctcaggttaataaactgaaacaaaaatgtgatgcccaagaagagcaactgcagaaagcggaaaggagagctgaacattctgcctctacagctgcagaagagtcttcaaggcgtaatggtgtcttggagttcattaggttccttgacaatgagctcaagagcatcgcagatagggtgcccagcgacgctgccgacggcttaaaagccttgcaaaaccattcggagaggtttctcacagaacaaggtgttcgtccactggaagccacaggtatgcatcgtaagtgcgcaagcataggcaacctcgtaatgtctcaggacggcagtgctggaaacgcgagcagctcggctgcttccttggcgagcgagtctccatgccaccgtatcatggagaacagctcgagagctaacggcgacttagcaccgaagctcggtggtacccatggagaagtgcagctgattgagcagtttgaaccgggggtgtatgtgacgctcatccagcttagagatggcactaaggtgttcaagcgtgtccggttcagcaagaggaggtttgcggagcagcaggccgaggaatggtggagggagaaccaggagagagtgttcaggaaatacaaccacccggccaactaaccagcctcaccagacttcaccattggacacttcaagaagaaggcaaagttttcttcatgttgcttggggcattgctcctgcggctgtgtgccgtgggcctgtggcgatgtagaattaggttgtggatggggaagatgctgatgtagattctcattctgttgttgtttacctcctacagtttaccctttctctagctcacctcctacagtttactgtttcgcagttttgatatctcaaattattcattcaacagccgtgtgtttggttggaatgtgtttcgttggatcgcggcggtgaaaaaaactgacgtggaccgtgagttatg

SEQ ID NO: 63672 - DNA, 3887 bp, Zea Mays
gttccttccccaactatcgttaggcttctccaccccgccctccccgccctccccgccgaacgcgcctcactctccctccatgcagatcaatgcgtccttccaccccaaccgtgctcctcgcccttctctcgtcgtcctcgttccccctagactggcgtggagtgaagatccatccggactccgattgatttcttctcctgctgaagaaacggagagattcggccaagattgggatcaatctgcgcatgggtcggtatcgtataagaacgtataggttgctgtcgctcaatctggaaattttgtattgttatgaccaccgtacaattttctccaatataattaacgacgtttcatgttgatatgttctgaatccgttctttgttttgctgaggtcccaacgttcacctgtatgcgcagttgcaggtgatcaagatccaatacttgaaaataggatgttgacatgttactgtttagatgacaccagatgataatgcccttatagctctcaaaaaaggcagtaaacttatcaagtatagtaggaagggaagacccaagattcgtgagttcagactttctagtgatgaaacatcattggtttggtattcccatagcaaagtgaagtaccttgtactgtcttctgtctctagaatcattcctggacaaagaactgctgtatttaggaggtttttacgccctgagaaggactacctatcattttctttgatatacaagaacggacaacgttcccttgacctgctgatctacaggtttgcaaggatcaagcagaagttgaggtctggttttcaacgcttgaggcacttattacttcatgccgtaaaagttattcagctgatggtccaagtgatagattatcagtttctgacgaagtatcacattaccaagatacttttcatgatacaacactagatattgcatcgagtatcacacgtacttttaactcagcaaaaacagatgttgtatctgatcgtgcaaatatgctaagagcaagtacagacagtagccggcttagtatttccagtgcccctagttcttcaagtcaaggttctggacaagatgacattgaatcccttggtgatgtttatgtgtggggtgaggtgtggactgatatgatccctgcagaaggatccgcaaactatttgtgctccaaagcagacattttaattcccaaaccacttgaatcagatgttgtcttggacgtacaacagatagcgtgtggttataggcacattgcactcactactaggcaaggagaagtatttgcatggggcgaagaacttggcggacgacttggtcatgggaccgatgcagatattagccgtcctaaacttgtcgaagccttagcagtgtcaaatgtagaatatgttgcgtgcggcgagttccatacttgtgctataactgcctctggtgatttgtacacttggggtgatggatactacaatgctggattgcttggacatggtgctggaactagtcactggcttccaaaacgagtctcaggacctttagaaggggttcaggtattgtctgtttcatgtggttcatggcattcagcactgaccacatcaagtggtaaagtgttcacctttggtgatgggacatttggtgcccttggacatgggaatcgtcatactgtcgcatatccaaaggaagtcgaaactttgagtggatttagaacaataaaagttgcctgtggactctggcattctgcagcgattgtggagaccactaatcaggcaggtgtgaatgtgatatccaggaagctatttacctggggtgctggtgataagaatcccctaggtcacggggataaagatgctaggctagttcctacttgtgttcaatctctcattgattataatttccatcaggtagcttgtggacatagtatgaccattgccctttctacatctggtcatgttttcacaatgggcagctctagcaatggccagcttgggaatccaaaatctgatggtaaacatcctaccccagtacaagataggctggctggagaattggttgaagagatctcatgtggctcatgccatgttgcagtcttgacttcacgaagcgaagtatatacatggggaatgggagccaatgggaggctgggacatggtggtgttgaagataagaaaaaaccaactcttgtggaagcattaaaagatcgtcacgttaaaagtatagcatgtggttctaatttcacgacctgcatttgtatacataagtgggtttcaggtgctgatcagtctgtctgctcaggttgtaggcaaccatttggcttcacaagaaagagacataattgttacaattgtgggcttgttcattgccatgcatgtagttcaaaaaaagttctgaaagctgctttggcaccaactcctggcaaaccacatcgcgtatgtgattcatgcttcatgaagcttaaggcagcggagaccagcagcaacagctcacatagcaaaagaaatgccattgctcgtcgctctgttgatagcaaagacaggtcagagagaccagaaataaggtcttccaggcttgcaactggatcaacagcagaaccactcaagcaagctgagctgaaagcagttagaaacgagataaaaccagatcctatgtccacgatgagggcaccccaagttccttccatgctaccttttaacaatcttgcttttggcgcaacatttggtggtccagctagtctgaagcccatgacaatggctccaatgccaatggccatgcctatgtcaccagctcctctcacaaagaagccaactccagcagcagcaactcctctttgtggtaaaagtgataccgataacttgaagatggctaaacaggtgctgaatgaagatatctcaaagttgcaatctcaggttaataaactgaaacaaaaatgtgatgcccaagaagagcaactgcagaaagcggaaaggagagctgaacattctgcctctacagctgcagaagagtcttcaaggcgtaatggtgtcttggagttcattaggttccttgacaatgagtatcaactatcaagacttctatactccagttaaaaatacaaatagagctcaagagcatcgcagatagggtgcccagcgacgctgccgacggcttaaaagccttgcaaaaccattcggagaggtttctcacagaacaaggtgttcgtccactggaagccacaggtatgcatcgtaagtgcgcaagcataggcaacctcgtaatgtctcaggacggcagtgctggaaacgcgagcagctcggctgcttccttggcgagcgagtctccatgccaccgtatcatggagaacagctcgagagctaacggcgacttagcaccgaagctcggtggtacccatggagaagtgcagctgattgagcagtttgaaccgggggtgtatgtgacgctcatccagcttagagatggcactaaggtgttcaagcgtgtccggttcagcaagaggaggtttgcggagcagcaggccgaggaatggtggagggagaaccaggagagagtgttcaggaaatacaaccacccggccaactaaccagcctcaccagacttcaccattggacacttcaagaagaaggcaaagttttcttcatgttgcttggggcattgctcctgcggctgtgtgccgtgggcctgtggcgatgtagaattaggttgtggatggggaagatgctgatgtagattctcattctgttgttgtttacctcctacagtttaccctttctctagctcacctcctacagtttactgtttcgcagttttgatatctcaaattattcattcaacagccgtgtgtttggttggaatgtgtttcgttggatcgcggcggtgaaaaaaactgacgtggaccgtgagttatg

SEQ ID NO: 63673 - DNA, 3832 bp, Zea Mays
gttccttccccaactatcgttaggcttctccaccccgccctccccgccctccccgccgaacgcgcctcactctccctccatgcagatcaatgcgtccttccaccccaaccgtgctcctcgcccttctctcgtcgtcctcgttccccctagactggcgtggagtgaagatccatccggactccgattgatttcttctcctgctgcagaagaaacggagagattcggccaagattgggatcaatctgcgcatgggtcggtatcgtataagaacgtataggttgctgtcgctcaatctggaaattttgtattgttatgaccaccgtacaattttctccaatataattaacgacgtttcatgttgatatgttctgaatccgttctttgttttgctgaggtcccaacgttcacctgtatgcgcagttgcaggtgatcaagatccaatacttgaaaataggatgttgacatgttactgtttagatgacaccagatgataatgcccttatagctctcaaaaaaggcagtaaacttatcaagtatagtaggaagggaagacccaagattcgtgagttcagactttctagtgatgaaacatcattggtttggtattcccatagcaaagtgaagtaccttgtactgtcttctgtctctagaatcattcctggacaaagaactgctgtatttaggaggtttttacgccctgagaaggactacctatcattttctttgatatacaagaacggacaacgttcccttgacctggtttgcaaggatcaagcagaagttgaggtctggttttcaacgcttgaggcacttattacttcatgccgtaaaagttattcagctgatggtccaagtgatagattatcagtttctgacgaagtatcacattaccaagatacttttcatgatacaacactagatattgcatcgagtatcacacgtacttttaactcagcaaaaacagatgttgtatctgatcgtgcaaatatgctaagagcaagtacagacagtagccggcttagtatttccagtgcccctagttcttcaagtcaaggttctggacaagatgacattgaatcccttggtgatgtttatgtgtggggtgaggtgtggactgatatgatccctgcagaaggatccgcaaactatttgtgctccaaagcagacattttaattcccaaaccacttgaatcagatgttgtcttggacgtacaacagatagcgtgtggttataggcacattgcactcactactaggcaaggagaagtatttgcatggggcgaagaacttggcggacgacttggtcatgggaccgatgcagatattagccgtcctaaacttgtcgaagccttagcagtgtcaaatgtagaatatgttgcgtgcggcgagttccatacttgtgctataactgcctctggtgatttgtacacttggggtgatggatactacaatgctggattgcttggacatggtgctggaactagtcactggcttccaaaacgagtctcaggacctttagaaggggttcaggtattgtctgtttcatgtggttcatggcattcagcactgaccacatcaagtggtaaagtgttcacctttggtgatgggacatttggtgcccttggacatgggaatcgtcatactgtcgcatatccaaaggaagtcgaaactttgagtggatttagaacaataaaagttgcctgtggactctggcattctgcagcgattgtggagaccactaatcaggcaggtgtgaatgtgatatccaggaagctatttacctggggtgctggtgataagaatcccctaggtcacggggataaagatgctaggctagttcctacttgtgttcaatctctcattgattataatttccatcaggtagcttgtggacatagtatgaccattgccctttctacatctggtcatgttttcacaatgggcagctctagcaatggccagcttgggaatccaaaatctgatggtaaacatcctaccccagtacaagataggctggctggagaattggttgaagagatctcatgtggctcatgccatgttgcagtcttgacttcacgaagcgaagtatatacatggggaatgggagccaatgggaggctgggacatggtggtgttgaagataagaaaaaaccaactcttgtggaagcattaaaagatcgtcacgttaaaagtatagcatgtggttctaatttcacgacctgcatttgtatacataagtgggtttcaggtgctgatcagtctgtctgctcaggttgtaggcaaccatttggcttcacaagaaagagacataattgttacaattgtgggcttgttcattgccatgcatgtagttcaaaaaaagttctgaaagctgctttggcaccaactcctggcaaaccacatcgcgtatgtgattcatgcttcatgaagcttaaggcagcggagaccagcagcaacagctcacatagcaaaagaaatgccattgctcgtcgctctgttgatagcaaagacaggtcagagagaccagaaataaggtcttccaggcttgcaactggatcaacagcagaaccactcaagcaagctgagctgaaagcagttagaaacgagataaaaccagatcctatgtccacgatgagggcaccccaagttccttccatgctaccttttaacaatcttgcttttggcgcaacatttggtggtccagctagtctgaagcccatgacaatggctccaatgccaatggccatgcctatgtcaccagctcctctcacaaagaagccaactccagcagcagcaactcctctttgtggtaaaagtgataccgataacttgaagatggctaaacaggtgctgaatgaagatatctcaaagttgcaatctcaggttaataaactgaaacaaaaatgtgatgcccaagaagagcaactgcagaaagcggaaaggagagctgaacattctgcctctacagctgcagaagagtcttcaaggcgtaatggtgtcttggagttcattaggttccttgacaatgagctcaagagcatcgcagatagggtgcccagcgacgctgccgacggcttaaaagccttgcaaaaccattcggagaggtttctcacagaacaaggtgttcgtccactggaagccacaggtatgcatcgtaagtgcgcaagcataggcaacctcgtaatgtctcaggacggcagtgctggaaacgcgagcagctcggctgcttccttggcgagcgagtctccatgccaccgtatcatggagaacagctcgagagctaacggcgacttagcaccgaagctcggtggtacccatggagaagtgcagctgattgagcagtttgaaccgggggtgtatgtgacgctcatccagcttagagatggcactaaggtgttcaagcgtgtccggttcagcaagaggaggtttgcggagcagcaggccgaggaatggtggagggagaaccaggagagagtgttcaggaaatacaaccacccggccaactaaccagcctcaccagacttcaccattggacacttcaagaagaaggcaaagttttcttcatgttgcttggggcattgctcctgcggctgtgtgccgtgggcctgtggcgatgtagaattaggttgtggatggggaagatgctgatgtagattctcattctgttgttgtttacctcctacagtttaccctttctctagctcacctcctacagtttactgtttcgcagttttgatatctcaaattattcattcaacagccgtgtgtttggttggaatgtgtttcgttggatcgcggcggtgaaaaaaactgacgtggaccgtgagttatg

SEQ ID NO: 63674 - DNA, 3676 bp, Zea Mays
gttccttccccaactatcgttaggcttctccaccccgccctccccgccctccccgccgaacgcgcctcactctccctccatgcagatcaatgcgtccttccaccccaaccgtgctcctcgcccttctctcgtcgtcctcgttccccctagactggcgtggagtgaagatccatccggactccgattgatttcttctcctgctgaagaaacggagagattcggccaagattgggatcaatctgcgcatgggtcggtatcgtataagaacgtatagttgcaggtgatcaagatccaatacttgaaaataggatgttgacatgttactgtttagatgacaccagatgataatctctcaaaaaaggcagtaaacttatcaagtatagtaggaagggaagacccaagattcgtgagttcagactttctagtgatgaaacatcattggtttggtattcccatagcaaagtgaagtaccttgtactgtcttctgtctctagaatcattcctggacaaagaactgctgtatttaggaggtttttacgccctgagaaggactacctatcattttctttgatatacaagaacggacaacgttcccttgacctggtttgcaaggatcaagcagaagttgaggtctggttttcaacgcttgaggcacttattacttcatgccgtaaaagttattcagctgatggtccaagtgatagattatcagtttctgacgaagtatcacattaccaagatacttttcatgatacaacactagatattgcatcgagtatcacacgtacttttaactcagcaaaaacagatgttgtatctgatcgtgcaaatatgctaagagcaagtacagacagtagccggcttagtatttccagtgcccctagttcttcaagtcaaggttctggacaagatgacattgaatcccttggtgatgtttatgtgtggggtgaggtgtggactgatatgatccctgcagaaggatccgcaaactatttgtgctccaaagcagacattttaattcccaaaccacttgaatcagatgttgtcttggacgtacaacagatagcgtgtggttataggcacattgcactcactactaggcaaggagaagtatttgcatggggcgaagaacttggcggacgacttggtcatgggaccgatgcagatattagccgtcctaaacttgtcgaagccttagcagtgtcaaatgtagaatatgttgcgtgcggcgagttccatacttgtgctataactgcctctggtgatttgtacacttggggtgatggatactacaatgctggattgcttggacatggtgctggaactagtcactggcttccaaaacgagtctcaggacctttagaaggggttcaggtattgtctgtttcatgtggttcatggcattcagcactgaccacatcaagtggtaaagtgttcacctttggtgatgggacatttggtgcccttggacatgggaatcgtcatactgtcgcatatccaaaggaagtcgaaactttgagtggatttagaacaataaaagttgcctgtggactctggcattctgcagcgattgtggagaccactaatcaggcaggtgtgaatgtgatatccaggaagctatttacctggggtgctggtgataagaatcccctaggtcacggggataaagatgctaggctagttcctacttgtgttcaatctctcattgattataatttccatcaggtagcttgtggacatagtatgaccattgccctttctacatctggtcatgttttcacaatgggcagctctagcaatggccagcttgggaatccaaaatctgatggtaaacatcctaccccagtacaagataggctggctggagaattggttgaagagatctcatgtggctcatgccatgttgcagtcttgacttcacgaagcgaagtatatacatggggaatgggagccaatgggaggctgggacatggtggtgttgaagataagaaaaaaccaactcttgtggaagcattaaaagatcgtcacgttaaaagtatagcatgtggttctaatttcacgacctgcatttgtatacataagtgggtttcaggtgctgatcagtctgtctgctcaggttgtaggcaaccatttggcttcacaagaaagagacataattgttacaattgtgggcttgttcattgccatgcatgtagttcaaaaaaagttctgaaagctgctttggcaccaactcctggcaaaccacatcgcgtatgtgattcatgcttcatgaagcttaaggcagcggagaccagcagcaacagctcacatagcaaaagaaatgccattgctcgtcgctctgttgatagcaaagacaggtcagagagaccagaaataaggtcttccaggcttgcaactggatcaacagcagaaccactcaagcaagctgagctgaaagcagttagaaacgagataaaaccagatcctatgtccacgatgagggcaccccaagttccttccatgctaccttttaacaatcttgcttttggcgcaacatttggtggtccagctagtctgaagcccatgacaatggctccaatgccaatggccatgcctatgtcaccagctcctctcacaaagaagccaactccagcagcagcaactcctctttgtggtaaaagtgataccgataacttgaagatggctaaacaggtgctgaatgaagatatctcaaagttgcaatctcaggttaataaactgaaacaaaaatgtgatgcccaagaagagcaactgcagaaagcggaaaggagagctgaacattctgcctctacagctgcagaagagtcttcaaggcgtaatggtgtcttggagttcattaggttccttgacaatgagctcaagagcatcgcagatagggtgcccagcgacgctgccgacggcttaaaagccttgcaaaaccattcggagaggtttctcacagaacaaggtgttcgtccactggaagccacaggtatgcatcgtaagtgcgcaagcataggcaacctcgtaatgtctcaggacggcagtgctggaaacgcgagcagctcggctgcttccttggcgagcgagtctccatgccaccgtatcatggagaacagctcgagagctaacggcgacttagcaccgaagctcggtggtacccatggagaagtgcagctgattgagcagtttgaaccgggggtgtatgtgacgctcatccagcttagagatggcactaaggtgttcaagcgtgtccggttcagcaagaggaggtttgcggagcagcaggccgaggaatggtggagggagaaccaggagagagtgttcaggaaatacaaccacccggccaactaaccagcctcaccagacttcaccattggacacttcaagaagaaggcaaagttttcttcatgttgcttggggcattgctcctgcggctgtgtgccgtgggcctgtggcgatgtagaattaggttgtggatggggaagatgctgatgtagattctcattctgttgttgtttacctcctacagtttaccctttctctagctcacctcctacagtttactgtttcgcagttttgatatctcaaattattcattcaacagccgtgtgtttggttggaatgtgtttcgttggatcgcggcggtgaaaaaaactgacgtggaccgtgagttatg

SEQ ID NO: 63675 - DNA, 3667 bp, Zea Mays
ccactcgttccttccccaactatcgttaggcttctccaccccgccctccccgccctccccgccgaacgcgcctcactctccctccatgcagatcaatgcgtccttccaccccaaccgtgctcctcgcccttctctcgtcgtcctcgttccccctagactggcgtggagtgaagatccatccggactccgattgatttcttctcctgctgaagaaacggagagattcggccaagattgggatcaatctgcgcatggttgcaggtgatcaagatccaatacttgaaaataggatgttgacatgttactgtttagatgacaccagatgataatgcccttatagctctcaaaaaaggcagtaaacttatcaagtatagtaggaagggaagacccaagattcgtgagttcagactttctagtgatgaaacatcattggtttggtattcccatagcaaagtgaagtaccttgtactgtcttctgtctctagaatcattcctggacaaagaactgctgtatttaggaggtttttacgccctgagaaggactacctatcattttctttgatatacaagaacggacaacgttcccttgacctggtttgcaaggatcaagcagaagttgaggtctggttttcaacgcttgaggcacttattacttcatgccgtaaaagttattcagctgatggtccaagtgatagattatcagtttctgacgaagtatcacattaccaagatacttttcatgatacaacactagatattgcatcgagtatcacacgtacttttaactcagcaaaaacagatgttgtatctgatcgtgcaaatatgctaagagcaagtacagacagtagccggcttagtatttccagtgcccctagttcttcaagtcaaggttctggacaagatgacattgaatcccttggtgatgtttatgtgtggggtgaggtgtggactgatatgatccctgcagaaggatccgcaaactatttgtgctccaaagcagacattttaattcccaaaccacttgaatcagatgttgtcttggacgtacaacagatagcgtgtggttataggcacattgcactcactactaggcaaggagaagtatttgcatggggcgaagaacttggcggacgacttggtcatgggaccgatgcagatattagccgtcctaaacttgtcgaagccttagcagtgtcaaatgtagaatatgttgcgtgcggcgagttccatacttgtgctataactgcctctggtgatttgtacacttggggtgatggatactacaatgctggattgcttggacatggtgctggaactagtcactggcttccaaaacgagtctcaggacctttagaaggggttcaggtattgtctgtttcatgtggttcatggcattcagcactgaccacatcaagtggtaaagtgttcacctttggtgatgggacatttggtgcccttggacatgggaatcgtcatactgtcgcatatccaaaggaagtcgaaactttgagtggatttagaacaataaaagttgcctgtggactctggcattctgcagcgattgtggagaccactaatcaggcaggtgtgaatgtgatatccaggaagctatttacctggggtgctggtgataagaatcccctaggtcacggggataaagatgctaggctagttcctacttgtgttcaatctctcattgattataatttccatcaggtagcttgtggacatagtatgaccattgccctttctacatctggtcatgttttcacaatgggcagctctagcaatggccagcttgggaatccaaaatctgatggtaaacatcctaccccagtacaagataggctggctggagaattggttgaagagatctcatgtggctcatgccatgttgcagtcttgacttcacgaagcgaagtatatacatggggaatgggagccaatgggaggctgggacatggtggtgttgaagataagaaaaaaccaactcttgtggaagcattaaaagatcgtcacgttaaaagtatagcatgtggttctaatttcacgacctgcatttgtatacataagtgggtttcaggtgctgatcagtctgtctgctcaggttgtaggcaaccatttggcttcacaagaaagagacataattgttacaattgtgggcttgttcattgccatgcatgtagttcaaaaaaagttctgaaagctgctttggcaccaactcctggcaaaccacatcgcgtatgtgattcatgcttcatgaagcttaaggcagcggagaccagcagcaacagctcacatagcaaaagaaatgccattgctcgtcgctctgttgatagcaaagacaggtcagagagaccagaaataaggtcttccaggcttgcaactggatcaacagcagaaccactcaagcaagctgagctgaaagcagttagaaacgagataaaaccagatcctatgtccacgatgagggcaccccaagttccttccatgctaccttttaacaatcttgcttttggcgcaacatttggtggtccagctagtctgaagcccatgacaatggctccaatgccaatggccatgcctatgtcaccagctcctctcacaaagaagccaactccagcagcagcaactcctctttgtggtaaaagtgataccgataacttgaagatggctaaacaggtgctgaatgaagatatctcaaagttgcaatctcaggttaataaactgaaacaaaaatgtgatgcccaagaagagcaactgcagaaagcggaaaggagagctgaacattctgcctctacagctgcagaagagtcttcaaggcgtaatggtgtcttggagttcattaggttccttgacaatgagctcaagagcatcgcagatagggtgcccagcgacgctgccgacggcttaaaagccttgcaaaaccattcggagaggtttctcacagaacaaggtgttcgtccactggaagccacaggtatgcatcgtaagtgcgcaagcataggcaacctcgtaatgtctcaggacggcagtgctggaaacgcgagcagctcggctgcttccttggcgagcgagtctccatgccaccgtatcatggagaacagctcgagagctaacggcgacttagcaccgaagctcggtggtacccatggagaagtgcagctgattgagcagtttgaaccgggggtgtatgtgacgctcatccagcttagagatggcactaaggtgttcaagcgtgtccggttcagcaagaggaggtttgcggagcagcaggccgaggaatggtggagggagaaccaggagagagtgttcaggaaatacaaccacccggccaactaaccagcctcaccagacttcaccattggacacttcaagaagaaggcaaagttttcttcatgttgcttggggcattgctcctgcggctgtgtgccgtgggcctgtggcgatgtagaattaggttgtggatggggaagatgctgatgtagattctcattctgttgttgtttacctcctacagtttaccctttctctagctcacctcctacagtttactgtttcgcagttttgatatctcaaattattcattcaacagccgtgtgtttggttggaatgtgtttcgttggatcgcggcggtgaaaaaaactgacgtggaccgtgagttatg

SEQ ID NO: 63676 - DNA, 896 bp, Zea Mays
acccacgcggaaaaaaaggaaaaaggctcgattcgctgttgcctcattgcctgccacagctcgccgcggacgccgtcgccgctcaagtgaagtccggagtgggggcttgcgatctccgctgcgggcgcggaagatggctgacccagagttggaagctatcaggcagagacggatgcgagaactacaacacggtgcggcaaatcagcaaaatgcgggccaacaaaaggctcaggaagacgcgaaacaggaagctgaggaacgccggcagatgatgcttgctcagatattatcttctgaagcaagagaaaggctttcccgcatagctttggtcaaacctgacaaagcaagaggggtggaggatgttttgctgagagctgctcaaactggtggaatatctgagaagattcagaggcgtcggaatgtccttgacgacgatgattagatgcaacctgcaaggctctgcttcgagtgtattattggcttgtgataaattaaaagtggtaccgaactgtttagacaatgatctcatgcgactatcagcagcaatgaaaacttggtacttggtagactatttcattggatattcggcggtatatgatccgatgtcttattttggtgtgtgtgcccccatcgaggacagtcgatattggctgtgtttatccccgaaacactgttcttccttgagtcatggcattattaatgggtgcgttttgcactcattttatttctgcctgttgagttgtttgcgccaaaatggcatgtcatgtacagtgcgctatgcatccgtcatcccattcatgcagcggaggctgcagatgtaaacagagggcgttgcagtccgcttctagatagatgccatgtatgcacttgtgaggatcaacgatggaaaaagaaag

SEQ ID NO: 63677 - DNA, 520 bp, Zea Mays
acccacgcggaaaaaaaggaaaaaggctcgattcgctgttgcctcattgcctgccacagctcgccgcggacgccgtcgccgctcaagtgaagtccggagtgggggcttgcgatctccgctgcgggcgcggaagatggctgacccagagttggaagctatcaggcagagacggatgcgagaactacaacacggtgcggcaaatcagcaaaatgcgggccaacaaaaggctcaggaagacgcgaaacaggaagctgaggaacgccggcagatgatgcttgctcagatattatcttctgaagcaagagaaaggctttcccgcatagctttggtcaaacctgacaaagcaagaggggtggaggatgttttgctgagagctgctcaaactggtggaatatctgagaaggtgtctgaagaaagacttatctcccttctagaacaaattaacagccacacaagcaagcaaaccaaagttacgtgggtagaagtctatagaagctaattgagttttcagcaatgcaag

SEQ ID NO: 63678 - DNA, 2347 bp, Zea Mays
ctacattccaaaatagtattcgttttagctcttgatttgtatgcctatattcaactagacgatgatgaatgtggacacgtatataaaacattttgctacgattgttatatatcatataaataggtattgagatatttattcaaatataactatttttaatttctaaacactaaggtacgtccggtccggtggttagccctaaatttttctagagcaagagggtttgggtttgaatgctcgctttgcactattttttgtgtggtatggtagctgcgtggtcaggtgctggacagagacagtagctagttacgcgagtgctgggtccataggacagtagctaagagagcattgcgcgagcactgagcatgggacctatgagcatgggacccaggacacggcgggacgtgtggggcgggtccaaagtgtcagcgcggaggatggaaagccatggtagcaccagatgctcatattaagttcttaatagagtagtatatatatacagcaagcattgcataaatccagcaaagaagtaaaacaaattctattttgatatagaggaagaacatacccatggaacttatatgagatacaaacggaaccaagctagagaacgcacggttgccagtaagatatgttgaccaacgagctctcaactccaggctgatacgctgctacctaacttaaagccctgaaacgctaaatctgtactgctgctcatcacaaatgtcataacatcccaatgaaaaccactggacagaatgatcgacagaattaagataggttccgccgataagctacagtgttctacaaacagacaagccacatggtttcttgttttgcacaaggagattcagcaaaacgatgtagtgtgtacagaagcttgaagaatcagctgcagatcgattacacttgagcctattcttctaatcaagtaacatggactcagttctatgatcattggctcattgctaaaaaaaattgcctcgggcagtaggtagacacgtataactatttatctatgagcaaaaaaggaacatgccaatgccaatgaaacaagcatatctaactagatgcctactggatatcaaaacaggtcaagccaaacatgttacatccaagttttgatgcctttgggatatccaaaccagctgatcagtgctcaatattaaaaagcgggatagaatgacatgagaccccctacataccctaacccaccaaacaaattcatggatccttaataacaaattcataaatgcaagataatccattgagatcaacacatctctaattaccagccatacagactagcagccatgtcaagcagtaagagacatgcaaacagtcatacatatttcaaatttgcaatttaaaacatctcaagccatctactaaacaaagtagcatacctgctcagcatttacctgaaaagactgacaacaactatcacaagaaaattggtacgatttcttgcagtgcaccctcactctgggccatcatcatctccaacacatagagactctaatatattatccagctgatagtaaagataccacactgagtccagcaacactagtaccacgacaaaacggataacccattctcatataggccatagcagcagatcaaaacttcccgagcatcggaccaccacatcatctcttgaggttgagcaagaccaccgcgatggcagccgtgacagctgctccagcagccgcggcagccacaagagcgggagacaccacgccctcatccttaggcgtcccggccctggcagaaacggaatcacgtccctcctcttcctccttcccgcccttgccctcggcagtggcggaacccttcagggtctcgatctcctcctcaagggcggccttctcctggtacgcggtctgcagctggtccccgagccttgcgcccctgcgcatctcctcctcatggctggccttctctgcggctaggaggccctggagacgctcgacctcggcgcggagcgtggcggcctcgctctctttggtggcggcgacttgctcggcagcggcgacctcctcgcgggcctgggacaccaggacctcgaggcgccgggactcagaggacaggaaccggttctcgtgtcccacggcatcgagcttctcctccaggtcgcgcttcgccgcgcggagggcctccatctcgtccgccaaattgtggagcttgggcgtgctgtccccgccgttgatggagatctcgaagtccgcggcggcggcggcagtgggggaggcgaacgtctcctcgccgttctccatcggaaaccctcctccccctctcgcggcggcgcggtggaggtggatgcggtgcgagggtggaaatggga

SEQ ID NO: 63679 - DNA, 1807 bp, Zea Mays
cgagaaggggggacaggagacacgaccagcgctactgcccggcccacacaactcaacaccagaccaccagagtgccaccgaaacgtcatctcttggttcgaaacgcccgccgccgctgaggccgagcgacgtcagcgcctcgcgaacgcgtgcatggactgctcctcggcgccgatcgacacgcacaactccgcggccgaggaagccgccctgccgaggaggataccttcggccccggaggcatcctcgtccggcctcggcctgcagtggatgcgcggctctgtaaccctgtcgctgcggacgcccgatcaggagcccgcggccgtggcgctctcgctcaacaccaggcatccgcagggccatctgcaggaggagcttgcgacggcggcggcggcggcggtcgtgcatgagggcgcgcaggcgcaggcacagcagcccctcggcgagagggacatgcccgaggagcaccgcgccatcgccgacatggcggcccggctcgggatcgcggcgggcgcgcgggaccgcgcggtggaggtgttcatgaggatggaggagcgcaagggcaagtccaagtcgcaccactactacaccaagggcgcggggcggagcggcgacgcgctgtacgcggcgtgcctctacgtggcgtgccgtagcgcgggcgcgccccggacgttcaaggagctggcggcggcgacgcgcgacgggcccgcggcgaggaaggacatcggcaagctcatcgcgctcatccgcaagcgcctcggggacgaggccggcggcgaggccatggacatgggcgtcgtccgcgcggcggactacgtggagcgcttcggctcgctgctggggatcggggagggcgaggtgcgcgccgtgcaggaggccgcgcggaggatgcaggaccacctcgacgtacggcgcaacccggactccaccgccgccgccatcgtcttcatggccatggagcgccgggccggcgccgggagttccatccgggacgtgtccgcggccaccggcgtcgccgagaacaccatcaagcaggcatacagggaactctacccgcacgccgacctgctcttcccctgaagtaggggggcgagggcgacattggatttgcttgtatatatggttgtacttttggttgtaggcttatagctgatctgtttctttaatctcattcccttgtctgcttaactgagacacaacttcaccttgtttgcttaactcagacacaaattcatctctcatttggaatttctgtataacaaacaaaatattcatcttctaaagtcaaaagagttattgtccctgtatttcttttctgtgcacaagaaaagaaaaactaaggggaaaaaaatcaaatatcccaattgctaacgttttccattgaaatttgtctttcggagttgattcgcgggaggaaagccgccgccgcctggcagggcattgacgaagagagggctccacgactggggatctcgccgtcaagattgatgcccttgccgccgccggtgcgctcgcaaggtcgcgggacgcgacgggcggtatcagacggggcccatttaagttagggttttttaatctggtatcctcggtttgctgatgtcttaatttttacttttaacccttttatgttaaggcccagcccggctgcattttctcttgggcttactacccaccctttttttgtgtgtgtaaaatattgatcttatttcagattattttttcccacttccccactaccctttcaagtttcctagaaattacccaccattgccattataatctaccgaatcgtttttgcgcctatcgg

SEQ ID NO: 63680 - DNA, 360 bp, Zea Mays
gtaatttgttcttcctagacattgcaggttaaaagagaagaggtgggatgcaaggaaatttcttacttcagctggagtcatgtcatctctttctgcaactgtggggagcttggccgttgctgtgggtcaacgagaaggcgcagatagctctgcatttgccctcgcattggtttttgctgcagttgtaatgtatgatgcatcaggaattagatggcacacaggccgccaagctgcgttgttaaatcaaatagtctgtgaattcccagcagaacatccaatcatttcaacctttaggccactacgggaacctcttggacacagcccacttcagtttgttttcattgtcttcctattgttact

SEQ ID NO: 63681 - DNA, 718 bp, Zea Mays
cttgtatattataatgctagctgaagttcttgaatgttctacagagggagataggtgaagttgaaaagaacaaagacgctttcctggcagacttcacccaggaggactatgacgacattgtgaatggctggaacgcgaagctgaaacggagctctgccggcgagcagaggtgggggttgttcattgccaccaagtgatttggcctggcagcaggagggctcttcggaataagaatggatgtggctctaactctgcttctagaccggtgatggttcagcttagaagcaggggatcttcatcatcagaataaaaacgtgtgttgttgtgttgctgtgtctacgccactagtatttctgttgttacttatgttctaggtaaactgcgcagccagagcagagctgaagaatatgtactgcttgctcgctcttgtgtggttgtgtctacccctactagcatttcagctttgttgtaggtaaactgcgaacccagagttgcagaacccgtactgctcgtttaagttcatggtgaactacgagctaaaaggctgttgccagagtcgatgtcacttgtcactggaggtccccggttcaattcagatgttgctttggcacgtgctattcttttggacggaggcagctagtgtcaagtacttcgttcgggaaaagagacaacggaatcctgccggtgtcggcaatgggctaggcagcttctggggcag

SEQ ID NO: 63682 - DNA, 1920 bp, Zea Mays
gttcatcataaccgatgaatagtacactgtttttttttcaataaaggaagagcaccaaatcctgtctttgcttccctcttacaaagggaaatcagttctagaactcggtgctggaattggacgctttactggagatctggcaaaagaagctgggcacgttctggcactagactttattgaaagtgtgattaagaagaaccaaagcataaatgggcatcacaagaacataaccttcaggtgtgccgatgtgacatctaacgacttgaagattgaagataactctgttgatctgatattttcaaactggctattaatgtatctttcagatgaggaggtccaaaagcttgtggggaaaatggtaaaatggttaaaggtcggaggccatattttctttagagaatcatgttttcaccaatctggagattccaaaaggaaggtgaacccaacacactatcgagaaccaaggttttataccaaggtatttaaagagggccattcatttgatcaagatggaggttcgtttgaactttctctagtgacctgtaaatgcattggggcttatgtcaaaaacaagaagaatcaaaaccagatatgctggttatgggaaaaggtaaaatcaacagaagacagagattttcaaagattcctggacaacgtgcaatacaaaacaagtgggatattacgttatgagcgtgtctttggtgaaggttttgtgagcactggtggaatcgagactacaaaggaatttgtgggcatgctcgatcttaaaccgggccagaaagtacttgatgtcggatgtggaattggaggcggcgacttttacatggctgcaaactatgatgtccatgttcttggtattgatctttcggtgaacatggtttcatttgcaattgaacgtgccattggacgcaagtgctctgttgaattcgaagttgctgattgcaccacaaaggattacccagaaaatagttttgacgtcatctacagccgtgacaccatccttcacatacaagacaagcctgctctgttcagaagcttcttcaaatggctaaagcccggcggcaaagtcctaatcagcgactactgtaagaatcctggaaaaccatcagaagaatttgctgcgtacattaagcagagaggctatgaccttcacgacgtgaaggcttatggacagatgctgaaggatgctggttttcataatgtcatcgcggaagatcgcactgagcagttcttgaatgttctacagagggagataggtgaagttgaaaagaacaaagacgctttcctggcagacttcacccaggaggactatgacgacattgtgaatggctggaacgcgaagctgaaacggagctctgccggcgagcagaggtgggggttgttcattgccaccaagtgatttggcctggcagcaggagggctcttcggaataagaatggatgtggctctaactctgcttctagaccggtgatggttcagcttagaagcaggggatcttcatcatcagaataaaaacgtgtgttgttgtgttgctgtgtctacgccactagtatttctgttgttacttatgttctaggtaaactgcgcagccagagcagagctgaagaatatgtactgcttgctcgctcttgtgtggttgtgtctacccctactagcatttcagctttgttgtaggtaaactgcgaacccagagttgcagaacccgtactgctcgtttaagttcatggtgaactacgagctaaaaggctgttgccagagtcgatgtcacttgtcactggaggtccccggttcaattcagatgttgctttggcacgtgctattcttttggacggaggcagctagtgtcaagtacttcgttcgggaaaagagacaacggaatcctgccggtgtcggcaatgggctaggcagcttctggggcag

SEQ ID NO: 63683 - DNA, 1891 bp, Zea Mays
gtaggaaagggcagatccagcgctagaggatcctgtctttgcttccctcttacaaagggaaatcagttctagaactcggtgctggaattggacgctttactggagatctggcaaaagaagctgggcacgttctggcactagactttattgaaagtgtgattaagaagaaccaaagcataaatgggcatcacaagaacataaccttcaggtgtgccgatgtgacatctaacgacttgaagattgaagataactctgttgatctgatattttcaaactggctattaatgtatctttcagatgaggaggtccaaaagcttgtggggaaaatggtaaaatggttaaaggtcggaggccatattttctttagagaatcatgttttcaccaatctggagattccaaaaggaaggtgaacccaacacactatcgagaaccaaggttttataccaaggtatttaaagagggccattcatttgatcaagatggaggttcgtttgaactttctctagtgacctgtaaatgcattggggcttatgtcaaaaacaagaagaatcaaaaccagatatgctggttatgggaaaaggtaaaatcaacagaagacagagattttcaaagattcctggacaacgtgcaatacaaaacaagtgggatattacgttatgagcgtgtctttggtgaaggttttgtgagcactggtggaatcgagactacaaaggaatttgtgggcatgctcgatcttaaaccgggccagaaagtacttgatgtcggatgtggaattggaggcggcgacttttacatggctgcaaactatgatgtccatgttcttggtattgatctttcggtgaacatggtttcatttgcaattgaacgtgccattggacgcaagtgctctgttgaattcgaagttgctgattgcaccacaaaggattacccagaaaatagttttgacgtcatctacagccgtgacaccatccttcacatacaagacaagcctgctctgttcagaagcttcttcaaatggctaaagcccggcggcaaagtcctaatcagcgactactgtaagaatcctggaaaaccatcagaagaatttgctgcgtacattaagcagagaggctatgaccttcacgacgtgaaggcttatggacagatgctgaaggatgctggttttcataatgtcatcgcggaagatcgcactgagcagttcttgaatgttctacagagggagataggtgaagttgaaaagaacaaagacgctttcctggcagacttcacccaggaggactatgacgacattgtgaatggctggaacgcgaagctgaaacggagctctgccggcgagcagaggtgggggttgttcattgccaccaagtgatttggcctggcagcaggagggctcttcggaataagaatggatgtggctctaactctgcttctagaccggtgatggttcagcttagaagcaggggatcttcatcatcagaataaaaacgtgtgttgttgtgttgctgtgtctacgccactagtatttctgttgttacttatgttctaggtaaactgcgcagccagagcagagctgaagaatatgtactgcttgctcgctcttgtgtggttgtgtctacccctactagcatttcagctttgttgtaggtaaactgcgaacccagagttgcagaacccgtactgctcgtttaagttcatggtgaactacgagctaaaaggctgttgccagagtcgatgtcacttgtcactggaggtccccggttcaattcagatgttgctttggcacgtgctattcttttggacggaggcagctagtgtcaagtacttcgttcgggaaaagagacaacggaatcctgccggtgtcggcaatgggctaggcagcttctggggcag

SEQ ID NO: 63684 - DNA, 2028 bp, Zea Mays
cttactgttgctcgccgtagtgccgggccgaactcgaacagggatcggggaggtggagcgcaaggtgcagaagagctactgggaggagcactccaagtgcctcactgtcgagtccatgatgctcgactcccgcgccgccgacctcgacaaggaagagcgacccgagatcctgtctttgcttccctcttacaaagggaaatcagttctagaactcggtgctggaattggacgctttactggagatctggcaaaagaagctgggcacgttctggcactagactttattgaaagtgtgattaagaagaaccaaagcataaatgggcatcacaagaacataaccttcaggtgtgccgatgtgacatctaacgacttgaagattgaagataactctgttgatctgatattttcaaactggctattaatgtatctttcagatgaggaggtccaaaagcttgtggggaaaatggtaaaatggttaaaggtcggaggccatattttctttagagaatcatgttttcaccaatctggagattccaaaaggaaggtgaacccaacacactatcgagaaccaaggttttataccaaggtatttaaagagggccattcatttgatcaagatggaggttcgtttgaactttctctagtgacctgtaaatgcattggggcttatgtcaaaaacaagaagaatcaaaaccagatatgctggttatgggaaaaggtaaaatcaacagaagacagagattttcaaagattcctggacaacgtgcaatacaaaacaagtgggatattacgttatgagcgtgtctttggtgaaggttttgtgagcactggtggaatcgagactacaaaggaatttgtgggcatgctcgatcttaaaccgggccagaaagtacttgatgtcggatgtggaattggaggcggcgacttttacatggctgcaaactatgatgtccatgttcttggtattgatctttcggtgaacatggtttcatttgcaattgaacgtgccattggacgcaagtgctctgttgaattcgaagttgctgattgcaccacaaaggattacccagaaaatagttttgacgtcatctacagccgtgacaccatccttcacatacaagacaagcctgctctgttcagaagcttcttcaaatggctaaagcccggcggcaaagtcctaatcagcgactactgtaagaatcctggaaaaccatcagaagaatttgctgcgtacattaagcagagaggctatgaccttcacgacgtgaaggcttatggacagatgctgaaggatgctggttttcataatgtcatcgcggaagatcgcactgagcagttcttgaatgttctacagagggagataggtgaagttgaaaagaacaaagacgctttcctggcagacttcacccaggaggactatgacgacattgtgaatggctggaacgcgaagctgaaacggagctctgccggcgagcagaggtgggggttgttcattgccaccaagtgatttggcctggcagcaggagggctcttcggaataagaatggatgtggctctaactctgcttctagaccggtgatggttcagcttagaagcaggggatcttcatcatcagaataaaaacgtgtgttgttgtgttgctgtgtctacgccactagtatttctgttgttacttatgttctaggtaaactgcgcagccagagcagagctgaagaatatgtactgcttgctcgctcttgtgtggttgtgtctacccctactagcatttcagctttgttgtaggtaaactgcgaacccagagttgcagaacccgtactgctcgtttaagttcatggtgaactacgagctaaaaggctgttgccagagtcgatgtcacttgtcactggaggtccccggttcaattcagatgttgctttggcacgtgctattcttttggacggaggcagctagtgtcaagtacttcgttcgggaaaagagacaacggaatcctgccggtgtcggcaatgggctaggcagcttctggggcag

SEQ ID NO: 63685 - DNA, 1457 bp, Zea Mays
aaatgatgttggtggaaaactgaaaatagagcaattccttgtttctggtgctaaaagaaagctttaaaatttattgtgcgataaatgatggaattatcaaccttgttgataagttttttgagatgccaagacatgaagcacataaagctcttgaaatatacagaagggctggccaacaggctggaaatctatctgatttctacgagaattgccggggtttagaacttgcgaggaattttcagtttcccactctgagggagccgccacaaacatttcttgcaactatggaggagtatgtgaaggaggctccacgcatggtcccagttcgagaacccctggaacttcctgagaggcttcttcttacatacaaacctgaagaatcggaggacattcctgagcctgcttctgttgaagaggaaaatgcaccagttgaagagcctgttctggtaccacctgttactgaagttgtttcacctcccaagaccgaggtggccgatactggtgacttactgggcttagatgatccaaatcctgctgtatcagctatagaggaaagcaatgctcttgccttggctattgttccaacagatggggcttccacaactggtaacactgcatttcaagataaggggtttgatcctacaggatgggaactcgcccttgttaccgcaccgagcaacacgacttcatctgcgtctggtggtggatttgacaagctcattttggacagcctttatgatgacggggcctacaggcagaggcaacagcaacaggtgtatggttcagcagtgcctaatccattcatgacaaatgatcctttcgtgatgtcaaaccaagttgctcccccaccatcagttcaaatggctgccatgtctcagcagcatcagcagatccccacgatgatgcaaccaaatccttttggaccacctatgcagccacaggtaggcatgggcccagcaacaaacaatccctttctggatgctggattcggggcattcccagtggcgaacaatagccatcagcaacacaacccatttggcagtgcccaacttctgtaggctacgtagttacaagagcaaatttgtgcttcagcagatgcgattttttcggtgattatatcgtgcattgtgctcggccattcttccatgcgatgcgtgtattatgaattggcttcaccacacggggagctatggcttgacccaacccttgttgtaaagaaattagcgacttgtgtaacatcgaatgtatgtcaataaacagtaggcaatgttattataactataaacaaaatagcggtggtatgtaggagttctgtttatttcattgctgtttgattgccggtcttgcatgcacattgattggccatgtgttctaaccccagaactgaagcgttattgtacctatacacatgcatatactacttgcgattggtaattattttacgttgttcacattta

SEQ ID NO: 63686 - DNA, 2369 bp, Zea Mays
cgaaccttccgctcgggaacgggaagttgtctgtcatttgagaatcgagttgtcgagagtcgagacgcacacgctcgtacgcaacttctcaaaaagcagcctgccctgttcattttctctctcctcccgtcggcgaaattttatacgccagcaaaaccgccctgtggaggaaatagagaaaaaaaacccgaatcatacggccagaaatattaaacagacagaaaggaagaggagaatagcggcgaggacgaagtggcccgcccaggaaatggcgtcgatgcagagctggcgcaaggcctacggcgccatcaaggacaccacaaccgttagcctcgccaacctcaactcggacttcaaggatctggatgtggcgatcgtgaaggcgactaatcacgtggagtgcccacccaaggagcgacacctgcgaaaggttgttgcggcgacatccatcgccaggcctagggcggatgtcgcctactgcatccacgcgcttgcccgccgtcttgccaagacccgcaactggattgttgctctgaaagcacttgtagtaatccatagacttcttcgtgagggtgatcctacatttcgagaagagcttcttaactttacacaaagggggcgtattctgcaactttcaaactttaaggatgactccagtccaattgttctctgcagcttgggattgttctgcctgggtgcgcacatatggtttgtttttggaagaaaggttggagtgcttcagagttctgaagtatgatgttgaagctgagcgtttgtccaaacaaggtcaaggtcctgaaaagggtcacagtagaaccagagagttggattcacaggatctgttagagcagctgccagcattgcagcagttactataccgactcgttggatgtcggcctgaaggagctgcaaataataactacctggtgcaatacgctttagctttggtgctaaaagaaagctttaaaatttattgtgcgataaatgatggaattatcaaccttgttgataagttttttgagatgccaagacatgaagcacataaagctcttgaaatatacagaagggctggccaacaggctggaaatctatctgatttctacgagaattgccggggtttagaacttgcgaggaattttcagtttcccactctgagggagccgccacaaacatttcttgcaactatggaggagtatgtgaaggaggctccacgcatggtcccagttcgagaacccctggaacttcctgagaggcttcttcttacatacaaacctgaagaatcggaggacattcctgagcctgcttctgttgaagaggaaaatgcaccagttgaagagcctgttctggtaccacctgttactgaagttgtttcacctcccaagaccgaggtggccgatactggtgacttactgggcttagatgatccaaatcctgctgtatcagctatagaggaaagcaatgctcttgccttggctattgttccaacagatggggcttccacaactggtaacactgcatttcaagataaggggtttgatcctacaggatgggaactcgcccttgttaccgcaccgagcaacacgacttcatctgcgtctgtcggtcaattgggtggtggatttgacaagctcattttggacagcctttatgatgacggggcctacaggcagaggcaacagcaacaggtgtatggttcagcagtgcctaatccattcatgacaaatgatcctttcgtgatgtcaaaccaagttgctcccccaccatcagttcaaatggctgccatgtctcagcagcatcagcagatccccacgatgatgcaaccaaatccttttggaccacctatgcagccacaggtaggcatgggcccagcaacaaacaatccctttctggatgctggattcggggcattcccagtggcgaacaatagccatcagcaacacaacccatttggcagtgcccaacttctgtaggctacgtagttacaagagcaaatttgtgcttcagcagatgcgattttttcggtgattatatcgtgcattgtgctcggccattcttccatgcgatgcgtgtattatgaattggcttcaccacacggggagctatggcttgacccaacccttgttgtaaagaaattagcgacttgtgtaacatcgaatgtatgtcaataaacagtaggcaatgttattataactataaacaaaatagcggtggtatgtaggagttctgtttatttcattgctgtttgattgccggtcttgcatgcacattgattggccatgtgttctaaccccagaactgaagcgttattgtacctatacacatgcatatactacttgcgattggtaattattttacgttgttcacattta

SEQ ID NO: 63687 - DNA, 2393 bp, Zea Mays
gtttaatgcaaatctatggcgtctagtcgagacgcagccttcttcaagcctcgaaccttccgctcgggaacgggaagttgtctgtcatttgagaatcgagttgtcgagagtcgagacgcacacgctcgtacgcaacttctcaaaaagcagcctgccctgttcattttctctctcctcccgtcggcgaaattttatacgccagcaaaaccgccctgtggaggaaatagagaaaaaaaacccgaatcatacggccagaaatattaaacagacagaaaggaagaggagaatagcggcgaggacgaagtggcccgcccaggaaatggcgtcgatgcagagctggcgcaaggcctacggcgccatcaaggacaccacaaccgttagcctcgccaacctcaactcggacttcaaggatctggatgtggcgatcgtgaaggcgactaatcacgtggagtgcccacccaaggagcgacacctgcgaaaggttgttgcggcgacatccatcgccaggcctagggcggatgtcgcctactgcatccacgcgcttgcccgccgtcttgccaagacccgcaactggattgttgctctgaaagcacttgtagtaatccatagacttcttcgtgagggtgatcctacatttcgagaagagcttcttaactttacacaaagggggcgtattctgcaactttcaaactttaaggatgactccagtccaattgcttgggattgttctgcctgggtgcgcacatatggtttgtttttggaagaaaggttggagtgcttcagagttctgaagtatgatgttgaagctgagcgtttgtccaaacaagggtcacagtagaaccagagagttggattcacaggatctgttagagcagctgccagcattgcagcagttactataccgactcgttggatgtcggcctgaaggagctgcaaataataactacctggtgcaatacgctttagctttggtgctaaaagaaagctttaaaatttattgtgcgataaatgatggaattatcaaccttgttgataagttttttgagatgccaagacatgaagcacataaagctcttgaaatatacagaagggctggccaacaggctggaaatctatctgatttctacgagaattgccggggtttagaacttgcgaggaattttcagtttcccactctgagggagccgccacaaacatttcttgcaactatggaggagtatgtgaaggaggctccacgcatggtcccagttcgagaacccctggaacttcctgagaggcttcttcttacatacaaacctgaagaatcggaggacattcctgagcctgcttctgttgaagaggaaaatgcaccagttgaagagcctgttctggtaccacctgttactgaagttgtttcacctcccaagaccgaggtggccgatactggtgacttactgggcttagatgatccaaatcctgctgtatcagctatagaggaaagcaatgctcttgccttggctattgttccaacagatggggcttccacaactggtaacactgcatttcaagataaggggtttgatcctacaggatgggaactcgcccttgttaccgcaccgagcaacacgacttcatctgcgtctgtcggtcaattgggtggtggatttgacaagctcattttggacagcctttatgatgacggggcctacaggcagaggcaacagcaacaggtgtatggttcagcagtgcctaatccattcatgacaaatgatcctttcgtgatgtcaaaccaagttgctcccccaccatcagttcaaatggctgccatgtctcagcagcatcagcagatccccacgatgatgcaaccaaatccttttggaccacctatgcagccacaggtaggcatgggcccagcaacaaacaatccctttctggatgctggattcggggcattcccagtggcgaacaatagccatcagcaacacaacccatttggcagtgcccaacttctgtaggctacgtagttacaagagcaaatttgtgcttcagcagatgcgattttttcggtgattatatcgtgcattgtgctcggccattcttccatgcgatgcgtgtattatgaattggcttcaccacacggggagctatggcttgacccaacccttgttgtaaagaaattagcgacttgtgtaacatcgaatgtatgtcaataaacagtaggcaatgttattataactataaacaaaatagcggtggtatgtaggagttctgtttatttcattgctgtttgattgccggtcttgcatgcacattgattggccatgtgttctaaccccagaactgaagcgttattgtacctatacacatgcatatactacttgcgattggtaattattttacgttgttcacattta

SEQ ID NO: 63688 - DNA, 1291 bp, Zea Mays
cttctcagctgtactttctgcgtaccttgcaattgtgttcacttgcttagcggtggagacaaaaattcttggcggtatccaagacttgccaaagggaatagcgagagagaataagatcattcaaacggtgatgagacaactcttatttgctcttgacggacttcattcgacaggaattgttcacagagatataaaacctcaaaatgtgatattttcagagggatcacgaaccttcaaaattattgatcttggagcagcagctgacttacgtgtaggaattaactatattcctaaagagttccttttggatccaaggtatgctgctccagaacaatatattatgagcacacaaaccccgtctgctccttctgttccagttgcaacaactttgtctccagtcctgtggcagctgaaccttcctgacagattcgacatatatagcttgggtctcatattcttacagatggcattcccttcactacgaactgatagcaacctcatacaatttaatcgccaactgaaaagatgtgattatgacttacaagcttggaggaatctggtggagccacgagcgagtgctgagctccggaggggctttgacatcatggatttagacggtggtatcggatgggaactcctcacctcgatggtccggtacaaagcacggcagaggaccagtgctaaggccgcattggcacacccgtacttcaaccgtgaagggctccttggcctctccgtcatgcaaaacgtacggctgcaactgttccgcgcaacccagaaggactacagtgaagcagcgcggtgggttatcggcctcatggcaaggtcaggaactgaagatgtgggaggctttacagaagcacagcttcaagagcttagggaaataaaaccaaagaaaagcagcacccagcggaacgcgcttgcctccgtgctgcgcctgcagaggaagatcatgagaacgatcaaggagagcatggacgagctcaacagccagcgcaaaagcatctggtggagccggtggatacccagggaggagtaggccggccgcaggcgcacatgtacatcgtccacttctgtatgaaacgtcacctattagcactggtgaattggtgatagtataatacactatcctacttactgctttgtacatgctgacgactggtgagtaaaattcatctgaaaaaaaaatcggagtaacgcgatgtatagctgtaaatattttgcattgaagcatcatgatttttgagatcagctctctgcttgaatatccaatcaccgaagctttctgcac

SEQ ID NO: 63689 - DNA, 4486 bp, Zea Mays
taaaaaattggaactttcaactgccaaaacatacaatcaatactaggtgatgtggagaccataggtatccagctacttattatgtaggatgtaagccgaacaggttgaggtaagaaaggttatggtaaggaaaagacttcatccgaactgtttaagtcttgagtcatcttgagattcgctttgattataatgtccttccttgccggtgtcgatcttttcttctccagtctttgtctcactgatttgaggtgtgtgttttatcggagttggggaatatggttaagatagttatggatgagatggactatatgactacatgatgtaggtcaaaatattgtttgatgctaggcgagtataaagaggacttggggaaaagttaggtaacagaaacatttattctagatggtggatcatgattcatccgaagatattttttttacttgtatccttcattttcgaggttaaccttcttgttgggcttgatttagtagaaacagatcttcagatgaggtagggtataggttagattggatataactagattagactggataagatctacctaatttattttggaatagatcatgtgtgttacactattatgatataagcaaagtggttgggataagtatgattattaggacaagataagtctctaagaataagatataatcttttcgagataagatgaatcaattaaggtaagaaagaatcttttaagatcagataggtcaattaagatatgagagaatcttttaagataagatggatcatttaagataagatagattcctttaggttaagagggatccaatatagtaagagtgagtcttttgagataagagggatccattaaggtatggaagaatcttttaaggtaagaaggatccatttaaattagatatactttaatggaggataatctaaattgtttagttatctcataaattttatttatttacatttatacctatatgtatatgcagatgtaatcatggacgttactccacaacttatcacactcaatcaaaaatccaaatcaaacaaatatcacaagaacaaacactcaagcgtatagatacatataaaaatagttttgtttttggtcctaagagtaggtctcctattcctaaaggtcactttaggcacaagatttcaaaagtgtgaaatccacatttttctttagaaggaaaaggtaagaatgatcagagtatagcgaaaatagatgagaaaagattaagataagttcataaaataattagagtagcaaaggtaaggttaatcagagtagaacagtagaaggtgaaacaggatcaagaagagataagtatagaatgaatcagagtaaggtaagtaagtattggttgtccagttctatttaggtttcgtcctacagtcaacattcctctgataccacttctgtaacacccggttttaagggacaaagccgggtgcatctcatacatgcgccaaagaagacaatatatataatcacagagtgtatagagataaatgtcacaataatcagagtacttattacatagcggaagtcttacaaaataaaagataaatatagcaggatctaaaatctatccttggcgccagaaagtcaactgggagacgccaccttttgttgatgcatcctactatatatgtttcatatatgaagtctcatgtactcctaaaaatatatgtatatatgagtactactaaacaagaactgtttgaagcttgctacaccctatggtgacaatttactatgtaatgcttttacagtcgtccgtatcgctctatatacatgtgtaatagtataataatgtcccttctatatgatttagatagaaataagtattaaatttccataacaagaacgcgcgcgctggcgcgtgccatttgctagtttcttactgtcccgccacccttatctttagtgagtactgagtacaattccagtttatcttttaacgacatattagtagtctagtggatgtactgatgtaccagtatcaagggaaattatcatgcatacatagatcgtgctaaaagcaattacctgagttgcaatcatgaagtaacaacggcagtcattttttctccaccaagcaagcacgaccgagaataattgatttttctaacctctttgttttcttattttgatatataagcaattggagcaactcatccttgatttctggacggaagaagatgattatgaattgaccgtgtcttgtccgggagtctgagagtgagacactcggagcagatcctagccacggaagcaatcgatgcttccccaccacgttaatcttcccgtaaccacaaattatggcctcctcgtcttttttatttttatttcagaaacaaccaaaactcctcctttgtcacatgcattttgagtcactgacatgtggaccctcagctacgtgtcaaactcatatattccacacgtttgaacaaaattatctctcgaacgataattcaaactcggaatatatagcgggagccgcatttttcaaccaggaaaaggtcgggaaaaaaatccgaaatggccgctagtggcctcggtctctccacctccttcctccccggccacgacaccctcctccggcgccggcgccggcggccggcgggccacgccgccgcgtcgttccggccggtgacggcggagctcggcggcgtcgcgacggagctgggccgccagctggtggaggcggtgggcgtggggctcccctgcaccgtcatgcagtgcggcgacgtcatctaccgcagcacgctcccccggaacgacgggctcaccatcacggcccccggcctcacgctcgcgctcgctaccgtgtcgtacctctggtccacgccaggcgtcgcgccggggttcttcgacatgttcgtcctcgccttcgccgaacgcctcttccgccctaccttccgcaaggatgacttggtatttgggaagaagctcggggagggcgcattcggggtcgtgtgtaaggcttcactggcgaaccccgaagcggcgaagaagcaaggggatttggtcgtgaagaaggcaacagagtatggtgcagtggagatttggatgaatgaacgtgtcaggagggcatgcgctagtagctgtgcggattttatttatggcttttgcgagacaaaagcaaaaggtaagggagctgaagaatattggcttatttggcgttttgaaggtgaggatacactttatgatctcatgcaaagcaaggaattcccttacaatgtggagacaaaaattcttggcggtatccaagacttgccaaagggaatagcgagagagaataagatcattcaaacggtgatgagacaactcttatttgctcttgacggacttcattcgacaggaattgttcacagagatataaaacctcaaaatgtgatattttcagagggatcacgaaccttcaaaattattgatcttggagcagcagctgacttacgtgtaggaattaactatattcctaaagagttccttttggatccaaggtatgctgctccagaacaatatattatgagcacacaaaccccgtctgctccttctgttccagttgcaacaactttgtctccagtcctgtggcagctgaaccttcctgacagattcgacatatatagcttgggtctcatattcttacagatggcattcccttcactacgaactgatagcaacctcatacaatttaatcgccaactgaaaagatgtgattatgacttacaagcttggaggaatctggtggagccacgagcgagtgctgagctccggaggggctttgacatcatggatttagacggtggtatcggatgggaactcctcacctcgatggtccggtacaaagcacggcagaggaccagtgctaaggccgcattggcacacccgtacttcaaccgtgaagggctccttggcctctccgtcatgcaaaacgtacggctgcaactgttccgcgcaacccagaaggactacagtgaagcagcgcggtgggttatcggcctcatggcaaggtcaggaactgaagatgtgggaggctttacagaagcacagcttcaagagcttagggaaataaaaccaaagaaaagcagcacccagcggaacgcgcttgcctccgtgctgcgcctgcagaggaagatcatgagaacgatcaaggagagcatggacgagctcaacagccagcgcaaaagcatctggtggagccggtggatacccagggaggagtaggccggccgcaggcgcacatgtacatcgtccacttctgtatgaaacgtcacctattagcactggtgaattggtgatagtataatacactatcctacttactgctttgtacatgctgacgactggtgagtaaaattcatctgaaaaaaaaatcggagtaacgcgatgtatagctgtaaatattttgcattgaagcatcatgatttttgagatcagctctctgcttgaatatccaatcaccgaagctttctgcac

SEQ ID NO: 63690 - DNA, 2390 bp, Zea Mays
ttacagtccacgttcgcatgaattggaactttcaactgccaaaacatacaattatctggattttggagttatagtccacgttctaaaaaattggaactttcaactgccaaaacatacaacaattggagcaactcatccttgatttctggacggaagaagatgattatgaattgaccgtgtcttgtccgggagtctgagagtgagacactcggagcagatcctagccacggaagcaatcgatgcttccccaccacgttaatcttcccgtaaccacaaattatggcctcctcgtcttttttatttttatttcagaaacaaccaaaactcctcctttgtcacatgcattttgagtcactgacatgtggaccctcagctacgtgtcaaactcatatattccacacgtttgaacaaaattatctctcgaacgataattcaaactcggaatatatagcgggagccgcatttttcaaccaggaaaaggtcgggaaaaaaatccgaaatggccgctagtggcctcggtctctccacctccttcctccccggccacgacaccctcctccggcgccggcgccggcggccggcgggccacgccgccgcgtcgttccggccggtgacggcggagctcggcggcgtcgcgacggagctgggccgccagctggtggaggcggtgggcgtggggctcccctgcaccgtcatgcagtgcggcgacgtcatctaccgcagcacgctcccccggaacgacgggctcaccatcacggcccccggcctcacgctcgcgctcgctaccgtgtcgtacctctggtccacgccaggcgtcgcgccggggttcttcgacatgttcgtcctcgccttcgccgaacgcctcttccgccctaccttccgcaaggatgacttggtatttgggaagaagctcggggagggcgcattcggggtcgtgtgtaaggcttcactggcgaaccccgaagcggcgaagaagcaaggggatttggtcgtgaagaaggcaacagagtatggtgcagtggagatttggatgaatgaacgtgtcaggagggcatgcgctagtagctgtgcggattttatttatggcttttgcgagacaaaagcaaaaggtaagggagctgaagaatattggcttatttggcgttttgaaggtgaggatacactttatgatctcatgcaaagcaaggaattcccttacaatgtggagacaaaaattcttggcggtatccaagacttgccaaagggaatagcgagagagaataagatcattcaaacggtgatgagacaactcttatttgctcttgacggacttcattcgacaggaatgaaccttcaaaattattgatcttggagcagcagctgacttacgtgtaggaattaactatattcctaaagagttccttttggatccaaggtatgctgctccagaacaatatattatgagcacacaaaccccgtctgctccttctgttccagttgcaacaactttgtctccagtcctgtggcagctgaaccttcctgacagattcgacatatatagcttgggtctcatattcttacagatggcattcccttcactacgaactgatagcaacctcatacaatttaatcgccaactgaaaagatgtgattatgacttacaagcttggaggaatctggtggagccacgagcgagtgctgagctccggaggggctttgacatcatggatttagacggtggtatcggatgggaactcctcacctcgatggtccggtacaaagcacggcagaggaccagtgctaaggccgcattggcacacccgtacttcaaccgtgaagggctccttggcctctccgtcatgcaaaacgtacggctgcaactgttccgcgcaacccagaaggactacagtgaagcagcgcggtgggttatcggcctcatggcaaggtcaggaactgaagatgtgggaggctttacagaagcacagcttcaagagcttagggaaataaaaccaaagaaaagcagcacccagcggaacgcgcttgcctccgtgctgcgcctgcagaggaagatcatgagaacgatcaaggagagcatggacgagctcaacagccagcgcaaaagcatctggtggagccggtggatacccagggaggagtaggccggccgcaggcgcacatgtacatcgtccacttctgtatgaaacgtcacctattagcactggtgaattggtgatagtataatacactatcctacttactgctttgtacatgctgacgactggtgagtaaaattcatctgaaaaaaaaatcggagtaacgcgatgtatagctgtaaatattttgcattgaagcatcatgatttttgagatcagctctctgcttgaatatccaatcaccgaagctttctgcac

SEQ ID NO: 63691 - DNA, 2692 bp, Zea Mays
ctcattctctcttcccaggcgataaggctcaagtgggtcaacaaaaaaaggaaggaaagaccaaacgataaggctggaggcttatctagaaaggtccctagcgccctgcgacgacgcttggatcacaacgttgttggacgaatgcgcatctaccttcgcagttatctggaatttggagttacagtccacgttcgcatgaattggaactttcaactgccaaaacatacaattatctggattttggagttatagtccacgttctaaaaaattggaactttcaactgccaaaacatacaaaatagtcctcaaactgaagacaatcttcaaaatgaagaccagaacatactggcttttgaatcaccaccaaaaagcaattggagcaactcatccttgatttctggacggaagaagatgattatgaattgaccgtgtcttgtccgggagtctgagagtgagacactcggagcagatcctagccacggaagcaatcgatgcttccccaccacgttaatcttcccgtaaccacaaattatggcctcctcgtcttttttatttttatttcagaaacaaccaaaactcctcctttgtcacatgcattttgagtcactgacatgtggaccctcagctacgtgtcaaactcatatattccacacgtttgaacaaaattatctctcgaacgataattcaaactcggaatatatagcgggagccgcatttttcaaccaggaaaaggtcgggaaaaaaatccgaaatggccgctagtggcctcggtctctccacctccttcctccccggccacgacaccctcctccggcgccggcgccggcggccggcgggccacgccgccgcgtcgttccggccggtgacggcggagctcggcggcgtcgcgacggagctgggccgccagctggtggaggcggtgggcgtggggctcccctgcaccgtcatgcagtgcggcgacgtcatctaccgcagcacgctcccccggaacgacgggctcaccatcacggcccccggcctcacgctcgcgctcgctaccgtgtcgtacctctggtccacgccaggcgtcgcgccggggttcttcgacatgttcgtcctcgccttcgccgaacgcctcttccgccctaccttccgcaaggatgacttggtatttgggaagaagctcggggagggcgcattcggggtcgtgtgtaaggcttcactggcgaaccccgaagcggcgaagaagcaaggggatttggtcgtgaagaaggcaacagagtatggtgcagtggagatttggatgaatgaacgtgtcaggagggcatgcgctagtagctgtgcggattttatttatggcttttgcgagacaaaagcaaaaggtaagggagctgaagaatattggcttatttggcgttttgaaggtgaggatacactttatgatctcatgcaaagcaaggaattcccttacaatgtggagacaaaaattcttggcggtatccaagacttgccaaagggaatagcgagagagaataagatcattcaaacggtgatgagacaactcttatttgctcttgacggacttcattcgacaggaattgttcacagagatataaaacctcaaaatgtgatattttcagagggatcacgaaccttcaaaattattgatcttggagcagcagctgacttacgtgtaggaattaactatattcctaaagagttccttttggatccaaggtatgctgctccagaacaatatattatgagcacacaaaccccgtctgctccttctgttccagttgcaacaactttgtctccagtcctgtggcagctgaaccttcctgacagattcgacatatatagcttgggtctcatattcttacagatggcattcccttcactacgaactgatagcaacctcatacaatttaatcgccaactgaaaagatgtgattatgacttacaagcttggaggaatctggtggagccacgagcgagtgctgagctccggaggggctttgacatcatggatttagacggtggtatcggatgggaactcctcacctcgatggtccggtacaaagcacggcagaggaccagtgctaaggccgcattggcacacccgtacttcaaccgtgaagggctccttggcctctccgtcatgcaaaacgtacggctgcaactgttccgcgcaacccagaaggactacagtgaagcagcgcggtgggttatcggcctcatggcaaggtcaggaactgaagatgtgggaggctttacagaagcacagcttcaagagcttagggaaataaaaccaaagaaaagcagcacccagcggaacgcgcttgcctccgtgctgcgcctgcagaggaagatcatgagaacgatcaaggagagcatggacgagctcaacagccagcgcaaaagcatctggtggagccggtggatacccagggaggagtaggccggccgcaggcgcacatgtacatcgtccacttctgtatgaaacgtcacctattagcactggtgaattggtgatagtataatacactatcctacttactgctttgtacatgctgacgactggtgagtaaaattcatctgaaaaaaaaatcggagtaacgcgatgtatagctgtaaatattttgcattgaagcatcatgatttttgagatcagctctctgcttgaatatccaatcaccgaagctttctgcac

SEQ ID NO: 63692 - DNA, 4838 bp, Zea Mays
caagcgataaggctcatctcattctctcttcccaggcgataaggctcaagtgggtcaacaaaaaaaggaaggaaagaccaaacgataaggctggaggcttatctagaaaggtccctagcgccctgcgacgacgcttggatcacaacgttgttggacgaatgcgcatctaccttcgcagttatctggaatttggagttacagtccacgttcgcatgaattggaactttcaactgccaaaacatacaattatctggattttggagttatagtccacgttctaaaaaattggaactttcaactgccaaaacatacaaaatagtcctcaaactgaagacaatcttcaaaatgaagaccagaacatactggcttttgaatcaccaccaaaaagtcaatactaggtgatgtggagaccataggtatccagctacttattatgtaggatgtaagccgaacaggttgaggtaagaaaggttatggtaaggaaaagacttcatccgaactgtttaagtcttgagtcatcttgagattcgctttgattataatgtccttccttgccggtgtcgatcttttcttctccagtctttgtctcactgatttgaggtgtgtgttttatcggagttggggaatatggttaagatagttatggatgagatggactatatgactacatgatgtaggtcaaaatattgtttgatgctaggcgagtataaagaggacttggggaaaagttaggtaacagaaacatttattctagatggtggatcatgattcatccgaagatattttttttacttgtatccttcattttcgaggttaaccttcttgttgggcttgatttagtagaaacagatcttcagatgaggtagggtataggttagattggatataactagattagactggataagatctacctaatttattttggaatagatcatgtgtgttacactattatgatataagcaaagtggttgggataagtatgattattaggacaagataagtctctaagaataagatataatcttttcgagataagatgaatcaattaaggtaagaaagaatcttttaagatcagataggtcaattaagatatgagagaatcttttaagataagatggatcatttaagataagatagattcctttaggttaagagggatccaatatagtaagagtgagtcttttgagataagagggatccattaaggtatggaagaatcttttaaggtaagaaggatccatttaaattagatatactttaatggaggataatctaaattgtttagttatctcataaattttatttatttacatttatacctatatgtatatgcagatgtaatcatggacgttactccacaacttatcacactcaatcaaaaatccaaatcaaacaaatatcacaagaacaaacactcaagcgtatagatacatataaaaatagttttgtttttggtcctaagagtaggtctcctattcctaaaggtcactttaggcacaagatttcaaaagtgtgaaatccacatttttctttagaaggaaaaggtaagaatgatcagagtatagcgaaaatagatgagaaaagattaagataagttcataaaataattagagtagcaaaggtaaggttaatcagagtagaacagtagaaggtgaaacaggatcaagaagagataagtatagaatgaatcagagtaaggtaagtaagtattggttgtccagttctatttaggtttcgtcctacagtcaacattcctctgataccacttctgtaacacccggttttaagggacaaagccgggtgcatctcatacatgcgccaaagaagacaatatatataatcacagagtgtatagagataaatgtcacaataatcagagtacttattacatagcggaagtcttacaaaataaaagataaatatagcaggatctaaaatctatccttggcgccagaaagtcaactgggagacgccaccttttgttgatgcatcctactatatatgtttcatatatgaagtctcatgtactcctaaaaatatatgtatatatgagtactactaaacaagaactgtttgaagcttgctacaccctatggtgacaatttactatgtaatgcttttacagtcgtccgtatcgctctatatacatgtgtaatagtataataatgtcccttctatatgatttagatagaaataagtattaaatttccataacaagaacgcgcgcgctggcgcgtgccatttgctagtttcttactgtcccgccacccttatctttagtgagtactgagtacaattccagtttatcttttaacgacatattagtagtctagtggatgtactgatgtaccagtatcaagggaaattatcatgcatacatagatcgtgctaaaagcaattacctgagttgcaatcatgaagtaacaacggcagtcattttttctccaccaagcaagcacgaccgagaataattgatttttctaacctctttgttttcttattttgatatataagcaattggagcaactcatccttgatttctggacggaagaagatgattatgaattgaccgtgtcttgtccgggagtctgagagtgagacactcggagcagatcctagccacggaagcaatcgatgcttccccaccacgttaatcttcccgtaaccacaaattatggcctcctcgtcttttttatttttatttcagaaacaaccaaaactcctcctttgtcacatgcattttgagtcactgacatgtggaccctcagctacgtgtcaaactcatatattccacacgtttgaacaaaattatctctcgaacgataattcaaactcggaatatatagcgggagccgcatttttcaaccaggaaaaggtcgggaaaaaaatccgaaatggccgctagtggcctcggtctctccacctccttcctccccggccacgacaccctcctccggcgccggcgccggcggccggcgggccacgccgccgcgtcgttccggccggtgacggcggagctcggcggcgtcgcgacggagctgggccgccagctggtggaggcggtgggcgtggggctcccctgcaccgtcatgcagtgcggcgacgtcatctaccgcagcacgctcccccggaacgacgggctcaccatcacggcccccggcctcacgctcgcgctcgctaccgtgtcgtacctctggtccacgccaggcgtcgcgccggggttcttcgacatgttcgtcctcgccttcgccgaacgcctcttccgccctaccttccgcaaggatgacttggtatttgggaagaagctcggggagggcgcattcggggtcgtgtgtaaggcttcactggcgaaccccgaagcggcgaagaagcaaggggatttggtcgtgaagaaggcaacagagtatggtgcagtggagatttggatgaatgaacgtgtcaggagggcatgcgctagtagctgtgcggattttatttatggcttttgcgagacaaaagcaaaaggtaagggagctgaagaatattggcttatttggcgttttgaaggtgaggatacactttatgatctcatgcaaagcaaggaattcccttacaatgtggagacaaaaattcttggcggtatccaagacttgccaaagggaatagcgagagagaataagatcattcaaacggtgatgagacaactcttatttgctcttgacggacttcattcgacaggaattgttcacagagatataaaacctcaaaatgtgatattttcagagggatcacgaaccttcaaaattattgatcttggagcagcagctgacttacgtgtaggaattaactatattcctaaagagttccttttggatccaaggtatgctgctccagaacaatatattatgagcacacaaaccccgtctgctccttctgttccagttgcaacaactttgtctccagtcctgtggcagctgaaccttcctgacagattcgacatatatagcttgggtctcatattcttacagatggcattcccttcactacgaactgatagcaacctcatacaatttaatcgccaactgaaaagatgtgattatgacttacaagcttggaggaatctggtggagccacgagcgagtgctgagctccggaggggctttgacatcatggatttagacggtggtatcggatgggaactcctcacctcgatggtccggtacaaagcacggcagaggaccagtgctaaggccgcattggcacacccgtacttcaaccgtgaagggctccttggcctctccgtcatgcaaaacgtacggctgcaactgttccgcgcaacccagaaggactacagtgaagcagcgcggtgggttatcggcctcatggcaaggtcaggaactgaagatgtgggaggctttacagaagcacagcttcaagagcttagggaaataaaaccaaagaaaagcagcacccagcggaacgcgcttgcctccgtgctgcgcctgcagaggaagatcatgagaacgatcaaggagagcatggacgagctcaacagccagcgcaaaagcatctggtggagccggtggatacccagggaggagtaggccggccgcaggcgcacatgtacatcgtccacttctgtatgaaacgtcacctattagcactggtgaattggtgatagtataatacactatcctacttactgctttgtacatgctgacgactggtgagtaaaattcatctgaaaaaaaaatcggagtaacgcgatgtatagctgtaaatattttgcattgaagcatcatgatttttgagatcagctctctgcttgaatatccaatcaccgaagctttctgcac

SEQ ID NO: 63693 - DNA, 1888 bp, Zea Mays
actctctaccagtctaccctaaccagcccgacagccgccgccgtttctccatcttcctcgcagcgccggcactacatcttcgctcccaccccgactcgcgctcaacacgcaggcgacggcggcagcgctcaggctcgggctctcagggacggcggggcagtcccagactcggcgtcgtcgtcagcggctacccttcccgcctctcgccaatcgcctcgcgcccgcgactccggtcctccgcacaccggcctgcgaccctgccaatagtgtataacttggagatatggatttgcaagagaagacgaccccaactcataaaggaaaaggaaagaaaaaagaaagcgcaaagaaaaaagaaagatcaaggaagagaacgtcatctgttttggattccactaatgacacagtcatcagcgaggaaatgtcagagtataatcttgatgaacctactatggaggaaaaactggcaaccctgaatttaatcaatagagagaatgaaatacatggtactgagaagcaatcgctctctgtggcaccaccaagtgcagattcagtccatatcttgctgaagcaagctcttcgtgctgatgatagtgtagcactgttaacttgcttgtataatagagatgagaaggttattacgaagtctatatcactcctaacaccagcagatgttgtgaagcttctcaagttctttgtcttgcaaatacaatctaggggtgcagtgttggtttgtttactcccgtggctgcaaactttattgaatcgacacatgagcagcatagtgtctcaggagtcttctctgtcattgctcaactcgctctaccaggtttgtaaaatgaagtaaccccgttgctttgaagaattttcaatgcaatgcccctaagaagttatataaaaaactaatagaaccctgaatatcaacacttaaattatgcttgagtggaacacccatcctggtgatcatttacatttagagatgatgcatgcctctctaggatcttactgcctggtttaaaagtgaacttgcactgtattagcgatattctattcaccagtcatcactcattaggatattctattcatcagtcggaggtggtgagtttggtctgcaacaggacaatgtaacttagaaaaacgttgtcttgccagttattgggtacttgtgcagttcatatagcatgatagcaatttaagtcatttttactgttggatgcaaattttacgggctatatttttttccagcttattgatgcaagaacgtcaacatttaagtcagcattgcaactctctaccactctagattaccttttcagcgagattgctgatgatgaagctgatgaggaggtaccaccaccgataatctatgaagataaggacactgatgatgacgagtccgaagttgatgctatggaaaccgacagagaagaggctgaagagctaggtgctgttactgatgcctctgaaaattcagatggaagtgagatcatgagcgactgattgccttttactctcccaactgctgaagtccaaatatcaacatcaattattcacgtaagatggaattcacgataattgctcaagatagttgtgcttgtactttgtggatcttaattgagtgaatgtttcaaatagcttttggatgacatattgacatttgagctgagaaaagggtagttaatgcaattgattgagtaaagcaaacattacccatcttatagtttgtactatctgtgaagggtaattgtttctgtatatggtgcttgaggtcatatttactcatgctaacctcgacctctcggaagtgcccaagagaaccgttgggtcgatggtctaacatgcgacgtgtggtgtttttcttgtttgaatgcacaccaattcgttcttt

SEQ ID NO: 63694 - DNA, 2296 bp, Zea Mays
ggccccccagtgtcggtcttgttttgaactaggatggttaatggctttgccgctttgggcaacgcgcgggcagtgggcactgctgtaccaggctataccagcatcagcgaagagccggcgttcttgagacttgagagaggagagcgaccgacgacctcgaagcttggcctgcgcggtggtgacgatggatgtcaaatgccggcgtctggaggggaaggtggccgtcgtgacggcgtccacgcaggggatcggcctagccatcgccgagcgcctcggcctggagggcgccgccgccgtcgtctcctcccgcaagcagaacgtggacgaggccgtggaggggctcaaggccaaggggatcaccgtggtgggcgccgtctgccacgtatccgacgcacagcaacgcaagaacatcatcgagacggccgtcaaggtcgcaactgtggaagggggttccagtctttcagggcttgttttgttgtcctcgtatttgctcagtccaaaatagttcattttcagatggattacattgcattgtcagcttcctcttgttgctaagcgatcccatcaggcctccctgcggttaacgttttgctgaaccttggggaagagggggattcctgtcaactctgtttttttcctagtaggatctggctctgttgctcacccgacattacctgcctgccctcgttagtcgccacctcgtattttctctagctgcttgcttaatactagcttcgtgctaaaatagtactctctccgttattttttatttgtcatgtttaatataaaaatgaactaacgagcgacaaatatttaattacggaggtagtagtcgttttagaaaatttgtagattcgtacaattcttgatgcatgtgttttgtatgtgtgtctagatttatcatctatttgaatataaacataaagaataatagctaaaccgactaatattttggaatgtagtacattttttggtgcaacggcattgtccaaactagctaagaaacatgggttcatggttggtaaaacacagacattgatagatacatctttaaactgggtaacagtgagatctatttgtgcataagtgcaaataatgccgctactagagctagaattgtctttttcttaaattatgaactaagacaacctcatttatacaaatatctactggaatttcacttatgagtataacgctcttttatcagtttagtcaatagcttttccaagcttacgaacagtagcgtagtatatatttatcatgtgaaagtgaaagtctcgagccaaaaggccgtgtcatttctcttttatctgttcatcttgtgacattgaggttgatggctagctcaacttgcatttacttcattagtacttcgacacacagtggtcataccttgtcttattcgcttgcatctaaagtgtacctttttcgtatctcaaatcacttgttttgttgatcatgttgtacattattttagtttatgttcatgtcttatatattgaaaagcatttgaggatgtgaggattcgtgtagcagtaatcaactgattatatggttgcagaactttgggcacattgatattcttgtctccaacgctgctgcaaatcctactgtgaatgtcatacttgaaatgaaagaggttgttctcgataagttgtgggatattaacgtcaaggcttctattcttcttattcaggatgctgctccccacctacgggcagggtcatctgtgatccttatttcttcaattgctggttacaatcctgagcaaggattgacaatgtatggtgttacaaagaccgctctctttggtctcacaaaggctcttgctggtgagatgggacccgatattcgtgttaattgtatagcccctggttttgttccgacacggtttgctagtttcttcatagacaacgagaccattaggaaaaagcttaacgagaggactatgcttaagagattgggttccgtggaagatatggcggcagctgccgcattcctggcatctgacgatgcatcattcatcacagctgaaaccattgttgttgctggaggggtgccgtcgagattgtaaatttggctcaagtttgtaccgattgttactaggttggtgacatagcaactatactgtaataatccactctgaaaatgtgggtcgtgctaagttggccaccgttagatctaataattttttaggtgtcttggtatttgtttgagataataatctactcagattatctgtcacttagttcaaattttattggattatataatataaatagataatcccaaacaa

SEQ ID NO: 63695 - DNA, 2869 bp, Zea Mays
gaaaatcctctccggtgtcctgtcctctccccttatccgccaccagcaaggccaaaacccgacacgccttctcaccccaaatccatggcgccaccgggctaaaaaccccaaccgccggtccgccctcgctccatggcgctctccgagctcccgctccaccactccttccgcctctcgtcccgccccagcatccacagcctcctcccgctccgcctcctctcctcttcctcttcctcgtcctccgccgccgcggcttcggcctcctccccttcctccaccggtggcaatcgcgcggcccccagcaccggcgctccgtggctgcagaggtgggcgccctccgacccctcccgtcccgccccagctccggctcccatcccgtccccgaccacgtccatagaccgcatcgtccaccgcctccgcaacctcggcctcgcctccgacgaagacgacccctctgcctccgcctccgcctccgctgccacggccgccgcacccccggacggcaccgaacgcctcggcgacctgctccaccgcggctgggcgcggcccgaccaccagttcgcggccgcgggcttcgacgatgccgtcctcccgtgggagagagacgacgagaccacggggccggtgagggacgaggaggatgggaccaagaggagacgggtcaaggcgcccacgctggccgagctcaccatcgaggacggggagctgcgccggctgcgcaggttggggatgacgcttcgcgaccgcatcaccgtgcccaaggctggagtcaccacggccgtcacggagaagatccatgacgcctggaggaagtcggagctggtccggctcaagttccacgaggacctcgcgcacgacatgaagacagctcatgagctcgtagagcgacgcacaggcggattgatcatatggaggtctggaagtgtaatggtggtttaccgagggagcaattacaaaaggcctctgaaatctcaggctctaaatggtgcctcatcaccagtgaagggcgaagatggtgcattgttcatcccagatgcctccaaccctgttgagagtaatattcaggggacaggtctggctacacagtatgcaaacgtgtccctattgaactcacagaatactgaggacatgacggaggaagagctggagttcaaccagatgcttgatgagctgggtcctcgttttgtggattggtggggaactggtattttaccagtggatgccgacttgttgcctcaaacaatccctggttataaaacaccgtatagagttcttccgactggaatgcgttcgacccttaccaatgcagagctgactaacttgcgaaagttagcgaggaaccttccatgccattttgctctagggagaaaccggaaccatcaaggtctgtcagcagcaattgttaagctctgggagaagagcttggtggtgaaaatagctgtcaaacgtggaatacagaacacaaataataaaataatggcagaagaaataaagaatctaacagggggtaccttgcttcttcgaaataaattttatattgtaatatatcgtggaaaagacttcctcccaacatctgtggcagctgtgttggctgaaagagaggagttgacaaaggatatttacaatatggaggagcagagaagaagggttttgattacacaaccttcggatgatggcttagatggccatgctcttgctggtactcttgctgaatttcaggaggcccaagctcgttggggaagagaagtgactgctaaggagcaagaagaaatgaaagaagcttcttctagatcagaaaagcaaaagctttacaggaaactcgaacacaagctttctattgctcaggcaaaaatacatagagcagaacgcttactatcaaagattgaagcttctttggtacttgccgatccatgtgatgatcaagaaatgattacagatgaggaaaagtctgttttccgtaggattggtttacggcttaaggcatatttgccacttggagttcgtggtgtttttgatggtgtaattgaaaatatgcacttgcattggaagcacagggaagttgttaaactaatttcaaagcagaagaccttgtcattcgttgaagagacggcacggcttcttgcatatgagagtggtggtatactagttgcaattgaaagagttccaaagggttatgcactcattttttaccgtgggaagaactataggagacctattaacataaggccaagaaacctcttaacaaaagctaaggcattgaagcgtgcggttgctatgcaacgccatgaggcccttagtcagcatatagatcaactggaaagcaatataaagcagatgaagttggatttgttgaggactatgaggaacaagatgaggatagctcagattcagaaaatgaatatgacaacgcagtcacctctgttagctatgatgaggatcaagacgattttgacgaatcagctgatgaagatgaatatgatgattacgacgatgaagatgacgagattgacagctagtggtttggaattgtttcttgtgatgtgccgctctgaattagtgattctctggacgttgtacttctgtctctgggacatttcgtggtacgagaaaacaaagttgcttcttgtgttcactagtccttttctattagttaacctcaagggctcaaggtttagtttccaactttccaagttgttccaaccagttccatctcgcgaaggacagtgagacggaggaatggatgttgcaaatcttggccccctagattaatttagtattgctcccaagaagaccattatgcgactgggctactggtaaccactaaccacgtaggagaggccgaggaatcgtcagggtcgtgagtgcgtca

SEQ ID NO: 63696 - DNA, 2893 bp, Zea Mays
gaaaatcctctccggtgtcctgtcctctccccttatccgccaccagcaaggccaaaacccgacacgccttctcaccccaaatccatggcgccaccgggctaaaaaccccaaccgccggtccgccctcgctccatggcgctctccgagctcccgctccaccactccttccgcctctcgtcccgccccagcatccacagcctcctcccgctccgcctcctctcctcttcctcttcctcgtcctccgccgccgcggcttcggcctcctccccttcctccaccggtggcaatcgcgcggcccccagcaccggcgctccgtggctgcagaggtgggcgccctccgacccctcccgtcccgccccagctccggctcccatcccgtccccgaccacgtccatagaccgcatcgtccaccgcctccgcaacctcggcctcgcctccgacgaagacgacccctctgcctccgcctccgcctccgctgccacggccgccgcacccccggacggcaccgaacgcctcggcgacctgctccaccgcggctgggcgcggcccgaccaccagttcgcggccgcgggcttcgacgatgccgtcctcccgtgggagagagacgacgagaccacggggccggtgagggacgaggaggatgggaccaagaggagacgggtcaaggcgcccacgctggccgagctcaccatcgaggacggggagctgcgccggctgcgcaggttggggatgacgcttcgcgaccgcatcaccgtgcccaaggctggagtcaccacggccgtcacggagaagatccatgacgcctggaggaagtcggagctggtccggctcaagttccacgaggacctcgcgcacgacatgaagacagctcatgagctcgtagagcgacgcacaggcggattgatcatatggaggtctggaagtgtaatggtggtttaccgagggagcaattacaaaaggcctctgaaatctcaggctctaaatggtgcctcatcaccagtgaagggcgaagatggtgcattgttcatcccagatgcctccaaccctgttgagagtaatattcaggggacaggtctggctacacagtatgcaaacgtgtccctattgaactcacagaatactgaggacatgacggaggaagagctggagttcaaccagatgcttgatgagctgggtcctcgttttgtggattggtggggaactggtattttaccagtggatgccgacttgttgcctcaaacaatccctggttataaaacaccgtatagagttcttccgactggaatgcgttcgacccttaccaatgcagagctgactaacttgcgaaagttagcgaggaaccttccatgccattttgctctagcttgctaaacttcattgaagggagaaaccggaaccatcaaggtctgtcagcagcaattgttaagctctgggagaagagcttggtggtgaaaatagctgtcaaacgtggaatacagaacacaaataataaaataatggcagaagaaataaagaatctaacagggggtaccttgcttcttcgaaataaattttatattgtaatatatcgtggaaaagacttcctcccaacatctgtggcagctgtgttggctgaaagagaggagttgacaaaggatatttacaatatggaggagcagagaagaagggttttgattacacaaccttcggatgatggcttagatggccatgctcttgctggtactcttgctgaatttcaggaggcccaagctcgttggggaagagaagtgactgctaaggagcaagaagaaatgaaagaagcttcttctagatcagaaaagcaaaagctttacaggaaactcgaacacaagctttctattgctcaggcaaaaatacatagagcagaacgcttactatcaaagattgaagcttctttggtacttgccgatccatgtgatgatcaagaaatgattacagatgaggaaaagtctgttttccgtaggattggtttacggcttaaggcatatttgccacttggagttcgtggtgtttttgatggtgtaattgaaaatatgcacttgcattggaagcacagggaagttgttaaactaatttcaaagcagaagaccttgtcattcgttgaagagacggcacggcttcttgcatatgagagtggtggtatactagttgcaattgaaagagttccaaagggttatgcactcattttttaccgtgggaagaactataggagacctattaacataaggccaagaaacctcttaacaaaagctaaggcattgaagcgtgcggttgctatgcaacgccatgaggcccttagtcagcatatagatcaactggaaagcaatataaagcagatgaagttggatttgggtattgaggactatgaggaacaagatgaggatagctcagattcagaaaatgaatatgacaacgcagtcacctctgttagctatgatgaggatcaagacgattttgacgaatcagctgatgaagatgaatatgatgattacgacgatgaagatgacgagattgacagctagtggtttggaattgtttcttgtgatgtgccgctctgaattagtgattctctggacgttgtacttctgtctctgggacatttcgtggtacgagaaaacaaagttgcttcttgtgttcactagtccttttctattagttaacctcaagggctcaaggtttagtttccaactttccaagttgttccaaccagttccatctcgcgaaggacagtgagacggaggaatggatgttgcaaatcttggccccctagattaatttagtattgctcccaagaagaccattatgcgactgggctactggtaaccactaaccacgtaggagaggccgaggaatcgtcagggtcgtgagtgcgtca

SEQ ID NO: 63697 - DNA, 2959 bp, Zea Mays
caaaactgcaattgtcattagaatgtaaataattttacacacacatacacggaccgaagaaggggaaaaaaagaaaaagaaaagaggaaaatcctctccggtgtcctgtcctctccccttatccgccaccagcaaggccaaaacccgacacgccttctcaccccaaatccatggcgccaccgggctaaaaaccccaaccgccggtccgccctcgctccatggcgctctccgagctcccgctccaccactccttccgcctctcgtcccgccccagcatccacagcctcctcccgctccgcctcctctcctcttcctcttcctcgtcctccgccgccgcggcttcggcctcctccccttcctccaccggtggcaatcgcgcggcccccagcaccggcgctccgtggctgcagaggtgggcgccctccgacccctcccgtcccgccccagctccggctcccatcccgtccccgaccacgtccatagaccgcatcgtccaccgcctccgcaacctcggcctcgcctccgacgaagacgacccctctgcctccgcctccgcctccgctgccacggccgccgcacccccggacggcaccgaacgcctcggcgacctgctccaccgcggctgggcgcggcccgaccaccagttcgcggccgcgggcttcgacgatgccgtcctcccgtgggagagagacgacgagaccacggggccggtgagggacgaggaggatgggaccaagaggagacgggtcaaggcgcccacgctggccgagctcaccatcgaggacggggagctgcgccggctgcgcaggttggggatgacgcttcgcgaccgcatcaccgtgcccaaggctggagtcaccacggccgtcacggagaagatccatgacgcctggaggaagtcggagctggtccggctcaagttccacgaggacctcgcgcacgacatgaagacagctcatgagctcgtagagcgacgcacaggcggattgatcatatggaggtctggaagtgtaatggtggtttaccgagggagcaattacaaaaggcctctgaaatctcaggctctaaatggtgcctcatcaccagtgaagggcgaagatggtgcattgttcatcccagatgcctccaaccctgttgagagtaatattcaggggacaggtctggctacacagtatgcaaacgtgtccctattgaactcacagaatactgaggacatgacggaggaagagctggagttcaaccagatgcttgatgagctgggtcctcgttttgtggattggtggggaactggtattttaccagtggatgccgacttgttgcctcaaacaatccctggttataaaacaccgtatagagttcttccgactggaatgcgttcgacccttaccaatgcagagctgactaacttgcgaaagttagcgaggaaccttccatgccattttgctctagggagaaaccggaaccatcaaggtctgtcagcagcaattgttaagctctgggagaagagcttggtggtgaaaatagctgtcaaacgtggaatacagaacacaaataataaaataatggcagaagaaataaagaatctaacagggggtaccttgcttcttcgaaataaattttatattgtaatatatcgtggaaaagacttcctcccaacatctgtggcagctgtgttggctgaaagagaggagttgacaaaggatatttacaatatggaggagcagagaagaagggttttgattacacaaccttcggatgatggcttagatggccatgctcttgctggtactcttgctgaatttcaggaggcccaagctcgttggggaagagaagtgactgctaaggagcaagaagaaatgaaagaagcttcttctagatcagaaaagcaaaagctttacaggaaactcgaacacaagctttctattgctcaggcaaaaatacatagagcagaacgcttactatcaaagattgaagcttctttggtacttgccgatccatgtgatgatcaagaaatgattacagatgaggaaaagtctgttttccgtaggattggtttacggcttaaggcatatttgccacttggagttcgtggtgtttttgatggtgtaattgaaaatatgcacttgcattggaagcacagggaagttgttaaactaatttcaaagcagaagaccttgtcattcgttgaagagacggcacggcttcttgcatatgagagtggtggtatactagttgcaattgaaagagttccaaagggttatgcactcattttttaccgtgggaagaactataggagacctattaacataaggccaagaaacctcttaacaaaagctaaggcattgaagcgtgcggttgctatgcaacgccatgaggcccttagtcagcatatagatcaactggaaagcaatataaagcagatgaagttggatttgggtattgaggactatgaggaacaagatgaggatagctcagattcagaaaatgaatatgacaacgcagtcacctctgttagctatgatgaggatcaagacgattttgacgaatcagctgatgaagatgaatatgatgattacgacgatgaagatgacgagattgacagctagtggtttggaattgtttcttgtgatgtgccgctctgaattagtgattctctggacgttgtacttctgtctctgggacatttcgtggtacgagaaaacaaagttgcttcttgtgttcactagtccttttctattagttaacctcaagggctcaaggtttagtttccaactttccaagttgttccaaccagttccatctcgcgaaggacagtgagacggaggaatggatgttgcaaatcttggccccctagattaatttagtattgctcccaagaagaccattatgcgactgggctactggtaaccactaaccacgtaggagaggccgaggaatcgtcagggtcgtgagtgcgtca

SEQ ID NO: 63698 - DNA, 2129 bp, Zea Mays
cacgcttggcggtccccgtagaccaagtccactcgccgatccctctccgagatctccacccacttatttcccctcccaccgcggccaggcctcagtcctctctgtcgcggagccgccgcaacccagcgtcccccgaagtctaaccctagatccggaccggccatggcgtcccgccgggtcgtctcctcgctcctccgctccgcgtcccgcctgcgggccgcctcgcccgctgctccacgaccgcgcgcgccaccgcaccgcccgtccccggccgggtacctcttcaaccgcgctgccgcctacgcctcttccgccgcggcccaggcggcacctgccaccccgccgccggccaccgggaagaccgggggcggcaagatcaccgacgagttcaccggcgctggcgccatcggccaggtgtgccaggtgatcggcgccgtcgttgacgtgcgcttcgatgagggcctcccgcccatcctcacggcgctcgaggtgctcgacaacaacatccgcctcgtgctcgaggtggcgcagcaccttggcgagaacatggtgcgcaccatcgctatggacggcacggaggggctcgtccgcggccagcgcgtcctcaacactggctcccccatcaccgtgcctgttggcagggctacccttggacgcatcataaatgttattggtgaaccgattgatgagaagggtgacataaagacaaaccacttcctccctattcatcgtgaagcccctgcttttgttgagcaggccactgagcagcaaattcttgttactggaatcaaggtcgtggatcttcttgcaccctaccaaaggggtggaaagattggtctcttcggtggtgcaggagtgggtaaaactgtgctcattatggagttgatcaacaatgttgctaaggcccatggtggtttctctgtgtttgctggtgttggagaacgtacccgtgaaggtaatgatctgtacagggaaatgattgaaagtggtgtcattaagctagatgacaagcagagcgaaagcaagtgtgctcttgtttacgggcagatgaatgagcccccgggtgctcgtgctcgtgttgggttgactggtttgactgttgctgaacatttccgtgatgctgaaggacaagatgtgcttctgtttattgacaacattttccgttttactcaggcaaactctgaggtgtctgctcttcttggacgtatcccatctgctgtgggataccagccaacccttgccactgatcttggaggactgcaagagcgtattacgacaacaaagaagggttctattacatctgtgcaggccatctacgtgcctgccgatgacttgacggatcctgctcctgctactacctttgcccatcttgatgctacaactgtgttgtcacgacagatctctgagcttggtatttatcctgctgttgatccactggattccacatcaagaatgctttctccccacgtgctgggtgaggatcactacaacactgctcgtggtgtgcagaaggttcttcagaactacaaaaatcttcaggatattattgctatcttgggtatggatgagctcagtgaggatgacaagctgacagtcgcccgtgcaagaaagattcagcgtttcctgagccagcctttccatgtcgctgaagttttcacgggtgctccaggaaagtatgtggagctgaaggaaagcgtgaagagtttccagggtgttttggatgggaagtatgatgacctccctgagcagtcattctacatggttggtggcattgaggaagtcattgctaaggctgagaaaattgccaaggagtctgcttcataaggaggcttcttgcttgttcaaccctgtacaagttccatttttggattttaagcgtttatttatgcttttcccagttaggcatgacgagctggagagtccatctcctgctgagagatgtttgttttacccttctttgcttcctccaccttacacccaaataagcaactgcagtgacgttggttttggctgcacccaaactacatgactgaagaaacttgtggcctgtgtaacgcgaatccatcagaacgccaaagttatggcttctggttgtggcaaattatggttcctccctgttcggttgagaa

SEQ ID NO: 63699 - DNA, 2281 bp, Zea Mays
atcaaaaaagaagacgtaattgcgcaaaagcctttttccgagatcggcgaaacaaatcgctgtaaaacccagcctgctaatcgccccactaggagtagtaggaggactctccgaggtccgagcggggtaggcaggtgtccgaaacggatcaccaaaccccgccggcgcagccgagagatccgacgtcgccgcgatccatggccgcctcgacggcggcggcgcggcgtctcctcctcgccctcgccgtcctcgccgcctgcctcggctcggcgccgcacggggccgtcgcgctccgctcgctcggcgtcgggggcgccaaggcggccgacggggacgcggccgtggacctcgacgcgtccaacttcaccgccttcctccagacttcgccggagtcgttcgcggtcgtcgagttcttcgcccactggtgtcctgcctgcagaaactacaagcctcactatgagagggttgcaaaacttttcaatggcccagatgctgcacatccagggactgttgtgatggcacgagttgattgtgcatcaaagcacaggtgaacgtggatctttgcaacaaattctctgttgaccattatccttacctggtgtggggtccgccaacaaaattcaatttggctcagtggaaaccaaagcaagagaatagtgaattggaactaattgatgatggaagaacagcagatcggttactgaaatggataaataagaagatgggaagctcattcaatttagacgacaaaaagtatgagaatgaaagtatgcacccaaaaaatacttcagatcctgaacagattgttcgagcaatttatgacgttgaggaagctacatctcatgcattgcagataattttggagcacaaggtttgagtgaaatgatcaaaacttccaactaatgtgctgtctgcacctctttttatgattattgctaatgttacctgcaactgtagatgatcaaaccagacactcgtgactcgcttattagctttttacaaattttggtggctcatcatccatcaaagaggtgtcgaagaggatctgctgagctacttattgactttgatgatcactggcatacaaacctctcattaagtttggaagacagtactacactgttgaaaggtgcaggagagaaagtatgtggaaatggagtgccacgtggatactggattttctgccgaggaagtaaaaaggaaacaagaggatttagctgtggcctatgggttttgctgcattcactaactgtccgaatcggagatggagagagccaaacaacatttacatcaatttgtgatttcatccacaatttcttcatatgtgaggaatgccgcacacacttctatgaaatgtgttcaaggtttggaaaaactactctagccatatattgccacagaaatcaactgcatgtttaatagttaccgttcacctgtagtgtatcagtccccttcaaatctgcccgtgaccttgccctctggctatggaccgcgcataacaaagttaacgagaggttgatgaaagaagaaaaggagttagacaatgctgatccttcatttcctaagatcatatggcctccaaagcaactctgtccattgtgctaccgttcttctagtaggacggctgatggagccatgcaggttgagtggaatgaagatgaagtattcaatttcttggttaactactacgggaagatgcttgtatcatcctacagggagacctccatgcagtcctttcaagtagcctcaatttctgacgattcttccgcatccagtgccgcaacagtacctattggagctgccctgggtatcgcccttgctagctgtacatttggggcgctagcatgcttctggaggacccaacagaagaacagaaagcaaagaaagaactggaactgaatatcttgcaccacttgcaaaccctaaactgcatgtctgcatcagaagtagcctccgtgagtgtaaattttctggaccggttatcttgacgatgggcccaaaagagtcgaaaacagatgaaaaacatacagagtagatttagtagtgctgagtcacgtggtagtgttgcgcgacggcgcgaactttgttgcaacaggtaatacagattgaacgtgtaaactctgcccttaacatgtttctcggatacctttacctggttatcgatgtaatattatcaatttaatgagtgaaaacgctgtgccttactttattgctgagctgaaacttcatcgatgttgtatctgtcatcctaatggttgccgtactacgtccagtcgaaaaa

SEQ ID NO: 63700 - DNA, 2700 bp, Zea Mays
tatagctaacggtcacacgcaccacaaaaccccgttccccaattccccgatcgacgcccctcttatcacaggagggcggcggggctgctgtcggctactcggctccacgagaccacgactggagttcggcgaatcgacagtaggtggaggcggggctcacggccgacggagcctctcaccaacgcccaacgcccaacgccggttccctgggttgggctggccacttgctcctcgccggctggggctgaggtgtggccggcggcagctaggaacagcgacctgcgccagtcgaagcaacattgcgtcagggagcggaagacatgcgcgccgttggtgaatgacagctttgcatcaccttctctgccgctcccatttctccctcgaggcaagaaaaataaatcctagggtttctgcctccaatccgcggccgatgcctgacgccaatgagctggaagccgcccggcgcgtggcgaccttcaccttggcggagctctctatctcctcttcgacgttgcctcctcgctccaacctcccggcgctctttcgccgctgcctccagttgctgcctcttctcaacgctggcgatccaaaactagccgctcgatgctgccgcggcctcctcgcttccgttggcgccatcctctctcgggacctctcgccctccctcctccctgcaatcgaggtcttcactgagagtgttgtttctagtgaccatttgaggagctgcttgattatagccaactgtgctgcacgtgaaggatcaaggatgttcgctgaggctgacccatacgaggatgagcacataatgcttgaacttgtgtgccgccacttcatttcatcattactggacgagggggcatttgaggtgtttctgagtgcactttcttggtcggggagggcattgcagcggactccagaaatcagctttcagggggcttttgtgctggttcaaaggacctacctctctttgccggctgttgtacaagcacatcttttactgctcatgtcaagatgcaccagtggtcaaaatcttaactcgcatatgctagcgtttagatatgccatgaatctttatgtcagatatttaccggcattgcgtgttttcaacataacccgcagtgcaatacccccactgaattatttgggcaagaaaagatcttttagttgtatcaaagatagcactgatcagaaactcagaagtcagatctatcgtctgctttcgttttgtgaattgcactgtggtgatgatcttcctgtcaatgagagtgatattggttgcataattgaaatgaaccagcatatgtttcttgaaaagttcaggcaagaatgtattgtgtttgtgaagggtatattgtctagtatcctgtgctgtgcaaagcaaaaggaggtgagtgaacctgatactgaggtatcagatgagattatttgccttgctgcagcaactagggtaatgggctcctcaattctatacatcctgcacaataaaaattatgaagcaaactgcaaggaatacaatgttatatgtgaaattatcagtttgcttgggcaatatggaacagatgagcttcatagatatgacctcctggctattattggggagtcagtggaaagtgaaagtgcctcaatgctaatgttggctcattttgctagcttatcaacttgttgtttaagaagaaggcttggctttctgtggaaaggttgtattatcatgatgatgatcgccacaaatcttattgctgaagagcaaagttggggtacatttcatctccctatggatgtctccaaatattctccagttttctgcaataccgaaaaggggattgtagaggtttctgctcgaactaaagagataatattacggtataaaagcatacataaatctcataataaaggcaggcgcttttatgatgatggaatcaggtgcaacagcagcggcttggaagttgcggtgcagaactcatgaacagagtgcatgggagctttctgtactcccctggacggagggataagactgttggttattttttgagagagaagttaattttttttacatattttgttggtctcatgctgatggactggtgggaggcaagagtagtagtgctgcacgttggatctcccaaacctatatcacctactatgtgaccttttattttgggacaaaatttgaattatagaattgcaaatatttaggacagagggagtaagttaataccctattaataatattaaaaacaattgcgcatgtctcatttcttcccccctttgaccagtagttaacgaattcctggtgactattggtgggtgtatagcaattttaatcgataaaagatgcaacattgatattaagaccagaatgctggataaattccattgaaatgtatattataattttttttgaagaaactgactataggaatgtcaaaaggacaagtagaagatggtagtatgcatcagttgcttaccactattatttccatcttgtgatatgtagtcaagaccaatttaaatcctgctaccaaatttgatcagagtgagttcctatagatcaaattgatgatggtggactgttctatcgttctcatccagacacttttttaacatgtcagactaatactagtttcatgcgtcccttgacctcttgttcacgtgcctattagcttctaataattgtttagtttgaattatgttatctcgttg

SEQ ID NO: 63701 - DNA, 2615 bp, Zea Mays
cacgcttggcggtccccgtagaccaagtccactcgccgatccctctccgagatctccacccacttatttcccctcccaccgcggccaggcctcagtcctctctgtcgcggagccgccgcaacccagcgtcccccgaagtctaaccctagatccggaccggccatggcgtcccgccgggtcgtctcctcgctcctccgctccgcgtcccgcctgcgggccgcctcgcccgctgctccacgaccgcgcgcgccaccgcaccgcccgtccccggccgggtacctcttcaaccgcgctgccgcctacgcctcttccgccgcggcccaggcggcacctgccaccccgccgccggccaccgggaagaccgggggcggcaagatcaccgacgagttcaccggcgctggcgccatcggccaggtgtgccaggtgatcggcgccgtcgttgacgtgcgcttcgatgagggcctcccgcccatcctcacggcgctcgaggtgctcgacaacaacatccgcctcgtgctcgaggtggcgcagcaccttggcgagaacatggtgcgcaccatcgctatggacggcacggaggggctcgtccgcggccagcgcgtcctcaacactggctcccccatcaccgtgcctgttggcagggctacccttggacgcatcataaatgttattggtgaaccgattgatgagaagggtgacataaagacaaaccacttcctccctattcatcgtgaagcccctgcttttgttgagcaggccactgagcagcaaattcttgttactggaatcaaggtcgtggatcttcttgcaccctaccaaaggggtggaaagattggtctcttcggtggtgcaggagtgggtaaaactgtgctcattatggagttgatcaacaatgttgctaaggcccatggtggtttctctgtgtttgctggtgttggagaacgtacccgtgaaggtaatgatctgtacagggaaatgattgaaagtggtgtcattaagctagatgacaagcagagcgaaagcaagtgtgctcttgtttacgggcagatgaatgagcccccgggtgctcgtgctcgtgttgggttgactggtttgactgttgctgaacatttccgtgatgctgaaggacaagatgtgcttctgtttattgacaacattttccgttttactcaggcaaactctgaggtgtctgctcttcttggacgtatcccatctgctgtgggataccagccaacccttgccactgatcttggaggactgcaagagcgtattacgacaacaaagaagggttctattacatctgtgcaggccatctacgtgcctgccgatgacttgacggatcctgctcctgctactacctttgcccatcttgatgctacaactgtgttgtcacgacagatctctgagcttggtatttatcctgctgttgatccactggattccacatcaagaatgctttctccccacgtgctgggtgaggatcactacaacactgctcgtggtgtgcagaaggttcttcagaactacaaaaatcttcaggatattattgctatcttgggtatggatgagctcagtgaggatgacaagctgacagtcgcccgtgcaagaaagattcagcgtttcctgagccagcctttccatgtcgctgaagttttcacgggtgctccaggaaagtatgtggagctgaaggaaagcgtgaagagtttccaggtacagtttgaactgtttttttttttgctcagaaactgctgcttggaaatattgtattccttactatgctttctcataatgtttagatatgcatctgtagacatcactgggtccttgctttgctttaccatttttgttgtttgaggccctcatgtttagttttgtcagacaacactcgtgcattctatacatgttgcagtatgatgtttctgtttcacgatctgcttttctatggaatcttatattgtgcagggtgttttggatgggaagtatgatgacctccctgagcagtcattctacatggttggtggcattgaggaagtcattgctaaggctgagaaaattgccaaggagtctgcttcataaggaggcttcttgcttgttcaaccctgtacaagttccatttttggattttaagcgtttatttatgcttttcccagttaggcatgacgagctggagagtccatctcctgctgagagatgtttgttttacccttctttgcttcctccaccttacacccaaataagcaactgcagtgacgttggttttggctgcacccaaactacatgactgaagaaacttgtggcctgtgtaacgcgaatccatcagaacgccaaagttatggcttctggttgtggcaaattatggttcctccctgttcggttgagtggttgcattctggaggtatcttgttctggactcaggctaatgattgtgcgtgcaactgtttcggagtcatttcaaaggttatccactttcgttggagttgatttcataacttatggtgtgtttggttgaggagcggagaggaatggaatggtttcattcttattttttttttatgtttggtttccaacggaggagaatggagtggcttctggagtctatatatggtaaatatttg

SEQ ID NO: 63702 - DNA, 439 bp, Zea Mays
gcaatgaatgacccgtaaacagtggcatcactaaccagagaagttacagaaatccaggcccacttcctttacaatcgatgacccgcaacaacgccatcagtacagagaccggacgcctcatttactgaaaccacagaagctccttccatcgtgcaaaaccagaagatatactggcacaacactgctatggaaaatctgaacagtacgtgctaatggctaatattaagaccttccatctcgttcaccacatcatcagctaacctggcccgcagagatccaaggcaattttcgaatccttcaagggctgcaaaggtgctctcaggtgcgccaccgaggttccctatttccttgcgcatcccgttgatgccattgtacagtctttttatagcgagctccatctcagacgagtcttgtggtgggtatacagaagccccaagat

SEQ ID NO: 63703 - DNA, 953 bp, Zea Mays
catctgcatcggcgagaagctcctccgtgacgtcatgaacgagaacaagatcgagctctacgccgcatacggtaaggtgatgaactgcggtggcggcggaagttgcggcacttgcatcgtcgagataatcgatggaaaggagctcctgaatgagaggacgaacaccgagaatcggtacctgaagaagaaaccagactcatggaggctagcttgccagactattgtaggcaacaaagagaactctggcaaggttgtggtccaacggctgccccagtggaagagatgaccgtgcagtgcagcaccacgttggtggatgattgatcgtccagttgtatgtcactaaaacgccatgccctgtgcattagagaagagacagaatcacctcgtcatatcgcttgtgaccagttctctgatactagtttgcaagtctgggcttcggtccacagtatatatgtgggatatatatctgtaaacaaaaaaaacaagaaggcagggcatgttgggatatatatctgtaaacaaaaaaacaagtttgggcttcggtccacagtatataagctgttttcacaaatggagaccagagtactccggtgtatgttggtagctttctgaaagaaaaaaaaaacaagaaggcagggcactagaattttcagcccttcaaaatttcctttcctgcatgttgtctctacggacatatgaatttttaacgaacatgtcactgctaacagaggcgtgcctctctgatacgtgcatggtgtcccgttacatgattctctccatgccatcgtgaattcgtgatgcagaacaatgtgatatggatgtatctgatttgtaatgttttgtatgcttatattccaatcatccgttgtagtctagctggtcaggatattcggctctcacccgaaagacccgggttcgagtcccggcaacggaacttttttatgtttttttag

SEQ ID NO: 63704 - DNA, 221 bp, Zea Mays
cagcagcaggccgtgaggccgcagaagaagaagacggcagcaggtaccagcagcaggccgtgaggttacgacgccgggcatctctaactcgaagctgcttgtaattttggtggcggcgcgtgatagctatcagattgtaaagtcgtgctgggctctactcctatttaactggttgtcttctactgttcacgggcgaaactaaaggttattgttaattgcgt

SEQ ID NO: 63705 - DNA, 272 bp, Zea Mays
acttcccaccgctactccgccagtcgccagggatctcggcatctcgcgccgtcgccgggccgccgcctcgcccacgacgcccagtctccagcctctgggctttggcgccctcaccggccatgctgcgtgcgactcacctcccactcccccagcagccactgccggcgcattcttcctttgattaatgtaagtttggcccggggctggacggcggcggctaggatttggtgcccactgagctgcctcacgataagtcaccttctggaccaatc

SEQ ID NO: 63706 - DNA, 1100 bp, Zea Mays
acttcccaccgctactccgccagtcgccagggatctcggcatctcgcgccgtcgccgggccgccgcctcgcccacgacgcccagtctccagcctctgggctttggcgccctcaccggccatgctgcgtgcgactcacctcccactcccccagcagccactgccggcgcattcttcctttgattaatgtaagtttggcccggggctggacggcggcggctaggatttggtgcccactgagctgcctcacgtgatgatctcccgggttgggaagagagtttgcttctgcacttccaggtggtaaagttcttgacgggaatgccaactcatggagatgaagtgcatcttgtgcaagcatttcaaatgttgagccctcaactctactaggtgtaccttcaaaacacttactgaccacttctgaagcaagaccaagggcctcaaatatctgggcacctttgtacgacgccagggtggaaatccccatctttgcaagaaccttcattattccattgttagaagcatagaaatacttgtcaataagttcctttggatacagctgtccgtcatcttgaagaggtattttctcatcaatctgtaaccgccatatggcttcaatagccaaataagggcatatagcatctgcaccaaatccaagaaggctacagaaatggtgcacttcacgaggttcagctgaatcaacaagcaaccctatgcgtgtcctctcaagattcaagacaagatgctgatggacagctccaactgccaatagagaactgacagctacacgatctggagagaaacctgtatggaaaaatagttcaaacctgacattttaaacctccaaatgctagagagtatatgacaagtaattttacagaatcaagcattgagatgcatagcacaaaatcatataaatcaagtgtgttgtgagtatcaagcgttgggaaaagatgaaagcagactgcttagaataagggagtagaatttagatgaacttagaataagggagtaggatttagatgaacttagaataagggagtaattcaaaaaatttatctctttacatgctgtgatgaaaaataatagagaaagttaattattc

SEQ ID NO: 63707 - DNA, 1168 bp, Zea Mays
gttccaacttcccaccgctactccgccagtcgccagggatctcggcatctcgcgccgtcgccgggccgccgcctcgcccacgacgcccagtctccagcctctgggctttggcgccctcaccggccatgctgcgtgcgactcacctcccactcccccagcagccactgccggcgcattcttcctttgattaatgtaagtttggcccggggctggacggcggcggctaggatttggtgcccactgagctgcctcacggttcaacctcatccaaggaaatcctgactggagtttctctaaacttcagcataccacgcagatgatgatctcccgggttgggaagagagtttgcttctgcacttccaggtggtaaagttcttgacgggaatgccaactcatggagatgaagtgcatcttgtgcaagcatttcaaatgttgagccctcaactctactaggtgtaccttcaaaacacttactgaccacttctgaagcaagaccaagggcctcaaatatctgggcacctttgtacgacgccagggtggaaatccccatctttgcaagaaccttcattattccattgttagaagcatagaaatacttgtcaataagttcctttggatacagctgtccgtcatcttgaagaggtattttctcatcaatctgtaaccgccatatggcttcaatagccaaataagggcatatagcatctgcaccaaatccaagaaggctacagaaatggtgcacttcacgaggttcagctgaatcaacaagcaaccctatgcgtgtcctctcaagattcaagacaagatgctgatggacagctccaactgccaatagagaactgacagctacacgatctggagagaaacctgtatggaaaaatagttcaaacctgacattttaaacctccaaatgctagagagtatatgacaagtaattttacagaatcaagcattgagatgcatagcacaaaatcatataaatcaagtgtgttgtgagtatcaagcgttgggaaaagatgaaagcagactgcttagaataagggagtagaatttagatgaacttagaataagggagtaggatttagatgaacttagaataagggagtaattcaaaaaatttatctctttacatgctgtgatgaaaaataatagagaaagttaattattc

SEQ ID NO: 63708 - DNA, 1249 bp, Zea Mays
gctggttaaagtatgataagttagacagcagtccgcggttccaacttcccaccgctactccgccagtcgccagggatctcggcatctcgcgccgtcgccgggccgccgcctcgcccacgacgcccagtctccagcctctgggctttggcgccctcaccggccatgctgcgtgcgactcacctcccactcccccagcagccactgccggcgcattcttcctttgattaatgtaagtttggcccggggctggacggcggcggctaggatttggtgcccactgagctgcctcacggttcaacctcatccaaggaaatcctgactggagtttctctaaacttcagcataccacgcagagtacaagacttattcagctcctgagtgtatctagaatattcttttgatgatctcccgggttgggaagagagtttgcttctgcacttccaggtggtaaagttcttgacgggaatgccaactcatggagatgaagtgcatcttgtgcaagcatttcaaatgttgagccctcaactctactaggtgtaccttcaaaacacttactgaccacttctgaagcaagaccaagggcctcaaatatctgggcacctttgtacgacgccagggtggaaatccccatctttgcaagaaccttcattattccattgttagaagcatagaaatacttgtcaataagttcctttggatacagctgtccgtcatcttgaagaggtattttctcatcaatctgtaaccgccatatggcttcaatagccaaataagggcatatagcatctgcaccaaatccaagaaggctacagaaatggtgcacttcacgaggttcagctgaatcaacaagcaaccctatgcgtgtcctctcaagattcaagacaagatgctgatggacagctccaactgccaatagagaactgacagctacacgatctggagagaaacctgtatggaaaaatagttcaaacctgacattttaaacctccaaatgctagagagtatatgacaagtaattttacagaatcaagcattgagatgcatagcacaaaatcatataaatcaagtgtgttgtgagtatcaagcgttgggaaaagatgaaagcagactgcttagaataagggagtagaatttagatgaacttagaataagggagtaggatttagatgaacttagaataagggagtaattcaaaaaatttatctctttacatgctgtgatgaaaaataatagagaaagttaattattc

SEQ ID NO: 63709 - DNA, 2478 bp, Zea Mays
ctgagttccgcactcccgtctggttgggaagctagtccactagtgacttagtgtgatcaagtacggatgcgaagctctggtaaatcatctgtgttggagagcgtggttgggaaggatttcctaccgaggggttcaggcattgtaacccggcggccgctggtgctgcagctccacagaattgatggtgacagggaatatgcagagttcatgcatcttccgagaaagagatttacagattttgctgctgtgagaaaggagatagctgatgaaactgaccgagaaacaggccgttcaaagcaaatatcaactgtccctatccatttaagcatattttctccccatgttgtgaatcttactcttattgatcttcctgggcttactaaagtagcagttgatggccaaccggagagtattgtacatgacattgaaaacatggttcgctcatatattgaaaagccaaattgtatcattctggctgtgtccccagccaatcaggaccttgctacttctgatgcaatcaagatttcacggggaagttgatcccaaaggtgaaaggacctttggtgtgctcacaaaaattgatctgatggataagggtaccgatgctgttgatatactggaaggaagatcttaccgtctccaaacaccatgggttggtgttgttaatcgatcccaacaagacatcaacaagaatgtggacatgattgctgctaggcgtagagagcgagagtattttgcatctacaccagaatataagcacatggcttctaggatgggatctgaatatttaggaaagatgctttcaaagcatttggaacaagtgatcaaatcaaggattccggggatccaatctcttataacaaagacaattgcagagctggaaactgaacttaatcgtcttggaaaacccattgctaatgatgctggggggaagctgtacacgatcatggaaatatgccgtatgtttgatggtatttacaaagagcatctggatggagtgcgccctggcggagagaaagtttaccatgtcttcgacaatcaatttcctgtagctattaaacgattgcagtttgataaacaactctctatggaaaatgtgaggaagcttataacagaggctgatggataccagcctcacttgatagctccagaacaaggatatagacgccttatagaatcttgtcttattagtatcagaggtcctgctgaggcggctgttgacgcggtccatgcaattctcaaggaccttgtccgcaaggctatcaatgaaacacatgaactgaagcagtttcccacccttcgtgtggaagtaggcaatgcagcttttgagtcattggatagaatgagggatgaaagcaagaaaaatacattaaagctagttgacatggaatgcagctacttgacagtagatttcttcaggaagcttcctcaggatgttgagaagggtggaaatccaagccactctatttttgatagatataatgactcttatcttagacgaattggacaaactgttctgtcatatgttaatatggtgtgttcgaccttgaggaactccatcccaaaatctattgtttattgtcaagtgcgagaggccaagcgctcgctgctcgatcacttcttcactgaactgggagcaagagagatgaagcagctttccaaacttcttgacgaagacccagcagtcatggaacgcagaactaaccttgcaaagaggctcgagctgtaccggagtgcccaatccgaaattgatgccgttgcatggtccaaatagtcctgatggccaagatatctgttcttaccccttgtctggcgattctctctcctattctggggcatatatagctgattttttgtgttgtaggtcaggtcattttatatatcaccggagctgtacggtgtcatgttccttgtgcttgaggatctaggggggcacttgtatctcgaacaagttcgtacatcgcgctttcgttccatctatgtgcagctgcatgaaaaccatgtttttctgtcacgcaaaaagtttgtcctattaaaaccctagtcctgggggtttcaaccaaaacacactaatgctgtgcagtaatcataagaaatgcggcgggaacctctgataactccagaaaacgactgttctgcaggatgtatattagattagcatctaaacattagcttcttagtcgtagtagtatacgtaaattcacccaaagcaataggcgtgatacattactgtgcgctgtattcgattcgatgatcgactatattttgtacagagttatgatcaaagctaaaaatgaatacacaagaacacacttgatggtacgaacgtatggacggtagcttttcttgaggtatgctctacgttgttgtctggtaatacttgtctaccagcctttctgagtactccccgaaagtcagcgttccgtttggtggaatcaactggtcaaggtcaacacaagcttaatcatttggggggag

SEQ ID NO: 63710 - DNA, 2796 bp, Zea Mays
gctggtacgacacagaccacgttcaattcaaaacccaaatcaactccgacgctcccagacaccagaccaccgtcgctcgctcgcctgcacaacctctccatccaggccacagctcgagaccaacgaccgacgcctagacgcggctgggcggtcggcctcacctcgttcccccgcctcccttcttcctgctccgcgtctcgatctcgactcccccgccgcgtcgcgcgacccggccagatctcgcccaccctgcgccgcggccatggataacttgatcaccctcgtcaacaagctgcagagggcttgcacggctctcggagaccacggagaggagagcgccctcccgacgctctgggactcgctgccggctatcgccgtcgttggaggacagagctctggtaaatcatctgtgttggagagcgtggttgggaaggatttcctaccgaggggttcaggcattgtaacccggcggccgctggtgctgcagctccacagaattgatggtgacagggaatatgcagagttcatgcatcttccgagaaagagatttacagattttgctgctgtgagaaaggagatagctgatgaaactgaccgagaaacaggccgttcaaagcaaatatcaactgtccctatccatttaagcatattttctccccatggtaagatgcaaactcttgaagggtacattgttaccgtcgcattatcacatctcaactgtcctcttcctattgtgaatcttactcttattgatcttcctgggcttactaaagtagcagttgatggccaaccggagagtattgtacatgacattgaaaacatggttcgctcatatattgaaaagaagtgcacggttgttgattcaggtgaaaggacctttggtgtgctcacaaaaattgatctgatggataagggtaccgatgctgttgatatactggaaggaagatcttaccgtctccaaacaccatgggttggtgttgttaatcgatcccaacaagacatcaacaagaatgtggacatgattgctgctaggcgtagagagcgagagtattttgcatctacaccagaatataagcacatggcttctaggatgggatctgaatatttaggaaagatgctttcaaagcatttggaacaagtgatcaaatcaaggattccggggatccaatctcttataacaaagacaattgcagagctggaaactgaacttaatcgtcttggaaaacccattgctaatgatgctggggggaagctgtacacgatcatggaaatatgccgtatgtttgatggtatttacaaagagcatctggatggagtgcgccctggcggagagaaagtttaccatgtcttcgacaatcaatttcctgtagctattaaacgattgcagtttgataaacaactctctatggaaaatgtgaggaagcttataacagaggctgatggataccagcctcacttgatagctccagaacaaggatatagacgccttatagaatcttgtcttattagtatcagaggtcctgctgaggcggctgttgacgcggtccatgcaattctcaaggaccttgtccgcaaggctatcaatgaaacacatgaactgaagcagtttcccacccttcgtgtggaagtaggcaatgcagcttttgagtcattggatagaatgagggatgaaagcaagaaaaatacattaaagctagttgacatggaatgcagctacttgacagtagatttcttcaggaagcttcctcaggatgttgagaagggtggaaatccaagccactctatttttgatagatataatgactcttatcttagacgaattggacaaactgttctgtcatatgttaatatggtgtgttcgaccttgaggaactccatcccaaaatctattgtttattgtcaagtgcgagaggccaagcgctcgctgctcgatcacttcttcactgaactgggagcaagagagatgaagcagctttccaaacttcttgacgaagacccagcagtcatggaacgcagaactaaccttgcaaagaggctcgagctgtaccggagtgcccaatccgaaattgatgccgttgcatggtccaaatagtcctgatggccaagatatctgttcttaccccttgtctggcgattctctctcctattctggggcatatatagctgattttttgtgttgtaggtcaggtcattttatatatcaccggagctgtacggtgtcatgttccttgtgcttgaggatctaggggggcacttgtatctcgaacaagttcgtacatcgcgctttcgttccatctatgtgcagctgcatgaaaaccatgtttttctgtcacgcaaaaagtttgtcctattaaaaccctagtcctgggggtttcaaccaaaacacactaatgctgtgcagtaatcataagaaatgcggcgggaacctctgataactccagaaaacgactgttctgcaggatgtatattagattagcatctaaacattagcttcttagtcgtagtagtatacgtaaattcacccaaagcaataggcgtgatacattactgtgcgctgtattcgattcgatgatcgactatattttgtacagagttatgatcaaagctaaaaatgaatacacaagaacacacttgatggtacgaacgtatggacggtagcttttcttgaggtatgctctacgttgttgtctggtaatacttgtctaccagcctttctgagtactccccgaaagtcagcgttccgtttggtggaatcaactggtcaaggtcaacacaagcttaatcatttggggggag

SEQ ID NO: 63711 - DNA, 2841 bp, Zea Mays
gctggtacgacacagaccacgttcaattcaaaacccaaatcaactccgacgctcccagacaccagaccaccgtcgctcgctcgcctgcacaacctctccatccaggccacagctcgagaccaacgaccgacgcctagacgcggctgggcggtcggcctcacctcgttcccccgcctcccttcttcctgctccgcgtctcgatctcgactcccccgccgcgtcgcgcgacccggccagatctcgcccaccctgcgccgcggccatggataacttgatcaccctcgtcaacaagctgcagagggcttgcacggctctcggagaccacggagaggagagcgccctcccgacgctctgggactcgctgccggctatcgccgtcgttggaggacaggtgcccttcttcccttcccgggcacgttttttcgcgttggttctgattggatctggtgctgtcgccccagcttcgtgggtgtggatctcgcgggttgctggtggaaccgcgaggagctctggtaaatcatctgtgttggagagcgtggttgggaaggatttcctaccgaggggttcaggcattgtaacccggcggccgctggtgctgcagctccacagaattgatggtgacagggaatatgcagagttcatgcatcttccgagaaagagatttacagattttgctgctgtgagaaaggagatagctgatgaaactgaccgagaaacaggccgttcaaagcaaatatcaactgtccctatccatttaagcatattttctccccatgttgtgaatcttactcttattgatcttcctgggcttactaaagtagcagttgatggccaaccggagagtattgtacatgacattgaaaacatggttcgctcatatattgaaaagaagtgcacggttgttgattcaggtgaaaggacctttggtgtgctcacaaaaattgatctgatggataagggtaccgatgctgttgatatactggaaggaagatcttaccgtctccaaacaccatgggttggtgttgttaatcgatcccaacaagacatcaacaagaatgtggacatgattgctgctaggcgtagagagcgagagtattttgcatctacaccagaatataagcacatggcttctaggatgggatctgaatatttaggaaagatgctttcaaagcatttggaacaagtgatcaaatcaaggattccggggatccaatctcttataacaaagacaattgcagagctggaaactgaacttaatcgtcttggaaaacccattgctaatgatgctggggggaagctgtacacgatcatggaaatatgccgtatgtttgatggtatttacaaagagcatctggatggagtgcgccctggcggagagaaagtttaccatgtcttcgacaatcaatttcctgtagctattaaacgattgcagtttgataaacaactctctatggaaaatgtgaggaagcttataacagaggctgatggataccagcctcacttgatagctccagaacaaggatatagacgccttatagaatcttgtcttattagtatcagaggtcctgctgaggcggctgttgacgcggtccatgcaattctcaaggaccttgtccgcaaggctatcaatgaaacacatgaactgaagcagtttcccacccttcgtgtggaagtaggcaatgcagcttttgagtcattggatagaatgagggatgaaagcaagaaaaatacattaaagctagttgacatggaatgcagctacttgacagtagatttcttcaggaagcttcctcaggatgttgagaagggtggaaatccaagccactctatttttgatagatataatgactcttatcttagacgaattggacaaactgttctgtcatatgttaatatggtgtgttcgaccttgaggaactccatcccaaaatctattgtttattgtcaagtgcgagaggccaagcgctcgctgctcgatcacttcttcactgaactgggagcaagagagatgaagcagctttccaaacttcttgacgaagacccagcagtcatggaacgcagaactaaccttgcaaagaggctcgagctgtaccggagtgcccaatccgaaattgatgccgttgcatggtccaaatagtcctgatggccaagatatctgttcttaccccttgtctggcgattctctctcctattctggggcatatatagctgattttttgtgttgtaggtcaggtcattttatatatcaccggagctgtacggtgtcatgttccttgtgcttgaggatctaggggggcacttgtatctcgaacaagttcgtacatcgcgctttcgttccatctatgtgcagctgcatgaaaaccatgtttttctgtcacgcaaaaagtttgtcctattaaaaccctagtcctgggggtttcaaccaaaacacactaatgctgtgcagtaatcataagaaatgcggcgggaacctctgataactccagaaaacgactgttctgcaggatgtatattagattagcatctaaacattagcttcttagtcgtagtagtatacgtaaattcacccaaagcaataggcgtgatacattactgtgcgctgtattcgattcgatgatcgactatattttgtacagagttatgatcaaagctaaaaatgaatacacaagaacacacttgatggtacgaacgtatggacggtagcttttcttgaggtatgctctacgttgttgtctggtaatacttgtctaccagcctttctgagtactccccgaaagtcagcgttccgtttggtggaatcaactggtcaaggtcaacacaagcttaatcatttggggggag

SEQ ID NO: 63712 - DNA, 2911 bp, Zea Mays
gctggtacgacacagaccacgttcaattcaaaacccaaatcaactccgacgctcccagacaccagaccaccgtcgctcgctcgcctgcacaacctctccatccaggccacagctcgagaccaacgaccgacgcctagacgcggctgggcggtcggcctcacctcgttcccccgcctcccttcttcctgctccgcgtctcgatctcgactcccccgccgcgtcgcgcgacccggccagatctcgcccaccctgcgccgcggccatggataacttgatcaccctcgtcaacaagctgcagagggcttgcacggctctcggagaccacggagaggagagcgccctcccgacgctctgggactcgctgccggctatcgccgtcgttggaggacaggtgcccttcttcccttcccgggcacgttttttcgcgttggttctgattggatctggtgctgtcgccccagcttcgtgggtgtggatctcgcgggttgctggtggaaccgcgaggagctctggtaaatcatctgtgttggagagcgtggttgggaaggatttcctaccgaggggttcaggcattgtaacccggcggccgctggtgctgcagctccacagaattgatggtgacagggaatatgcagagttcatgcatcttccgagaaagagatttacagattttgctgctgtgagaaaggagatagctgatgaaactgaccgagaaacaggccgttcaaagcaaatatcaactgtccctatccatttaagcatattttctccccatgttgtgaatcttactcttattgatcttcctgggcttactaaagtagcagttgatggccaaccggagagtattgtacatgacattgaaaacatggttcgctcatatattgaaaagccaaattgtatcattctggctgtgtccccagccaatcaggaccttgctacttctgatgcaatcaagatttcacggggaagttgatcccaaaggtgaaaggacctttggtgtgctcacaaaaattgatctgatggataagggtaccgatgctgttgatatactggaaggaagatcttaccgtctccaaacaccatgggttggtgttgttaatcgatcccaacaagacatcaacaagaatgtggacatgattgctgctaggcgtagagagcgagagtattttgcatctacaccagaatataagcacatggcttctaggatgggatctgaatatttaggaaagatgctttcaaagcatttggaacaagtgatcaaatcaaggattccggggatccaatctcttataacaaagacaattgcagagctggaaactgaacttaatcgtcttggaaaacccattgctaatgatgctggggggaagctgtacacgatcatggaaatatgccgtatgtttgatggtatttacaaagagcatctggatggagtgcgccctggcggagagaaagtttaccatgtcttcgacaatcaatttcctgtagctattaaacgattgcagtttgataaacaactctctatggaaaatgtgaggaagcttataacagaggctgatggataccagcctcacttgatagctccagaacaaggatatagacgccttatagaatcttgtcttattagtatcagaggtcctgctgaggcggctgttgacgcggtccatgcaattctcaaggaccttgtccgcaaggctatcaatgaaacacatgaactgaagcagtttcccacccttcgtgtggaagtaggcaatgcagcttttgagtcattggatagaatgagggatgaaagcaagaaaaatacattaaagctagttgacatggaatgcagctacttgacagtagatttcttcaggaagcttcctcaggatgttgagaagggtggaaatccaagccactctatttttgatagatataatgactcttatcttagacgaattggacaaactgttctgtcatatgttaatatggtgtgttcgaccttgaggaactccatcccaaaatctattgtttattgtcaagtgcgagaggccaagcgctcgctgctcgatcacttcttcactgaactgggagcaagagagatgaagcagctttccaaacttcttgacgaagacccagcagtcatggaacgcagaactaaccttgcaaagaggctcgagctgtaccggagtgcccaatccgaaattgatgccgttgcatggtccaaatagtcctgatggccaagatatctgttcttaccccttgtctggcgattctctctcctattctggggcatatatagctgattttttgtgttgtaggtcaggtcattttatatatcaccggagctgtacggtgtcatgttccttgtgcttgaggatctaggggggcacttgtatctcgaacaagttcgtacatcgcgctttcgttccatctatgtgcagctgcatgaaaaccatgtttttctgtcacgcaaaaagtttgtcctattaaaaccctagtcctgggggtttcaaccaaaacacactaatgctgtgcagtaatcataagaaatgcggcgggaacctctgataactccagaaaacgactgttctgcaggatgtatattagattagcatctaaacattagcttcttagtcgtagtagtatacgtaaattcacccaaagcaataggcgtgatacattactgtgcgctgtattcgattcgatgatcgactatattttgtacagagttatgatcaaagctaaaaatgaatacacaagaacacacttgatggtacgaacgtatggacggtagcttttcttgaggtatgctctacgttgttgtctggtaatacttgtctaccagcctttctgagtactccccgaaagtcagcgttccgtttggtggaatcaactggtcaaggtcaacacaagcttaatcatttggggggag

SEQ ID NO: 63713 - DNA, 2672 bp, Zea Mays
ggcagcccaccacgctgctggtacgacacagaccacgttcaattcaaaacccaaatcaactccgacgctcccagacaccagaccaccgtcgctcgctcgcctgcacaacctctccatccaggccacagctcgagaccaacgaccgacgcctagacgcggctgggcggtcggcctcacctcgttcccccgcctcccttcttcctgctccgcgtctcgatctcgactcccccgccgcgtcgcgcgacccggccagatctcgcccaccctgcgccgcggccatggataacttgatcaccctcgtcaacaagctgcagagggcttgcacggctctcggagaccacggagaggagagcgccctcccgacgctctgggactcgctgccggctatcgccgtcgttggaggacagagctctggtaaatcatctgtgttggagagcgtggttgggaaggatttcctaccgaggggttcaggcattgtaacccggcggccgctggtgctgcagctccacagaattgatggtgacagggaatatgcagagttcatgcatcttccgagaaagagatttacagattttgctgctgtgagaaaggagatagctgatgaaactgaccgagaaacaggccgttcaaagcaaatatcaactgtccctatccatttaagcatattttctccccatgttgtgaatcttactcttattgatcttcctgggcttactaaagtagcagttgatggccaaccggagagtattgtacatgacattgaaaacatggttcgctcatatattgaaaagaagtgcacggttgttgattcaggtgaaaggacctttggtgtgctcacaaaaattgatctgatggataagggtaccgatgctgttgatatactggaaggaagatcttaccgtctccaaacaccatgggttggtgttgttaatcgatcccaacaagacatcaacaagaatgtggacatgattgctgctaggcgtagagagcgagagtattttgcatctacaccagaatataagcacatggcttctaggatgggatctgaatatttaggaaagatgctttcaaagcatttggaacaagtgatcaaatcaaggattccggggatccaatctcttataacaaagacaattgcagagctggaaactgaacttaatcgtcttggaaaacccattgctaatgatgctggggcgccctggcggagagaaagtttaccatgtcttcgacaatcaatttcctgtagctattaaacgattgcagtttgataaacaactctctatggaaaatgtgaggaagcttataacagaggctgatggataccagcctcacttgatagctccagaacaaggatatagacgccttatagaatcttgtcttattagtatcagaggtcctgctgaggcggctgttgacgcggtccatgcaattctcaaggaccttgtccgcaaggctatcaatgaaacacatgaactgaagcagtttcccacccttcgtgtggaagtaggcaatgcagcttttgagtcattggatagaatgagggatgaaagcaagaaaaatacattaaagctagttgacatggaatgcagctacttgacagtagatttcttcaggaagcttcctcaggatgttgagaagggtggaaatccaagccactctatttttgatagatataatgactcttatcttagacgaattggacaaactgttctgtcatatgttaatatggtgtgttcgaccttgaggaactccatcccaaaatctattgtttattgtcaagtgcgagaggccaagcgctcgctgctcgatcacttcttcactgaactgggagcaagagagatgaagcagctttccaaacttcttgacgaagacccagcagtcatggaacgcagaactaaccttgcaaagaggctcgagctgtaccggagtgcccaatccgaaattgatgccgttgcatggtccaaatagtcctgatggccaagatatctgttcttaccccttgtctggcgattctctctcctattctggggcatatatagctgattttttgtgttgtaggtcaggtcattttatatatcaccggagctgtacggtgtcatgttccttgtgcttgaggatctaggggggcacttgtatctcgaacaagttcgtacatcgcgctttcgttccatctatgtgcagctgcatgaaaaccatgtttttctgtcacgcaaaaagtttgtcctattaaaaccctagtcctgggggtttcaaccaaaacacactaatgctgtgcagtaatcataagaaatgcggcgggaacctctgataactccagaaaacgactgttctgcaggatgtatattagattagcatctaaacattagcttcttagtcgtagtagtatacgtaaattcacccaaagcaataggcgtgatacattactgtgcgctgtattcgattcgatgatcgactatattttgtacagagttatgatcaaagctaaaaatgaatacacaagaacacacttgatggtacgaacgtatggacggtagcttttcttgaggtatgctctacgttgttgtctggtaatacttgtctaccagcctttctgagtactccccgaaagtcagcgttccgtttggtggaatcaactggtcaaggtcaacacaagcttaatcatttggggggag

SEQ ID NO: 63714 - DNA, 2939 bp, Zea Mays
agacgactcctttagtgcattcaaacatagagctagatcagctgaaactcaagtctggaaatcaaatctactgaaactctacctgaagagagcatcccaacatggcaacatagagctagatcagctggcagcccaccacgctgctggtacgacacagaccacgttcaattcaaaacccaaatcaactccgacgctcccagacaccagaccaccgtcgctcgctcgcctgcacaacctctccatccaggccacagctcgagaccaacgaccgacgcctagacgcggctgggcggtcggcctcacctcgttcccccgcctcccttcttcctgctccgcgtctcgatctcgactcccccgccgcgtcgcgcgacccggccagatctcgcccaccctgcgccgcggccatggataacttgatcaccctcgtcaacaagctgcagagggcttgcacggctctcggagaccacggagaggagagcgccctcccgacgctctgggactcgctgccggctatcgccgtcgttggaggacagagctctggtaaatcatctgtgttggagagcgtggttgggaaggatttcctaccgaggggttcaggcattgtaacccggcggccgctggtgctgcagctccacagaattgatggtgacagggaatatgcagagttcatgcatcttccgagaaagagatttacagattttgctgctgtgagaaaggagatagctgatgaaactgaccgagaaacaggccgttcaaagcaaatatcaactgtccctatccatttaagcatattttctccccatgttgtgaatcttactcttattgatcttcctgggcttactaaagtagcagttgatggccaaccggagagtattgtacatgacattgaaaacatggttcgctcatatattgaaaagccaaattgtatcattctggctgtgtccccagccaatcaggaccttgctacttctgatgcaatcaagatttcacggggaagttgatcccaaaggtgaaaggacctttggtgtgctcacaaaaattgatctgatggataagggtaccgatgctgttgatatactggaaggaagatcttaccgtctccaaacaccatgggttggtgttgttaatcgatcccaacaagacatcaacaagaatgtggacatgattgctgctaggcgtagagagcgagagtattttgcatctacaccagaatataagcacatggcttctaggatgggatctgaatatttaggaaagatgctttcaaagcatttggaacaagtgatcaaatcaaggattccggggatccaatctcttataacaaagacaattgcagagctggaaactgaacttaatcgtcttggaaaacccattgctaatgatgctggggggaagctgtacacgatcatggaaatatgccgtatgtttgatggtatttacaaagagcatctggatggagtgcgccctggcggagagaaagtttaccatgtcttcgacaatcaatttcctgtagctattaaacgattgcagtttgataaacaactctctatggaaaatgtgaggaagcttataacagaggctgatggataccagcctcacttgatagctccagaacaaggatatagacgccttatagaatcttgtcttattagtatcagaggtcctgctgaggcggctgttgacgcggtccatgcaattctcaaggaccttgtccgcaaggctatcaatgaaacacatgaactgaagcagtttcccacccttcgtgtggaagtaggcaatgcagcttttgagtcattggatagaatgagggatgaaagcaagaaaaatacattaaagctagttgacatggaatgcagctacttgacagtagatttcttcaggaagcttcctcaggatgttgagaagggtggaaatccaagccactctatttttgatagatataatgactcttatcttagacgaattggacaaactgttctgtcatatgttaatatggtgtgttcgaccttgaggaactccatcccaaaatctattgtttattgtcaagtgcgagaggccaagcgctcgctgctcgatcacttcttcactgaactgggagcaagagagatgaagcagctttccaaacttcttgacgaagacccagcagtcatggaacgcagaactaaccttgcaaagaggctcgagctgtaccggagtgcccaatccgaaattgatgccgttgcatggtccaaatagtcctgatggccaagatatctgttcttaccccttgtctggcgattctctctcctattctggggcatatatagctgattttttgtgttgtaggtcaggtcattttatatatcaccggagctgtacggtgtcatgttccttgtgcttgaggatctaggggggcacttgtatctcgaacaagttcgtacatcgcgctttcgttccatctatgtgcagctgcatgaaaaccatgtttttctgtcacgcaaaaagtttgtcctattaaaaccctagtcctgggggtttcaaccaaaacacactaatgctgtgcagtaatcataagaaatgcggcgggaacctctgataactccagaaaacgactgttctgcaggatgtatattagattagcatctaaacattagcttcttagtcgtagtagtatacgtaaattcacccaaagcaataggcgtgatacattactgtgcgctgtattcgattcgatgatcgactatattttgtacagagttatgatcaaagctaaaaatgaatacacaagaacacacttgatggtacgaacgtatggacggtagcttttcttgaggtatgctctacgttgttgtctggtaatacttgtctaccagcctttctgagtactccccgaaagtcagcgttccgtttggtggaatcaactggtcaaggtcaacacaagcttaatcatttggggggag

SEQ ID NO: 63715 - DNA, 2896 bp, Zea Mays
gtaaaatttaatttcttcagatgaaggagacgactcctttagtgcattcaaacatagagctagatcagctgaaactcaagtctggaaatcaaatctactgaaactctacctgaagagagcatcccaacatggcaacatagagctagatcagctggcagcccaccacgctgctggtacgacacagaccacgttcaattcaaaacccaaatcaactccgacgctcccagacaccagaccaccgtcgctcgctcgcctgcacaacctctccatccaggccacagctcgagaccaacgaccgacgcctagacgcggctgggcggtcggcctcacctcgttcccccgcctcccttcttcctgctccgcgtctcgatctcgactcccccgccgcgtcgcgcgacccggccagatctcgcccaccctgcgccgcggccatggataacttgatcaccctcgtcaacaagctgcagagggcttgcacggctctcggagaccacggagaggagagcgccctcccgacgctctgggactcgctgccggctatcgccgtcgttggaggacagagctctggtaaatcatctgtgttggagagcgtggttgggaaggatttcctaccgaggggttcaggcattgtaacccggcggccgctggtgctgcagctccacagaattgatggtgacagggaatatgcagagttcatgcatcttccgagaaagagatttacagattttgctgctgtgagaaaggagatagctgatgaaactgaccgagaaacaggccgttcaaagcaaatatcaactgtccctatccatttaagcatattttctccccatgttgtgaatcttactcttattgatcttcctgggcttactaaagtagcagttgatggccaaccggagagtattgtacatgacattgaaaacatggttcgctcatatattgaaaagaagtgcacggttgttgattcaggtgaaaggacctttggtgtgctcacaaaaattgatctgatggataagggtaccgatgctgttgatatactggaaggaagatcttaccgtctccaaacaccatgggttggtgttgttaatcgatcccaacaagacatcaacaagaatgtggacatgattgctgctaggcgtagagagcgagagtattttgcatctacaccagaatataagcacatggcttctaggatgggatctgaatatttaggaaagatgctttcaaagcatttggaacaagtgatcaaatcaaggattccggggatccaatctcttataacaaagacaattgcagagctggaaactgaacttaatcgtcttggaaaacccattgctaatgatgctggggggaagctgtacacgatcatggaaatatgccgtatgtttgatggtatttacaaagagcatctggatggagtgcgccctggcggagagaaagtttaccatgtcttcgacaatcaatttcctgtagctattaaacgattgcagtttgataaacaactctctatggaaaatgtgaggaagcttataacagaggctgatggataccagcctcacttgatagctccagaacaaggatatagacgccttatagaatcttgtcttattagtatcagaggtcctgctgaggcggctgttgacgcggtccatgcaattctcaaggaccttgtccgcaaggctatcaatgaaacacatgaactgaagcagtttcccacccttcgtgtggaagtaggcaatgcagcttttgagtcattggatagaatgagggatgaaagcaagaaaaatacattaaagctagttgacatggaatgcagctacttgacagtagatttcttcaggaagcttcctcaggatgttgagaagggtggaaatccaagccactctatttttgatagatataatgactcttatcttagacgaattggacaaactgttctgtcatatgttaatatggtgtgttcgaccttgaggaactccatcccaaaatctattgtttattgtcaagtgcgagaggccaagcgctcgctgctcgatcacttcttcactgaactgggagcaagagagatgaagcagctttccaaacttcttgacgaagacccagcagtcatggaacgcagaactaaccttgcaaagaggctcgagctgtaccggagtgcccaatccgaaattgatgccgttgcatggtccaaatagtcctgatggccaagatatctgttcttaccccttgtctggcgattctctctcctattctggggcatatatagctgattttttgtgttgtaggtcaggtcattttatatatcaccggagctgtacggtgtcatgttccttgtgcttgaggatctaggggggcacttgtatctcgaacaagttcgtacatcgcgctttcgttccatctatgtgcagctgcatgaaaaccatgtttttctgtcacgcaaaaagtttgtcctattaaaaccctagtcctgggggtttcaaccaaaacacactaatgctgtgcagtaatcataagaaatgcggcgggaacctctgataactccagaaaacgactgttctgcaggatgtatattagattagcatctaaacattagcttcttagtcgtagtagtatacgtaaattcacccaaagcaataggcgtgatacattactgtgcgctgtattcgattcgatgatcgactatattttgtacagagttatgatcaaagctaaaaatgaatacacaagaacacacttgatggtacgaacgtatggacggtagcttttcttgaggtatgctctacgttgttgtctggtaatacttgtctaccagcctttctgagtactccccgaaagtcagcgttccgtttggtggaatcaactggtcaaggtcaacacaagcttaatcatttggggggag

SEQ ID NO: 63716 - DNA, 493 bp, Zea Mays
taggcctcgggtatctgcagcggaatcaatcaaacggagctcgagtcagcggctggatcgagcaagagggatgtccaacacctggaacaatgggtggaaggaacggcaaaaccacgtcttcctgcgtgaattcggaaccccagaaatcagaaccctcgcaaaccggactccacgcggaacgaacggttcggagatctgtgtagcggaatcagcccagaacgcgagcggagaaattcagaacgaaaaacctgcaaatatatgagaacccagccgagactagcgaagaagcagaagagattggtaagacagagactgcgagacgcgagaacaactggaccgcagatcaaacggaccctcgaggagccttgcggagagaaggcggcgcagagagcagttggggactgcgaacacgccacgaaacggagaaacttcacaaatcagcccggcaggacccggaacgccgcgtcaacagacaccgacagcggaaacgaga

SEQ ID NO: 63717 - DNA, 844 bp, Zea Mays
cacgtccacgtgcccatgcagagccatgagccatctcacttcctcccctgccaccgtcatcgctgcatggtttctcatctcatttctaaaatgcttctcctgcgctgaaactcaaaccgacgcccgtgccctgccatgtcgctgatttccagcacctgacacaaccaagttcccattgcagctaaataaaaagtgttataaagcagataacaaaggctaaaaatgttataaatatacagaaatcatctgaatcctctattctctgggtgaaagaaaaggtagaagaaagagtattttttttttgtctagaagctaatttttagctaagaatctaagcatgcgagagatatccttagctagcttttagccatgattaacaactagtcctagtatttccaaacatgctctaattaaccacatagagcgagcgagagagagggtggtctaaatgccttgtttcctcttgcggagacagtctactggttgtccgacgatatgcacaaaccacccaatgtcgaacaaaaaaaaggaaggaacgaaggaagacgccggctacgattcattcggaagttcttcccccccccccccccccccccccctgaatccaccttcgttttttatggcttccttcaacccagtgcgaccatgtacaagagcgcgcgctcctcgtctcccgtcactgtcgccgacccttcttcctcttccgccgccaccgcgcctcgggcaggcaactcaggctggcgtcggtggtcagtcggagtcgctgtccatgccctccatccccttgaggcctcgattcttctgttgctgaagaaacgaacagaaagaaaacgtgagacttccc

SEQ ID NO: 63718 - DNA, 2026 bp, Zea Mays
cttttccctgtttccccgtccggagcgaggcgaggggtgagggtgacgcaaccgagcgccgccaaccgcgaccgccttcctcacctgtgtcacctccgccgccatcctcacttcgatcgcctctgccgtcatcctcagcttgtcctgtcgcactgcttgtgccgcaccagcttgttgccttccgcgcccggctgcgccagccaggctcgtccggccctcgcgccgcttacttctattttgcccggccccatagaattcgaaccgcaaatgagacaggcgctactgcagccgtgggaaaggaaacgcaaaacaacgccaacgccgtcttctcttcctggagttctatcccgatgccgtccatcacgcactacgtgctggatcgcctcctagagacacggtcgcctgttcatgtccagaaggtggttcccaagcctccgcccccgcctcctgacaaggccacaccggtgccagtgtctactgccaggacacggtcgtcgctggcatcactctatgccacgcctgagaacaccaccctgccggacttgccttcctcgttcccgggaacctggtcgccatacctcatcaaccataagaggcggggagcctcccttgccaggaccttctctcagggtgatgctgggagggaggtcagccagccaaacctccctgtgatgctgcctgctttgccgagagggtgtgaacccactcaagtccaggagcccgagtttgtgtttcagcaagcaggcaatggtcaagctgaaggtgaaagtgctgtagaagaggctttgaatggcaaaagtgtaatgctacagaaaggcaaggggtctgttatagctgaaatagagcaggagcagcctgagtttgagttttgtcaaagtcttgaagcattagtgaagcctgttaatgttagaaggcctttgaatggtgaggcacccaaaatttgtgagagtgacacctttgaatggcggaagcctagttcacctcttggaacctctgttggtacaccaggtgcagaattctacgatgcatttgaagaaatatccagtgacggtggaactcggtcatcgcgaggcatggatgatgacctccgtgaaatgaggttaagtctgttgatggaaattgagaggaggacacaaacagaagaagcacttgagatctggcaacaggaatggaagaacctgagtcaccacctatctcttgttgccttatcactaccatctccaagtatagctgaggattctgattgtttaaaggtggatcctggagctgagttgtgccagcaaataactgtttcacaacttgtggctgctgctattgctcggggttttgctcgtgctgaagttgaatcagagatggaaactatgattgcgacaaagaactttgagattggaaggctgtcggatagggtccagtactatgaagctgcaaacagggaaatgtctcaaagaaaccaagaagctatcgagatgtcaaggcaacaacgcaaggggcgtaagaagcgacagaagtggttctgggcttcagttgggcttgcagtcacccttggcgccacagccattgcctggtcttacgtaactccgtcgcagccccaggccagtgcagatccaagtagtgctgccagccagtaagctactaagtaagctaggatgaagacatactcctcgttccagaagcctaacaaagatctagctatactcctatagagggaaaaaaatgctgtataagttttctctttggtgatcggccgtgatcgccgccgcaatcttgatctgtcgcttcgtttgtagaagcgttgtatggcccatctcgtagatggttgagcaaataacacaatggatgtgggcgtgtggctatggttagtgaaccatgcccgtagcccactcaagcggagtttattttgtcaagttcactttattatttatttatttatttttgctcttccgaaatatgatggatcatggaagtcgtctgccgagcggaccggaccgactggttctggggcctgtggctgtggtctgtggagagg

SEQ ID NO: 63719 - DNA, 2467 bp, Zea Mays
gccgtcaatggaaggtcccagactctccccaccatgcccctgcccacgcgtccccactcctgcgctgatatctcgcacccgtagacaccgccacagcaccccggcccgccgcgcgatctccagcccccgccccatgcgccttcgtcaaacccctccgccgcggtaatgcaggcttgagatcgagcagatccgccatcccgcgccctcgctctcgctctcgccccgacacgcattcaccctggccccgctgccctgcgccgccataccctcgccccatccttccctgcccccgcaccgcatccaacacgcagatccagcgccgtcgccgcgagcatacagaggcaccgcgcggacacgacgacgtcgcgtgctgtggtgaaggaggtcgccctgaactggttggctacaaaggcgacaaggtgggtggtgtcgcggaactccacgagcaggcccacgagcgccgggagcgagcgcgcgcactcctcagtcatgaggcccacgacgcctcaccttcctcaagctccacggcgtcctcaccctcgcgagctagcaacgccttcctctccgtcgtccgtgtgcatctccatgacgcttatggatgtgtacgccaagaccagccggctcgagctggtcctgcaggtgctcggcgaaatgcctagcaggaacgtggtctcgcggaccatgcttgccgcctcgctgggacaagagctgacttgaggaagatgatggattttggatgcttgaacgaacggtggaaaaaatcgggtacaagtggcttcaaaaacacacgagtacattctctattcctttatttttaaggactaggcataatctgccgcacgacacaatataccaaactgcacaaaactgaagcattccattagttcacatgtttgattagggtagggcaagtgcaattagtaacgaaaacaacacgacattgtaaaaggaccattgtcgcaaaaagtatttattcttcagcattgattacaaatcaagccagctaaataacaagtttcagaaacttgcaacaacgcttcaaaatatctgtaggaaggactgtcgccatggcacgccagccctttattcatccgattctgtgcggacagctgcagaaataaccatgttaatgtgtatttcgcatgtttgttatgttggacactgaagttttccattatgtagatcattgtgtctgaatattttgttttttcatgtagagcactaaagctacaatgtttttattgggccctgatcatacctatgctctgtttagccagtgattttgtgagaccattatccaaaaattgttgcctggctacggtcgatatatatatatagtcttattttccgttttgcattctgtctggttctgtatatattctatttagaaaacactggctattttccgttttgctctgtttagtcaatcaatttaactgttgtaaaagatgcagtgatttctatgaacacaatttttggatgaacacattatatttacctgtagcagttgtcacaggagaatttatcctctgtgttttaagttacaagtgtccagtcagaaaatacattataaatagaaatcactggaactcatagcagtagccctggcacacttaatcaccataaaaattggatgaacacaatggaactcatagcagtgctgaaagggaaatgtgcccttgggacatttctaaatattttggtgattgagtgccaactcaagtgcttaaaatgtgaatttatgcaatggatgaacaaagtgcaaatcaagagcaaaggtatgtttctaagtcttagtacattggttttgtgtactaatatatttgtctaagtggtagaaacagaaagaagaagagaagaaaagacttggctgtgtacagccaagaggctgtttcggtctggggcaccggactgtccggtggtgcaccggacagtgtccggtggtgcaccggacagtgtccggtgcgccaggctgcctcggccgaagtggccactctcgggaattcgccgacggcgtacggctaaaattcaccggactgtccggtgtgcaccggactgtccggtgagccaacggtcggcagggccaacggtcggccgcgcgatctgcgcgggacacgtggccaagccaacggtcggaagggggcaccggactgtccggtgtgcaccggactgtccggtgtgcaccggacatgtccggtgcgccaacggctcccgcatctgcaacggtcggcttcgccatttaaggaaaggaatcgggcaccggacactgtccggtgtgcaccggactgtccggtgcgcccgacgacagaaggcaagatcagccttccagatttgctctcaacggctcccagctgccttggggctataaaagggacccttaggcgcatggaggagaataacaagcgactcttgagcattcttgatcatccacactaagtctttgcgcatccgtttgtgattctaagtg

SEQ ID NO: 63720 - DNA, 1113 bp, Zea Mays
aaaagctctgctccagccacctcttcttcttcttcgccttcgagttcgaatacgagcacgcgacgacgcgagagaaagctcgtgcggagaggtggcgcgcggaggcgaaaatgggcgctgctgctcctcttcccagtacaacgacggctcggcggcgcgcggcgtggtgggcaccgactccgcgaccatcgcgctgtccgggagcgagagccgggacggcggcggcaggcgcgcgaagctgcagggcgtcgtgctgggctgcaccgcgtcgtacgacggccagagcttccagtcctcggacggcgtgctcagcctgggcaacagcaacatctccttcgcgtcccgcgccgccgcgcgcttcgggggccgcttctcctactgcctcgtcgaccacctggccccgcgcaacgccaccagctacctcaccttcggcccgccggggcccgagggcggcgccgcggcgtccagcagctcctcctccgccgcagcgcggacgccgctgctgctcgaccgccggatgagcccgttctacgccgtggcggtcgacgccgtgcacgtggccggggaggcgctcgacatccccgcggacgtgtgggacgtcgcccggggcggcggcgcgatcctcgactccgggaccagcctcaccgtcctcgccaccccggcgtacagggccgtggtcgccgccctcagcgagcgcctcgccggcctgcccagggtctccatggacccgttcgagtactgctacaactggaccgccgccgcgctggagatccccgggctggaggtgcgcttcgccgggtccgcgcgcctgcagccgccggccaagagctacgtcgtcgacgcggcgcccggggtgaagtgcatcggcgtgcaggagggcgcgtggcccggagtgtcggtcatcggcaacatcctgcagcaggaccacctctgggagttcgacctcagggaccggtggctccggttcaagcacacgcgctgcgccctatgatgattgctcacggacgccgcgcatcattcctctatgccttgataaaatttgtgacgagtttggagggagttgggtttttttttcctgaatgaatgaatgaaaatataatttttagcgcaaag

SEQ ID NO: 63721 - DNA, 2700 bp, Zea Mays
agcaaaaatgagacgacgaagcagcaagactcccgccgcaggactgcttccttcgtatgatcgtatcctacgtcctgaccccagcccgcccgcggtctcctacaaatccccgtgcccgactgcccgtagcccccccaagctccggcctccggctgccccgcccccgcgacagcgactccgcccccagacctcgtcaacccgccgcccgcacgtcactccactaacgtgtccccccggcccaccatacccgatggttccccgccaccccacgaccttgacctcgcccgggccgcgccgtcgctgtccccgcgcctgcagcccccgcacgcagccccacccccgacgccacacactcgcacacactaccggaccagggcgaccagaacgctgcgacgggctgcgctgcgcagtccacgccacgccacgccgcacggcaggccgacggaatagtaccgtgccgttggcggcacgtacagcagttcaggccggccttcccctcgcggctctgtccgttataatccgcacgaccgcacgcacggtgcagaagtaagggctgggaccaccggacgacgatgcggggctcctcgggcgcgcgcatgaccgcgcaggacgcggcggaggcggcggtgggcgcggtcgggtgcggctacgacctgacgggggacctccgcctgggccgcgccaagcctggtggccggctggtggacctcgacggcgccgggaagggcccggggacgtcccagtccgcgtccccgtcgccgcgggagctggcgttccccggcggggccgccgtggcgggcgtgccggccggggtcgtcgccggcaagggcgagcgcgcgcggttccgctccgacgtgctccccttcgcgcagatggcggaggaggtgaaccggtcgctgtcgctgcccgccagcaagatcccctcgggcgccttcaacgccatgttcgactaccgcgggtgctggcaccgcgacgccgccgccacgcgcagcctctgcttcgacgcccgcctcgtcgagctctacagcgtcgaggccgtgcgcgccagcctcgccctcagggaccacgtcaggcgggacctcccgcccgtctgggaccccgccgcgctcgccgactccctccctgcaggttcatcgacaagtacgggactcacgtcatcgtcggggtgaagatgggaggcaaggacgtggtgtgcgtgaagcagctcaagggctccagcctcacgcagagcgacgtgcaggcccggctcaaggagctcgccgacgacaggttctcggaggattccacagcaagttccaattcttccaccgcgggaggcggcaggttgtcgcaggggctaaacgttgggcccggatcggccgcctggcagtccttcagatcacccgtcgtgtctcacaaggatgacatggtgtgcattcacgtcaggagaggcggcgtcgacagcggccagggccacggcaagtggctctccaccatcaccggcttcccggacgtcatctccatgtcgttcgtgcccataacgagcctgctcaccggcgtccggggcagcggcttcctcaaccacgcggtgaacctctacctcagatacaagccggccatagaggagctgcagcagtttctcgagttccaggtgcctcggctctgggctccagagttcggtcagctcccgctctccctccagaggcggaagaacatcctgccgtctctccagttcaccctcatgggccctaaacttcacgtcaacactgccaaggtcgactcctgcctccgcccggtgaccggcatccggctgttcctggaaggcaagaagagcgaccagctgggcgtccacctgcagcacctgtcggcgacgcccggcgcgatcacggtgctcggcgaggccgcgtcctcggcggacgacgcggccgccgtgaacgagcgcgcctacatcgagcccgtccggtcgccgctgctctcgcacatctgcacggcgcccgtgcagtacaacggcgcgcttatcgacgactgcgccgccatcgtcaccagcgcctggctcgaggtgcgggacgcctgctgcctcaagaaggtgctcttcctgcgcctcggcttctccggcgtcgcggacatgaagatccgccgctccgagtggggcggggccctggtcgcgccgcgcaggtccgggtcgctgtcggcgcgcctcagcgccgcgctgtccggtggcctggcgccggcgccgccggcggtggaggagaaggtggaggtcaactccgccatattccccaagggcccgccggtgccgctcccggttcagaagatggccaggcacatcgacaccaccgaggtgagcaggggccccgacgacctgccgggctactgggtcgtcaccggcgccaagctctgcatggaaggcggcaaggttgcgctcaaggtcaagtactcgttgctcatcgcagtgcaagaggaccctgaaggacactgacgctttgaggcctccattgccgtcgtcgacgcctcaactctctctgtctgtgttgtgttgcggcggtgtaaagttcagttgtgggcaactacgttgtacagaatacagtgtgcccagaggctgatgtttttttggtttgttcactcagttcttgcaaatctaggaacagtttaggtttagatataatactgagaaattacctgattcgattgagcattcaatacatgaaaaattagtgccgg

SEQ ID NO: 63722 - DNA, 2707 bp, Zea Mays
agcaaaaatgagacgacgaagcagcaagactcccgccgcaggactgcttccttcgtatgatcgtatcctacgtcctgaccccagcccgcccgcggtctcctacaaatccccgtgcccgactgcccgtagcccccccaagctccggcctccggctgccccgcccccgcgacagcgactccgcccccagacctcgtcaacccgccgcccgcacgtcactccactaacgtgtccccccggcccaccatacccgatggttccccgccaccccacgaccttgacctcgcccgggccgcgccgtcgctgtccccgcgcctgcagcccccgcacgcagccccacccccgacgccacacactcgcacacactaccggaccagggcgaccagaacgctgcgacgggctgcgctgcgcagtccacgccacgccacgccgcacggcaggccgacggaatagtaccgtgccgttggcggcacgtacagcagttcaggccggccttcccctcgcggctctgtccgttataatccgcacgaccgcacgcacggtgcagaagtaagggctgggaccaccggacgacgatgcggggctcctcgggcgcgcgcatgaccgcgcaggacgcggcggaggcggcggtgggcgcggtcgggtgcggctacgacctgacgggggacctccgcctgggccgcgccaagcctggtggccggctggtggacctcgacggcgccgggaagggcccggggacgtcccagtccgcgtccccgtcgccgcgggagctggcgttccccggcggggccgccgtggcgggcgtgccggccggggtcgtcgccggcaagggcgagcgcgcgcggttccgctccgacgtgctccccttcgcgcagatggcggaggaggtgaaccggtcgctgtcgctgcccgccagcaagatcccctcgggcgccttcaacgccatgttcgactaccgcgggtgctggcaccgcgacgccgccgccacgcgcagcctctgcttcgacgcccgcctcgtcgagctctacagcgtcgaggccgtgcgcgccagcctcgccctcagggaccacgtcaggcgggacctcccgcccgtctgggaccccgccgcgctcgccgagttcatcgacaagtacgggactcacgtcatcgtcggggtgaagatgggaggcaaggacgtggtgtgcgtgaagcagctcaagggctccagcctcacgcagagcgacgtgcaggcccggctcaaggagctcgccgacgacaggttctcggaggattccacagcaagttccaattcttccaccgcgggaggcggcaggttgtcgcaggggctaaacgttgggcccggatcggccgcctggcagtccttcagatcacccgtcgtgtctcacaaggataacgtggtgggatcctcgcaggacatggtgtgcattcacgtcaggagaggcggcgtcgacagcggccagggccacggcaagtggctctccaccatcaccggcttcccggacgtcatctccatgtcgttcgtgcccataacgagcctgctcaccggcgtccggggcagcggcttcctcaaccacgcggtgaacctctacctcagatacaagccggccatagaggagctgcagcagtttctcgagttccaggtgcctcggctctgggctccagagttcggtcagctcccgctctccctccagaggcggaagaacatcctgccgtctctccagttcaccctcatgggccctaaacttcacgtcaacactgccaaggtcgactcctgcctccgcccggtgaccggcatccggctgttcctggaaggcaagaagagcgaccagctgggcgtccacctgcagcacctgtcggcgacgcccggcgcgatcacggtgctcggcgaggccgcgtcctcggcggacgacgcggccgccgtgaacgagcgcgcctacatcgagcccgtccggtcgccgctgctctcgcacatctgcacggcgcccgtgcagtacaacggcgcgcttatcgacgactgcgccgccatcgtcaccagcgcctggctcgaggtgcgggacgcctgctgcctcaagaaggtgctcttcctgcgcctcggcttctccggcgtcgcggacatgaagatccgccgctccgagtggggcggggccctggtcgcgccgcgcaggtccgggtcgctgtcggcgcgcctcagcgccgcgctgtccggtggcctggcgccggcgccgccggcggtggaggagaaggtggaggtcaactccgccatattccccaagggcccgccggtgccgctcccggttcagaagatggccaggcacatcgacaccaccgaggtgagcaggggccccgacgacctgccgggctactgggtcgtcaccggcgccaagctctgcatggaaggcggcaaggttgcgctcaaggtcaagtactcgttgctcatcgcagtgcaagaggaccctgaaggacactgacgctttgaggcctccattgccgtcgtcgacgcctcaactctctctgtctgtgttgtgttgcggcggtgtaaagttcagttgtgggcaactacgttgtacagaatacagtgtgcccagaggctgatgtttttttggtttgttcactcagttcttgcaaatctaggaacagtttaggtttagatataatactgagaaattacctgattcgattgagcattcaatacatgaaaaattagtgccgg

SEQ ID NO: 63723 - DNA, 2050 bp, Zea Mays
gaatggtgggggagagaggcaacctagggttgccagaggaaggactatatgggctggctggttgtaccgcaagaagtgattgaaatcgatgatgatgatcctgatggagtcatacttattggtgataaagcacaggtggaaaagaataagcaaactgctgtatgtcccatggattgctcaaagcatgccaagagtggttgggttcaggacatccctggtccaagcacatatgcttcaaaatataccagttcctgggttgacctgaaagtgtttcaagacgaggcagtttacaactattctgatggctacccctttgatggatttgaagaagactatgcttatgatgaagatgagtttgaggatgatggttatgacactccactcattgaaagtgagtttcaatttagtttgtctgccaagtttgataacttcaatgttctacatggtctggaggcttctttaccgtggaagcataagactgctattgagattgcaaataagaccaaacctagtaaggctgtagatgataaaatcgaagaaaaatacaaggccttcaaacgatttgatactgttgatgatcatagtgatcattattattcaaagccagaatcaagaaaggttcaggcggtaaaaaagccatcaaaagactgggtcaaacgtattcagcatgagtggaaagtcttagagaaagatttgccagaaactatatttgtgagggcatatgaggatagaatggacctgcttagagctgtcattatgggaccagctggtactccttaccatgacgggctcttcttctttgacatttacttccctcctcagtatccaaatataccaccgatggtgaattaccgtgctggtggtttgcggcttaatccaaacttgtatgcttgcgggaaggtgtgccttagcctcctaaacacgtggactggcagtggatgtgagaagtggaacccggccaattcaactatgctgcaggtcctggtctctattcaagctttggttttgaatgcaaagccttatttcaatgagcctggctacgctatgcatgctaacacagcccacggggagaagaaatccctgacatataatgaagacacgttcctgcactcctgcaggacgatgctgtattctcttcgaaatccaccaaagaatttcgaggattttgttgctggccatttccgcaagtatgggcgcaacatcctcgtggcttgcagagcctacctggagggtgcccaggttggatgcctttctggtgacggagtgcaagacgtcgacgaaggcgacaagagctgctcggtgaggttcaagcagtcactgaagaggcttcacgaggaacttctggcggagttcaccgcgaagggcgcggactgtggcaagttcctcagcgagaaggcaaggtccggagcttccacatcggcagcggacaccacgttgaggctgtaaggcggagtcgggcttgctgttggaaataaacctgccattcaagctatcctcggtcgatggggagttgggccacaccgatgcaacacaacacagcaagtttgatgcctgagctgccgatcgtctaactgctttctgtaggtagtctatgtatatatccctgtctagatcttctggtaaagacataagcgagacatattgggcgtttagggacaccattataccgtaggtatttacgtgtttataactgctggccgcagccccggcagctgtgtcgggctgtgacctcgtcctcagcttcagcttgtgctgatatgattgggaccacccaccatttggatatcaaaatgatgttggtctaggttaggcgattcctgactgattcgttcgtgggatattcggtgtgtgccgcctcctgttcttttacgactgagctccagtgggtccgtttggttgctcacactatggtggttctggttcagccaatgatttgaagatcgttgaaaaccacaatatgtattgaataaccgaagcatagctttcggtacaatacatcaaaggtcaagtggaatcagatacatagggaccttcgaatgaaaaactagag

SEQ ID NO: 63724 - DNA, 2132 bp, Zea Mays
gggtcggtccttctttcctctacgaaaaaaccattttttcagtataaaatttcgtttttctcctctcagtctccgacgccgccgcactcatccccccagacgaccaccctcctcctcctcccccacccacctcgccggaaccctagcgccgaccgcctgccgtgcccatcgacggcgatcgcattgctgcgccccgatggcgacccgcgcctccaagaattgcctctgcgcgggcagctcttcgttcgatgaccccgacgtggtcgaggtgtctccggcaaccgccgcggctgcagggtgggcctccggccaccacaagaggaagcggagccaggttgtaccgcaagaagtgattgaaatcgatgatgatgatcctgatggagtcatacttattggtgataaagcacaggtggaaaagaataagcaaactgctgtatgtcccatggattgctcaaagcatgccaagagtggttgggttcaggacatccctggtccaagcacatatgcttcaaaatataccagttcctgggttgacctgaaagtgtttcaagacgaggcagtttacaactattctgatggctacccctttgatggatttgaagaagactatgcttatgatgaagatgagtttgaggatgatggttatgacactccactcattgaaagtgagtttcaatttagtttgtctgccaagtttgataacttcaatgttctacatggtctggaggcttctttaccgtggaagcataagactgctattgagattgcaaataagaccaaacctagtaaggctgtagatgataaaatcgaagaaaaatacaaggccttcaaacgatttgatactgttgatgatcatagtgatcattattattcaaagccagaatcaagaaaggttcaggcggtaaaaaagccatcaaaagactgggtcaaacgtattcagcatgagtggaaagtcttagagaaagatttgccagaaactatatttgtgagggcatatgaggatagaatggacctgcttagagctgtcattatgggaccagctggtactccttaccatgacgggctcttcttctttgacatttacttccctcctcagtatccaaatataccaccgatggtgaattaccgtgctggtggtttgcggcttaatccaaacttgtatgcttgcgggaaggtgtgccttagcctcctaaacacgtggactggcagtggatgtgagaagtggaacccggccaattcaactatgctgcagcccacggggagaagaaatccctgacatataatgaagacacgttcctgcactcctgcaggacgatgctgtattctcttcgaaatccaccaaagaatttcgaggattttgttgctggccatttccgcaagtatgggcgcaacatcctcgtggcttgcagagcctacctggagggtgcccaggttggatgcctttctggtgacggagtgcaagacgtcgacgaaggcgacaagagctgctcggtgaggttcaagcagtcactgaagaggcttcacgaggaacttctggcggagttcaccgcgaagggcgcggactgtggcaagttcctcagcgagaaggcaaggtccggagcttccacatcggcagcggacaccactttgatgcctgagctgccgatcgtctaactgctttctgtaggtagtctatgtatatatccctgtctagatcttctggtaaagacataagcgagacatattgggcgtttagggacaccattataccgtaggtatttacgtgtttataactgctggccgcagccccggcagctgtgtcgggctgtgacctcgtcctcagcttcagcttgtgctgatatgattgggaccacccaccatttggatatcaaaatgatgttggtctaggttaggcgattcctgactgattcgttcgtgggatattcggtgtgtgccgcctcctgttcttttacgactgagctccagtgggtccgtttggttgctcacactatggtggttctggttcagccaatgatttgaagatcgttgaaaaccacaatatgtattgaataaccgaagcatagctttcggtacaatacatcaaaggtcaagtggaatcagatacatagggaccttcgaatgaaaaactagag

SEQ ID NO: 63725 - DNA, 2633 bp, Zea Mays
ctgaactggaatgcagaaagccgagagagcctagggcccaccacgcaccgagccttaaaataaattccaaaaatctgaacggcttttcgggtcggtccttctttcctctacgaaaaaaccattttttcagtataaaatttcgtttttctcctctcagtctccgacgccgccgcactcatccccccagacgaccaccctcctcctcctcccccacccacctcgccggaaccctagcgccgaccgcctgccgtgcccatcgacggcgatcgcattgctgcgccccgatggcgacccgcgcctccaagaattgcctctgcgcgggcagctcttcgttcgatgaccccgacgtggtcgaggtgtctccggcaaccgccgcggctgcagggtgggcctccggccaccacaagaggaagcggagccaggttgtaccgcaagaagtgattgaaatcgatgatgatgatcctgatggagtcatacttattggtgataaagcacaggtggaaaagaataagcaaactgctgtatgtcccatggattgctcaaagcatgccaagagtggttgggttcaggacatccctggtccaagcacatatgcttcaaaatataccagttcctgggttgacctgaaagtgtttcaagacgaggcagtttacaactattctgatggctacccctttgatggatttgaagaagactatgcttatgatgaagatgagtttgaggatgatggttatgacactccactcattgaaagtgagtttcaatttagtttgtctgccaagtttgataacttcaatgttctacatggtctggaggcttctttaccgtggaagcataagactgctattgagattgcaaataagaccaaacctagtaaggctgtagatgataaaatcgaagaaaaatacaaggccttcaaacgatttgatactgttgatgatcatagtgatcattattattcaaagccagaatcaagaaaggttcaggcggtaaaaaagccatcaaaagactgggtcaaacgtattcagcatgagtggaaagtcttagagaaagatttgccaggtaggtagctgttgcttactattaccgtaattttatgaattggtcgcatgggtttctttgaatagtaccacacttggtgcaatcatgcctttgttagttaaatgcgtcttttgtcttgagaacttagaagagcctgttcatgagggtcaagaatggttatagtttcacctgtctactttaaacaaaatattataatctgtatttttcttcaaattgaatagaaactatatttgtgagggcatatgaggatagaatggacctgcttagagctgtcattatgggaccagctggtactccttaccatgacgggctcttcttctttgacatttacttccctcctcagtatccaaatataccaccgatggtgaattaccgtgctggtggtttgcggcttaatccaaacttgtatgcttgcgggaaggtgtgccttagcctcctaaacacgtggactggcagtggatgtgagaagtggaacccggccaattcaactatgctgcaggtcctggtctctattcaagctttggttttgaatgcaaagccttatttcaatgagcctggctacgctatgcatgctaacacagcccacggggagaagaaatccctgacatataatgaagacacgttcctgcactcctgcaggacgatgctgtattctcttcgaaatccaccaaagaatttcgaggattttgttgctggccatttccgcaagtatgggcgcaacatcctcgtggcttgcagagcctacctggagggtgcccaggttggatgcctttctggtgacggagtgcaagacgtcgacgaaggcgacaagagctgctcggtgaggttcaagcagtcactgaagaggcttcacgaggaacttctggcggagttcaccgcgaagggcgcggactgtggcaagttcctcagcgagaaggcaaggtccggagcttccacatcggcagcggacaccacgttgaggctgtaaggcggagtcgggcttgctgttggaaataaacctgccattcaagctatcctcggtcgatggggagttgggccacaccgatgcaacacaacacagcaagtttgatgcctgagctgccgatcgtctaactgctttctgtaggtagtctatgtatatatccctgtctagatcttctggtaaagacataagcgagacatattgggcgtttagggacaccattataccgtaggtatttacgtgtttataactgctggccgcagccccggcagctgtgtcgggctgtgacctcgtcctcagcttcagcttgtgctgatatgattgggaccacccaccatttggatatcaaaatgatgttggtctaggttaggcgattcctgactgattcgttcgtgggatattcggtgtgtgccgcctcctgttcttttacgactgagctccagtgggtccgtttggttgctcacactatggtggttctggttcagccaatgatttgaagatcgttgaaaaccacaatatgtattgaataaccgaagcatagctttcggtacaatacatcaaaggtcaagtggaatcagatacatagggaccttcgaatgaaaaactagag

SEQ ID NO: 63726 - DNA, 4828 bp, Zea Mays
gttcagctcgggtcaactcaccggcctgatcaccctgaccccggttaggtccgcgtcatttcggagcaaggaaatggaaattcgggagcccaccaaaagctttcgtcttcagttcccaacacctgtattggtctattggagagagaaaaagggagagtggaggaagaacacgcgagctcgtaaaagtggcagggtgggggatgggatcccattagcgcagcgcaattaggcgcgccctcggctaaataaaagaagccaaaagaattgcgcgcggcaccggaaaggcgaggcctttgcgctcgcgcaccgtagaaatcgttaccggcaccgccaccacgcccactcgagcaagccgccgagcacccagcgagaacctcccactcctcccagtggctctctgtcctctcgcgccccctcgcgtcctcactgccacttgaaataccggtgggcacacgaccgctccagtgttcaactgctccgggctgtgatttggtgcgacttggtgttgttggtggtggtgctacacgtcttggcctctgcttcctcggagggattggagccgtttgaactcaggagcttgctgctggccatggtccaagggttaggggatggattgaggcgtggggggagaggagcgcagtagcttcctcttcttcttcttcttcggtgcgcgggtctgggctctcgggagcgagcatggcggcgggttgggattgcgacagggtcagctgatcctagcaattggacccgacagaccattttattctgtgatctcatcataattgaagcccccactgatgaaaagctgttaccttggttgctttcttgagtactggtcaccagatagtagcatgttctcttctgtgtgattaggcttgattgtggactgacactcctggtcacttatctcttgtgatcatccagagtatatcatctgtcagctgatcttttctctatggaatcgcttccctttatgaaagtatccttgttttagggcaaatctcctttggcaaacattgttcagggtgcatcactttgctggttatcctgagcatattctcctcgtcgaatgaactatcagcagcgaagagacttccaaatgatatccatcaggaaattctcatttagtttgatggaagtttcataaggtttcgtaccatctgatttgctgggcaaatctcctttggcagtacttattaatagctcttttgggggcaaatctcctttggcattagctttaagatttctcactgggcaaatctcctttggcactagttctacctttagtttcacatcgctcttcgggcaaatctcctttggcactaaataccaattatatttactatttttagtaaatctccttccgctgtgcgcactagcatctatatctgggtaattctcctttggcattatcagtcaagtgtgctgcctgcctgcacataacttatacgagaatatcaagaagtgattctggaagaaatacttggccagctggtatattgaccttctggacatcaatttgcatattgttccttgttcttgagattaccacgttacccaagcagccacaccttactaagaagggtttgaaatcatggatttgtttacaattgactcggatagtgagtcatatactgggaccagtgacagtgaagaccaagaatgtgaatttacatatagtgaccatgcccaaaacatcttgtccagtctggatgagagcattggcaagattgataattttttgacttttgaaagggggtttctgcatggggatatagtctgccctgtttctgatccctcaggtcagctgggacgtgttgttggtgttgcaatgtttgttgacttggagacaagctcaggtgacataattaaagatgtaaacagcaagaagctatcaagagtgagatcttttgtttccggtgactgcgttgttatggggccatggattggacgagtgataagagcatttgatcttgtcacacttttattcagtgatggagcaaagtgtgaaatcctgttaagggattcggatgtactgaagcccattcctcctgttctttttgaagatgcaccttacttttattatcctggccaacgtgtgaggatagtcgatccgtcagtttccaagtcagcaacatggttatgtggatcatggaggcccagtagagatgatggtattgtctctcatgtcgatgtagggctggtgcatgtgaactggatcacatctgtaaccaatgtttggggagataaatcatcaagtcctccaaacattcaggacccaaagaagctcaccttgctgtcatgtttcccttacgctaattggcaactaggtgattggtgtgctcttatgactgacaacaatggatgcctctggatggattctggcaagtcttgtattcttagtgaagaccagaagtgtgactctcatgcacacatgtattttgaaagttatggttcagattgttctcaaacatttgttgttgccaagacaaagagcactgttgatgttctgtggcagaatggaactgtatctcttggtctagaaccccaggcattactccctgtgagtacccttggtgaccatgatttttggccaggtcaatttgtcctagaaaaactgactgtagaagatgctgcaagatgtccgcgaacggcaatagtgagtgatgtggatgcactggagcgaacagtaaatgtaaaatggattggtccagcacatagtgacattgtcagctatggaagtgaccctgcagtggagactgtaagtgtttatgagctagtagagcacccagatttctccttctgcactggcgaggtcgttatcaggtcagctatgaacatagacaagtctgaagcagatcccacaaatgggtcattggcaagcaaagaatcattggttacctcctctggcttcttatcatgcaccggaaatgtacttgggtacaaggacaatggaattgaagtgcaatgggctaatggtgttatatccaaggtgcaacattttgagataattggattggacaagcttcttgataatagttctgtagaatcaatgaatgaggaacatacaattggtgattcattagacgaggctgagcaggaggaattgaaccatgagattgctctggagtctactgaagactgcactggctccttgtgcaaagccactgcttttctatttcccaagacagcttttgacttcctgacaaatgtggctgctagtttgtttggtattcatggttctccatctccaagctcagttttggtagatcctcgatatgaaattgtgaagatggcagaaatgcagccatgtgcagaagaaacaccaaaagaagaacagatagtgaagtttgtggcgcagattgacaagccaattctctcttcagaagatgccatctcaaaaagattcgatgtagtcactgactgtttggatcatcattttgtgaaggaaaatggccatgaaagtgttacaagaggttggttgaagaaggtgcgactggaatggaacatcctgcaaaatgacctaccagatggtattcatgtgagagtttatgaggaaaggatggatcttctgagggcttgcatcgttggggcacctggaacaccttaccatgacaatctttttttcttcgatattttctttcctcctgattacccccatgaaccaccttctgttcactatcactctggtggtctccgcctgaatccaaatctgtatgagtcgggaaaagtgtgcctcagcctcctgaagacatggacaggcactggtaacgaagtgtggaatgctgagagctcaactgttcttcagctgctgttatcgcttcaggcccttgttctcaacgaaaaaccttacttcaacgaggcgggatacgacaaatttgtgggcaaggctgatggagagaagaactccatcacgtacaatgagaatgccttccttctgtcatgcaaatccatgatgtatgttttacgcaagcctccaaagcattttgagacgttggtcaaggagcatttcacctgccgtgccccgcacatcctggatgcctgcgaggcttatcttgggggcgatctcgtcggacacgcgcacgacaaagcatacgtagcagaggacggcaacaagaactgctcaaccggtttcaagataatgcttggtaagcttctgccgaagctcgttactgccttctgtgaggccggtatcaccagcgaccggtaaaaccagcgcaagcctgctctctgctgcatcagcaatggaattgggaccctttattatattgcgcgtgtatattcgatgcttgtgtattccaaataaaatggcgcctggtttgtgtgttacttgtgcctgtcttgtaaatgtgaaacagtatatacagatgattgctgaactgatatgcttggtcttgtaaatgcggaacggtatgtacgcatgattgctggtgtttatgttgctaagctgaaggcagctaaacactcaagtgtttgggtttgggctgtcttctgcggtcagtgtgaaataaaatgtaaatgtgtgttgttcaatcgttttggactattggcatagcagctgtgtattcatatatttgctcatattgcaatctgaaatacgaaggcaaggggatccattgttgccgtgctgtttatcttgtatatggatgtgctggattgatttttatttttattttttaatacaatttattgcgcaaattacataaatatctcgaaaattcacactaccgaaaaccataggttgtcatggggctaaataacattttggggaaaaacaccataaataagtgaaataggtaatgtttaatttttaacatctatttcaaaa

SEQ ID NO: 63727 - DNA, 2336 bp, Zea Mays
tctctcgctcccggatcgccgcgagctcctttttgatctttgactcgcatcgcgtctcctctcgcctccgttttggataagcccgtctggaagcctctcctgctttcatttcgccggcccgcggagaacagctcggcgggttcccttcgtgcagcgttcggagagctcttcctgctgctctgcgacggacggggacggagaggtcaaaaatgtaccatcacggatgatggatggtctccggtatcatctgcgtgggacatagatggaggactacttttcacgcttcctaaaccttggttggcagctaagacaatactttgacagaattcgcagaaaatttggttcggaccattaatcggattcctcaacgtcttggagtccaattctctgctagccatggaggatcattgactggcaccacagtatactttcatgaaagggcatctacgttatctgttaatactattaccactacagaaaaacagactgcaaatggaacatctgaaggcgcaattttcagaaaaggactttccagtatttacgaaagatcatgtgtcaggtcttcctatcttttacatggcttcatgctggtacgaagattggcattcagtgtgcgagatctgtggaatctattttcaagtgaagtacacgccaaactaaccaggatcttacatcgtttctggacaacactacagggatcttgtgaagacataggatggttgcaaagaactcgggcatcacttcgttcagttgatgggacaggtcgcttcaaggagattttgcatgagataaggaatggcgtgcattgcctgcctgatacactgatttacttatttattcctggcctttttagcaaccacagtccactttacttcaccaatacgaaacgattcttttcaaaaatgggattggcttgccatattgcgaaaattcatagcgaggtatttgagctgaagggtggcatacaagtggtttttctcccctagtattaggcgtcagtggagaagaacgcgtgggaactgaaacagtacattgaggagctctactgggggtctggtaagcaggttctgctccttggtcatagcaaaggtggagttgatgcagctgcagctctttccttgtactggtctgagctcaagggtaaggttgctggcctggcgttggttcagagcccatatggtggcaccccggtcgcctccgatatccttcgagaaggccagatcgctgataaggagacaaggaggatcatggagctcatcgtatgcaaactaatcaagggccttggaggacctcacgtatgccaagagaaaggacttcatctcccagcacaaactccccatcgatgagctgccgatcatctccttccacaccgaagccagcaccgcgcccacagcgctcgcgtcgctgacccgtgtcgcccaagccgagctcctcccatggctacccctgccacggttcttcctgtctgcatccgagtttgtcgagtcaatgctcgcctctctgaaggtccccgtggttgcgcctgtgtctgcagccatggcggtgacagccctccacctgcggctgcgctatggggagaggagcgacgggctggtgacacggcgcgacgccgaggtgcctgggtcagtggtagttagacccgagaggaggctggaccacgcgtggatggtgtactccacgctgaagatgggcagcgctgaggccgatgcgagcgagatgtgcgaggctctgctggccatgctcgttgagattggcaggaagaaattttgctgaccatctggtcatctggagttctccatggttttggttatatatgcacatatatgtcacgcatactacaaatgatagagtattacagtctttacagggaacagtggaaattagattaatttccttggtgaaagcagggctctgtgataaaaccatatgctactttttttgacaatatgcatactttgtggcaatatgcattaattttggacgaaccataggctactttggctatgtaatgttcttcgcacttcacatttaatttagttttttttaatggttttggtttatacactcggctttattttagtaggagagtcactaaccatagcgactgctgagtaaagcctttaaaaaagtgtaaagctaaaaaacatggtttgagtaaaatataaagctaaggaaaagatgttttgatatgttagatttctaaccaaaaataactttagtgcatgtttggaaggagaggtgtttggattcttgtgactattttttagtcattctattttattcattttagttctaaattattaaatacgaaaattaaaatagagttttagtttttg

SEQ ID NO: 63728 - DNA, 2183 bp, Zea Mays
tctctcgctcccggatcgccgcgagctcctttttgatctttgactcgcatcgcgtctcctctcgcctccgttttggataagcccgtctggaagcctctcctgctttcatttcgccggcccgcggagaacagctcggcgggttcccttcgtgcagcgttcggagagctcttcctgctgctctgcgacggacggggacggagaggtcaaaaatgtaccatcacggatgatggatggtctccggtatcatctgcgtgggacatagatggaggactacttttcacgcttcctaaaccttggttggcagctaagacaatactttgacagaattcgcagaaaatttggttcggaccattaatcggattcctcaacgtcttggagtccaattctctgctagccatggaggatcattgactggcaccacagtatactttcatgaaagggcatctacgttatctgttaatactattaccactacagaaaaacagactgcaaatggaacatctgaaggcgcaattttcagaaaaggactttccagtatttacgaaagatcatgtgtcaggtcttcctatcttttacatggcttcatgctggtacgaagattggcattcagtgtgcgagatctgtggaatctattttcaagtgaagtacacgccaaactaaccaggatcttacatcgtttctggacaacactacagggatcttgtgaagacataggatggttgcaaagaactcgggcatcacttcgttcagttgatgggacaggtcgcttcaaggagattttgcatgagataaggaatggcgtgcattgcctgcctgatacactgatttacttatttattcctggcctttttagcaaccacagtccactttacttcaccaatacgaaacgattcttttcaaaaatgggattggcttgccatattgcgaaaattcatagcgaggcgtcagtggagaagaacgcgtgggaactgaaacagtacattgaggagctctactgggggtctgagcccatatggtggcaccccggtcgcctccgatatccttcgagaaggccagatcgctgataaggagacaaggaggatcatggagctcatcgtatgcaaactaatcaagggcgacatcagggccttggaggacctcacgtatgccaagagaaaggacttcatctcccagcacaaactccccatcgatgagctgccgatcatctccttccacaccgaagccagcaccgcgcccacagcgctcgcgtcgctgacccgtgtcgcccaagccgagctcctcccatggctacccctgccacggttcttcctgtctgcatccgagtttgtcgagtcaatgctcgcctctctgaaggtccccgtggttgcgcctgtgtctgcagccatggcggtgacagccctccacctgcggctgcgctatggggagaggagcgacgggctggtgacacggcgcgacgccgaggtgcctgggtcagtggtagttagacccgagaggaggctggaccacgcgtggatggtgtactccacgctgaagatgggcagcgctgaggccgatgcgagcgagatgtgcgaggctctgctggccatgctcgttgagattggcaggaagaaattttgctgaccatctggtcatctggagttctccatggttttggttatatatgcacatatatgtcacgcatactacaaatgatagagtattacagtctttacagggaacagtggaaattagattaatttccttggtgaaagcagggctctgtgataaaaccatatgctactttttttgacaatatgcatactttgtggcaatatgcattaattttggacgaaccataggctactttggctatgtaatgttcttcgcacttcacatttaatttagttttttttaatggttttggtttatacactcggctttattttagtaggagagtcactaaccatagcgactgctgagtaaagcctttaaaaaagtgtaaagctaaaaaacatggtttgagtaaaatataaagctaaggaaaagatgttttgatatgttagatttctaaccaaaaataactttagtgcatgtttggaaggagaggtgtttggattcttgtgactattttttagtcattctattttattcattttagttctaaattattaaatacgaaaattaaaatagagttttagtttttg

SEQ ID NO: 63729 - DNA, 2139 bp, Zea Mays
tctctcgctcccggatcgccgcgagctcctttttgatctttgactcgcatcgcgtctcctctcgcctccgttttggataagcccgtctggaagcctctcctgctttcatttcgccggcccgcggagaacagctcggcgggttcccttcgtgcagcgttcggagagctcttcctgctgctctgcgacggacggggacggagaggtcaaaaatgtaccatcacggatgatggatggtctccggtatcatctgcgtgggacatagatggaggactacttttcacgcttcctaaaccttggttggcagctaagacaatactttgacagaattaatagaaaatttggttcggaccattaatcggattcctcaacgtcttggagtccaattctctgctagccatggaggatcattgactggcaccacagtatactttcatgaaagggcatctacgttatctgttaatactattaccactacagaaaaacagactgcaaatggaacatctgaaggcgcaattttcagaaaaggactttccagtatttacgaaagatcatgtgtcaggtcttcctatcttttacatggcttcatgctggtacgaagattggcattcagtgtgcgagatctgtggaatctattttcaagtgaagtacacgccaaactaaccaggatcttacatcgtttctggacaacactacagggatcttgtgaagacataggatggttgcaaagaactcgggcatcacttcgttcagttgatgggacaggtcgcttcaaggagattttgcatgagataaggaatggcgtgcattgcctgcctgatacactgatttacttatttattcctggcctttttagcaaccacagtccactttacttcaccaatacgaaacgattcttttcaaaaatgggattggcttgccatattgcgaaaattcatagcgaggtatttgagctgaagggtggcatacaagtggtttttctcccctagtattaggcgtcagtggagaagaacgcgtgggaactgaaacagtacattgaggagctctactgggggtctgagcccatatggtggcaccccggtcgcctccgatatccttcgagaaggccagatcgctgataaggagacaaggaggatcatggagctcatcgtatgcaaactaatcaagggcgacatcagggccttggaggacctcacgtatgccaagagaaaggacttcatctcccagcacaaactccccatcgatgagctgccgatcatctccttccacaccgaagccagcaccgcgcccacagcgctcgcgtcgctgacccgtgtcgcccaagccgagctcctcccatggctacccctgccacgccctccacctgcggctgcgctatggggagaggagcgacgggctggtgacacggcgcgacgccgaggtgcctgggtcagtggtagttagacccgagaggaggctggaccacgcgtggatggtgtactccacgctgaagatgggcagcgctgaggccgatgcgagcgagatgtgcgaggctctgctggccatgctcgttgagattggcaggaagaaattttgctgaccatctggtcatctggagttctccatggttttggttatatatgcacatatatgtcacgcatactacaaatgatagagtattacagtctttacagggaacagtggaaattagattaatttccttggtgaaagcagggctctgtgataaaaccatatgctactttttttgacaatatgcatactttgtggcaatatgcattaattttggacgaaccataggctactttggctatgtaatgttcttcgcacttcacatttaatttagttttttttaatggttttggtttatacactcggctttattttagtaggagagtcactaaccatagcgactgctgagtaaagcctttaaaaaagtgtaaagctaaaaaacatggtttgagtaaaatataaagctaaggaaaagatgttttgatatgttagatttctaaccaaaaataactttagtgcatgtttggaaggagaggtgtttggattcttgtgactattttttagtcattctattttattcattttagttctaaattattaaatacgaaaattaaaatagagttttagtttttg

SEQ ID NO: 63730 - DNA, 2114 bp, Zea Mays
catccctgcgctctctcgctcccggatcgccgcgagctcctttttgatctttgactcgcatcgcgtctcctctcgcctccgttttggataagcccgtctggaagcctctcctgctttcatttcgccggcccgcggagaacagctcggcgggttcccttcgtgcagcgttcggagagctcttcctgctgctctgcgacggacggggacggagaggtcaaaaatgtaccatcacggatgatggatggtctccggtatcatctgcgtgggacatagatggaggactacttttcacgcttcctaaaccttggttggcagctaagacaatactttgacagaattaatagaaaatttggttcggaccattaatcggattcctcaacgtcttggagtccaattctctgctagccatggaggatcattgactggcaccacagtatactttcatgaaagggcatctacgttatctgttaatactattaccactacagaaaaacagactgcaaatggaacatctgaaggcgcaattttcagaaaaggactttccagtatttacgaaagatcatgtgtcaggtcttcctatcttttacatggcttcatgctggtacgaagattggcattcagtgtgcgagatctgtggaatctattttcaagtgaagtacacgccaaactaaccaggatcttacatcgtttctggacaacactacagggatcttgtgaagacataggatggttgcaaagaactcgggcatcacttcgttcagttgatgggacaggtcgcttcaaggagattttgcatgagataaggaatggcgtgcattgcctgcctgatacactgatttacttatttattcctggcctttttagcaaccacagtccactttacttcaccaatacgaaacgattcttttcaaaaatgggattggcttgccatattgcgaaaattcatagcgaggcgtcagtggagaagaacgcgtgggaactgaaacagtacattgaggagctctactgggggtctgagcccatatggtggcaccccggtcgcctccgatatccttcgagaaggccagatcgctgataaggagacaaggaggatcatggagctcatcgtatgcaaactaatcaagggcgacatcagggccttggaggacctcacgtatgccaagagaaaggacttcatctcccagcacaaactccccatcgatgagctgccgatcatctccttccacaccgaagccagcaccgcgcccacagcgctcgcgtcgctgacccgtgtcgcccaagccgagctcctcccatggctacccctgccacgccatggcggtgacagccctccacctgcggctgcgctatggggagaggagcgacgggctggtgacacggcgcgacgccgaggtgcctgggtcagtggtagttagacccgagaggaggctggaccacgcgtggatggtgtactccacgctgaagatgggcagcgctgaggccgatgcgagcgagatgtgcgaggctctgctggccatgctcgttgagattggcaggaagaaattttgctgaccatctggtcatctggagttctccatggttttggttatatatgcacatatatgtcacgcatactacaaatgatagagtattacagtctttacagggaacagtggaaattagattaatttccttggtgaaagcagggctctgtgataaaaccatatgctactttttttgacaatatgcatactttgtggcaatatgcattaattttggacgaaccataggctactttggctatgtaatgttcttcgcacttcacatttaatttagttttttttaatggttttggtttatacactcggctttattttagtaggagagtcactaaccatagcgactgctgagtaaagcctttaaaaaagtgtaaagctaaaaaacatggtttgagtaaaatataaagctaaggaaaagatgttttgatatgttagatttctaaccaaaaataactttagtgcatgtttggaaggagaggtgtttggattcttgtgactattttttagtcattctattttattcattttagttctaaattattaaatacgaaaattaaaatagagttttagtttttg

SEQ ID NO: 63731 - DNA, 173 bp, Zea Mays
  misc_feature (172)..(173): n is a, c, g, or t
attggggagcaaactaattctcactgtgtgccaatggatgaaactagtacaagatattgcagcaaaggggaagaaagagcttcatccttgcctaagaagcgtggaaggaccgctaaaagcatcctagccaagccaaaggaaaggaaaaaagggtttgggattgccaagcttnn

SEQ ID NO: 63732 - DNA, 948 bp, Zea Mays
ctgtttcgtgcaggctctacatgcatctagggtagaatggaatatgtggagtatcccggagggcgcaagttgttggatggccgcctgttaggagctaccggaagaacacactagctatgagtgccacaaagacaaacggggaagatgaaggtaggagtgaggcgggatgctgttatgttaaggtcagcatggatggagccccatacctaaggaaggtggacctcaagaccttttcgagctatgaggacctttcgcttgctctggagaaaatgttcacctgcttcatcactggtcaaagcggttcgtgcaagacttcaagaagggagaggcttactgatggttctagggctgatgcccttcaggaccaagaatatgtccttacttacgaagataaagatgctgactggatgctcgttggtgatctcccctgggacttgttcaccacaatttgcgggaaacttagaatcatgagaggctctgatgctgctggcatggctccaagatcaccggagcagatagttgggaccagaataaggaacgttgcccggcatgcagagtcgtgaactgaaaggaaaggacagagtttacatggcgctgaagggagcggtgtttttacgtgaagtgctccggttaagtctctctctctctctttttttttgtaacccccacatgtgcaatgagatgtgtgtggccctactgtaagacaccccattttgcccacgaggttgtcacgtgttattgtagatggtcgcctttgtgttatgaacgatcaaactcggcagtagcctgcttgctgcttcctctatgatactttcctccgtatttggaagctcgtacttcatatggtagaagtaagaaaaaaaaagcccatgttgcccattaagattttttgttctcctgatgtgtgtgcgagtgaactaaactattcagtggatctagaaagaatct

SEQ ID NO: 63733 - DNA, 1243 bp, Zea Mays
gaccttgtcgacaagtcgcgcatgggctgttttaggcccgttcggcctacaagacggacaagcccaagcacaaacaaaaactgcagaagcagaacactagaacagatcctcgcttagcctacctggctccatgtcggtattgccaagtcagctcgcatcagaatcaggagatcaggataagcctatccagagcaggccacacggcatcctccctatgggtcacggccatcttcgcgcctgagagtgcgaggcgtccacccacacaaatcccaaatcctcagcacgatacgatccgccgaattaagttcgtgcacgtacgcacgcaccgggacaccagcaacccccaacagcgccactgtccagtgcgcgcgtcaagcttgcttagctagccgccatggcctccctcgccgccgtctccgtgaagcccgtggccatcaagggtctcgccggcagctccatctccggaaggaagctcgccgtcgccaggccgtcggcccgctccatccgcaggccccgcgcagccgccgtggtggccaagtacggcgacaagagcgtctactttgacctcgacgacatcggcaacaccaccggacagtgggacctctacggctctgacgcgccctcgccctacaacccgctacaagcaagttcttcgagacgttcgcggctccgttcaccaagagaggtctgctgctcaagttcctgctgctgggcggcggctcacttctggcctacgtcagcgcgtcggcgtcaccggacctcctgccgatcaagaagggacctcaggagccgccgcagccgggcccgcgcggcaagatctaagctcagcttctccatttgcatggtctagtagcttgctttgtactgctagcgccggtcgatccgtcgcaatcgtcatggatcatctctctatcttgttgttacgctgttcataatttggtatatttgccattccgctattgtgtactctttggcatacatacaataattaaaatggcgttgcgtggctctcatataattaaccttcacataacctgaagactcaagtacgtatagtatgggcaactttattgtagatactatctggagtctcgaatatttgtcgtccgctagttcatatttaaactaaacaacgataaataaaaaagaactaagtgagtatatttttttgtgggagaagggttatccattaatacatccacggttctgtaaattccatttcatgacatgaaaaaaggaaaaa

SEQ ID NO: 63734 - DNA, 920 bp, Zea Mays
ctccctgaaactggtagccagaagtttcaggtcaaaactcaaaaggcgctttggctcatggcctgtaacaatccatattggaacaaagtatagggcagttctggaaggccctatttgcaaagctaaccgagtcatgagatggcacacagtccagacggttcaaaagaagagttcaactcgtcgattcccaattggtttctctgcatttgctttcaacagtacactgttatgggaccctcaaagatggaaccgcccgcctatggattctgttataatccacacaggtggaagaggtggtttgcaggagtcacggtttatagaaaagcttgttaaaagtgagcgccaaatagagggtcttccggacaattgcaacagggtcatggtctggaattttaacctggaacctcctcagctgaactaccccgcaggctgggcactttataagaacctagaagctgacatgcctgtaatatagcttcctgcgagctgcgttatgccttgctcctagaggtggtttctcccggcaaggcagaaggttgaagcacgtctccagcggcatgttagttctaaatttcaactccctgtccttaccaggtgcccaggtaaagctgctgggtgatgccatcctgaacaagttgcgccaaagatttcgtgccgagatctgtcttcggtaatgcaatgtcatcctgaacaagttgcagcggcaatcaaaataggattttccccctgccttttagtctcgtgtattccttttgtgctcttcattttttttcctcatcagctcgatacgacatgtagactttcttttaggttttttttgtttttcatactgtgtgttaccttacagatgtaaaagcgcccccgtacattgcaactgttaaagaggaaaagcaaaataccgtcatttagcttcttcagta

SEQ ID NO: 63735 - DNA, 1996 bp, Zea Mays
ctcaagttcttagagccctatgcgccttcagggcatgtacaacctagatacagctgcacggtacaattcaattgattacctcaccagggagggagggtgctgcatccacggaccacggcttcacatgagtgaaagggatagaaagtgcagcgaccgtggacgaaaggactcgtgcttttgagcaattcaggaggagtacaagcatcacgaagccttcattctggaatgctgtccagtcgaaggaacagcgggattatcctacgggaagggtcagttagggactggtccgagttcaacgatccctctccgtccccaaaaccgttgtactcgcagtcctatgtcgcagtgagaggattcctgctgtcgagcaagctaaagtcagtgtatgcggctatgacttcacagaggcatagccgatcgcaggagagatcaaaatcaaaggggttgagctgcaggagagttgcagtccgtctactgttctttttcatgttaggcattttcattgggttcatgcctttattctctgtcgacgtctacaagaaaatagtatctgaaaacaagatgcttccgttccacgagggtgtgattgagacggaaatggtgggtaccaaagttaaggagtcggagacgattgtagtagagaaagagatcgaactgatcgacgagcctcatattcaagagagccctccagtccctgcattgttggatgatgatgtggatttttctgaatcatcacctgtgttgcctgctattagagaatctgacattcccgtgaagaagctgctgataatcgtgacaatcacttctgtccggccacaacaggcatattacttgaatcggctagcccataccttgaaagctgtacaggcacctcttctatggttagtggtggaatggcctgaacagtcctatgaaacagcagaaattctgaggtcttccggggttatgtacaggcatcttatgtgcagaaagaataccacgagtgttcggaagattgctgtttgtcaaaggaataatgcaatctatcatgtcaaaaggcatcaccttgatggtataatgcattttgctgatgaagaacggtcatactcagctgatgtatttgaagaaatgcagaagatcaggcgctttggctcatggcctgtaacaatccatattggaacaaagtatagggcagttctggaaggccctatttgcaaagctaaccgagtcatgagatggcacacagtccagacggttcaaaagaagagttcaactcgtcgattcccaattggtttctctgcatttgctttcaacagtacactgttatgggaccctcaaagatggaaccgcccgcctatggattctgttataatccacacaggtggaagaggtggtttgcaggagtcacggtttatagaaaagcttgttaaaagtgagcgccaaatagagggtcttccggacaattgcaacagggtcatggtctggaattttaacctggaacctcctcagctgaactaccccgcaggctgggcactttataagaacctagaagctgacatgcctgtaatatagcttcctgcgagctgcgttatgccttgctcctagaggtggtttctcccggcaaggcagaaggttgaagcacgtctccagcggcatgttagttctaaatttcaactccctgtccttaccaggtgcccaggtaaagctgctgggtgatgccatcctgaacaagttgcgccaaagatttcgtgccgagatctgtcttcggtaatgcaatgtcatcctgaacaagttgcagcggcaatcaaaataggattttccccctgccttttagtctcgtgtattccttttgtgctcttcattttttttcctcatcagctcgatacgacatgtagactttcttttaggttttttttgtttttcatactgtgtgttaccttacagatgtaaaagcgcccccgtacattgcaactgttaaagaggaaaagcaaaataccgtcatttagcttcttcagta

SEQ ID NO: 63736 - DNA, 2095 bp, Zea Mays
gccagcagttctgcttcctcttccttccctctctctgccccagaggccagacacagcgtccccgaaatctagccagccaccgcccaccgcctccctcctccccgcctctctctctttctctctctgcgccaagaaagagaaggcgccacgttgacattgcggatgccgtagcgggggcgcgcgcgccagccatgcgctcgtgatgatccggccgttccagaagatcggccacggcctcgaaaaggttctcgtccaggcgccggaggtcgtcgtcgccgccgtcgttggcctcggacggcacgggcgcctgcctcctcgatggacgcgcaggcgcagcctttcaccaggcgggcgctgtccaggagctgcgggtccaaggggagccggctgtccgttgaccatccgccgccgccgctggccggcggcccttcggcggacaagggggtggcagggagctcgtcctcgctcgcggtgccgcccgagccggcccgtcgtgagggcccgccctcagacgcggagaaggtgagggagaagttctccaagctactgctgggggaggacatgtccggcaccggcaaaggggtgacctctgctctcgccctttccaacgccatcactaatcttgcagcgccgtctgcagcccatggccgacgaccagaaatcgcggtggaagaaggaggtcgactggcttttgtccgtcgccgaccacattgttgaatttgttccttcgcagcaggtcgccgagaatgggacctccgtggagataatgataacccagcaacgtcaagatctacagatgaacatccccgcgctgcgcaagctcgatgcgatgctccttgaatacctcgacagtttcgcgggtaagcaggagttctggtatgcgtcgaaagacgcagatggaccgggcaagggcagcacgccgaggcaggacgacaaatggtggctcccgactgtcagggtccctcctgacggtctgtcaggtgcatacagtaaatggcttcagaaccagaaggacctcgttgcgcaggtgctcaaggcagcaatggctatcaacgctaatgtccttatggagatggaggttcctgaatcgtacacggagtcgctaccgaagaatgggaagtccacccttggggattcagtgtacagacttataaccgacgatcatttcgaccctgaagaactgctacgctccgtggactcgtcggatgaacacagcattgttgatctgaagaacaggatcgaagcctcagcagtcatctggcagaagaaaatgacccacaacaaggacagcaaattgccctggggacatagtcacgagaagcggggaatgttcgaagggagggcggagaacgttcttctcctcatcaagcacaggtttcctggcattgcccagtcggcgctggacataagcaagatccaatgcaacaaggtatgtatgggactgggatgcctcgtcagatatacgccatttgttgctttgtttgttcattcgaatgccttgcgtacctcccttttgtattcgtcaggatgttggccttgccattttggagagctactccaggactctggagagcctggctttcacggtcatgtctcggatcgaggacgttctgagcgcggacttggccgctcgagatctcaggaacacggaatcgatgagaatcgccgccagcttagcttcggacgacaccgacaaggtcgtctcagacgctaaagccgaggtagagaagacggggagaatggagccggtttcgccggcgctatctgacttggtcggcccgaagctgacgaagatctcgccagttgcaaccaagaggttttcgtaccttgagaatctgggtggaacaagaagcccgatagcaagacactagctgctgtaggtagggggtgtagtgagggtagatggatcatgccgtcgcagagccttcggaagaagctttgtacatagcatagatgcccactgcgaacgtttgtctaacgataatgtgacatctaatcgactaatagaggcagaagttcttagagcgcaaacattatcaccaaaaccatgccctgccctggctttcataatcactttatttaacacttttatctt

SEQ ID NO: 63737 - DNA, 1554 bp, Zea Mays
ttgacacacctcccgagccacgtccgccgcgcgccccccctgcaccggtgcgccctgctgcccgattcgtcggggggcgcgggaatggagctggagctggaggcggcggcccggcgcttccacctctggttccgcgggctgcgctcgctgcgccgggacctggcgtcggcccggtggtcggacgacccgacggcccagctccccgcgcaggtgggccgcttcgtggcccacctggagtcgtactgcgccgcgcgcgccgggctggacccggtgtggacgctgtcggcgccgtgggccacccccgcggagcgcggcgccgcgtactggctcgccgggtggcgccccaccacgctggtccacctgctgtacaccgagtccgggcgccgcctcgaggcgcagctgccggacctcctcctcggcgtgcggtcggggaaccttggcgacctcacccccgcgcagctggcgcaggtcgacgacctgcagcgccgcacggtggccgaggaggacgcgctggcaagggagatggcgctcgtgcaggagggccacggcgtcgtcgtgctgccggcggcgccggacgggtccggcggactcgacgtggccggcctcgtgcgcagggccagggcggtgctggacagggccgacgcgctgcggctgcgcaccgtgaagcgggcggtggagatactggagccggcacaggcggccgagctgctcgttgccgccgccgacctggagatcgggttccgggagttcgggctcaagcatgggtcgggacgaatgacatgactgccccagttttttcgagctcccctgcacttcccggcattttatttttcttcctttttttttctcctcacgattttgccgagttgtacccggctgggccgtcgtgacagggcacggaaacacgaataaaaaaatgcacgagattgacttatgagaattggcaacgaaccaagccaaatcgacctgccctacggacttcgaaaattaccagttcatggttgaggaaagagactagctaacagttatgaaaattttaaaatatatttagttaaaataactgttaattatagatgtgttgttatggtaacatgggaaaatccggaaaatctatagtagaagatgattttgaatcgagttagagatttattgatattttaattttttttacagcgactctgattcaaaaaatgaatcaaacacactcttaggcctagtttagaaacttttggaatgggagagattaaggatgggttgagatgtattgatcgagattttgacttattacaaatttaaacactcacttctcttcacatcactccaattcaagagcacctaaactagtcctttaatatttttaagggtttttaagtttgtgccctcagttttgctcgtgttctcatttttccatctagtcgtgtttttactcagttttgtcattctaagaaagacaatacttagaaggacaaaactgagataaaactgagtaaaaaacatgactaagagtgaaaatgaggacacaagcaaaactgatggcaccatcttaaaaaaacc

SEQ ID NO: 63738 - DNA, 1733 bp, Zea Mays
tggttagtgagcaataaggccattttaactaaagataatttgctcaagaaaaactggacagggagggattcctcctgtagtttctgtccccaagtcgaaacagttgatcaccttttctttacatgctctgttgctaaagtgatatggggagtggtggccaagtgcctcgacacaccttatgtgcctggggaacttagatcattgtattgtgtggttacagagatatctcaaaattgacaagtctactcgtgtagttctaattgccgttacttgttgggccatatggaagaccagaaacaaaatgagcttcgaaaaaatcttaatcaaatcacctaatgtgattatttgccatgctggtgctttgattttgtgttgggcaggactcagcaaaaagatttgcaggatctttaggagggtgctaaacttcttgtccgggctgcaagtggaaggcagatcacgggcaccaatgataaagttgatgatgcggagtaatcctggcttccagctgcgacaacgtcgtctctctgttttgtgtgctactgctttctggtgttatctctctgggtttcagcccctttgtgactgtagtatgtagacttcatcgcccagtctaggtggatgcttgattgatgtgttgtcgcacttgttgtggtctgatggttgtgatgcctcaatcaggtactccaccatgatgtaataatgggttctgaacttggccaccatgctgttatgcgctgaaaacctttctgtaaacatgttgtatttctattatgcaagtaatagagttgggggtatccctctcataaaaaatataatatcatccgctcaaactcgcaatccaattgaatttatttcaaaaacaagtcaacttaacttcgcatccatctttctcccacacttcaactggcgccggagcagatggaacgagctcaacacttcaccacagcaaagtagcagcaaccaacaaatcatcgtatctttttatattgcaagcatgcgtgtgcaagtcacaaacaggttacaatcacatatgtccattaaaaggcaggacatatgccagcatcatttcaactaatctaatcagtcttatttcatcttgaccatccagctgcaaaaaataagctggtggatatgtagtcctggcagataagaagacgccagaggaaatacctgaagatttccaacgataatgaggtacattatcacacgagcatctcatgactaattcattcttaactatccagaccatgcctgaggagccaccgcatgggtgacagagctcaacctatcgtgcagggtgttacattctgcaggctggcctgcatccaccatacggagcgcaaggccatcaactacttgatcctttgggtaacccattcgagcaaccttatcagcaatgcctatcggatggttctgcactgactgagatggtcccaggtgatgaagcaccatgggagcactgcaatgtgcttgttgattaaggacagcaacaatagtagcaggattgctggaagggcttccgtaagcagggctgtaggcctgtgcattcccttgtaccgtatatgatgctacaccgcatggactaactttacttggctgaggtacaaatgagccattgccaagtgaatgaagttgctggtgctgctccgtcaatggaacagaaactgtgttgctttgtacataaataggagcagcttcatgatgcttccgctgggatgaggaaattgtagagt

SEQ ID NO: 63739 - DNA, 1551 bp, Zea Mays
acggcgagtcagtctcagtgggggacggccgacgagccgaccgcctcagctctgcggctctgcctgctcacctcgttctcccggcgcggcccggcggggacggcaaccaccgcacggcgaataaaaaaacagaaccagcggcgccacgtccctgtcctcctcctctctctctccacatttcctctcccgataagagtgaggcctcggctcagcttgagcttcccctccctcccctcctgcgctccagctcccctccatcctcggccaaaaattctgcggcgagctccgatccggtgcgactactaacccacgccgcagaagccgcgcgtcctgatcgcgcgggggtcgaggagaggggaagcgcggcgccgcggttgcctgccaccgcaccgccgcaggagaaggaagaggagcccgtatccctccgccccgctgcccgccggaccgatggactccgagcactggatctcgcgcctggccgccgcgaagcgcttctacgcggcgcagctcggccacagcgatcgggccgggatggatgagctggagatggacgaggaggtcaggcccgagttcccctgcccctactgctacgaggaccacgacgtcggatccctctgcgcgcacctggaggaggagcacccgttcgaaccccaagccgcggcctgccctgtctgctcagagatggttacgaaggatatggttaaccatattactacgcaacatggatatttattcaagaatcgccgccggctgcgcagattcatcattccaggcagccaggccctctctttgctgagccgagatctacgggaagcccacttgcaggtgctcctcggaggaggcggacagagatccagcgacaacagcagcagcagcagcgccacgaacatttcggctgatcctcttctgtcgtcgttcggccttggcttccctacctcagacgcggagcaagcatccaagtcgactgtttccattcctgatgatgcaacgacggtgaaagaagcgcccgctcagtatcgattcgtcgctcacaagtgaagaaagggagctgaagcggaagcaagcccgcgtcagagccacgttcgtgcaggacctgctgctctctactctattcggcgactgatgacgaaccagagcgagcctggtattatcactggaaggtgcagagttgatgtgggcgtgatgtatctttctaagttattgtaagccggtctctgtcttcacaactgacgatctgtgtgtggtacgcaccacgcacgcaagtcgcggttgtgcgtgtacgtctgaactctggagcattggtttgttgtaccaacataatgagtcacaacggcggatggctggctatacgtacactgcagtagtgcgtaggagcgattagaccagttccgaaactacagccatgaagcgcatggctgtacactgcactgtataggttacgatcagtgagttccgaaactgtgcttagaccggggctcctctgccttttctctttttttccccctttgatctctgatctggccttatcccaaacagaaagaaaattccacc

SEQ ID NO: 63740 - DNA, 713 bp, Zea Mays
acggcgagtcagtctcagtgggggacggccgacgagccgaccgcctcagctctgcggctctgcctgctcacctcgttctcccggcgcggcccggcggggacggcaaccaccgcacggcgaataaaaaaacagaaccagcggcgccacgtccctgtcctcctcctctctctctccacatttcctctcccgataagagtgaggcctcggctcagcttgagcttcccctccctcccctcctgcgctccagctcccctccatcctcggccaaaaattctgcggcgagctccgatccggtgcgactactaacccacgccgcagaagccgcgcgtcctgatcgcgcgggggtcgaggagaggggaagcgcggcgccgcggttgcctgccaccgcaccgccgcaggagaaggaagaggagcccgtatccctccgccccgctgcccgccggaccgatggactccgagcactggatctcgcgcctggccgccgcgaagcgcttctacgcggcgcagctcggccacagcgatcgggccgggatggatgagctggagatggacgaggaggtcaggcccgagttcccctgcccctactgctacgaggaccacgacgtcggatccctctgcgcgcacctggaggaggagcacccgttcgaaccccaagccgcgctcgttggcgttgacttttgaagaacgagattgttcttcttttacacttttcg

SEQ ID NO: 63741 - DNA, 2381 bp, Zea Mays
cagaatacatgaatgagaatatcagttcctcctatatctttgtgtctcctgtgtttgtgattccacttctagttaagtagcctttggactacactcggtagcaaagggttcttaacagggagagctccacctgggctgcgcccctagattccgcgcgcagtttcctgcgccttccagaagcttccacacccgtctccagaccggtctcgtcggctcgtcgcttcgtctatccagacgcttctctcatccccttttctctcccctcctctcctcccgtctcctaccccgaaccaaccaaacctcaccgaatcgcaacgacagcgagaacgtccaaacgagcgcgagtctccggcgataaccaagagcgcgggcacgcaaagcggcgaagcgggaaggaagcagtaacgatggggcttgactattacaagatcctaggcgtcgacaagggcgccaccgatgacgacctcaagaaggcctaccgcaagctcgccatgaaatggcaccccgacaagaaccccaacaacaagaaggaggccgagaacaagttcaagcagatctcggaggcgtacgaggtgctgagcgacccgcagaagcgcgcggtgtacgaccagtacggcgaggagggtcttaaggggcaggtgccgccgccgggcgccggcggggcggggcccggcggcgcaaccttcttctccaccggcggcgacgggccgacggtgttccggttcaacccgcgcaacgcggaggacatcttcgccgagttcttcggcggctccagccccttcggcggcatgggcggcggtggcatgggcggcagcggcatgggcggtgggatgcccggcatgcggagcggcggtacgaggttctcctcctccatcttcggggacgacatattcggctctgcgttcggcggcggcccggacgggcacggcatgcacgccggcgggcgggccgtgaaggcgccggccatagagcggaagctgccgtgcagcctcgaggagctgtacaagggcaccaccaagaagatgaagatctccagggaaatctctgacgccagtgggtaagcatctgccttctcttcgcatctccgtctcagcattgtttgtttgaaattgctgttgttgattaaagtatttgaaactgaactgaaacgcaataaaagactccttaaatttgcttgagctataacctgatgagatttatgcttggttaatttctgctgttggatttaagctgctgtcctaaaaatgactttgattctagactggaatcaagttaaattttcttaaattcgaccgattgggcgagttggtttgatctttttttaatataaattctgcggatcagccatcatagatgtttgagtttactgctttagcagcggtagctcagtcagttgaattgatttgcatttgccatttgggctgtgccagcttgttttgtccccgtcaatccgtgagctatataacactacagccacaaaacaagaaagctgagttccatttgcagattgtgtgctcaccactgctatgctaaacttgtgtgtgcaggaagacgatcccagtggaagagatcctaacgatcgacgtgaagccggggtggaagaagggcaccaagatcacgttcccggagaagggcaacgagacgcccaacacgatcccggcggacctcgtcttcatcatcgacgagaagccgcacccggtgttcacccgcgacggcaacgacctggtggtgacccagaagatcccgctggcggaggccctgacggggtacaccgcgcacgtgacgacgctggacgggcgcagcctgacggtgcccatcagctccgtgatccacccgggctacgaggaggtggtgcgaggggagggcatgccgatacccaaggacccgtccaggaagggcaacctccggatcaagttcgacatcaagttcccggcgaggctcacggcggaccagaagtccggtgtcaagaggctgctcgggcagtagagcgcgcttgtgttgttttggagtattgtgtatcagacattttcgtgttggtttatcttgaactggggaggagggaagggagctgccatttgcagcctccgcaacgacgacgacgatgacgaggccaccaagtgttgagtacagaacagctactgttgtacggtgtatggttgagaaacttgagatgtgtagcggaggattccttgtgcgaacttccagatcgtggtggttgtctgttcactggtccacgtcgttgcatttgcaacttgcaaggatcgcggatggagtaactgttggccacgaacacgcgcattctctgtatttgttagtgtaagaaatagtcattgcaaacggtagttgtacaccgcaaaaaagaataaaattcaaggtttaag

SEQ ID NO: 63742 - DNA, 560 bp, Zea Mays
ccgcgttccaagaaataaaaccagaggcgcacgccccctgttcgctcccccaaattcgtttgtttcccacggcgcaagaaagaaacaagggtacaagaacagcccgctaaaggaaagaaacaagggctacacaagaacagcttgagagctcctctccgatcccgacccaccgcctgcaactcttcttctctcctacgtgttcgtcagcccgctaagtgttaagatggcttcaagtgatggtcaaacagaagctgcggccccatctgtccccaaaaaccctgctatggcatcatgccggaagaagaaaacagatgatgctaccttcctcgaagatctgaaagaccacatcgatgagttcatccatgcctccatggatgagcacaagacctgctttaagaagacgatccagaagatgtttgggatgtcgaaggctgttgcagagagatccgcggcagaagcgaaggaagctggagttgaaagtgctttgccacttcagaccagtgtctcgcagtagaatttcacgttggatgatcgtgtcttctcggtctcggtgtaattgt

SEQ ID NO: 63743 - DNA, 4046 bp, Zea Mays
cactgtctcatttaacttaactcctgattcaaggctcttaggtgaattgcatattgctctgttgaaatctatcattaaagatattgaggatgttgcccggactccttcagttgctttaggtgtaaatcagagcagttctgccaatcctggaggtggtcacccacaaattgttgaaggggcgtatgcttggggcatcaacatacttaactggcagcaccacttgaactttcttacatggccagaaatattgcgccaatttggtttatgtgctggttttgggcctcagttaaagaaaagcaatgctgaaattgtccatcaccgtgacaataacgaggtccataatggtgtagatgtcatttccattctgcgaaatggttcagcggctgtgaaggctgctgctttaatgaaagaaagagggtatactaatcgcaggtctcgacaccgtctgacacctggaacagtaaagtttgctgctttctatgtactgtcacttgaagggagcagaggtctcacgatattggaagttgcagaaaagatccagaaatctggactgagagaccttacaacaagtaagacaccagaggcatctgtatctgcggcattgtcgagagacactaagctttttgaaagaacagcaccttcgacatattgtgttaaaactccttacagaaaggacccagatgactctgaggctgtgttgtcagcagcacgtgaaaaaatcagggtttttcagaatacactttcagagtgtgaagaagtggagaaggatgtggatgaggctgagagggatgaggattctgaatgtgatgatgctactgatgacgctgatggtgacgacgtgaatattgagggcaaggatgccaagtctcctctagttggagctcaatatgacacacaaattacagtagttggtgatgtaaagaaagaatcaaacagtgtgatgaacatatcagtgccaccaagcattcaaattaaatctagtgcaagtgtaccgttgcatactttagacagtaaagcaagtagttcaactgacccacaagttggagatgatgataaagacactgagatagatgaaagtaaccaaggggagtcctgggtacaggggttagctgagggtgactattgtgatcttagtgtggacgaacggctcaatgctttcgttgcgcttattggtgttgccacagaaggaaattctatccgtgcaattctggaggaacgcctagaagcagcaagtgctttgaaaaaacaaatgtgggctgaggcacaacttgataagaggcgttcaagggatgactttactagtaaggtgcagtatgattcttgtgtgggtataaaggttgatacagatcaaaaaaataatgctgctgaaagtacacttgtgccagtggataaccctattagaaacaacaacggaaattccagtttgacgaacaacgatttacttgttgataagcagaaccagcttattactggtgatgtatttcaacaatggaatggtgtaagccaagaattgagtactaaccccgaaagcttgtctgttcagcaatatgcttcatctgagaaaactagatctcagttgaaatctttcataggtcacaaggcagaacagctatacgtgtacagatcgctaccccttggacaagatcggagacggaaccggtattggcagttttctgcatcttcatcatcctatgaccctggttcgggaagagtcttttttgaatctagagatggatattggagggtcattgattcatctgaggcgtttgaagctttggtatcttcccttgatactcgtggcatccgtgagtcacatctacactcaatgttgcaaagtatcgagccaacttttagggaagctgttgagaggaagaagtgtgttagtttagaacacacaactgggtggactgacaatggaagtaatgaaagtccaaactgcaacaatgagtttggaagtccatgcagtaccctttctggtgttgcttctgataatcttatggcatattcagatactttcaagatagaaattgggcacaacgaagctgagaaaagttctatctcgaaaagggcttctgtgtttctgaaatggatgtggagagagtgctactgtcaccaatccacgtacaccatgaaatatggaaagaagcggtgccctgagttgattcaatcttgtgaccattgctaccagatatacttagctgaagaacaacactgttcttcttgtcacaagtcattcaaacccattcacaatttcttggagcacttatcacaatgcgaagataatcagagaacaaatcctagttggaagacacaaattgtgggcctttctgtacccgtaggattgagattgctgaggttgctcttagctaccattgaggcttcagtaccggcagaagctctcctacctttttggacggatttgtatcgaaaatcttggggtgtgaagttgtattctgcatcatctgctgaagaagtcttgcagatgcttagtgtgctggaaagtgcaataaagcgagattacttatcatctaattttgaaacgacaactgagttgcttaattcaaacacacaagatgctacccagaattcagttggaggttctggatctgccactatacttccatgggttcctgacaccaccgctgctgtcgccttaagattgttagacttggatacttccatctcatacaaacttcattcaaagttggtttcaaataaggagcaagaagctggagatttcatgaagcttccactgagatacccttctattaataagaacaaacaagaaatagaacagttcatacctattggttttgatcaacaggatggaacattgctaactaacagcaatggccgtagaggtcgtggacggggaggtagaggtggaaggggaagtagaggaggtagcaggggaggtagttctcgtggtggtggtggtagggttcccaggggtattggtagctcatccaggattcagttcagggatgacaatagtgtgccctatgggagagcccctcgaaagaatgtacgtggtgggcgtacccgtggccgcggccgcggccgtggacttcgaactgtcagacctcggcaaccatctgaattcagtgccacatcaattccaaagttaaacctattgggcagctttagcatgttaagtaaggcaaatcacactggcaatatgcattctccagagagcttgggtgcagaagagtgggtcttggagagaagggaatatgtcaaggatgatgatgacaatttggtctctcgatatgatgagtcagaggaggaaaatggtgagcctatgaatgaggaatatgatgagcagatctcaggctatccaagggacaattctgagttcagccccatacagatgatgggtgatgtgagccacgatgaggatgctgaaggggatgagggcgaggaggatggagaggactatgaaactgaagatcctgctggtgatgaggatgatgacgttgagatggattgggatgatgacattcgggacaacgatgatggtaatggagcagccaacgcagatgaggatgaaggtggtacatcatcatattcttcagagtatagtgagtgatgagagtggattgaagttgtgcaggtttgtggtttgccaactatgtaagaggctgccagttctaaactgtgctgtggctatggccctatttctattcatttttaactaaaatttatttagggtcttatcattttgttaagaatcatttggatggtgacccattaccatctctagttgtggctcgttattgcatagaagctagccgacagtggaagatcggctttgtacagggatgttcgaaacttcgaatcaggttatttgtggtgtatatataatgccaaattaccaatcacaagaagtaaaaaaaaagtcattcactgtctgtttttttgttcttcagctacatttttcattgctatatatagggagagttttttttagacggttgtcacagtcttggcttacaaatttgtctctaacggtgttcgggtctgatcgattcgtcgtcacgcacttg

SEQ ID NO: 63744 - DNA, 4921 bp, Zea Mays
cgctggaggcgaatctagggttacggtcgtccgggatggagtcctccgacgacgggggctccgggccgctgctgctggcggcggggatggggagtcccggccattcgttggtccccgcggccgtcggcggtgcgagtagcgcacctggcgcctccggatccggggggaagccgccggtgaagcgcgtcatgaagacgccctaccagctggaggttctggagaggacgtatgcagaggattcgtacccaaacgagacgaagcgggcggagctatcggtgcagttaaacctcacggacaggcagctgcagatgtggttctgccaccgccggctcaaggaccggaaaccgctggccaagaggcaactgagggacgacgaggttagcgccccagtcatagcgccatcacctgtgcttccgcctccatcgccgcccagcgagatgatagcggggactgttggaacctatcgtgagcagctgccaccctattccaggagagggcctgaccggccatccgtgcctaggctatctgtgcccgagattgggaggagatactacgaacctccacaagttatgctgcctcacatggcaccagtgcaccttacacaagcggagcatcgggtgatcaattctgtagaagcacttataggggagcctttgagggatgatgggccagtgcttggtattgaatttgatccacttcctcctggtgcatttggcacacctatagttcctgagccaccaaggcagcccttccgatcatatgataccaagatgttttttgggcatgattccaaacccatgaaggctttggcatttttgcctgccacagaccctttacttccaaatagagggaaacagaagtccttggttgggtcttctcatcttggctcacaggcagtacatgaatatcaatttcttcctgagcagccaagtgacacatatgagagggcaagccagtcacacttctataatgctccagcagaggcatcaaacttgagggtagctcctctgtctacaggttcacgctttctacatggacttgagcaggcacctagctatacgtttcacagtcaatcatctggttctagccattcggctcatcgtggcagatcgccgattgcattggcattgacagatcatgagggggctttgtcaaatattaatgttagcccaactccaatccatggcaaatttagcatccctcaagttgctggatttgaaagctccctcgcatcctctgaaagaatgggatatcatgatgatgatacatatcgtgtggacagaaagcgcaagcataatgaggaagctaagactgttagggaggttgaggctcatgaaaagagaatcagaaaggagcttgagaagcaagatctgctgaatagaaagagagaagaacaaatgcagagggaaacagagagacttggtcgtgagagacgaaaggaagaggagaggttgatgcgtgaaaggcagagggaagaagagaaattccaaagggaacaaagacgtgcacacaagcgtatggaaaagtttatgcagaaacaatctataagagctgaaaaactaagacaaaaagaggagcttcgacgagagaaagaagcagcgaagcagaaggctgctaatgagagggctacagcacgtagaatcgcgcgggagagtatggaactgatggaagatgagcgcttagaattattagaactggcctctcgtagtaaagggctcctctcaatggtttctcttgatagtgacacattacagcagcttgattcatttagaggaatgctgggaaagtttcctcctgaaactgtgagactgaaggtgcctttttcaataaaaccatgggcagattccgaggatattattggaaaccttttgatggtttggaagttctttgttacctttggtgatgttcttgggcttccatcattcacattggatgagttcgtgcaggctcttcatgattatgattcaaggctcttaggtgaattgcatattgctctgttgaaatctatcattaaagatattgaggatgttgcccggactccttcagttgctttaggtgtaaatcagagcagttctgccaatcctggaggaacgcctagaagcagcaagtgctttgaaaaaacaaatgtgggctgaggcacaacttgataagaggcgttcaagggatgactttactagtaaggtgcagtatgattcttgtgtgggtataaaggttgatacagatcaaaaaaataatgctgctgaaagtacacttgtgccagtggataaccctattagaaacaacaacggaaattccagtttgacgaacaacgatttacttgttgataagcagaaccagcttattactggtgatgtatttcaacaatggaatggtgtaagccaagaattgagtactaaccccgaaagcttgtctgttcagcaatatgcttcatctgagaaaactagatctcagttgaaatctttcataggtcacaaggcagaacagctatacgtgtacagatcgctaccccttggacaagatcggagacggaaccggtattggcagttttctgcatcttcatcatcctatgaccctggttcgggaagagtcttttttgaatctagagatggatattggagggtcattgattcatctgaggcgtttgaagctttggtatcttcccttgatactcgtggcatccgtgagtcacatctacactcaatgttgcaaagtatcgagccaacttttagggaagctgttgagaggaagaagtgtgttagtttagaacacacaactgggtggactgacaatggaagtaatgaaagtccaaactgcaacaatgagtttggaagtccatgcagtaccctttctggtgttgcttctgataatcttatggcatattcagatactttcaagatagaaattgggcacaacgaagctgagaaaagttctatctcgaaaagggcttctgtgtttctgaaatggatgtggagagagtgctactgtcaccaatccacgtacaccatgaaatatggaaagaagcggtgccctgagttgattcaatcttgtgaccattgctaccagatatacttagctgaagaacaacactgttcttcttgtcacaagtcattcaaacccattcacaatttcttggagcacttatcacaatgcgaagataatcagagaacaaatcctagttggaagacacaaattgtgggcctttctgtacccgtaggattgagattgctgaggttgctcttagctaccattgaggcttcagtaccggcagaagctctcctacctttttggacggatttgtatcgaaaatcttggggtgtgaagttgtattctgcatcatctgctgaagaagtcttgcagatgcttagtgtgctggaaagtgcaataaagcgagattacttatcatctaattttgaaacgacaactgagttgcttaattcaaacacacaagatgctacccagaattcagttggaggttctggatctgccactatacttccatgggttcctgacaccaccgctgctgtcgccttaagattgttagacttggatacttccatctcatacaaacttcattcaaagttggtttcaaataaggagcaagaagctggagatttcatgaagcttccactgagatacccttctattaataagaacaaacaagaaatagaacagttcatacctattggttttgatcaacaggatggaacattgctaactaacagcaatggccgtagaggtcgtggacggggaggtagaggtggaaggggaagtagaggaggtagcaggggaggtagttctcgtggtggtggtggtagggttcccaggggtattggtagctcatccaggattcagttcagggatgacaatagtgtgccctatgggagagcccctcgaaagaatgtacgtggtgggcgtacccgtggccgcggccgcggccgtggacttcgaactgtcagacctcggcaaccatctgaattcagtgccacatcaattccaaagttaaacctattgggcagctttagcatgttaagtaaggcaaatcacactggcaatatgcattctccagagagcttgggtgcagaagagtgggtcttggagagaagggaatatgtcaaggatgatgatgacaatttggtctctcgatatgatgagtcagaggaggaaaatggtgagcctatgaatgaggaatatgatgagcagatctcaggctatccaagggacaattctgagttcagccccatacagatgatgggtgatgtgagccacgatgaggatgctgaaggggatgagggcgaggaggatggagaggactatgaaactgaagatcctgctggtgatgaggatgatgacgttgagatggattgggatgatgacattcgggacaacgatgatggtaatggagcagccaacgcagatgaggatgaaggtggtacatcatcatattcttcagagtatagtgagtgatgagagtggattgaagttgtgcaggtttgtggtttgccaactatgtaagaggctgccagttctaaactgtgctgtggctatggccctatttctattcatttttaactaaaatttatttagggtcttatcattttgttaagaatcatttggatggtgacccattaccatctctagttgtggctcgttattgcatagaagctagccgacagtggaagatcggctttgtacagggatgttcgaaacttcgaatcaggttatttgtggtgtatatataatgccaaattaccaatcacaagaagtaaaaaaaaagtcattcactgtctgtttttttgttcttcagctacatttttcattgctatatatagggagagttttttttagacggttgtcacagtcttggcttacaaatttgtctctaacggtgttcgggtctgatcgattcgtcgtcacgcacttg

SEQ ID NO: 63745 - DNA, 6175 bp, Zea Mays
cgcggatcgagccgcgggcttgcttccggctcggtgcctgtgtatttattcgcggaaatcgccctagcgtgtgattaggtttgttgttcttctgtgtggcctagtcttcgcgtgttgtggtttgttgtccgctggaggcgaatctagggttacggtcgtccgggatggagtcctccgacgacgggggctccgggccgctgctgctggcggcggggatggggagtcccggccattcgttggtccccgcggccgtcggcggtgcgagtagcgcacctggcgcctccggatccggggggaagccgccggtgaagcgcgtcatgaagacgccctaccagctggaggttctggagaggacgtatgcagaggattcgtacccaaacgagacgaagcgggcggagctatcggtgcagttaaacctcacggacaggcagctgcagatgtggttctgccaccgccggctcaaggaccggaaaccgctggccaagaggcaactgagggacgacgaggttagcgccccagtcatagcgccatcacctgtgcttccgcctccatcgccgcccagcgagatgatagcggggactgttggaacctatcgtgagcagctgccaccctattccaggagagggcctgaccggccatccgtgcctaggctatctgtgcccgagattgggaggagatactacgaacctccacaagttatgctgcctcacatggcaccagtgcaccttacacaagcggagcatcgggtgatcaattctgtagaagcacttataggggagcctttgagggatgatgggccagtgcttggtattgaatttgatccacttcctcctggtgcatttggcacacctatagttcctgagccaccaaggcagcccttccgatcatatgataccaagatgttttttgggcatgattccaaacccatgaaggctttggcatttttgcctgccacagaccctttacttccaaatagagggaaacagaagtccttggttgggtcttctcatcttggctcacaggcagtacatgaatatcaatttcttcctgagcagccaagtgacacatatgagagggcaagccagtcacacttctataatgctccagcagaggcatcaaacttgagggtagctcctctgtctacaggttcacgctttctacatggacttgagcaggcacctagctatacgtttcacagtcaatcatctggttctagccattcggctcatcgtggcagatcgccgattgcattggcattgacagatcatgagggggctttgtcaaatattaatgttagcccaactccaatccatggcaaatttagcatccctcaagttgctggatttgaaagctccctcgcatcctctgaaagaatgggatatcatgatgatgatacatatcgtgtggacagaaagcgcaagcataatgaggaagctaagactgttagggaggttgaggctcatgaaaagagaatcagaaaggagcttgagaagcaagatctgctgaatagaaaggtcttccttagttgcactaagaaagttcatgcatacctttcatgatgcattattattttttcctctttctgcagagagaagaacaaatgcagagggaaacagagagacttggtcgtgagagacgaaaggaagaggagaggttgatgcgtgaaaggcagagggaagaagagaaattccaaagggaacaaagacgtgcacacaagcgtatggaaaagtttatgcagaaacaatctataagagctgaaaaactaagacaaaaagaggagcttcgacgagagaaagaagcagcgaagcagaaggctgctaatgagagggctacagcacgtagaatcgcgcgggagagtatggaactgatggaagatgagcgcttagaattattagaactggcctctcgtagtaaagggctcctctcaatggtttctcttgatagtgacacattacagcagcttgattcatttagaggaatgctgggaaagtttcctcctgaaactgtgagactgaaggtgcctttttcaataaaaccatgggcagattccgaggatattattggaaaccttttgatggtttggaagttctttgttacctttggtgatgttcttgggcttccatcattcacattggatgagttcgtgcaggctcttcatgattatgattcaaggctcttaggtgaattgcatattgctctgttgaaatctatcattaaagatattgaggatgttgcccggactccttcagttgctttaggtgtaaatcagagcagttctgccaatcctggaggtggtcacccacaaattgttgaaggggcgtatgcttggggcatcaacatacttaactggcagcaccacttgaactttcttacatggccagaaatattgcgccaatttggtttatgtgctggttttgggcctcagttaaagaaaagcaatgctgaaattgtccatcaccgtgacaataacgaggtctcgacaccgtctgacacctggaacagtaaagtttgctgctttctatgtactgtcacttgaagggagcagaggtctcacgatattggaagttgcagaaaagatccaggtatatctacatcaaacaaatttctagattgatactgacctgttatttctaatggaacctatactggtttgttcttgtttctcttcagaaatctggactgagagaccttacaacaagtaagacaccagaggcatctgtatctgcggcattgtcgagagacactaagctttttgaaagaacagcaccttcgacatattgtgttaaaactccttacagaaaggacccagatgactctgaggctgtgttgtcagcagcacgtgaaaaaatcagggtttttcagaatacactttcagagtgtgaagaagtggagaaggatgtggatgaggctgagagggatgaggattctgaatgtgatgatgctactgatgacgctgatggtgacgacgtgaatattgagggcaaggatgccaagtctcctctagttggagctcaatatgacacacaaattacagtagttggtgatgtaaagaaagaatcaaacagtgtgatgaacatatcagtgccaccaagcattcaaattaaatctagtgcaagtgtaccgttgcatactttagacagtaaagcaagtagttcaactgacccacaagttggagatgatgataaagacactgagatagatgaaagtaaccaaggggagtcctgggtacaggggttagctgagggtgactattgtgatcttagtgtggacgaacggctcaatgctttcgttgcgcttattggtgttgccacagaaggaaattctatccgtgcaattctggaggaacgcctagaagcagcaagtgctttgaaaaaacaaatgtgggctgaggcacaacttgataagaggcgttcaagggatgactttactagtaaggtgcagtatgattcttgtgtgggtataaaggttgatacagatcaaaaaaataatgctgctgaaagtacacttgtgccagtggataaccctattagaaacaacaacggaaattccagtttgacgaacaacgatttacttgttgataagcagaaccagcttattactggtgatgtatttcaacaatggaatggtgtaagccaagaattgagtactaaccccgaaagcttgtctgttcagcaatatgcttcatctgagaaaactagatctcagttgaaatctttcataggtcacaaggcagaacagctatacgtgtacagatcgctaccccttggacaagatcggagacggaaccggtattggcagttttctgcatcttcatcatcctatgaccctggttcgggaagagtcttttttgaatctagagatggatattggagggtcattgattcatctgaggcgtttgaagctttggtatcttcccttgatactcgtggcatccgtgagtcacatctacactcaatgttgcaaagtatcgagccaacttttagggaagctgttgagaggaagaagtgtgttagtttagaacacacaactgggtggactgacaatggaagtaatgaaagtccaaactgcaacaatgagtttggaagtccatgcagtaccctttctggtgttgcttctgataatcttatggcatattcagatactttcaagatagaaattgggcacaacgaagctgagaaaagttctatctcgaaaagggcttctgtgtttctgaaatggatgtggagagagtgctactgtcaccaatccacgtacaccatgaaatatggaaagaagcggtgccctgagttgattcaatcttgtgaccattgctaccagatatacttagctgaagaacaacactgttcttcttgtcacaagtcattcaaacccattcacaatttcttggagcacttatcacaatgcgaagataatcagagaacaaatcctagttggaagacacaaattgtgggcctttctgtacccgtaggattgagattgctgaggttgctcttagctaccattgaggcttcagtaccggcagaagctctcctacctttttggacggatttgtatcgaaaatcttggggtgtgaagttgtattctgcatcatctgctgaagaagtcttgcagatgcttagtgtgctggaaagtgcaataaagcgagattacttatcatctaattttgaaacgacaactgagttgcttaattcaaacacacaagatgctacccagaattcagttggaggttctggatctgccactatacttccatgggttcctgacaccaccgctgctgtcgccttaagattgttagacttggatacttccatctcatacaaacttcattcaaagttggtttcaaataaggagcaagaagctggagatttcatgaagcttccactgagatacccttctattaataagaacaaacaagaaatagaacagttcatacctattggttttgatcaacaggatggaacattgctaactaacagcaatggccgtagaggtcgtggacggggaggtagaggtggaaggggaagtagaggaggtagcaggggaggtagttctcgtggtggtggtggtagggttcccaggggtattggtagctcatccaggattcagttcagggatgacaatagtgtgccctatgggagagcccctcgaaagaatgtacgtggtgggcgtacccgtggccgcggccgcggccgtggacttcgaactgtcagacctcggcaaccatctgaattcagtgccacatcaattccaaagttaaacctattgggcagctttagcatgttaagtaaggcaaatcacactggcaatatgcattctccagagagcttgggtgcagaagagtgggtcttggagagaagggaatatgtcaaggatgatgatgacaatttggtctctcgatatgatgagtcagaggaggaaaatggtgagcctatgaatgaggaatatgatgagcagatctcaggctatccaagggacaattctgagttcagccccatacagatgatgggtgatgtgagccacgatgaggatgctgaaggggatgagggcgaggaggatggagaggactatgaaactgaagatcctgctggtgatgaggatgatgacgttgagatggattgggatgatgacattcgggacaacgatgatggtaatggagcagccaacgcagatgaggatgaaggtggtacatcatcatattcttcagagtatagtgagtgatgagagtggattgaagttgtgcaggtttgtggtttgccaactatgtaagaggctgccagttctaaactgtgctgtggctatggccctatttctattcatttttaactaaaatttatttagggtcttatcattttgttaagaatcatttggatggtgacccattaccatctctagttgtggctcgttattgcatagaagctagccgacagtggaagatcggctttgtacagggatgttcgaaacttcgaatcaggttatttgtggtgtatatataatgccaaattaccaatcacaagaagtaaaaaaaaagtcattcactgtctgtttttttgttcttcagctacatttttcattgctatatatagggagagttttttttagacggttgtcacagtcttggcttacaaatttgtctctaacggtgttcgggtctgatcgattcgtcgtcacgcacttg

SEQ ID NO: 63746 - DNA, 6434 bp, Zea Mays
caaacattgaaacatacgaacgcgcgcgcgtgcacaggccacagccagccgcgagatacaacatacaacgcgcgcgcacgaaatccacaccacaccaatccaagaacagatccacatcaccgctcccccttcctttctttccttggttgctgacctccgcatcgagggaaaaaaggactactgccagggcaggcagcgcagcgggacggaagagcatcaaacgccatcaccagcagaagcagcagcagcaagtcaataataaaagtcggaggcatcaaatccaaaaggtttttattagcatggaagcgatccaaacccctgaccaattcgggacgagcagcaggcggagggggagttgcatctgtgccctctcctgttgctcctcctcgcggtcgcgcgcgcccgggtcctgttgttccgcgctggggtgcgcccgccgatcctgttctacttcgcgtctgggctgcgacgttacctactgccgccgtcacccattggtggaattcgtggcgcggatcgagccgcgggcttgcttccggctcggtgcctgtgtatttattcgcggaaatcgccctagcgtgtgattaggtttgttgttcttctgtgtggcctagtcttcgcgtgttgtggtttgttgtccgctggaggcgaatctagggttacggtcgtccgggatggagtcctccgacgacgggggctccgggccgctgctgctggcggcggggatggggagtcccggccattcgttggtccccgcggccgtcggcggtgcgagtagcgcacctggcgcctccggatccggggggaagccgccggtgaagcgcgtcatgaagacgccctaccagctggaggttctggagaggacgtatgcagaggattcgtacccaaacgagacgaagcgggcggagctatcggtgcagttaaacctcacggacaggcagctgcagatgtggttctgccaccgccggctcaaggaccggaaaccgctggccaagaggcaactgagggacgacgagctgccaccctattccaggagagggcctgaccggccatccgtgcctaggctatctgtgcccgagattgggaggagatactacgaacctccacaagttatgctgcctcacatggcaccagtgcaccttacacaagcggagcatcgggtgatcaattctgtagaagcacttataggggagcctttgagggatgatgggccagtgcttggtattgaatttgatccacttcctcctggtgcatttggcacacctatagttcctgagccaccaaggcagcccttccgatcatatgataccaagatgttttttgggcatgattccaaacccatgaaggctttggcatttttgcctgccacagaccctttacttccaaatagagggaaacagaagtccttggttgggtcttctcatcttggctcacaggcagtacatgaatatcaatttcttcctgagcagccaagtgacacatatgagagggcaagccagtcacacttctataatgctccagcagaggcatcaaacttgagggtagctcctctgtctacagatcgccgattgcattggcattgacagatcatgagggggctttgtcaaatattaatgttagcccaactccaatccatggcaaatttagcatccctcaagttgctggatttgaaagctccctcgcatcctctgaaagaatgggatatcatgatgatgatacatatcgtgtggacagaaagcgcaagcataatgaggaagctaagactgttagggaggttgaggctcatgaaaagagaatcagaaaggagcttgagaagcaagatctgctgaatagaaagagagaagaacaaatgcagagggaaacagagagacttggtcgtgagagacgaaaggaagaggagaggttgatgcgtgaaaggcagagggaagaagagaaattccaaagggaacaaagacgtgcacacaagcgtatggaaaagtttatgcagaaacaatctataagagctgaaaaactaagacaaaaagaggagcttcgacgagagaaagaagcagcgaagcagaaggctgctaatgagagggctacagcacgtagaatcgcgcgggagagtatggaactgatggaagatgagcgcttagaattattagaactggcctctcgtagtaaagggctcctctcaatggtttctcttgatagtgacacattacagcagcttgattcatttagaggaatgctgggaaagtttcctcctgaaactgtgagactgaaggtgcctttttcaataaaaccatgggcagattccgaggatattattggaaaccttttgatggtttggaagttctttgttacctttggtgatgttcttgggcttccatcattcacattggatgagttcgtgcaggctcttcatgattatgattcaaggctcttaggtgaattgcatattgctctgttgaaatctatcattaaagatattgaggatgttgcccggactccttcagttgctttaggtgtaaatcagagcagttctgccaatcctggaggtggtcacccacaaattgttgaaggggcgtatgcttggggcatcaacatacttaactggcagcaccacttgaactttcttacatggccagaaatattgcgccaatttggtttatgtgctggttttgggcctcagttaaagaaaagcaatgctgaaattgtccatcaccgtgacaataacgaggtccataatggtgtagatgtcatttccattctgcgaaatggttcagcggctgtgaaggctgctgctttaatgaaagaaagagggtatactaatcgcaggtctcgacaccgtctgacacctggaacagtaaagtttgctgctttctatgtactgtcacttgaagggagcagaggtctcacgatattggaagttgcagaaaagatccagaaatctggactgagagaccttacaacaagtaagacaccagaggcatctgtatctgcggcattgtcgagagacactaagctttttgaaagaacagcaccttcgacatattgtgttaaaactccttacagaaaggacccagatgactctgaggctgtgttgtcagcagcacgtgaaaaaatcagggtttttcagaatacactttcagagtgtgaagaagtggagaaggatgtggatgaggctgagagggatgaggattctgaatgtgatgatgctactgatgacgctgatggtgacgacgtgaatattgagggcaaggatgccaagtctcctctagttggagctcaatatgacacacaaattacagtagttggtgatgtaaagaaagaatcaaacagtgtgatgaacatatcagtgccaccaagcattcaaattaaatctagtgcaagtgtaccgttgcatactttagacagtaaagcaagtagttcaactgacccacaagttggagatgatgataaagacactgagatagatgaaagtaaccaaggggagtcctgggtacaggggttagctgagggtgactattgtgatcttagtgtggacgaacggctcaatgctttcgttgcgcttattggtgttgccacagaaggaaattctatccgtgcaattctggaggaacgcctagaagcagcaagtgctttgaaaaaacaaatgtgggctgaggcacaacttgataagaggcgttcaagggatgactttactagtaaggtgcagtatgattcttgtgtgggtataaaggttgatacagatcaaaaaaataatgctgctgaaagtacacttgtgccagtggataaccctattagaaacaacaacggaaattccagtttgacgaacaacgatttacttgttgataagcagaaccagcttattactggtgatgtatttcaacaatggaatggtgtaagccaagaattgagtactaaccccgaaagcttgtctgttcagcaatatgcttcatctgagaaaactagatctcagttgaaatctttcataggtcacaaggcagaacagctatacgtgtacagatcgctaccccttggacaagatcggagacggaaccggtattggcagttttctgcatcttcatcatcctatgaccctggttcgggaagagtcttttttgaatctagagatggatattggagggtcattgattcatctgaggcgtttgaagctttggtatcttcccttgatactcgtggcatccgtgagtcacatctacactcaatgttgcaaagtatcgagccaacttttagggaagctgttgagaggaagaagtgtgttagtttagaacacacaactgggtggactgacaatggaagtaatgaaagtccaaactgcaacaatgagtttggaagtccatgcagtaccctttctggtgttgcttctgataatcttatggcatattcagatactttcaagatagaaattgggcacaacgaagctgagaaaagttctatctcgaaaagggcttctgtgtttctgaaatggatgtggagagagtgctactgtcaccaatccacgtacaccatgaaatatggaaagaagcggtgccctgagttgattcaatcttgtgaccattgctaccagatatacttagctgaagaacaacactgttcttcttgtcacaagtcattcaaacccattcacaatttcttggagcacttatcacaatgcgaagataatcagagaacaaatcctagttggaagacacaaattgtgggcctttctgtacccgtaggattgagattgctgaggttgctcttagctaccattgaggcttcagtaccggcagaagctctcctacctttttggacggatttgtatcgaaaatcttggggtgtgaagttgtattctgcatcatctgctgaagaagtcttgcagatgcttagtgtgctggaaagtgcaataaagcgagattacttatcatctaattttgaaacgacaactgagttgcttaattcaaacacacaagatgctacccagaattcagttggaggttctggatctgccactatacttccatgggttcctgacaccaccgctgctgtcgccttaagattgttagacttggatacttccatctcatacaaacttcattcaaagttggtttcaaataaggagcaagaagctggagatttcatgaagcttccactgagatacccttctattaataagaacaaacaagaaatagaacagttcatacctattggttttgatcaacaggatggaacattgctaactaacagcaatggccgtagaggtcgtggacggggaggtagaggtggaaggggaagtagaggaggtagcaggggaggtagttctcgtggtggtggtggtagggttcccaggggtattggtagctcatccaggattcagttcagggatgacaatagtgtgccctatgggagagcccctcgaaagaatgtacgtggtgggcgtacccgtggccgcggccgcggccgtggacttcgaactgtcagacctcggcaaccatctgaattcagtgccacatcaattccaaagttaaacctattgggcagctttagcatgttaagtaaggcaaatcacactggcaatatgcattctccagagagcttgggtgcagaagagtgggtcttggagagaagggaatatgtcaaggatgatgatgacaatttggtctctcgatatgatgagtcagaggaggaaaatggtgagcctatgaatgaggaatatgatgagcagatctcaggctatccaagggacaattctgagttcagccccatacagatgatgggtgatgtgagccacgatgaggatgctgaaggggatgagggcgaggaggatggagaggactatgaaactgaagatcctgctggtgatgaggatgatgacgttgagatggattgggatgatgacattcgggacaacgatgatggtaatggagcagccaacgcagatgaggatgaaggtggtacatcatcatattcttcagagtatagtgagtgatgagagtggattgaagttgtgcaggtttgtggtttgccaactatgtaagaggctgccagttctaaactgtgctgtggctatggccctatttctattcatttttaactaaaatttatttagggtcttatcattttgttaagaatcatttggatggtgacccattaccatctctagttgtggctcgttattgcatagaagctagccgacagtggaagatcggctttgtacagggatgttcgaaacttcgaatcaggttatttgtggtgtatatataatgccaaattaccaatcacaagaagtaaaaaaaaagtcattcactgtctgtttttttgttcttcagctacatttttcattgctatatatagggagagttttttttagacggttgtcacagtcttggcttacaaatttgtctctaacggtgttcgggtctgatcgattcgtcgtcacgcacttg

SEQ ID NO: 63747 - DNA, 6417 bp, Zea Mays
caaacattgaaacatacgaacgcgcgcgcgtgcacaggccacagccagccgcgagatacaacatacaacgcgcgcgcacgaaatccacaccacaccaatccaagaacagatccacatcaccgctcccccttcctttctttccttggttgctgacctccgcatcgagggaaaaaaggactactgccagggcaggcagcgcagcgggacggaagagcatcaaacgccatcaccagcagaagcagcagcagcaagtcaataataaaagtcggaggcatcaaatccaaaaggtttttattagcatggaagcgatccaaacccctgaccaattcgggacgagcagcaggcggagggggagttgcatctgtgccctctcctgttgctcctcctcgcggtcgcgcgcgcccgggtcctgttgttccgcgctggggtgcgcccgccgatcctgttctacttcgcgtctgggctgcgacgttacctactgccgccgtcacccattggtggaattcgtggcgcggatcgagccgcgggcttgcttccggctcggtgcctgtgtatttattcgcggaaatcgccctagcgtgtgattaggtttgttgttcttctgtgtggcctagtcttcgcgtgttgtggtttgttgtccgctggaggcgaatctagggttacggtcgtccgggatggagtcctccgacgacgggggctccgggccgctgctgctggcggcggggatggggagtcccggccattcgttggtccccgcggccgtcggcggtgcgagtagcgcacctggcgcctccggatccggggggaagccgccggtgaagcgcgtcatgaagacgccctaccagctggaggttctggagaggacgtatgcagaggattcgtacccaaacgagacgaagcgggcggagctatcggtgcagttaaacctcacggacaggcagctgcagatgtggttctgccaccgccggctcaaggaccggaaaccgctggccaagaggcaactgagggacgacgaggagagggcctgaccggccatccgtgcctaggctatctgtgcccgagattgggaggagatactacgaacctccacaagttatgctgcctcacatggcaccagtgcaccttacacaagcggagcatcgggtgatcaattctgtagaagcacttataggggagcctttgagggatgatgggccagtgcttggtattgaatttgatccacttcctcctggtgcatttggcacacctatagttcctgagccaccaaggcagcccttccgatcatatgataccaagatgttttttgggcatgattccaaacccatgaaggctttggcatttttgcctgccacagaccctttacttccaaatagagggaaacagaagtccttggttgggtcttctcatcttggctcacaggcagtacatgaatatcaatttcttcctgagcagccaagtgacacatatgagagggcaagccagtcacacttctataatgctccagcagaggcatcaaacttgagggtagctcctctgtctacagatcgccgattgcattggcattgacagatcatgagggggctttgtcaaatattaatgttagcccaactccaatccatggcaaatttagcatccctcaagttgctggatttgaaagctccctcgcatcctctgaaagaatgggatatcatgatgatgatacatatcgtgtggacagaaagcgcaagcataatgaggaagctaagactgttagggaggttgaggctcatgaaaagagaatcagaaaggagcttgagaagcaagatctgctgaatagaaagagagaagaacaaatgcagagggaaacagagagacttggtcgtgagagacgaaaggaagaggagaggttgatgcgtgaaaggcagagggaagaagagaaattccaaagggaacaaagacgtgcacacaagcgtatggaaaagtttatgcagaaacaatctataagagctgaaaaactaagacaaaaagaggagcttcgacgagagaaagaagcagcgaagcagaaggctgctaatgagagggctacagcacgtagaatcgcgcgggagagtatggaactgatggaagatgagcgcttagaattattagaactggcctctcgtagtaaagggctcctctcaatggtttctcttgatagtgacacattacagcagcttgattcatttagaggaatgctgggaaagtttcctcctgaaactgtgagactgaaggtgcctttttcaataaaaccatgggcagattccgaggatattattggaaaccttttgatggtttggaagttctttgttacctttggtgatgttcttgggcttccatcattcacattggatgagttcgtgcaggctcttcatgattatgattcaaggctcttaggtgaattgcatattgctctgttgaaatctatcattaaagatattgaggatgttgcccggactccttcagttgctttaggtgtaaatcagagcagttctgccaatcctggaggtggtcacccacaaattgttgaaggggcgtatgcttggggcatcaacatacttaactggcagcaccacttgaactttcttacatggccagaaatattgcgccaatttggtttatgtgctggttttgggcctcagttaaagaaaagcaatgctgaaattgtccatcaccgtgacaataacgaggtccataatggtgtagatgtcatttccattctgcgaaatggttcagcggctgtgaaggctgctgctttaatgaaagaaagagggtatactaatcgcaggtctcgacaccgtctgacacctggaacagtaaagtttgctgctttctatgtactgtcacttgaagggagcagaggtctcacgatattggaagttgcagaaaagatccagaaatctggactgagagaccttacaacaagtaagacaccagaggcatctgtatctgcggcattgtcgagagacactaagctttttgaaagaacagcaccttcgacatattgtgttaaaactccttacagaaaggacccagatgactctgaggctgtgttgtcagcagcacgtgaaaaaatcagggtttttcagaatacactttcagagtgtgaagaagtggagaaggatgtggatgaggctgagagggatgaggattctgaatgtgatgatgctactgatgacgctgatggtgacgacgtgaatattgagggcaaggatgccaagtctcctctagttggagctcaatatgacacacaaattacagtagttggtgatgtaaagaaagaatcaaacagtgtgatgaacatatcagtgccaccaagcattcaaattaaatctagtgcaagtgtaccgttgcatactttagacagtaaagcaagtagttcaactgacccacaagttggagatgatgataaagacactgagatagatgaaagtaaccaaggggagtcctgggtacaggggttagctgagggtgactattgtgatcttagtgtggacgaacggctcaatgctttcgttgcgcttattggtgttgccacagaaggaaattctatccgtgcaattctggaggaacgcctagaagcagcaagtgctttgaaaaaacaaatgtgggctgaggcacaacttgataagaggcgttcaagggatgactttactagtaaggtgcagtatgattcttgtgtgggtataaaggttgatacagatcaaaaaaataatgctgctgaaagtacacttgtgccagtggataaccctattagaaacaacaacggaaattccagtttgacgaacaacgatttacttgttgataagcagaaccagcttattactggtgatgtatttcaacaatggaatggtgtaagccaagaattgagtactaaccccgaaagcttgtctgttcagcaatatgcttcatctgagaaaactagatctcagttgaaatctttcataggtcacaaggcagaacagctatacgtgtacagatcgctaccccttggacaagatcggagacggaaccggtattggcagttttctgcatcttcatcatcctatgaccctggttcgggaagagtcttttttgaatctagagatggatattggagggtcattgattcatctgaggcgtttgaagctttggtatcttcccttgatactcgtggcatccgtgagtcacatctacactcaatgttgcaaagtatcgagccaacttttagggaagctgttgagaggaagaagtgtgttagtttagaacacacaactgggtggactgacaatggaagtaatgaaagtccaaactgcaacaatgagtttggaagtccatgcagtaccctttctggtgttgcttctgataatcttatggcatattcagatactttcaagatagaaattgggcacaacgaagctgagaaaagttctatctcgaaaagggcttctgtgtttctgaaatggatgtggagagagtgctactgtcaccaatccacgtacaccatgaaatatggaaagaagcggtgccctgagttgattcaatcttgtgaccattgctaccagatatacttagctgaagaacaacactgttcttcttgtcacaagtcattcaaacccattcacaatttcttggagcacttatcacaatgcgaagataatcagagaacaaatcctagttggaagacacaaattgtgggcctttctgtacccgtaggattgagattgctgaggttgctcttagctaccattgaggcttcagtaccggcagaagctctcctacctttttggacggatttgtatcgaaaatcttggggtgtgaagttgtattctgcatcatctgctgaagaagtcttgcagatgcttagtgtgctggaaagtgcaataaagcgagattacttatcatctaattttgaaacgacaactgagttgcttaattcaaacacacaagatgctacccagaattcagttggaggttctggatctgccactatacttccatgggttcctgacaccaccgctgctgtcgccttaagattgttagacttggatacttccatctcatacaaacttcattcaaagttggtttcaaataaggagcaagaagctggagatttcatgaagcttccactgagatacccttctattaataagaacaaacaagaaatagaacagttcatacctattggttttgatcaacaggatggaacattgctaactaacagcaatggccgtagaggtcgtggacggggaggtagaggtggaaggggaagtagaggaggtagcaggggaggtagttctcgtggtggtggtggtagggttcccaggggtattggtagctcatccaggattcagttcagggatgacaatagtgtgccctatgggagagcccctcgaaagaatgtacgtggtgggcgtacccgtggccgcggccgcggccgtggacttcgaactgtcagacctcggcaaccatctgaattcagtgccacatcaattccaaagttaaacctattgggcagctttagcatgttaagtaaggcaaatcacactggcaatatgcattctccagagagcttgggtgcagaagagtgggtcttggagagaagggaatatgtcaaggatgatgatgacaatttggtctctcgatatgatgagtcagaggaggaaaatggtgagcctatgaatgaggaatatgatgagcagatctcaggctatccaagggacaattctgagttcagccccatacagatgatgggtgatgtgagccacgatgaggatgctgaaggggatgagggcgaggaggatggagaggactatgaaactgaagatcctgctggtgatgaggatgatgacgttgagatggattgggatgatgacattcgggacaacgatgatggtaatggagcagccaacgcagatgaggatgaaggtggtacatcatcatattcttcagagtatagtgagtgatgagagtggattgaagttgtgcaggtttgtggtttgccaactatgtaagaggctgccagttctaaactgtgctgtggctatggccctatttctattcatttttaactaaaatttatttagggtcttatcattttgttaagaatcatttggatggtgacccattaccatctctagttgtggctcgttattgcatagaagctagccgacagtggaagatcggctttgtacagggatgttcgaaacttcgaatcaggttatttgtggtgtatatataatgccaaattaccaatcacaagaagtaaaaaaaaagtcattcactgtctgtttttttgttcttcagctacatttttcattgctatatatagggagagttttttttagacggttgtcacagtcttggcttacaaatttgtctctaacggtgttcgggtctgatcgattcgtcgtcacgcacttg

SEQ ID NO: 63748 - DNA, 2850 bp, Zea Mays
ccgaacttgggcagttctcgcctgtctttgtttggttgttgcgagccctgttatgcatcagacacctttggtgtgcgacgagccgatgacaccgtgcttcctttactacaggacttttatctggatttggcagaagacaacagaaaaattactccacgggattacctagagctagcattgaggcctgttcaaggtggaggaagggacatatctgcaaagaatgcgatacgggactccatccgtgcactttttccggacagggaatgttttacacttgtgcgacctgtgaacaatgagaaagatctccaacgtcttgatcaacttcctattgctcttgaaacatatttacactttaaacagtttgatggcatttacaaattatgtctgtcccttcatgacctgagtaatttccgtccagagttcagatccggtctggatgctttcacgaaatttgttcttgaccgaacaagaccaaaacaacttggagctactacaatgacaggtcccatccttgctggattgacacaatcgtttcttgatgctattaataatggtgctgtccctacaatctcttcatcatggcagagtgtggaggaggcagaatgccagagggcatttgattctgctgtgggcacttacaattcttcttttgaccataaaaaacatatagaagaggattctttgagagaagcacatgaagatgccatgaggaaggctatcagtgcttttaatgtttctgctgttggtgctggaagacagttagagcatatagatgctgaaaggaacgccctgagattgaaatgcaattcaagcgatgataagttggcattgctgaggaagcagcttgaagcaagcgagagtcacagagctgagtatgtgaggcgctatgaggaagttctgaatgataaacagaaaatttccaaggattactctattcgtataactgaacttcaggccaagagtagcaagttggaacaacggtgcttgagcttgtcttcttctcttgaaactgcaaaacgagaatccaatgattggaagagcaaatatgatcatggtattttgcagcaaaaggcagatgagagtaagttaaaatctcaaattgcttccctagagtctagggtgagtatcagtgagggtagattatcggcaacacgtgaacaggctgattctgctcaagaggaagcatccgaatggaaacgcaaatatgaagttgctgttagtgaggccaaaacagctctgcagagagcggcggtagcacaggaacgcacaaataagaaagtgcaagagagggaagatgctttgagggtagagcttgctaaccaactatctgagaaggaagaggaaattgcaagattacatgcaaaacgtagtcaaatggaaattcatgctacaagtttgatctcgaggcttgaggccactgaagcgaagtcgaagagccatgagtctgattcgttggctttgagggaggagatcagattactgactgataacctggagtctattagaagtgaagctctgtcacgtgagaaggaagttgggatcctggaacaggaaaagaaccatcttgaggagaagtatttgtcacagtgcaaaaagtttgatgagacagatattagatgcaaggaagctgaaagggaagcaaaacgagcaacagaattagctgatgtagctcgtgtagaagcttctgctgctcaaaaggataagggggaagctcaacggctcgcaatggagaggtttgcactgatagaaagaatggagcgacaggttgaagctctagaaagggacaaggctaagttggtagaagagattgagagacttcatcagtcagagaaggatgctgtgtccaaggtcgcattgcttgaaagaaatgtaggtgagcgggaaaaagaaattgatgagatgttgaagcagaacaaccagcaaaggtccagcacagttcaagtgcttgagagtctgctggcaacagaacgtgaagcacgtgctgaagccaataagagggcagaggaactgtcgttgatgttgcaagcaactcaaggcaaactggacatgctccaacaagaaaccacacttgatagcaagctcaagacctctgcaaggcgcttaaggggtgatgctacagagtctgtacatgatatggatatcgatggggacaatgggaggcgtcggaaacggtcaaaaagcacaacaagcccgttcaagaacaatcacacagaggatggcggttccgtatttattggcgaagatacttacaacgggagtcagcaagggacagaaagcgaagactatactaaattcactgtgctgaagctgaagcaggagctcaccaagcacgggtttggtgctcaactactccagttgaaaaatcccaacaagaaggatatcgttgccttatatgaaaagcatgtcatcggcaagtagttcctcggcaatacttgtatttatgctttatagacttccctctgtagcgttgaaactttaattgacacgatcggattgaagcaaacaatgcatgtaacttagtttaaatctctggtctgtgtattgcaacaatggtgcagttcattttagcatgcatcgtcggcaagtttgtagttaggagtcgtgattgaaatgtttgtctttccaatcccggcacaggttttcttgtaatgctatgacgacaatctattcggattccatggttttgtggtgtaattttatgccatcgatcttttcagattctaggcagtgttgtactgttatggctgacagtccctatccaatttgttaataactcagtacagtacagcctcgcgaggtgaacacagtccactgcaatgttgtttaaatatcttttcagagcggacaaat

SEQ ID NO: 63749 - DNA, 3352 bp, Zea Mays
acacaggctcactcactcacggtcacgggacccttgccgtcggcggcgggcgacctcgcgatgctgcagatgctgggcttccgcgggggaagccccagcaccggcgacgcgtcccccgccatcagcggggacggcggcgcggccgcgcggccgctccgcctggtgtactgcgacgacaagggcaagttcgtgatggaccccgaggcggtggccgcgctgcagctcgtcaagggccccgtcggggtcgtctccgtctgcggccgcgcgcgccagggcaagagcttcatcctcaaccagcttcttgggcgaagcggcgggtttcaagtggcttcaacacatcggccttgcaccaaaggactttggatgtggagtgcgcctttgaagagaactggtctggatggaactgaatacagtcttgtgttgttggatactgaaggaattgatgcttatgatcaaaccgggacctatagcatccaaatattttccttggctgttttgctgtcgagcatgttcatctacaaccagatgggaggtatagatgaatctgcgttggatcgtctctcgctggtcacagagatgacaaagcacatacgtgtccgggcctcaggtggaagctgcacatcatcttataaaccgtcaaacataaacctcaggccctgttatgcatcagacacctttggtgtgcgacgagccgatgacaccgtgcttcctttactacaggacttttatctggatttggcagaagacaacagaaaaattactccacgggattacctagagctagcattgaggcctgttcaaggtggaggaagggacatatctgcaaagaatgcgggaatgttttacacttgtgcgacctgtgaacaatgagaaagatctccaacgtcttgatcaacttcctctgagtaatttccgtccagagttcagatccggtctggatgctttcacgaaatttgttcttgaccgaacaagaccaaaacaacttggagctactacaatgacaggtcccatccttgctggattgacacaatcgtttcttgatgctattaataatggtgctgtccctacaatctcttcatcatggcagagtgtggaggaggcagaatgccagagggcatttgattctgctgtgggcacttacaattcttcttttgaccataaaaaacatatagaagaggattctttgagagaagcacatgaagatgccatgaggaaggctatcagtgcttttaatgtttctgctgttggtgctggaagacagttagagcatatagatgctgaaaggaacgccctgagattgaaatgcaattcaagcgatgataagttggcattgctgaggaagcagcttgaagcaagcgagagtcacagagctgagtatgtgaggcgctatgaggaagttctgaatgataaacagaaaatttccaaggattactctattcgtataactgaacttcaggccaagagtagcaagttggaacaacggtgcttgagcttgtcttcttctcttgaaactgcaaaacgagaatccaatgattggaagagcaaatatgatcatggtattttgcagcaaaaggcagatgagagtaagttaaaatctcaaattgcttccctagagtctagggtgagtatcagtgagggtagattatcggcaacacgtgaacaggctgattctgctcaagaggaagcatccgaatggaaacgcaaatatgaagttgctgttagtgaggccaaaacagctctgcagagagcggcggtagcacaggaacgcacaaataagaaagtgcaagagagggaagatgctttgagggtagagcttgctaaccaactatctgagaaggaagaggaaattgcaagattacatgcaaaacgtagtcaaatggaaattcatgctacaagtttgatctcgaggcttgaggccactgaagcgaagtcgaagagccatgagtctgattcgttggctttgagggaggagatcagattactgactgataacctggagtctattagaagtgaagctctgtcacgtgagaaggaagttgggatcctggaacaggaaaagaaccatcttgaggagaagtatttgtcacagtgcaaaaagtttgatgagacagatattagatgcaaggaagctgaaagggaagcaaaacgagcaacagaattagctgatgtagctcgtgtagaagcttctgctgctcaaaaggataagggggaagctcaacggctcgcaatggagaggtttgcactgatagaaagaatggagcgacaggttgaagctctagaaagggacaaggctaagttggtagaagagattgagagacttcatcagtcagagaaggatgctgtgtccaaggtcgcattgcttgaaagaaatgtaggtgagcgggaaaaagaaattgatgagatgttgaagcagaacaaccagcaaaggtccagcacagttcaagtgcttgagagtctgctggcaacagaacgtgaagcacgtgctgaagccaataagagggcagaggaactgtcgttgatgttgcaagcaactcaaggcaaactggacatgctccaacaagaaaccacacttgatagcaagctcaagacctctgcaaggcgcttaaggggtgatgctacagagtctgtacatgatatggatatcgatggggacaatgggaggcgtcggaaacggtcaaaaagcacaacaagcccgttcaagaacaatcacacagaggatggcggttccgtatttattggcgaagatacttacaacgggagtcagcaagggacagaaagcgaagactatactaaattcactgtgctgaagctgaagcaggagctcaccaagcacgggtttggtgctcaactactccagttgaaaaatcccaacaagaaggatatcgttgccttatatgaaaagcatgtcatcggcaagtagttcctcggcaatacttgtatttatgctttatagacttccctctgtagcgttgaaactttaattgacacgatcggattgaagcaaacaatgcatgtaacttagtttaaatctctggtctgtgtattgcaacaatggtgcagttcattttagcatgcatcgtcggcaagtttgtagttaggagtcgtgattgaaatgtttgtctttccaatcccggcacaggttttcttgtaatgctatgacgacaatctattcggattccatggttttgtggtgtaattttatgccatcgatcttttcagattctaggcagtgttgtactgttatggctgacagtccctatccaatttgttaataactcagtacagtacagcctcgcgaggtgaacacagtccactgcaatgttgtttaaatatcttttcagagcggacaaat

SEQ ID NO: 63750 - DNA, 3199 bp, Zea Mays
aaaacacacacaggctcactcactcacggtcacgggacccttgccgtcggcggcgggcgacctcgcgatgctgcagatgctgggcttccgcgggggaagccccagcaccggcgacgcgtcccccgccatcagcggggacggcggcgcggccgcgcggccgctccgcctggtgtactgcgacgacaagggcaagttcgtgatggaccccgaggcggtggccgcgctgcagctcgtcaagggccccgtcggggtcgtctccgtctgcggccgcgcgcgccagggcaagagcttcatcctcaaccagcttcttgggcgaagcggcgggtttcaagtggcttcaacacatcggccttgcaccaaaggactttggatgtggagtgcgcctttgaagagaactggtctggatggaactgaatacagtcttgtgttgttggatactgaaggaattgatgcttatgatcaaaccgggacctatagcatccaaatattttccttggctgttttgctgtcgagcatgttcatctacaaccaggacttttatctggatttggcagaagacaacagaaaaattactccacgggattacctagagctagcattgaggcctgttcaaggtggaggaagggacatatctgcaaagaatgcgatacgggactccatccgtgcactttttccggacagggaatgttttacacttgtgcgacctgtgaacaatgagaaagatctccaacgtcttgatcaacttcctctgagtaatttccgtccagagttcagatccggtctggatgctttcacgaaatttgttcttgaccgaacaagaccaaaacaacttggagctactacaatgacaggtcccatccttgctggattgacacaatcgtttcttgatgctattaataatggtgctgtccctacaatctcttcatcatggcagagtgtggaggaggcagaatgccagagggcatttgattctgctgtgggcacttacaattcttcttttgaccataaaaaacatatagaagaggattctttgagagaagcacatgaagatgccatgaggaaggctatcagtgcttttaatgtttctgctgttggtgctggaagacagttagagcatatagatgctgaaaggaacgccctgagattgaaatgcaattcaagcgatgataagttggcattgctgaggaagcagcttgaagcaagcgagagtcacagagctgagtatgtgaggcgctatgaggaagttctgaatgataaacagaaaatttccaaggattactctattcgtataactgaacttcaggccaagagtagcaagttggaacaacggtgcttgagcttgtcttcttctcttgaaactgcaaaacgagaatccaatgattggaagagcaaatatgatcatggtattttgcagcaaaaggcagatgagagtaagttaaaatctcaaattgcttccctagagtctagggtgagtatcagtgagggtagattatcggcaacacgtgaacaggctgattctgctcaagaggaagcatccgaatggaaacgcaaatatgaagttgctgttagtgaggccaaaacagctctgcagagagcggcggtagcacaggaacgcacaaataagaaagtgcaagagagggaagatgctttgagggtagagcttgctaaccaactatctgagaaggaagaggaaattgcaagattacatgcaaaacgtagtcaaatggaaattcatgctacaagtttgatctcgaggcttgaggccactgaagcgaagtcgaagagccatgagtctgattcgttggctttgagggaggagatcagattactgactgataacctggagtctattagaagtgaagctctgtcacgtgagaaggaagttgggatcctggaacaggaaaagaaccatcttgaggagaagtatttgtcacagtgcaaaaagtttgatgagacagatattagatgcaaggaagctgaaagggaagcaaaacgagcaacagaattagctgatgtagctcgtgtagaagcttctgctgctcaaaaggataagggggaagctcaacggctcgcaatggagaggtttgcactgatagaaagaatggagcgacaggttgaagctctagaaagggacaaggctaagttggtagaagagattgagagacttcatcagtcagagaaggatgctgtgtccaaggtcgcattgcttgaaagaaatgtaggtgagcgggaaaaagaaattgatgagatgttgaagcagaacaaccagcaaaggtccagcacagttcaagtgcttgagagtctgctggcaacagaacgtgaagcacgtgctgaagccaataagagggcagaggaactgtcgttgatgttgcaagcaactcaaggcaaactggacatgctccaacaagaaaccacacttgatagcaagctcaagacctctgcaaggcgcttaaggggtgatgctacagagtctgtacatgatatggatatcgatggggacaatgggaggcgtcggaaacggtcaaaaagcacaacaagcccgttcaagaacaatcacacagaggatggcggttccgtatttattggcgaagatacttacaacgggagtcagcaagggacagaaagcgaagactatactaaattcactgtgctgaagctgaagcaggagctcaccaagcacgggtttggtgctcaactactccagttgaaaaatcccaacaagaaggatatcgttgccttatatgaaaagcatgtcatcggcaagtagttcctcggcaatacttgtatttatgctttatagacttccctctgtagcgttgaaactttaattgacacgatcggattgaagcaaacaatgcatgtaacttagtttaaatctctggtctgtgtattgcaacaatggtgcagttcattttagcatgcatcgtcggcaagtttgtagttaggagtcgtgattgaaatgtttgtctttccaatcccggcacaggttttcttgtaatgctatgacgacaatctattcggattccatggttttgtggtgtaattttatgccatcgatcttttcagattctaggcagtgttgtactgttatggctgacagtccctatccaatttgttaataactcagtacagtacagcctcgcgaggtgaacacagtccactgcaatgttgtttaaatatcttttcagagcggacaaat

SEQ ID NO: 63751 - DNA, 3379 bp, Zea Mays
gattctctttttcctctccccgtcagaaaacacacacaggctcactcactcacggtcacgggacccttgccgtcggcggcgggcgacctcgcgatgctgcagatgctgggcttccgcgggggaagccccagcaccggcgacgcgtcccccgccatcagcggggacggcggcgcggccgcgcggccgctccgcctggtgtactgcgacgacaagggcaagttcgtgatggaccccgaggcggtggccgcgctgcagctcgtcaagggccccgtcggggtcgtctccgtctgcggccgcgcgcgccagggcaagagcttcatcctcaaccagcttcttgggcgaagcggcgggtttcaagtggcttcaacacatcggccttgcaccaaaggactttggatgtggagtgcgcctttgaagagaactggtctggatggaactgaatacagtcttgtgttgttggatactgaaggaattgatgcttatgatcaaaccgggacctatagcatccaaatattttccttggctgttttgctgtcgagcatgttcatctacaaccagatgggaggtatagatgaatctgcgttggatcgtctctcgctggtcacagagatgacaaagcacatacgtgtccgggcctcaggacttttatctggatttggcagaagacaacagaaaaattactccacgggattacctagagctagcattgaggcctgttcaaggtggaggaagggacatatctgcaaagaatgcgatacgggactccatccgtgcactttttccggacagggaatgttttacacttgtgcgacctgtgaacaatgagaaagatctccaacgtcttgatcaacttcctattgctcttgaaacatatttacactttaaacagtttgatggcatttacaaattatgtctgtcccttcatgacctgagtaatttccgtccagagttcagatccggtctggatgctttcacgaaatttgttcttgaccgaacaagaccaaaacaacttggagctactacaatgacaggtcccatccttgctggattgacacaatcgtttcttgatgctattaataatggtgctgtccctacaatctcttcatcatggcagagtgtggaggaggcagaatgccagagggcatttgattctgctgtgggcacttacaattcttcttttgaccataaaaaacatatagaagaggattctttgagagaagcacatgaagatgccatgaggaaggctatcagtgcttttaatgtttctgctgttggtgctggaagacagttagagcatatagatgctgaaaggaacgccctgagattgaaatgcaattcaagcgatgataagttggcattgctgaggaagcagcttgaagcaagcgagagtcacagagctgagtatgtgaggcgctatgaggaagttctgaatgataaacagaaaatttccaaggattactctattcgtataactgaacttcaggccaagagtagcaagttggaacaacggtgcttgagcttgtcttcttctcttgaaactgcaaaacgagaatccaatgattggaagagcaaatatgatcatggtattttgcagcaaaaggcagatgagagtaagttaaaatctcaaattgcttccctagagtctagggtgagtatcagtgagggtagattatcggcaacacgtgaacaggctgattctgctcaagaggaagcatccgaatggaaacgcaaatatgaagttgctgttagtgaggccaaaacagctctgcagagagcggcggtagcacaggaacgcacaaataagaaagtgcaagagagggaagatgctttgagggtagagcttgctaaccaactatctgagaaggaagaggaaattgcaagattacatgcaaaacgtagtcaaatggaaattcatgctacaagtttgatctcgaggcttgaggccactgaagcgaagtcgaagagccatgagtctgattcgttggctttgagggaggagatcagattactgactgataacctggagtctattagaagtgaagctctgtcacgtgagaaggaagttgggatcctggaacaggaaaagaaccatcttgaggagaagtatttgtcacagtgcaaaaagtttgatgagacagatattagatgcaaggaagctgaaagggaagcaaaacgagcaacagaattagctgatgtagctcgtgtagaagcttctgctgctcaaaaggataagggggaagctcaacggctcgcaatggagaggtttgcactgatagaaagaatggagcgacaggttgaagctctagaaagggacaaggctaagttggtagaagagattgagagacttcatcagtcagagaaggatgctgtgtccaaggtcgcattgcttgaaagaaatgtaggtgagcgggaaaaagaaattgatgagatgttgaagcagaacaaccagcaaaggtccagcacagttcaagtgcttgagagtctgctggcaacagaacgtgaagcacgtgctgaagccaataagagggcagaggaactgtcgttgatgttgcaagcaactcaaggcaaactggacatgctccaacaagaaaccacacttgatagcaagctcaagacctctgcaaggcgcttaaggggtgatgctacagagtctgtacatgatatggatatcgatggggacaatgggaggcgtcggaaacggtcaaaaagcacaacaagcccgttcaagaacaatcacacagaggatggcggttccgtatttattggcgaagatacttacaacgggagtcagcaagggacagaaagcgaagactatactaaattcactgtgctgaagctgaagcaggagctcaccaagcacgggtttggtgctcaactactccagttgaaaaatcccaacaagaaggatatcgttgccttatatgaaaagcatgtcatcggcaagtagttcctcggcaatacttgtatttatgctttatagacttccctctgtagcgttgaaactttaattgacacgatcggattgaagcaaacaatgcatgtaacttagtttaaatctctggtctgtgtattgcaacaatggtgcagttcattttagcatgcatcgtcggcaagtttgtagttaggagtcgtgattgaaatgtttgtctttccaatcccggcacaggttttcttgtaatgctatgacgacaatctattcggattccatggttttgtggtgtaattttatgccatcgatcttttcagattctaggcagtgttgtactgttatggctgacagtccctatccaatttgttaataactcagtacagtacagcctcgcgaggtgaacacagtccactgcaatgttgtttaaatatcttttcagagcggacaaat

SEQ ID NO: 63752 - DNA, 3525 bp, Zea Mays
cgggaaccgaccgactccatccgccgccaactcaagcaaccgcgtcgcttcgtcgattttgcttaaccccctcctcgagggaggagtacactcgctgcccttgccgattctctttttcctctccccgtcagaaaacacacacaggctcactcactcacggtcacgggacccttgccgtcggcggcgggcgacctcgcgatgctgcagatgctgggcttccgcgggggaagccccagcaccggcgacgcgtcccccgccatcagcggggacggcggcgcggccgcgcggccgctccgcctggtgtactgcgacgacaagggcaagttcgtgatggaccccgaggcggtggccgcgctgcagctcgtcaagggccccgtcggggtcgtctccgtctgcggccgcgcgcgccagggcaagagcttcatcctcaaccagcttcttgggcgaagcggcgggtttcaagtggcttcaacacatcggccttgcaccaaaggactttggatgtggagtgcgcctttgaagagaactggtctggatggaactgaatacagtcttgtgttgttggatactgaaggaattgatgcttatgatcaaaccgggacctatagcatccaaatattttccttggctgttttgctgtcgagcatgttcatctacaaccagatgggaggtatagatgaatctgcgttggatcgtctctcgctggtcacagagatgacaaagcacatacgtgtccgggcctcaggtggaagctgcacatcatcttataaaccgtcaaacataaacctcaggccctgttatgcatcagacacctttggtgtgcgacgagccgatgacaccgtgcttcctttactacaggacttttatctggatttggcagaagacaacagaaaaattactccacgggattacctagagctagcattgaggcctgttcaaggtggaggaagggacatatctgcaaagaatgcgatacgggactccatccgtgcactttttccggacagggaatgttttacacttgtgcgacctgtgaacaatgagaaagatctccaacgtcttgatcaacttcctctgagtaatttccgtccagagttcagatccggtctggatgctttcacgaaatttgttcttgaccgaacaagaccaaaacaacttggagctactacaatgacaggtcccatccttgctggattgacacaatcgtttcttgatgctattaataatggtgctgtccctacaatctcttcatcatggcagagtgtggaggaggcagaatgccagagggcatttgattctgctgtgggcacttacaattcttcttttgaccataaaaaacatatagaagaggattctttgagagaagcacatgaagatgccatgaggaaggctatcagtgcttttaatgtttctgctgttggtgctggaagacagttagagcatatagatgctgaaaggaacgccctgagattgaaatgcaattcaagcgatgataagttggcattgctgaggaagcagcttgaagcaagcgagagtcacagagctgagtatgtgaggcgctatgaggaagttctgaatgataaacagaaaatttccaaggattactctattcgtataactgaacttcaggccaagagtagcaagttggaacaacggtgcttgagcttgtcttcttctcttgaaactgcaaaacgagaatccaatgattggaagagcaaatatgatcatggtattttgcagcaaaaggcagatgagagtaagttaaaatctcaaattgcttccctagagtctagggtgagtatcagtgagggtagattatcggcaacacgtgaacaggctgattctgctcaagaggaagcatccgaatggaaacgcaaatatgaagttgctgttagtgaggccaaaacagctctgcagagagcggcggtagcacaggaacgcacaaataagaaagtgcaagagagggaagatgctttgagggtagagcttgctaaccaactatctgagaaggaagaggaaattgcaagattacatgcaaaacgtagtcaaatggaaattcatgctacaagtttgatctcgaggcttgaggccactgaagcgaagtcgaagagccatgagtctgattcgttggctttgagggaggagatcagattactgactgataacctggagtctattagaagtgaagctctgtcacgtgagaaggaagttgggatcctggaacaggaaaagaaccatcttgaggagaagtatttgtcacagtgcaaaaagtttgatgagacagatattagatgcaaggaagctgaaagggaagcaaaacgagcaacagaattagctgatgtagctcgtgtagaagcttctgctgctcaaaaggataagggggaagctcaacggctcgcaatggagaggtttgcactgatagaaagaatggagcgacaggttgaagctctagaaagggacaaggctaagttggtagaagagattgagagacttcatcagtcagagaaggatgctgtgtccaaggtcgcattgcttgaaagaaatgtaggtgagcgggaaaaagaaattgatgagatgttgaagcagaacaaccagcaaaggtccagcacagttcaagtgcttgagagtctgctggcaacagaacgtgaagcacgtgctgaagccaataagagggcagaggaactgtcgttgatgttgcaagcaactcaaggcaaactggacatgctccaacaagaaaccacacttgatagcaagctcaagacctctgcaaggcgcttaaggggtgatgctacagagtctgtacatgatatggatatcgatggggacaatgggaggcgtcggaaacggtcaaaaagcacaacaagcccgttcaagaacaatcacacagaggatggcggttccgtatttattggcgaagatacttacaacgggagtcagcaagggacagaaagcgaagactatactaaattcactgtgctgaagctgaagcaggagctcaccaagcacgggtttggtgctcaactactccagttgaaaaatcccaacaagaaggatatcgttgccttatatgaaaagcatgtcatcggcaagtagttcctcggcaatacttgtatttatgctttatagacttccctctgtagcgttgaaactttaattgacacgatcggattgaagcaaacaatgcatgtaacttagtttaaatctctggtctgtgtattgcaacaatggtgcagttcattttagcatgcatcgtcggcaagtttgtagttaggagtcgtgattgaaatgtttgtctttccaatcccggcacaggttttcttgtaatgctatgacgacaatctattcggattccatggttttgtggtgtaattttatgccatcgatcttttcagattctaggcagtgttgtactgttatggctgacagtccctatccaatttgttaataactcagtacagtacagcctcgcgaggtgaacacagtccactgcaatgttgtttaaatatcttttcagagcggacaaat

SEQ ID NO: 63753 - DNA, 2481 bp, Zea Mays
gaggagacagtgaagagaatcttaggcgtgagacccttgtcaaattttatattcatcaagcaaagtaagtaccttagggaaacaaatgtaatagtaataagtaaaacattacagggcagaactgcaaaaaacagaagcaacagcgcaccgccaagacctctccctctccgtctcgtctctccccgcacggtcgcccctcttccggttctccctgatggatcccaaggcagcggcgaaatcgaagcgctcgcacaccgtgcgcggccgccgcgtccaccagacccccgccgccgcggcagcgcacaggcagaagcgtgccacagccgccgccgccgccgccgccacctcgtccggcccccgcagccgcaacctcccctcgaactgggaccgctacgatgccgagggcgaggcggaggactccgcggccgcgggggaatggacaggcgaggtggctccgcgcagcaagggtgccgacttcggattcctgctagagcaggcccgagcgcagccctccggggcccgagacctcatcgcgccgtgtgtcccctcccaggacttgccatttggcttctacctctatgctcgaagttaaaggtgaaggaatcttgtcctggtgtgctgatgataactttatattagaggacgacctagcaccagattttgaggtgccttttctctccatggatctgaatgcattggccaatcacctttcaaagattaggctttctcggagactttttattgaagatgatctatttcctgaggctatggctgatgcatcagaagacaatgaaatagcgattgaacttgacacctctgtggaaattgacgctaaaggcagttcagttggacataacttgaactttgaacccagaaaagatacaagtcatcatgagtctgccagcaacatctgtgctgatgatcagataaaaacagaacgtcagccgcaatgttttgcacgagaaaatacagcatctacaaaggttagtactcattcagtgaattcagatagtgaagacaagagctacaagcaagtcatggatactgatcctggtacaagccatagcaaagggttgatgtttgaggtgggcgctgcagaagaagaacttgacatgctcctcgattcatttggcggaactcacctttccagctccaacttggacgaaccatttgagcccgtttcaactttgcaagagatcagtcggtccaatgagaaggttggacctagcttgtcttccggaccacctttgcttgcacctctcgacgatgctctagatgacttgctttcagagacttctcatactgctgcacagaacgaaggctttgctacgcaatgtataacttctcaaccgacggctgattctggccagaacaccgacttcagatacactaagaaaattgatgtgacaccatcaattcatgattcggtggatgatttgctcgaagacacttcaccatgcttaaatgagccgaaacaaactacaactgcacaagcatcgaacagcaccccgcttgatagcgtacccatccgttctggtccatcaaatgcatctgcatcggaagattttgattcatggtttgattctctataggacagaagaaggtcggtgccgtgaggaagtaatggctggcttcagggcatcttctcggacatgcatagtacctttggcctttatgtactccattactgaattaaacttcgtaacagtacggcgaacttgatttcagtgttagcatctttgtatggagagcagccactagataacaatatatttttccttgagagatgacaaaagctctttattttaagagatgacaagaggttgttgcgggcgggcgccggactgccactcctcgtccttcacggtgccgtacttcttccttcgatgttgagccagctttaaggcctcctacgacgagatcttcgatggagaacgcgggaataccacggtcccaccgaacgccttttgaactaacaaatcggacagaaaaaaaaagcccatgcttatgatcaagtctgctgtaaggagaaagaaacaagacgacgtcatgggaggactggaagcgcccaactttcacgcatgtgcaagtgcaacgaacacctcatgattcttgctagcggctctgctctatgattagatccagatgtttagtctgtgtgctgctgcttcgtgggtaggtagccactggtttggagccgaaggccacctcgacgcgtcactcgtgctcattagtcattagtgctcatgcttttgttagtgtgttcgtttgttttggaaagggtaaagaaaacgcaatgtttggtactgctacaaagattcgatcagagtgactcaatgccatctatttagcgtttccgaaaaaaaaaaaaaaacctcgtgttagtatttgtcgtgatgtaatattgtactagtagtagtatcaagaggctgggaacgaagtggctcttgcatcaacccaagggttacgtggaccaaaaac

SEQ ID NO: 63754 - DNA, 2450 bp, Zea Mays
cgaagctaagggttttggacggatgcgattccgtgagcggcggtggaggagacagtgaagagaatcttaggcggcagaactgcaaaaaacagaagcaacagcgcaccgccaagacctctccctctccgtctcgtctctccccgcacggtcgcccctcttccggttctccctgatggatcccaaggcagcggcgaaatcgaagcgctcgcacaccgtgcgcggccgccgcgtccaccagacccccgccgccgcggcagcgcacaggcagaagcgtgccacagccgccgccgccgccgccgccacctcgtccggcccccgcagccgcaacctcccctcgaactgggaccgctacgatgccgagggcgaggcggaggactccgcggccgcgggggaatggacaggcgaggtggctccgcgcagcaagggtgccgacttcggattcctgctagagcaggcccgagcgcagccctccggggcccgagacctcatcgcgccgtgtgtcccctcccaggacttgccatttgattttatgcaggcttctacctctatgctcgaagttaaaggtgaaggaatcttgtcctggtgtgctgatgataactttatattagaggacgacctagcaccagattttgaggtgccttttctctccatggatctgaatgcattggccaatcacctttcaaagattaggctttctcggagactttttattgaagatgatctatttcctgaggctatggctgatgcatcagaagacaatgaaatagcgattgaacttgacacctctgtggaaattgacgctaaaggcagttcagttggacataacttgaactttgaacccagaaaagatacaagtcatcatgagtctgccagcaacatctgtgctgatgatcagataaaaacagaacgtcagccgcaatgttttgcacgagaaaatacagcatctacaaaggttagtactcattcagtgaattcagatagtgaagacaagagctacaagcaagtcatggatactgatcctggtacaagccatagcaaagggttgatgtttgaggtgggcgctgcagaagaagaacttgacatgctcctcgattcatttggcggaactcacctttccagctccaacttggacgaaccatttgagcccgtttcaactttgcaagagatcagtcggtccaatgagaaggttggacctagcttgtcttccggaccacctttgcttgcacctctcgacgatgctctagatgacttgctttcagagacttctcatactgctgcacagaacgaaggctttgctacgcaatgtataacttctcaaccgacggctgattctggccagaacaccgacttcagatacactaagaaaattgatgtgacaccatcaattcatgattcggtggatgatttgctcgaagacacttcaccatgcttaaatgagccgaaacaaactacaactgcacaagcatcgaacagcaccccgcttgatagcgtacccatccgttctggtccatcaaatgcatctgcatcggaagattttgattcatggtttgattctctataggacagaagaaggtcggtgccgtgaggaagtaatggctggcttcagggcatcttctcggacatgcatagtacctttggcctttatgtactccattactgaattaaacttcgtaacagtacggcgaacttgatttcagtgttagcatctttgtatggagagcagccactagataacaatatatttttccttgagagatgacaaaagctctttattttaagagatgacaagaggttgttgcgggcgggcgccggactgccactcctcgtccttcacggtgccgtacttcttccttcgatgttgagccagctttaaggcctcctacgacgagatcttcgatggagaacgcgggaataccacggtcccaccgaacgccttttgaactaacaaatcggacagaaaaaaaaagcccatgcttatgatcaagtctgctgtaaggagaaagaaacaagacgacgtcatgggaggactggaagcgcccaactttcacgcatgtgcaagtgcaacgaacacctcatgattcttgctagcggctctgctctatgattagatccagatgtttagtctgtgtgctgctgcttcgtgggtaggtagccactggtttggagccgaaggccacctcgacgcgtcactcgtgctcattagtcattagtgctcatgcttttgttagtgtgttcgtttgttttggaaagggtaaagaaaacgcaatgtttggtactgctacaaagattcgatcagagtgactcaatgccatctatttagcgtttccgaaaaaaaaaaaaaaacctcgtgttagtatttgtcgtgatgtaatattgtactagtagtagtatcaagaggctgggaacgaagtggctcttgcatcaacccaagggttacgtggaccaaaaac

SEQ ID NO: 63755 - DNA, 1984 bp, Zea Mays
gtcgtgtcacgttggctcctaaaacgagctacggcgacgaagctttcgggaaagaagaattttatgcaggcttctacctctatgctcgaagttaaaggtgaaggaatcttgtcctggtgtgctgatgataactttatattagaggacgacctagcaccagattttgaggtgccttttctctccatggatctgaatgcattggccaatcacctttcaaagattaggctttctcggagactttttattgaagatgatctatttcctgaggctatggctgatgcatcagaagacaatgaaatagcgattgaacttgacacctctgtggaaattgacgctaaaggcagttcagttggacataacttgaactttgaacccagaaaagatacaagtcatcatgagtctgccagcaacatctgtgctgatgatcagataaaaacagaacgtcagccgcaatgttttgcacgagaaaatacagcatctacaaaggttagtactcattcagtgaattcagatagtgaagacaagagctacaagcaagtcatggatactgatcctggtacaagccatagcaaagggttgatgtttgaggtgggcgctgcagaagaagaacttgacatgctcctcgattcatttggcggaactcacctttccagctccaacttggacgaaccatttgagcccgtttcaactttgcaagagatcagtcggtccaatgagaaggttggacctagcttgtcttccggaccacctttgcttgcacctctcgacgatgctctagatgacttgctttcagagacttctcatactgctgcacagaacgaaggctttgctacgcaatgtataacttctcaaccgacggctgattctggccagaacaccgacttcagatacactaagaaaattgatgtgacaccatcaattcatgattcggtggatgatttgctcgaagacacttcaccatgcttaaatgagccgaaacaaactacaactgcacaagcatcgaacagcaccccgcttgatagcgtacccatccgttctggtccatcaaatgcatctgcatcggaagattttgattcatggtttgattctctataggacagaagaaggtcggtgccgtgaggaagtaatggctggcttcagggcatcttctcggacatgcatagtacctttggcctttatgtactccattactgaattaaacttcgtaacagtacggcgaacttgatttcagtgttagcatctttgtatggagagcagccactagataacaatatatttttccttgagagatgacaaaagctctttattttaagagatgacaagaggttgttgcgggcgggcgccggactgccactcctcgtccttcacggtgccgtacttcttccttcgatgttgagccagctttaaggcctcctacgacgagatcttcgatggagaacgcgggaataccacggtcccaccgaacgccttttgaactaacaaatcggacagaaaaaaaaagcccatgcttatgatcaagtctgctgtaaggagaaagaaacaagacgacgtcatgggaggactggaagcgcccaactttcacgcatgtgcaagtgcaacgaacacctcatgattcttgctagcggctctgctctatgattagatccagatgtttagtctgtgtgctgctgcttcgtgggtaggtagccactggtttggagccgaaggccacctcgacgcgtcactcgtgctcattagtcattagtgctcatgcttttgttagtgtgttcgtttgttttggaaagggtaaagaaaacgcaatgtttggtactgctacaaagattcgatcagagtgactcaatgccatctatttagcgtttccgaaaaaaaaaaaaaaacctcgtgttagtatttgtcgtgatgtaatattgtactagtagtagtatcaagaggctgggaacgaagtggctcttgcatcaacccaagggttacgtggaccaaaaac

SEQ ID NO: 63756 - DNA, 2130 bp, Zea Mays
tgccatgcccatgcccatgccgtctttttttagcgctggccgtgcttatctgttcgtctcttctgctatttatgcgtcaaaccagcatatccttatcctcccaaccaatctctgtgtgctcgtcgtgtcgtgtcacgttggctcctaaaacgagctacggcgacgaagctttcgggaaagaagaattttatgcaggcttctacctctatgctcgaagttaaaggtgaaggaatcttgtcctggtgtgctgatgataactttatattagaggacgacctagcaccagattttgagttcttctccccaactttcaggtgccttttctctccatggatctgaatgcattggccaatcacctttcaaagattaggctttctcggagactttttattgaagatgatctatttcctgaggctatggctgatgcatcagaagacaatgaaatagcgattgaacttgacacctctgtggaaattgacgctaaaggcagttcagttggacataacttgaactttgaacccagaaaagatacaagtcatcatgagtctgccagcaacatctgtgctgatgatcagataaaaacagaacgtcagccgcaatgttttgcacgagaaaatacagcatctacaaaggttagtactcattcagtgaattcagatagtgaagacaagagctacaagcaagtcatggatactgatcctggtacaagccatagcaaagggttgatgtttgaggtgggcgctgcagaagaagaacttgacatgctcctcgattcatttggcggaactcacctttccagctccaacttggacgaaccatttgagcccgtttcaactttgcaagagatcagtcggtccaatgagaaggttggacctagcttgtcttccggaccacctttgcttgcacctctcgacgatgctctagatgacttgctttcagagacttctcatactgctgcacagaacgaaggctttgctacgcaatgtataacttctcaaccgacggctgattctggccagaacaccgacttcagatacactaagaaaattgatgtgacaccatcaattcatgattcggtggatgatttgctcgaagacacttcaccatgcttaaatgagccgaaacaaactacaactgcacaagcatcgaacagcaccccgcttgatagcgtacccatccgttctggtccatcaaatgcatctgcatcggaagattttgattcatggtttgattctctataggacagaagaaggtcggtgccgtgaggaagtaatggctggcttcagggcatcttctcggacatgcatagtacctttggcctttatgtactccattactgaattaaacttcgtaacagtacggcgaacttgatttcagtgttagcatctttgtatggagagcagccactagataacaatatatttttccttgagagatgacaaaagctctttattttaagagatgacaagaggttgttgcgggcgggcgccggactgccactcctcgtccttcacggtgccgtacttcttccttcgatgttgagccagctttaaggcctcctacgacgagatcttcgatggagaacgcgggaataccacggtcccaccgaacgccttttgaactaacaaatcggacagaaaaaaaaagcccatgcttatgatcaagtctgctgtaaggagaaagaaacaagacgacgtcatgggaggactggaagcgcccaactttcacgcatgtgcaagtgcaacgaacacctcatgattcttgctagcggctctgctctatgattagatccagatgtttagtctgtgtgctgctgcttcgtgggtaggtagccactggtttggagccgaaggccacctcgacgcgtcactcgtgctcattagtcattagtgctcatgcttttgttagtgtgttcgtttgttttggaaagggtaaagaaaacgcaatgtttggtactgctacaaagattcgatcagagtgactcaatgccatctatttagcgtttccgaaaaaaaaaaaaaaacctcgtgttagtatttgtcgtgatgtaatattgtactagtagtagtatcaagaggctgggaacgaagtggctcttgcatcaacccaagggttacgtggaccaaaaac

SEQ ID NO: 63757 - DNA, 1551 bp, Zea Mays
cgtcgtgtcgtgtcacgttggctcctaaaacgagctacggcgacgaagctttcgggaaagaagagtacgtctccttctcgtgtgtgctttcagagaagagaaggagtcgcggtgatcgtttttccttggatccgttgttggctggctcctcatccactacaagactccactctgcctatcctctgcaagtggctgctgtgcaaacgctacgctttaccacagctcgccgatcgttcgctctgtgctgtcgtccccgtcgcccgcggccagtgcccacgtcatgtcacttttacacctgaccttagcgtgccgcgccggcgcggcggatggcgacagtacatacaactatacaagcctgtgttggtgggcgccggcagccagcagagtctggcggcgccgtggccacgcaacgcaacggctctcgtgcggcacatggcccgcgccgcgcccccgatggctttctttggtcacgcggcttcgtcgcagccccggtgtggctgtggtctcggcgcctggtttcgcggcggctgcgaggagacgaccaccgaggaccagggtccagggccagggccgcgcgccgttcacgtgctctatactaggtcctctcatctccgtcctcgccgcggctccgaccgagtagcactgcctggcgcgctgctctttttttttcacctgaggctacgtgatggattagctgagacggtagaaccgtagagcaaaatggaacatgagagtttcagacagagtatggatggatcgagtttacggaataaaaaagaaactattgtccgaaggaggatctgatccctcgagcaggatattcccgagggagatgccaggtgagggaatcttcttttgtgaacgagctcgagcggatctaagggcgaaaggatttctactttcccccaccactgtggttagggttcaggttttcttcacgaaggttagtttgggcaaccccattctcctaaataatttctattttcttaacgtaaattcgtttatttttctttgaaaaatgaaaatcttctggaagaatagggttcccaaactagcataaaatccgatgttctaaatcgtcagctcttaaaaccgtttagagatgatgcaagtgcccgcagctcaaaactgttttaattatcttcctacctcagtagggctttcgaacggttttattcttttccacttcctccgtgactctattataaactatagcatattttaaaaaaaattagaccctctccatattatatacagatataatgtatatttaaatacaaagtcaaaacctacgtactatatatagaaccagaaacgtaacctgaaaggctgaaacgtctcgagggaatgctctaaaaaaatccacctctgacatgatctttttttttccagcgagtcgggctacaccgtgcaaagtcaactgtccgtgggttttggttttctactcgggctacacacgtgcacaaatcacgagtcaaatgaagtttgtttaaggcgcatatgtgatctcacaggattgacaccgacaacatgcagcgatattgaaacaag

SEQ ID NO: 63758 - DNA, 1833 bp, Zea Mays
atgactcatgagagagggaggcggagttggaggcggagcatttaccggcggcagcctctgcctagtacactggagtcgctgcgaaacggagagacggagactcttggactggaggcatgatggaggcaaagcaggcggcgcccgaccggctctcctccctcccagcggagctgcaggacgagatcctcatccgcctcgacctcagggacgccgtgcgcacctccgcgctctcccgcacctggcgggacctctggaagtcgctctcggtgatctccctctccttccccttcggcacgcacccttccgtcgtcgacagcgtcctcctccgctacatcggcccccgcgtctctctcttccgcatctgtgtcgacgacgcatgtgccgaccgcatcgacgactggctcatcgcgctctcccgctaccgtgtcgagtccatcgacatgtgtggcacactcagatcactcggcaacttcaatctctactcctccatcttctccttaggtgatctcgtgtctctgctgctgaaaaactgccgcatcccacccctccccgtaggattccccggcttccccgcgctccagaagctagtcctcgcctatgttatcttcccatcgaacgggttcaaacaattggaggctatcattcgtcgctcacccttgcttcataccctgcatatgtttgacgtgttcatccctggtgaatacccagactcagtgatcgaggcgcccaatctccgtgtcctgtcaatctattcaccgtatgactatcgatggcgatttggagagctgtcgtgtctcgaatatgccaacattcatgtgttccactgtccgcagcatgaacatgattttggagttttccttgctcggtttgctcacgttcaaaagttcggtctcttctctccggtacattatttttactttgttctctttattatgtgctttgttataaatcaaggctgaaacgctagcgcttggctcaagctgattgcatagttcagggatataaacgtggtctctcctatactagtgaaatagcgtgaaaagttacactaattattaataaaaaaggaaacaatccttatatttctgccttacttccatgtgcctgtggttccttttttttcaaaataacgcagaaatcccatccatatttctagaccctatatggcgtttatccactttcgatgttcttatatatatatctttttaacacaggctgtcgatgttaagatgccttatacacttccattcaccttttataacttgaagaaattgcagttatgtgtggatttcaatgaaattcactccattttgtccatgtttaccatgctaaggagctgtcacaaccttcaaaacttaaaaatagaggttcggagcaacagtggtagatgtggtggcaacattggttcgcttgaatgagacaagacccgcttttcctgcaccctgctgaagtgtttttttgtttgtctccgtcatcacaatgatacacgaatcatgtagaaaatggcttatccagggaaccggcttgatttgtttgtcttgttgagaagaagctgatgtggtattagttgttcatttgttcattagggatatccgtggcagcaagcgcccagagtcgtttggtttttgcctgagtaggtgaaattcggacctccagaacttgttgcttgctgagctcgccatggagtgtttgtttctagctaacgttcttctctgtttggtgaaagctgctcccctttacttcatactcctgtttgttttgttgtccggttccagttaacgagctgaatctatttccaacattagtttccctgatttctatttgaaacattgt

SEQ ID NO: 63759 - DNA, 1778 bp, Zea Mays
atgactcatgagagagggaggcggagttggaggcggagcatttaccggcggcagcctctgcctagtacactggagtcgctgcgaaacggagagacggagactcttggactggaggcatgatggaggcaaagcaggcggcgcccgaccggctctcctccctcccagcggagctgcaggacgagatcctcatccgcctcgacctcagggacgccgtgcgcacctccgcgctctcccgcacctggcgggacctctggaagtcgctctcggtgatctccctctccttccccttcggcacgcacccttccgtcgtcgacagcgtcctcctccgctacatcggcccccgcgtctctctcttccgcatctgtgtcgacgacgcatgtgccgaccgcatcgacgactggctcatcgcgctctcccgctaccgtgtcgagtccatcgacatgtgtggcacactcagatcactcggcaacttcaatctctactcctccatcttctccttaggtgatctcgtgtctctgctgctgaaaaactgccgcatcccacccctccccgtaggattccccggcttccccgcgctccagaagctagtcctcgcctatgttatcttcccatcgaacgggttcaaacaattggaggctatcattcgtcgctcacccttgcttcataccctgcatatgtttgacgtgttcatccctggtgaatacccagactcagtgatcgaggcgcccaatctccgtgtcctgtcaatctattcaccgtatgactatcgatggcgatttggagagctgtcgtgtctcgaatatgccaacattcatgtgttccactgtccgcagcatgaacatgattttggagttttccttgctcggtttgctcacgttcaaaagttcggtctcttctctccggctgtcgatgttaagatgccttatacacttccattcaccttttataacttgaagaaattgcagttatgtgtggatttcaatgaaattcactccattttgtccatgtttaccatgctaaggagctgtcacaaccttcaaaacttaaaaatagagttatgagagttttgaggcagattgggagttcttaaatgctctgtggactgatggcatgtgtgccaatcttcaaattgtgcgcatgattgatatcatttcgcttccgaatgaaacttcatttatgaagcttatactttctaaagcaactcttcttcacacattatatgttggcgcacacccatatgattttgatgatcacataattgacatgctaaaatgcgaaagagcttcagctcaagctcgtgtacagtttgaaggttcggagcaacagtggtagatgtggtggcaacattggttcgcttgaatgagacaagacccgcttttcctgcaccctgctgaagtgtttttttgtttgtctccgtcatcacaatgatacacgaatcatgtagaaaatggcttatccagggaaccggcttgatttgtttgtcttgttgagaagaagctgatgtggtattagttgttcatttgttcattagggatatccgtggcagcaagcgcccagagtcgtttggtttttgcctgagtaggtgaaattcggacctccagaacttgttgcttgctgagctcgccatggagtgtttgtttctagctaacgttcttctctgtttggtgaaagctgctcccctttacttcatactcctgtttgttttgttgtccggttccagttaacgagctgaatctatttccaacattagtttccctgatttctatttgaaacattgt

SEQ ID NO: 63760 - DNA, 2159 bp, Zea Mays
gggtccattctcgttctctagctataaatcaaatcgcctttccgcgcattgagtcatgactcatgagagagggaggcggagttggaggcggagcatttaccggcggcagcctctgcctagtacactggagtcgctgcgaaacggagagacggagactcttggactggaggcatgatggaggcaaagcaggcggcgcccgaccggctctcctccctcccagcggagctgcaggacgagatcctcatccgcctcgacctcagggacgccgtgcgcacctccgcgctctcccgcacctggcgggacctctggaagtcgctctcggtgatctccctctccttccccttcggcacgcacccttccgtcgtcgacagcgtcctcctccgctacatcggcccccgcgtctctctcttccgcatctgtgtcgacgacgcatgtgccgaccgcatcgacgactggctcatcgcgctctcccgctaccgtgtcgagtccatcgacatgtgtggcacactcagatcactcggcaacttcaatctctactcctccatcttctccttaggtgatctcgtgtctctgctgctgaaaaactgccgcatcccacccctccccgtaggattccccggcttccccgcgctccagaagctagtcctcgcctatgttatcttcccatcgaacgggttcaaacaattggaggctatcattcgtcgctcacccttgcttcataccctgcatatgtttgacgtgttcatccctggtgaatacccagactcagtgatcgaggcgcccaatctccgtgtcctgtcaatctattcaccgtatgactatcgatggcgatttggagagctgtcgtgtctcgaatatgccaacattcatgtgttccactgtccgcagcatgaacatgattttggagttttccttgctcggtttgctcacgttcaaaagttcggtctcttctctccggtacattatttttactttgttctctttattatgtgctttgttataaatcaaggctgaaacgctagcgcttggctcaagctgattgcatagttcagggatataaacgtggtctctcctatactagtgaaatagcgtgaaaagttacactaattattaataaaaaaggaaacaatccttatatttctgccttacttccatgtgcctgtggttccttttttttcaaaataacgcagaaatcccatccatatttctagaccctatatggcgtttatccactttcgatgttcttatatatatatctttttaacacaggctgtcgatgttaagatgccttatacacttccattcaccttttataacttgaagaaattgcagttatgtgtggatttcaatgaaattcactccattttgtccatgtttaccatgctaaggagctgtcacaaccttcaaaacttaaaaatagagtcgcggcacgacagttatgagagttttgaggcagattgggagttcttaaatgctctgtggactgatggcatgtgtgccaatcttcaaattgtgcgcatgattgatatcatttcgcttccgaatgaaacttcatttatgaagcttatactttctaaagcaactcttcttcacacattatatgttggcgcacacccatatgattttgatgatcacataattgacatgctaaaatgcgaaagagcttcagctcaagctcgtgtacagtttgaaggttcggagcaacagtggtagatgtggtggcaacattggttcgcttgaatgagacaagacccgcttttcctgcaccctgctgaagtgtttttttgtttgtctccgtcatcacaatgatacacgaatcatgtagaaaatggcttatccagggaaccggcttgatttgtttgtcttgttgagaagaagctgatgtggtattagttgttcatttgttcattagggatatccgtggcagcaagcgcccagagtcgtttggtttttgcctgagtaggtgaaattcggacctccagaacttgttgcttgctgagctcgccatggagtgtttgtttctagctaacgttcttctctgtttggtgaaagctgctcccctttacttcatactcctgtttgttttgttgtccggttccagttaacgagctgaatctatttccaacattagtttccctgatttctatttgaaacattgt

SEQ ID NO: 63761 - DNA, 1750 bp, Zea Mays
ctcttgaactggaggcgtgatggaggcgaagcaggcggcggctgcggtcgaccggctctcctccctcccggcggagctgcaggacgagatcctcgtccgcctcgacctccgggacgccgtgcgcacctctgcgctctcccgcacctggcgggacctctggaagtcgctctcggtgctctccctctccttccccgtcggcacgcagccctcagtcgtcgacagtatcctcctcccctacataggccctcgcgtctccctattcgacttctgcgtcaacgaggcgtctgtcggccgcatcgacgactggctcgtcgcgctctcccgctgccgcgttgagtccatccacatatctaacagactcggatcatgcgactacttcaacctccactcctcaatcttctcattaggtgatctcgtgtccctgcggctggaaggctgcaacatcccacccctccctgtaggattcgccggctttcctgcgctccaggagctagacctcgcctttgttaacttcccatcgaacgaggacaaacagttggaggctatcattcgtcggtcgcccttgcttcataccctgtttatgtgtaatgtgtgcatccctgatggttacccagactcagtgattgaggcgcccaatctccgtgtgctgtcattcgtttcagagtatgactatggatgccgatttggagagctgccgtgtctcgagtatgccgacattgatgcgttattctgtccgcagcatgaacatgattatggatttttccttgctcggtttgctcacgttcaaaggctcaccatcttctgtccagctgccgatgttaacatgccgtacacacttccattcaccttttataacctgaagaacttggagttatgtctgaacttcggtgaaatggactccattttgttcatgtttaccttgctaaggagctgtcgcaaccttcagggcatagaaatagagtcgcaggacatcgatcagagttttgaggcagattgggagttcttaaatgctctgtggactcatgacatgtgttccgatcttcaaactgtgcacatgatgtgtatcagttggcttccaaatgaaatttcatttatgaagcttatgctctctaaagcaactgttcttcgcacattagatgttgatagacaccctgctgattttgatgatcccataattgacatgctaacatgcaaaagagcttcagctcaagctcgtgtcctgtttggaggtttggagcaacagtggtagttgaggtggtgtattactgagtgcaagattggttcacttgaatgatacaagacccgctttccctgctccctgctgaagtgtttttttttgtttttctccatcatcaccatgatacacgaatcatgtagaaaatggcttatccagggaactggcatgatttgtttgtcttgttcagatgaagctgatttggtattggttgttcactagatcagtagagatattcgtggcagcaagcgcccagagtcgattggttaacgaagcatacctccaaacttgcctgagtaggtgaaattcggctacccattcgttagaacttgttgcttgccaagcagagctcatgcaataagcaatccatggggggttttgtttctagctaaatttcttctctgtttagtgaaagcttctcccctttacttcatactcctgtttgtattgttgtccggttccagttaacgtgccgaatctatttccaacattagtttccctgattttgcctctgtc

SEQ ID NO: 63762 - DNA, 1693 bp, Zea Mays
ccggcggcagcctagtacgctgtacggctgtagtcgctgccaaaaggagaggcggagactcttgaactggaggcgtgatggaggcgaagcaggcggcggctgcggtcgaccggctctcctccctcccggcggagctgcaggacgagatcctcgtccgcctcgacctccgggacgccgtgcgcacctctgcgctctcccgcacctggcgggacctctggaagtcgctctcggtgctctccctctccttccccgtcggcacgcagccctcagtcgtcgacaactcagtgattgaggcgcccaatctccgtgtgctgtcattcgtttcagagtatgactatggatgccgatttggagagctgccgtgtctcgagtatgccgacattgatgcgttattctgtccgcagcatgaacatgattatggatttttccttgctcggtttgctcacgttcaaaggctcaccatcttctgtccagtacgctatttttactttgttctccttattatgtgctttgttataaatcaaggctgaaacgctagcgattggctcaagctgattacatagttcagaaatataacgtcgtctcctatacttgtgaaatagcatgaaaagctacactaattattaataataaaaaaagaaacaatcctttcattcctgccttacttccatctgcctgtggtcctttgtttcgcagaaatcccatccatatttctagaccttgtatggcttttatccactttttgtcacaggctgccgatgttaacatgccgtacacacttccattcaccttttataacctgaagaacttggagttatgtctgaacttcggtgaaatggactccattttgttcatgtttaccttgctaaggagctgtcgcaaccttcagggcatagaaatagagtcgcaggacatcgatcagagttttgaggcagattgggagttcttaaatgctctgtggactcatgacatgtgttccgatcttcaaactgtgcacatgatgtgtatcagttggcttccaaatgaaatttcatttatgaagcttatgctctctaaagcaactgttcttcgcacattagatgttgatagacaccctgctgattttgatgatcccataattgacatgctaacatgcaaaagagcttcagctcaagctcgtgtcctgtttggaggtttggagcaacagtggtagttgaggtggtgtattactgagtgcaagattggttcacttgaatgatacaagacccgctttccctgctccctgctgaagtgtttttttttgtttttctccatcatcaccatgatacacgaatcatgtagaaaatggcttatccagggaactggcatgatttgtttgtcttgttcagatgaagctgatttggtattggttgttcactagatcagtagagatattcgtggcagcaagcgcccagagtcgattggttaacgaagcatacctccaaacttgcctgagtaggtgaaattcggctacccattcgttagaacttgttgcttgccaagcagagctcatgcaataagcaatccatggggggttttgtttctagctaaatttcttctctgtttagtgaaagcttctcccctttacttcatactcctgtttgtattgttgtccggttccagttaacgtgccgaatctatttccaacattagtttccctgattttgcctctgtc

SEQ ID NO: 63763 - DNA, 2160 bp, Zea Mays
cgattatcggcctataagctacaaatcaaatcacctttctggaccgttagaggatccgacgcacggagcctttgccggcggcagcctagtacgctgtacggctgtagtcgctgccaaaaggagaggcggagactcttgaactggaggcgtgatggaggcgaagcaggcggcggctgcggtcgaccggctctcctccctcccggcggagctgcaggacgagatcctcgtccgcctcgacctccgggacgccgtgcgcacctctgcgctctcccgcacctggcgggacctctggaagtcgctctcggtgctctccctctccttccccgtcggcacgcagccctcagtcgtcgacagtatcctcctcccctacataggccctcgcgtctccctattcgacttctgcgtcaacgaggcgtctgtcggccgcatcgacgactggctcgtcgcgctctcccgctgccgcgttgagtccatccacatatctaacagactcggatcatgcgactacttcaacctccactcctcaatcttctcattaggtgatctcgtgtccctgcggctggaaggctgcaacatcccacccctccctgtaggattcgccggctttcctgcgctccaggagctagacctcgcctttgttaacttcccatcgaacgaggacaaacagttggaggctatcattcgtcggtcgcccttgcttcataccctgtttatgtgtaatgtgtgcatccctgatggttacccagactcagtgattgaggcgcccaatctccgtgtgctgtcattcgtttcagagtatgactatggatgccgatttggagagctgccgtgtctcgagtatgccgacattgatgcgttattctgtccgcagcatgaacatgattatggatttttccttgctcggtttgctcacgttcaaaggctcaccatcttctgtccagtacgctatttttactttgttctccttattatgtgctttgttataaatcaaggctgaaacgctagcgattggctcaagctgattacatagttcagaaatataacgtcgtctcctatacttgtgaaatagcatgaaaagctacactaattattaataataaaaaaagaaacaatcctttcattcctgccttacttccatctgcctgtggtcctttgtttcgcagaaatcccatccatatttctagaccttgtatggcttttatccactttttgtcacaggctgccgatgttaacatgccgtacacacttccattcaccttttataacctgaagaacttggagttatgtctgaacttcggtgaaatggactccattttgttcatgtttaccttgctaaggagctgtcgcaaccttcagggcatagaaatagagtcgcaggacatcgatcagagttttgaggcagattgggagttcttaaatgctctgtggactcatgacatgtgttccgatcttcaaactgtgcacatgatgtgtatcagttggcttccaaatgaaatttcatttatgaagcttatgctctctaaagcaactgttcttcgcacattagatgttgatagacaccctgctgattttgatgatcccataattgacatgctaacatgcaaaagagcttcagctcaagctcgtgtcctgtttggaggtttggagcaacagtggtagttgaggtggtgtattactgagtgcaagattggttcacttgaatgatacaagacccgctttccctgctccctgctgaagtgtttttttttgtttttctccatcatcaccatgatacacgaatcatgtagaaaatggcttatccagggaactggcatgatttgtttgtcttgttcagatgaagctgatttggtattggttgttcactagatcagtagagatattcgtggcagcaagcgcccagagtcgattggttaacgaagcatacctccaaacttgcctgagtaggtgaaattcggctacccattcgttagaacttgttgcttgccaagcagagctcatgcaataagcaatccatggggggttttgtttctagctaaatttcttctctgtttagtgaaagcttctcccctttacttcatactcctgtttgtattgttgtccggttccagttaacgtgccgaatctatttccaacattagtttccctgattttgcctctgtc

SEQ ID NO: 63764 - DNA, 1909 bp, Zea Mays
cgagatcgggcggaaggggctgacagtttgggtcgattatcggcctataagctacaaatcaaatcacctttctggaccgttagaggatccgacgcacggagcctttgccggcggcagcctagtacgctgtacggctgtagtcgctgccaaaaggagaggcggagactcttgaactggaggcgtgatggaggcgaagcaggcggcggctgcggtcgaccggctctcctccctcccggcggagctgcaggacgagatcctcgtccgcctcgacctccgggacgccgtgcgcacctctgcgctctcccgcacctggcgggacctctggaagtcgctctcggtgctctccctctccttccccgtcggcacgcagccctcagtcgtcgacagtatcctcctcccctacataggccctcgcgtctccctattcgacttctgcgtcaacgaggcgtctgtcggccgcatcgacgactggctcgtcgcgctctcccgctgccgcgttgagtccatccacatatctaacagactcggatcatgcgactacttcaacctccactcctcaatcttctcattaggtgatctcgtgtccctgcggctggaaggctgcaacatcccacccctccctgtaggattcgccggctttcctgcgctccaggagctagacctcgcctttgttaacttcccatcgaacgaggacaaacagttggaggctatcattcgtcggtcgcccttgcttcataccctgtttatgtgtaatgtgtgcatccctgatggttacccagactcagtgattgaggcgcccaatctccgtgtgctgtcattcgtttcagagtatgactatggatgccgatttggagagctgccgtgtctcgagtatgccgacattgatgcgttattctgtccgcagcatgaacatgattatggatttttccttgctcggtttgctcacgttcaaaggctcaccatcttctgtccagctgccgatgttaacatgccgtacacacttccattcaccttttataacctgaagaacttggagttatgtctgaacttcggtgaaatggactccattttgttcatgtttaccttgctaaggagctgtcgcaaccttcagggcatagaaatagaggacatcgatcagagttttgaggcagattgggagttcttaaatgctctgtggactcatgacatgtgttccgatcttcaaactgtgcacatgatgtgtatcagttggcttccaaatgaaatttcatttatgaagcttatgctctctaaagcaactgttcttcgcacattagatgttgatagacaccctgctgattttgatgatcccataattgacatgctaacatgcaaaagagcttcagctcaagctcgtgtcctgtttggaggtttggagcaacagtggtagttgaggtggtgtattactgagtgcaagattggttcacttgaatgatacaagacccgctttccctgctccctgctgaagtgtttttttttgtttttctccatcatcaccatgatacacgaatcatgtagaaaatggcttatccagggaactggcatgatttgtttgtcttgttcagatgaagctgatttggtattggttgttcactagatcagtagagatattcgtggcagcaagcgcccagagtcgattggttaacgaagcatacctccaaacttgcctgagtaggtgaaattcggctacccattcgttagaacttgttgcttgccaagcagagctcatgcaataagcaatccatggggggttttgtttctagctaaatttcttctctgtttagtgaaagcttctcccctttacttcatactcctgtttgtattgttgtccggttccagttaacgtgccgaatctatttccaacattagtttccctgattttgcctctgtc

SEQ ID NO: 63765 - DNA, 728 bp, Zea Mays
atgaactatatcttttgcccatataccctctcacgaacctaagaacaagaggatgagcatagaggaaaactatgagactagcagagctactcgaagaggaaggagctgatataatccaaactgagggtgggaaatgttctagcccgacaaaacctggagtgcttggattgattgaaaaggcaacaccaacactcgccgcagcatactccatctctcgggctgttagtattccagtgatgtgctcgtcagggttaagctcggtgactgcaccaatggcagtaactgcaggagctgctggagttggagtcggttctgctattaacaaactcaacgacgttgtggcaatgatcgctgaggtgagaagcattgcgcaagcaatggagcttgcgccaagaatcgtgtccgaaaccctgagaacaattagttactagtggctaggaatacccttgccatttctgagcaaacttgagcagtcaataagaaagcaaaagagaggcatcgactctgcattttattctctctacgctgtcttttgcctgtggcagtgaatagcgcattagcatcatagaagtattagcttgatcaatggaagttgttcatgcgcttcttcatcgctgcaagtgttgtcatcttgtcgaactcacaataagcttagataagtgctgggtttgtgggaacatcgtttgtgcaatataaatgagatcttgcacctacaaatttgactcttc

SEQ ID NO: 63766 - DNA, 3336 bp, Zea Mays
gctcccggcagcacgtcgcctcgccccccactcccacgtctctgtccctctccctgccctcccccgtcttcccaaccaccacccacccgttcttttccagccaaaccaacgcacgcacacggcacaccctccttctggcagcagagcggcagccaatggccatcgagacggacgcggcggcggcgagggcgagggcgtcgggctcggtttcagatacggcgcccatgtccccggccgccgaggcggcagcggctgcggcggccccgggcccggcgcgcccgcgcgggtggctgaggaagctcatccccacggactacctgccccggagcagccggcgctggaggctggccgccccgtccgccgccggcgcgtccaggctcgcctcgtcgctctcccgctccctcaggtggaagcgcctcccggggctctcctccctcaccctgcgcagcggctccgcggcggcggcagtggacgccgtcgcgttccgcgtcatgtacgtcgtcgaggccgtcgtgctgggcctcgcgctctcctgcttcttcctctgctgcggctgccacctctaagctcccaccccctgcttttcttcccctagctcttcactactctggtcgtctccggctcgcggctcggcctccgcctcggcgtgtaacaaaaatgcccatcgtgttggttttttttctttcgatgatctccctgtctgtaaatttcctaccttttgctttcggtaggtaaaaaagaacacgaaaacttgcgatgcctatagttcaatttgcgttttgttggatgctgtgaacgcacgaaattgcgatctcggatactgggacccactgagttcttgtttgttcatgcaaattgctgccgctgtggcgctgtcccgttaaaaaaccaataccggaggacctggtcgccgccggcgcgagcctcgctacgcgccgtggccgcagcatccgacgtggtgttcaccatggtcggtaaccccggcgacgtccgtgcggtggtcctggagcacggtatgccgatatggtgccctcgcgggcctcgccatcgaagcgccgacatccgggggcgacgtcggcgcccaggacggcacgctcttcgcccatgcggcgacgaggccgtagtcgcttggctcgagccgctcttcaccttcctcggcagggcgacccgcatggggcagctggcagagcagcaagatcgccatccagatcgcggtgggcctcggcgagttcgtggtcttcgcccacctggcggggctcaacgcgccgctgttcctcctcgcggtgtccaagagcgcggctggatcgcgcgtcacgacttcttcggcaactgattgctccgccgcgagttcacgtcagaggtgggtggcagcgtgccgtacatcgtcaaagacctcggcatggcgctcgaggtcggggacggcggggaggagtccaacgtgctgcctggagcggcgctgtaccggcagatgttctcggcgatggtggccaatggcgacggcgacttgagcttgtagggactgatcaccgccgttgagcgcctgaacggcattggcgagtagagcgcagggctggtctccaaaatgcagcactggacttgaaaacttgtgtattttttctgaataaaatttggggccatgtcaatttgtcaaatcatgacggggctttacgtccgtcgtgtatcgcgtttgacttgctgattttcgtttgtcattttgccagacactaaaaaacatgtggattgtgaaataacaccgcagaaacaactgcaactacctcaactgaattatctgacggctgagggctagttcgcgaggactgtaaacaccaaggggcttcctgctgaaccgtgcaagatttttgacgtgtcagacagatatttgcaccgtcgacctctgctgctggcctgtcgctgcgtagtgtagtgtcatcttatctcttcctcctaccttcactctcaaaatcttcagggagtcgtagaggagcagcaggtgcaccaaaaggatggcagcgccaggctccctgcgacttctccaggccccgtccttcgctgcggccaagtgccagccggtgggtggccgggcatccgcgcggcgagcgccacggccactgttcgccgtgcgcgcctcggctgctgacgccgccaacagggatgccgtgctcaaggccttccgcgagaacagggctctcaagataatttccggtcttcagaactttgacaggagcagtgttgcatctgttgtcacagctgcagataaggtgtggacaatacatctacctgtcaacgcttactggtgttactatttcgttcttgcagacttctttgagactatatgatgtgaaaaagagaggtctctgttacactgcttttgtctgttgttttcttctagagggaggtgcaacacatgttgacatagcatgtgacaaggacttagtaaagcttgccatggatcttaccaaccttccgatctgtgtctcatctgtagatccttcagcgttccattctgcagtacaagcaggagctaaaatggttgagattggaaactatgattctttttatgagatgggcattgagttctcctctgagcagatactgaagctaacaagggaaacaaggaagatgcttccagacatcaccttatcagtaacagttcctcacacacttagtttgccagatcagatgagactagcagagctactcgaagaggaaggagctgatataatccaaactgagggtgggaaatgttctagcccgacaaaacctggagtgcttggattgattgaaaaggcaacaccaacactcgccgcagcatactccatctctcgggctgttagtattccagtgatgtgctcgtcagggttaagctcggtgactgcaccaatggcagtaactgcaggagctgctggagttggagtcggttctgctattaacaaactcaacgacgttgtggcaatgatcgctgaggtgagaagcattgcgcaagcaatggagcttgcgccaagaatcgtgtccgaaaccctgagaacaattagttactagtggctaggaatacccttgccatttctgagcaaacttgagcagtcaataagaaagcaaaagagaggcatcgactctgcattttattctctctacgctgtcttttgcctgtggcagtgaatagcgcattagcatcatagaagtattagcttgatcaatggaagttgttcatgcgcttcttcatcgctgcaagtgttgtcatcttgtcgaactcacaataagcttagataagtgctgggtttgtgggaacatcgtttgtgcaatataaatgagatcttgcacctacaaatttgactcttc

SEQ ID NO: 63767 - DNA, 3655 bp, Zea Mays
gctcccggcagcacgtcgcctcgccccccactcccacgtctctgtccctctccctgccctcccccgtcttcccaaccaccacccacccgttcttttccagccaaaccaacgcacgcacacggcacaccctccttctggcagcagagcggcagccaatggccatcgagacggacgcggcggcggcgagggcgagggcgtcgggctcggtttcagatacggcgcccatgtccccggccgccgaggcggcagcggctgcggcggccccgggcccggcgcgcccgcgcgggtggctgaggaagctcatccccacggactacctgccccggagcagccggcgctggaggctggccgccccgtccgccgccggcgcgtccaggctcgcctcgtcgctctcccgctccctcaggtggaagcgcctcccggggctctcctccctcaccctgcgcagcggctccgcggcggcggcagtggacgccgtcgcgttccgcgtcatgtacgtcgtcgaggccgtcgtgctgggcctcgcgctctcctgcttcttcctctgctgcggctgccacctctaagctcccaccccctgcttttcttcccctagctcttcactactctggtcgtctccggctcgcggctcggcctccgcctcggcgtgtaacaaaaatgcccatcgtgttggttttttttctttcgatgatctccctgtctgtaaatttcctaccttttgctttcggtaggtaaaaaagaacacgaaaacttgcgatgcctatagttcaatttgcgttttgttggatgctgtgaacgcacgaaattgcgatctcggatactgggacccactgagttcttgtttgttcatgcaaattgctgccgctgtggcgctgtcccgttaaaaaaccaataccggaggacctggtcgccgccggcgcgagcctcgctacgcgccgtggccgcagcatccgacgtggtgttcaccatggtcggtaaccccggcgacgtccgtgcggtggtcctggagcacggtatgccgatatggtgccctcgcgggcctcgccatcgaagcgccgacatccgggggcgacgtcggcgcccaggacggcacgctcttcgcccatgcggcgacgaggccgtagtcgcttggctcgagccgctcttcaccttcctcggcagggcgacccgcatggggcagctggcagagcagcaagatcgccatccagatcgcggtgggcctcggcgagttcgtggtcttcgcccacctggcggggctcaacgcgccgctgttcctcctcgcggtgtccaagagcgcggctggatcgcgcgtcacgacttcttcggcaactgattgctccgccgcgagttcacgtcagaggtgggtggcagcgtgccgtacatcgtcaaagacctcggcatggcgctcgaggtcggggacggcggggaggagtccaacgtgctgcctggagcggcgctgtaccggcagatgttctcggcgatggtggccaatggcgacggcgacttgagcttgtagggactgatcaccgccgttgagcgcctgaacggcattggcgagtagagcgcagggctggtctccaaaatgcagcactggacttgaaaacttgtgtattttttctgaataaaatttggggccatgtcaatttgtcaaatcatgacggggctttacgtccgtcgtgtatcgcgtttgacttgctgattttcgtttgtcattttgccagacactaaaaaacatgtggattgtgaaataacaccgcagaaacaactgcaactacctcaactgaattatctgacggctgagggctagttcgcgaggactgtaaacaccaaggggcttcctgctgaaccgtgcaagatttttgacgtgtcagacagatatttgcaccgtcgacctctgctgctggcctgtcgctgcgtagtgtagtgtcatcttatctcttcctcctaccttcactctcaaaatcttcagggagtcgtagaggagcagcaggtgcaccaaaaggatggcagcgccaggctccctgcgacttctccaggccccgtccttcgctgcggccaagtgccagccggtgggtggccgggcatccgcgcggcgagcgccacggccactgttcgccgtgcgcgcctcggctgctgacgccgccaacagggatgccgtgctcaaggccttccgcgagaacagggctctcaaggttcatctcctttacatgtctccttcaacgtactaatcccattgatgtcagcgtttaggcatcattcggaagctgaaaacgaggctaaactgctttctggttaataaagaatgtgagaaattggtgcgttccaaaatccaaacacgcatgcccctgggatgctgcaagtttcacatgttactattttccctggggtagagatctgtggatgtactgccgtcttcggagtggacagttgaaggagcctttcttttgtttggatgagttatccttacttagcgatgattagctgatagccactggctcttgaactgtgcagataatttccggtcttcagaactttgacaggagcagtgttgcatctgttgtcacagctgcagataaggtgtggacaatacatctacctgtcaacgcttactggtgttactatttcgttcttgcagacttctttgagactatatgatgtgaaaaagagaggtctctgttacactgcttttgtctgttgttttcttctagagggaggtgcaacacatgttgacatagcatgtgacaaggacttagtaaagcttgccatggatcttaccaaccttccgatctgtgtctcatctgtagatccttcagcgttccattctgcagtacaagcaggagctaaaatggttgagattggaaactatgattctttttatgagatgggcattgagttctcctctgagcagatactgaagctaacaagggaaacaaggaagatgcttccagacatcaccttatcagtaacagttcctcacacacttagtttgccagatcagatgagactagcagagctactcgaagaggaaggagctgatataatccaaactgagggtgggaaatgttctagcccgacaaaacctggagtgcttggattgattgaaaaggcaacaccaacactcgccgcagcatactccatctctcgggctgttagtattccagtgatgtgctcgtcagggttaagctcggtgactgcaccaatggcagtaactgcaggagctgctggagttggagtcggttctgctattaacaaactcaacgacgttgtggcaatgatcgctgaggtgagaagcattgcgcaagcaatggagcttgcgccaagaatcgtgtccgaaaccctgagaacaattagttactagtggctaggaatacccttgccatttctgagcaaacttgagcagtcaataagaaagcaaaagagaggcatcgactctgcattttattctctctacgctgtcttttgcctgtggcagtgaatagcgcattagcatcatagaagtattagcttgatcaatggaagttgttcatgcgcttcttcatcgctgcaagtgttgtcatcttgtcgaactcacaataagcttagataagtgctgggtttgtgggaacatcgtttgtgcaatataaatgagatcttgcacctacaaatttgactcttc

SEQ ID NO: 63768 - DNA, 3522 bp, Zea Mays
gctcccggcagcacgtcgcctcgccccccactcccacgtctctgtccctctccctgccctcccccgtcttcccaaccaccacccacccgttcttttccagccaaaccaacgcacgcacacggcacaccctccttctggcagcagagcggcagccaatggccatcgagacggacgcggcggcggcgagggcgagggcgtcgggctcggtttcagatacggcgcccatgtccccggccgccgaggcggcagcggctgcggcggccccgggcccggcgcgcccgcgcgggtggctgaggaagctcatccccacggactacctgccccggagcagccggcgctggaggctggccgccccgtccgccgccggcgcgtccaggctcgcctcgtcgctctcccgctccctcaggtggaagcgcctcccggggctctcctccctcaccctgcgcagcggctccgcggcggcggcagtggacgccgtcgcgttccgcgtcatgtacgtcgtcgaggccgtcgtgctgggcctcgcgctctcctgcttcttcctctgctgcggctgccacctctaagctcccaccccctgcttttcttcccctagctcttcactactctggtcgtctccggctcgcggctcggcctccgcctcggcgtgtaacaaaaatgcccatcgtgttggttttttttctttcgatgatctccctgtctgtaaatttcctaccttttgctttcggtaggtaaaaaagaacacgaaaacttgcgatgcctatagttcaatttgcgttttgttggatgctgtgaacgcacgaaattgcgatctcggatactgggacccactgagttcttgtttgttcatgcaaattgctgccgctgtggcgctgtcccgttaaaaaaccaataccggaggacctggtcgccgccggcgcgagcctcgctacgcgccgtggccgcagcatccgacgtggtgttcaccatggtcggtaaccccggcgacgtccgtgcggtggtcctggagcacggtatgccgatatggtgccctcgcgggcctcgccatcgaagcgccgacatccgggggcgacgtcggcgcccaggacggcacgctcttcgcccatgcggcgacgaggccgtagtcgcttggctcgagccgctcttcaccttcctcggcagggcgacccgcatggggcagctggcagagcagcaagatcgccatccagatcgcggtgggcctcggcgagttcgtggtcttcgcccacctggcggggctcaacgcgccgctgttcctcctcgcggtgtccaagagcgcggctggatcgcgcgtcacgacttcttcggcaactgattgctccgccgcgagttcacgtcagaggtgggtggcagcgtgccgtacatcgtcaaagacctcggcatggcgctcgaggtcggggacggcggggaggagtccaacgtgctgcctggagcggcgctgtaccggcagatgttctcggcgatggtggccaatggcgacggcgacttgagcttgtagggactgatcaccgccgttgagcgcctgaacggcattggcgagtagagcgcagggctggtctccaaaatgcagcactggacttgaaaacttgtgtattttttctgaataaaatttggggccatgtcaatttgtcaaatcatgacggggctttacgtccgtcgtgtatcgcgtttgacttgctgattttcgtttgtcattttgccagacactaaaaaacatgtggattgtgaaataacaccgcagaaacaactgcaactacctcaactgaattatctgacggctgagggctagttcgcgaggactgtaaacaccaaggggcttcctgctgaaccgtgcaagatttttgacgtgtcagacagatatttgcaccgtcgacctctgctgctggcctgtcgctgcgtagtgtagtgtcatcttatctcttcctcctaccttcactctcaaaatcttcagggagtcgtagaggagcagcaggtgcaccaaaaggatggcagcgccaggctccctgcgacttctccaggccccgtccttcgctgcggccaagtgccagccggtgggtggccgggcatccgcgcggcgagcgccacggccactgttcgccgtgcgcgcctcggctgctgacgccgccaacagggatgccgtgctcaaggccttccgcgagaacagggctctcaaggttcatctcctttacatgtctccttcaacgtactaatcccattgatgtcagcgtttaggcatcattcggaagctgaaaacgaggctaaactgctttctggttaataaagaatgtgagaaattggtgcgttccaaaatccaaacacgcatgcccctgggatgctgcaagtttcacatgttactattttccctggggtagagatctgtggatgtactgccgtcttcggagtggacagttgaaggagcctttcttttgtttggatgagttatccttacttagcgatgattagctgatagccactggctcttgaactgtgcagataatttccggtcttcagaactttgacaggagcagtgttgcatctgttgtcacagctgcagataagggaggtgcaacacatgttgacatagcatgtgacaaggacttagtaaagcttgccatggatcttaccaaccttccgatctgtgtctcatctgtagatccttcagcgttccattctgcagtacaagcaggagctaaaatggttgagattggaaactatgattctttttatgagatgggcattgagttctcctctgagcagatactgaagctaacaagggaaacaaggaagatgcttccagacatcaccttatcagtaacagttcctcacacacttagtttgccagatcagatgagactagcagagctactcgaagaggaaggagctgatataatccaaactgagggtgggaaatgttctagcccgacaaaacctggagtgcttggattgattgaaaaggcaacaccaacactcgccgcagcatactccatctctcgggctgttagtattccagtgatgtgctcgtcagggttaagctcggtgactgcaccaatggcagtaactgcaggagctgctggagttggagtcggttctgctattaacaaactcaacgacgttgtggcaatgatcgctgaggtgagaagcattgcgcaagcaatggagcttgcgccaagaatcgtgtccgaaaccctgagaacaattagttactagtggctaggaatacccttgccatttctgagcaaacttgagcagtcaataagaaagcaaaagagaggcatcgactctgcattttattctctctacgctgtcttttgcctgtggcagtgaatagcgcattagcatcatagaagtattagcttgatcaatggaagttgttcatgcgcttcttcatcgctgcaagtgttgtcatcttgtcgaactcacaataagcttagataagtgctgggtttgtgggaacatcgtttgtgcaatataaatgagatcttgcacctacaaatttgactcttc

SEQ ID NO: 63769 - DNA, 739 bp, Zea Mays
gcatatactagtacaacgtctcgcagacatgcgcgctggactttggcggagaagtcaaccgaggagatgacccctgctggtctagtccaaagggtgttccttttttttccccgccgtggtctattgttcttgtcctcttttggaccagttccatgagactgacgaggcatatcaaagcgttggaagctttctcgggcgggatcttctgcgtcgtcgtgtgatccatccactcactggtggaaaagggtgtttattcttgttgttaaagggcggaccaggaacctccctgactccagctccaggcaaggctgggcagctaggccttttgcagggaatctttgtgcaggagcccccatccccatctccttgcaggttcacatcgcaatgctggggcctggcctggcctggcctgggtggcttcaaatgattttttgcctctacgtacacgtaggatgtatgatgcaaacacttctttttgaagtttgatgatgcggcttgtttctgcgtgtgtatgcaggcgtttgtctctcgatcggctgtgtttctttcagttcaccagaatgttgacgaaaactgtactgtatagcctctctttttttttcttatccccgtgggtaaaaacgaaacggattaagctgtaagattcagtcaggaaaaggaagtggctggtcatctctctccggtttgacatatctggagtctggagaataacgttgaaagttttttttttgttcttgtc

SEQ ID NO: 63770 - DNA, 627 bp, Zea Mays
aaaaaacctgcttcatcaaggctcctgccgatagatcagacgtcattgtacgagttttcaatttaaaactcaatgaattattacaagacattagatctggatctatatttgggctatttgttgcagttcttcacactattgagttccaaaagagaggtttaccacatgctcatataatattttgggtatccaatgaaacttctcaatcaagtgttgaatcaatagactctctaatcaccgcagaaattccagacccagaaattgatcccttaggatatatcttggttgcagaacatatgatacatggtccttgcggggattataataaaaatgcaccttgcatgaaagatggaagatgtaccaaaaaattcccaaaaaaaatccaagaagaaactaccattgatggaaatgggtttgttctctatagacgaagaaatactggtcgatatgtcacgaaatcaggcatcagacttgataataaatatgttgtaccttcaaatttattgttgctaaaaaaatacatgggacatataaatgttgaatggtgtaacaagactattttcatcaagtatctttttaaatatgtcaccaaaggcccagatcgaagcaaagtttttcttcaacgtg

SEQ ID NO: 63771 - DNA, 791 bp, Zea Mays
attaagttctacatatctggccagggagaaaacctgcttcatcaagatacatttcattatagaatccttttcataaacagtgtgctttactatctattgctttgtacatttactctaaacattttgtatgcttgcatttggtaacttcccaatgcaagtattggtcatccgtttaattacatttcccaaatacatatgtctatctgctctcgctattagcttgctgctatgtcattattaatataatttgatacaaaattataacttgggtgtgtagtggtactgatcttttccccatcctgcctacttcaccatataatcgaatgtgcatttactgcttacagtaaattataatcttaggtttggaagcacgagcttcataaaattctacatattcgctcagggaaataaaatctgtttcatcaagaaatatttaattatacattccatttcctaatagtgtcctccgatataactttttcccattagtggtactattacgtatttcttctttgcataactatccattgctttgcacatttactctaaacattatgtgtgcttactgcattacctctaaacaatacgttcgttttttaatctatagtaccttatcacatatatgtccatgcattgactgctaactgttttgttagtttcaatttatagaaaatccttatctttggtttggaaaaaggaagggcttcattaacttctacatatctggtcagggaaaaaacctgcttcatcaagaatattattgctaccaatttcactatagaagaaatcag

SEQ ID NO: 63772 - DNA, 1825 bp, Zea Mays
agaaaacctgcttcatcaagatacatttcattatagaatccttttcataaacagtgtgctttactatctattgctttgtacatttactctaaacattttgtatgcttgcatttggtaacttcccaatgcaagtattggtcatccgtttaattacatttcccaaatacatatgtctatctgctctcgctattagcttgctgctatgtcattattaatataatttgatacaaaattataacttgggtgtgtagtggtactgatcttttccccatcctgcctacttcaccatataatcgaatgtgcatttactgcttacagtaaattataatcttaggtttggaagcacgagcttcataaaattctacatattcgctcagggaaataaaatctgtttcatcaagaaatatttaattatacattccatttcctaatagtgtcctccgatataactttttcccattagtggtactattacgtatttcttctttgcataactatccattgctttgcacatttactctaaacattatgtgtgcttactgcattacctctaaacaatacgttcgttttttaatctatagtaccttatcacatatatgtccatgcattgactgctaactgttttgttagtttcaatttatagaaaatccttatctttggtttggaaaaaggaagggcttcattaacttctacatatctggtcagggaaaaaacctgcttcatcaaggtacatttcattatagaatccttttcataaatagtgtgctttactatctattgctttgtacatttactctaaacattctgtgtgcttgctgcattaccactggataaggcattcattttttgaatgtatagtacagatttgtccatggatttacggctcacagctttgctaatttcaatatacagtaaatccttatatttggtttgggaaaaaagatagagagctgcattagcttctacatatctggtcaaagaaaaaaatgcttgatcaagttacatttcattatataatccttttccataaacagtgtggtttacttaaatgaatattcagttattatgatcctttgcttagtaatttgttatgtttttacaaattcacattaaatcctaatcattggataggaaacacgaccttagctaacttctaaatatttgctcggaatacattagcacaaatttttatatgcatttgctactactgtaagcttattaacaaactaaatatacaaataaaagagaaaatagacataaactacataggtacaactagaaaactactctaaattttaaaaaaattcagtcaattttttttctgagatgcaggccatgggcaacgagaatcacacaccttctaacaggtcctctgaaataatacaacagtcagcatcaactgctatgtttactcctaaaaatatttgcaatgttgtagtatccaagaatgccacacttgcacaccaaaatcgaaagcgggcacttgaacaaaaacgtttgctaaccagaggtaactgagccaaaaaaaaatttgaaaccaagttcatagtattttaacgtcatagtctttgatttaattaattgctgcgcaggacctagacatagcattaacacacccatgaccagtgtttatttctcttcagaatatataaatgcccttaaaggtattggaatagtattcttaaaaactttacacttttttatttttcttcccataaccaaccaccgacatatattgtaacaaatgcatcttacagcttcatatcgagataggtcccatcttggaacaccagactatgaatgccaacattgccatgctttattt

SEQ ID NO: 63773 - DNA, 1106 bp, Zea Mays
gagcaggcattggctgatccctactttaaaggcattgcaaaagtggagagggaaccatcctgtcagccaatttcgaaaatggaatttgagtttgaacagaagtttaccaaagaggatgtcaaggaacttatattccaggagatactgcagtaccatcctcaacttctgaaggactacaagaacggctctgaaaagacgagttttctatatcccagtgctgttgacaggttccgtaggcaatttgctagcttagaagaaaatggagagaggaatgccacgcttgacaggaaacatgtttctctcccaaggacaacaaccgttcactccactccaattcctgcaaaggaaggtccagcagcaacctcccagattgctcaaaggattccagcagctagaccaggaagagtggtaggcccagtattgccattcgagagcgcaagcgtcaccgatcaacacatcgcccgacgggtggcaaggaacccagctgttcctccagcaacgaacacctcgtcagtctactgctaccacctcaagtcggacagctccgacaggcaggagcatcatctagagcgtgagaaagatcgaaggcagtataggccagggcagcatttcatggatgccaaggtagcccctgagatgggccgggatatacgcccgtcacagtactatgtctcaaggggcttgcccaaagctgatctaacagacagggccaccctccataggagcgctcttcatggcgttgctcccttcaatggcatcgcagcggccgctggtggttacagccaggccggtgttcttcactatggagttacaagtttgtactaagagcgatgcccttggggagggtaatataagatggggaaaccggagtgcagatccagctgcccccttcccactcttgcactgcctggaaaatcggagcacgcgcgtacctgatccacgatgcatgtgtccggaaaggattttcaggctgggaactggcgagtgtcaccttcattgctcctgtttgaatgagctatggggatggtcttgggccaacgttgtgatctgaagtgaaaagcaaggtggtcgacaattcggatgcaaatcatggctgtagatgcgag

SEQ ID NO: 63774 - DNA, 635 bp, Zea Mays
gcaatactgctgaatttcttggcttcttccgagtcacatgtcattgcttacgttctgcattagaactcgccagagatggagttcttcagcgagtacggcgatgccaacagatacaagatccaggagatcattggcaaagggagctatggggtcgtctgttcggctattgaccaacatacgggcgagaaggtagccatcaagaagatacagaacatcttcgagcacctgtcggacgctgccaggatcctccgcgagatcaagcttctccggctgctgaggcaccccgatatcgtcgagatcaaacatgttatgctgcccccgtcgaggagggactatagagatatttatgttgtgtttgagctgatggataccgaccttcaccaagttattaaggctaacgatgacttgacgaaggaacaccatcagttctttctctatcagatgctgcgtgcattgaaatatattcatactgctaatgtttatcatcgtgatttaaagccaaaaaatatattagcaaatgctaactgcaaactcaagatatgtgattttgggctagcaagggttgcatttaatgactctcataccacagttttctggacggtatgttatttttacagtgctactatggtcgatcc

SEQ ID NO: 63775 - DNA, 624 bp, Zea Mays
ggaatttctttggccggtggcaaaaggccagcctggggctgggtcagagcggaactcgccagagatggagttcttcagcgagtacggcgatgccaacagatacaagatccaggagatcattggcaaagggagctatggggtcgtctgttcggctattgaccaacatacgggcgagaaggtagccatcaagaagatacagaacatcttcgagcacctgtcggacgctgccaggatcctccgcgagatcaagcttctccggctgctgaggcaccccgatatcgtcgagatcaaacatgttatgctgcccccgtcgaggagggactatagagatatttatgttgtgtttgagctgatggataccgaccttcaccaagttattaaggctaacgatgacttgacgaaggaacaccatcagttctttctctatcagatgctgcgtgcattgaaatatattcatactgctaatgtttatcatcgtgatttaaagccaaaaaatatattagcaaatgctaactgcaaactcaagatatgtgattttgggctagcaagggttgcatttaatgactctcataccacagttttctggacggtatgttatttttacagtgctactatggtcgatcc

SEQ ID NO: 63776 - DNA, 1166 bp, Zea Mays
gtgcgcgtaaatataaccccgcaacaagtgggacgccgcttctgctcctccgtcgtccgctcctctcctctcccccacccgtcgtctccttgtcgtccttgcctgcggattggggcggcacggcagtcggcacagcctctcgcttctcccgcgcgcgagccctttctccacggccgcggcatgacgttgccggaggcgaatgccggtgcgacgccgcagaggaagaagtgctgcctgcctggatggggattaattagctccagcggagcgccgtgtgccgggcagcggcgcccgtgtatgacgactcactggacaaggacccgcgtctccggattttggcgcggcaggagctgcgggatttgggggatctggatttcgaggacaaccccctcccctcgtcttatccgaatcctcggaggagccacctttaaagctaggttttcagtttcaaatccccacccctcaaaaatcacgccatcgttgtaagcgggagcgctgaattctttctttagtaggaatattaagtacctcgcgacgggacgggtggtcgaggagtcgtcctggtaaacgcgggtattggattcggctgacttgaactcgccagagatggagttcttcagcgagtacggcgatgccaacagatacaagatccaggagatcattggcaaagggagctatggggtcgtctgttcggctattgaccaacatacgggcgagaaggtagccatcaagaagatacagaacatcttcgagcacctgtcggacgctgccaggatcctccgcgagatcaagcttctccggctgctgaggcaccccgatatcgtcgagatcaaacatgttatgctgcccccgtcgaggagggactatagagatatttatgttgtgtttgagctgatggataccgaccttcaccaagttattaaggctaacgatgacttgacgaaggaacaccatcagttctttctctatcagatgctgcgtgcattgaaatatattcatactgctaatgtttatcatcgtgatttaaagccaaaaaatatattagcaaatgctaactgcaaactcaagatatgtgattttgggctagcaagggttgcatttaatgactctcataccacagttttctggacggtatgttatttttacagtgctactatggtcgatcc

SEQ ID NO: 63777 - DNA, 879 bp, Zea Mays
gtgcgcgtaaatataaccccgcaacaagtgggacgccgcttctgctcctccgtcgtccgctcctctcctctcccccacccgtcgtctccttgtcgtccttgcctgcggattggggcggcacggcagtcggcacagcctctcgcttctcccgcgcgcgagccctttctccacggccgcggcatgacgttgccggaggcgaatgccggtgcgacgccgcagaggaagaaggaatattaagtacctcgcgacgggacgggtggtcgaggagtcgtcctggtaaacgcgggtattggattcggctgacttgaactcgccagagatggagttcttcagcgagtacggcgatgccaacagatacaagatccaggagatcattggcaaagggagctatggggtcgtctgttcggctattgaccaacatacgggcgagaaggtagccatcaagaagatacagaacatcttcgagcacctgtcggacgctgccaggatcctccgcgagatcaagcttctccggctgctgaggcaccccgatatcgtcgagatcaaacatgttatgctgcccccgtcgaggagggactatagagatatttatgttgtgtttgagctgatggataccgaccttcaccaagttattaaggctaacgatgacttgacgaaggaacaccatcagttctttctctatcagatgctgcgtgcattgaaatatattcatactgctaatgtttatcatcgtgatttaaagccaaaaaatatattagcaaatgctaactgcaaactcaagatatgtgattttgggctagcaagggttgcatttaatgactctcataccacagttttctggacggtatgttatttttacagtgctactatggtcgatcc

SEQ ID NO: 63778 - DNA, 1100 bp, Zea Mays
ccaatccgcatcacagcttgccacttcagactcctctgcgctccatccctctgcactccggtccgcgcgagacgagcagcttctcccagacgctagacacgccaccgcatcgtctgcgccgcgagatcgagaatgtccatctctatgcggctcgcgatccctgctcctgccgtcaccgccgccgcgccgacgcggctgagggtgcgagcggcagcggcggggaaccgcggctctctctccgtcgcgcgcgccgccgtacgggcggagacgggcgcgctcaggggatgcgcctcgctgccaaagaagccgctgggagcggcccagccgtgccggagcagaggggccgccgccgtgtgtcactcgtcggcgcacctcagcgcgcgcaccatccagtggatctccgccggagccagcgcagtgctattagttgctaaaggcactgccatacacaaatctttccttgtgccattttttgctcttcaggcaccttgcagcataatctcatggatcaagtgaactggagcttccactgtcaacaatgctgcttgtgagtgttgctccttaccaattcatggatctgaggggaactcaaggtggtgccgtactgtcactggccatagctgcgtatctcgccttccagcacttcactagggtgggcggcccaggcaaagccttcgagcagggatccattgttgcgaccttggccatcatctgcatcatgattgtgcccttgatgcttctattctgatttgcatttagttggaatgaatttgcttctcattatgtgcgtatagaaggacaaataaatttaaccttgtaatgcagcatccgagttctctttcccaaaacgtatgcactgatatatccttccctgttagtgctcttcggtggttattgctcttcggtggttattgagttctctcagcatgtttattctcttgttggatcttgcatggactataatttggaagccacaaaaccacctgagggcttgtttggacaatctcggattgaagtagattgagctggtatgggatgtatcgaagtgtaatatgaactaatttctctttcaatcccttcaatacacctcaattcgctcc

SEQ ID NO: 63779 - DNA, 1765 bp, Zea Mays
tgccaatccgcatcacagcttgccacttcagactcctctgcgctccatccctctgcactccggtccgcgcgagacgagcagcttctcccagacgctagacacgccaccgcatcgtctgcgccgcgagatcgagaatgtccatctctatgcggctcgcgatccctgctcctgccgtcaccgccgccgcgccgacgcggctgagggtgcgagcggcagcggcggggaaccgcggctctctctccgtcgcgcgcgccgccgtacgggcggagacgggcgcgctcaggggatgcgcctcgctgccaaagaagccgctgggagcggcccagccgtgccggagcagaggggccgccgccgtgtgtcactcgtcggcgcacctcagcgcgcgcaccatccagtggatctccgccggagccagcgcagtgctattagttgctaaaggcactgccatacacaaatctttccttgtgccattttttgctcttcaggcaccttgcagcataatctcatggatcaagggtgactatggtcagtggactgcttttcttgctctgttggtgcgtctattcttcttcattccaggtgaactggagcttccactgtcaacaatgctgcttgtgagtgttgctccttaccaattcatggatctgaggtatggaagattttaacaatggccctgatgcatatcatgatgaagttttgtttacacaacttcttattaactaacgtaaagtcggttgtttagactactgctgctatagagacaaacattgtagaagcagtagaagccggtacggattaaagtcaaacgaacaaactaaaatacaagaacattttggttaaccaagtagtaaccattttttcattgtagtactgaactatgttatgtgtgaatagcaggaagcacttatgtctatatatcaataattgatatagaaccaatccagtttttttaagttgacaccctgatcagaagccatacaacataccttgaagccacattttctttgataaggacttttaacctacatgccactgagacattttttggggggtggggtggggacaccccgagacttgtagtggtagcatactttgaagtattatcatgctggctttcatattctcaagttcccttatgaaaactgcttaatttttccaggtaaaaatgcttattttcatgaactgaaaaatcattgtttttttgctcatgtatactgaatcctctgatttccaatttctggttacaggggaactcaaggtggtgccgtactgtcactggccatagctgcgtatctcgccttccagcacttcactagggtgggcggcccaggcaaagccttcgagcagggatccattgttgcgaccttggccatcatctgcatcatgattgtgcccttgatgcttctattctgatttgcatttagttggaatgaatttgcttctcattatgtgcgtatagaaggacaaataaatttaaccttgtaatgcagcatccgagttctctttcccaaaacgtatgcactgatatatccttccctgttagtgctcttcggtggttattgctcttcggtggttattgagttctctcagcatgtttattctcttgttggatcttgcatggactataatttggaagccacaaaaccacctgagggcttgtttggacaatctcggattgaagtagattgagctggtatgggatgtatcgaagtgtaatatgaactaatttctctttcaatcccttcaatacacctcaattcgctcc

SEQ ID NO: 63780 - DNA, 1570 bp, Zea Mays
gccactcccacgcccgcgcctttcactcgcggccgcttccctgccctgccaatccgcatcacagcttgccacttcagactcctctgcgctccatccctctgcactccggtccgcgcgagacgagcagcttctcccagacgctagacacgccaccgcatcgtctgcgccgcgagatcgagaatgtccatctctatgcggctcgcgatccctgctcctgccgtcaccgccgccgcgccgacgcggctgagggtgcgagcggcagcggcggggaaccgcggctctctctccgtcgcgcgcgccgccgtacgggcggagacgggcgcgctcaggggatgcgcctcgctgccaaagaagccgctgggagcggcccagccgtgccggagcagaggggccgccgccgtgtgtcactcgtcggcgcacctcagcgcgcgcaccatccagtggatctccgccggagccagcgcgacatcaggcgctacatttttttgctgaggaatctcagagtgctattagttgctaaaggcactgccatacacaaatctttccttgtgccattttttgctcttcaggcaccttgcagcataatctcatggatcaagggtgactatggtcagtggactgcttttcttgctctgttggtgcgtctattcttcttcattccaggtagagtagcaaacatggttcatataagagtactttttagattcattctgtctgctaataatcaaatgtgtacttcttttttgagataattgaatactatgtttttcgaaggaacaaagtagaccatgtgcccaacctgaacaaattttattacttctttgaaatcattcatttgcatgattcaagaaaaaaggaaaatggagattataaagtatctattgtaatcgtatgatagcaaacttgaaggcagttcacctctttgtagcatcggttctgaaccgatatatgtttaggtctacccagttgtttattattgtaggtgaactggagcttccactgtcaacaatgctgcttgtgagtgttgctccttaccaattcatggatctgaggggaactcaaggtggtgccgtactgtcactggccatagctgcgtatctcgccttccagcacttcactagggtgggcggcccaggcaaagccttcgagcagggatccattgttgcgaccttggccatcatctgcatcatgattgtgcccttgatgcttctattctgatttgcatttagttggaatgaatttgcttctcattatgtgcgtatagaaggacaaataaatttaaccttgtaatgcagcatccgagttctctttcccaaaacgtatgcactgatatatccttccctgttagtgctcttcggtggttattgctcttcggtggttattgagttctctcagcatgtttattctcttgttggatcttgcatggactataatttggaagccacaaaaccacctgagggcttgtttggacaatctcggattgaagtagattgagctggtatgggatgtatcgaagtgtaatatgaactaatttctctttcaatcccttcaatacacctcaattcgctcc

SEQ ID NO: 63781 - DNA, 2096 bp, Zea Mays
cggcccctcgtggacgggatggcgcgaggcccacgggctccacgtgtccgtccggccactcccacgcccgcgcctttcactcgcggccgcttccctgccctgccaatccgcatcacagcttgccacttcagactcctctgcgctccatccctctgcactccggtccgcgcgagacgagcagcttctcccagacgctagacacgccaccgcatcgtctgcgccgcgagatcgagaatgtccatctctatgcggctcgcgatccctgctcctgccgtcaccgccgccgcgccgacgcggctgagggtgcgagcggcagcggcggggaaccgcggctctctctccgtcgcgcgcgccgccgtacgggcggagacgggcgcgctcaggggatgcgcctcgctgccaaagaagccgctgggagcggcccagccgtgccggagcagaggggccgccgccgtgtgtcactcgtcggcgcacctcagcgcgcgcaccatccagtggatctccgccggagccagcgcagtgctattagttgctaaaggcactgccatacacaaatctttccttgtgccattttttgctcttcaggcaccttgcagcataatctcatggatcaagggtgactatggtcagtggactgcttttcttgctctgttggtgcgtctattcttcttcattccaggtagagtagcaaacatggttcatataagagtactttttagattcattctgtctgctaataatcaaatgtgtacttcttttttgagataattgaatactatgtttttcgaaggaacaaagtagaccatgtgcccaacctgaacaaattttattacttctttgaaatcattcatttgcatgattcaagaaaaaaggaaaatggagattataaagtatctattgtaatcgtatgatagcaaacttgaaggcagttcacctctttgtagcatcggttctgaaccgatatatgtttaggtctacccagttgtttattattgtaggtgaactggagcttccactgtcaacaatgctgcttgtgagtgttgctccttaccaattcatggatctgaggtatggaagattttaacaatggccctgatgcatatcatgatgaagttttgtttacacaacttcttattaactaacgtaaagtcggttgtttagactactgctgctatagagacaaacattgtagaagcagtagaagccggtacggattaaagtcaaacgaacaaactaaaatacaagaacattttggttaaccaagtagtaaccattttttcattgtagtactgaactatgttatgtgtgaatagcaggaagcacttatgtctatatatcaataattgatatagaaccaatccagtttttttaagttgacaccctgatcagaagccatacaacataccttgaagccacattttctttgataaggacttttaacctacatgccactgagacattttttggggggtggggtggggacaccccgagacttgtagtggtagcatactttgaagtattatcatgctggctttcatattctcaagttcccttatgaaaactgcttaatttttccaggggaactcaaggtggtgccgtactgtcactggccatagctgcgtatctcgccttccagcacttcactagggtgggcggcccaggcaaagccttcgagcagggatccattgttgcgaccttggccatcatctgcatcatgattgtgcccttgatgcttctattctgatttgcatttagttggaatgaatttgcttctcattatgtgcgtatagaaggacaaataaatttaaccttgtaatgcagcatccgagttctctttcccaaaacgtatgcactgatatatccttccctgttagtgctcttcggtggttattgctcttcggtggttattgagttctctcagcatgtttattctcttgttggatcttgcatggactataatttggaagccacaaaaccacctgagggcttgtttggacaatctcggattgaagtagattgagctggtatgggatgtatcgaagtgtaatatgaactaatttctctttcaatcccttcaatacacctcaattcgctcc

SEQ ID NO: 63782 - DNA, 1067 bp, Zea Mays
gtaaattctatagataaagagcagggagcaagggaggaaatatgtgcgtccacgtcagcttaaattttttcagccattggatagtctgtcaacggttgtgaatgcatcgcacggtcagggacgggaagcttcccgtagcagctaccacacagtcaaccggatacttccaggtccttggactccttgcatatcggtcagtttgccgtcagaacaaggagaaaaaaaggttccggtcttcatcccttccatttccaaaggacgacgctctcaccattcacgaacggcgactgcggatcgatcgtgcgtcgtctcctgcgccggcctcccttccagtcaggttcaaacaagggacgatacgcatcggacaagaaatggacatcaaatcctccgagaactaaagtttcactcagatcttcgtcgaccttttgagttgcacaatgtctattttgcaacatatgtataattatatatgatgacctactcagctctttgaaaacaatttatgtaaatataacagcttaattctacgtagtggacaaaaatgttgactctgattacagctcagataactctatttcatataaacatatagcatctgcagtaattaaattagaaaaaatttctaacgcgcgcagggcgcgcgccagtgactagtatttgttaggtcctcgcagatgctagcaagatgatagtgttgtagcatggaggaccattgtctctagtgtctgaaatacgagactggcatgcaggtcgatgtctgagcacagagctcggaagatgtgcgtatcaaccaataggctgtggctgtgcctgcaagatgccctgaaggacgcgcttcttgaaaagtcagaactgcaaaggtgtatgggcgtggaaggtttgcatccatcggatgtgttggaccagcatgttgtagttttgattcgtgctgcgtgcatcgagccatcaggagatctctgcatcggaatcatatctgcacaaagccgtcggaaagatgcaggattcccactgatattttgaaccatcatccaggaggctagctactagaggagagtaaacgattgggg

SEQ ID NO: 63783 - DNA, 1366 bp, Zea Mays
cttggactccttgcatatcggtcagtttgccgtcagaacaaggagaaaaaaaggttccggtcttcatcccttccatttccaaaggacgacgctctcaccattcacgaacggcgactgcggatcgatcgtgcgtcgtctcctgcgccggcctcccttccagtcagatagtgtcttcagtgccatggcgccgctacgccagggagcaagtcggtccgccatggctgggtggggcatgtaccacggactgaaacataaaccaacgcaaatccaatgattgttcaaacaagggacgatacgcatcggacaagaaatggacatcaaatcctccgagaactaaagtcgatgtctgagcacagagctcggaagatgtgcgtatcaaccaataggctgtggctgtgcctgcaagatgccctgaaggacgcgcttcttgaaaagtcagaactgcaaaggtgcgcaaaccaaacctctgattgaatgcttccatggctcatagtccctagattcttgtctctatctgatagcccattgtttaccattgtccgttcatgtgtcagctttgctgcatctgatcacaatgatctctcagcttgttgtaacatcgtcttgaccattgtccattgcgctcatatcagctacatacatggttgaaaaacttgttataaaaatgtgccatttcaaacacggattcgattgtaatttgaaaagttaatttatactgtattatctgatgcatcattcactggagaatgggggataacaggattcgggctaagaacatccattcttttcaccgtgtatctctttgcaatctcagccattcgatctactatactatccatagaacatattccaaaggagataagcagccggtgcacgccccttgggagccaaaggaatatatctgtgtgggtatatgtagcttttcatctccaatgatcctggaaagggaattgactacattccaatcttttcccctgcttgttcatgaaattcacgatgtcacatgatttaccgccacttagatctgtcaaaaggctgccatttcttcgttcaggtgtatgggcgtggaaggtttgcatccatcggatgtgttggaccagcatgttgtagttttgattcgtgctgcgtgcatcgagccatcaggagatctctgcatcggaatcatatctgcacaaagccgtcggaaagatgcaggattcccactgatattttgaaccatcatccaggaggctaggtattagattttatatatacgtggtctgtattttgattaattaaatcaaatcaatcttatacctggtctgtgttttgtttaattaaatcaaataaatcttaagtttatattaaatgtgatggtgttattacc

SEQ ID NO: 63784 - DNA, 915 bp, Zea Mays
cttggactccttgcatatcggtcagtttgccgtcagaacaaggagaaaaaaaggttccggtcttcatcccttccatttccaaaggacgacgctctcaccattcacgaacggcgactgcggatcgatcgtgcgtcgtctcctgcgccggcctcccttccagtcagtttcagatagtgtcttcagtgccatggcgccgctacgccagggagcaagtcggtccgccatggctgggtggggcatgtaccacggactgaaacataaaccaacgcaaatccaatgattgtaaaacatcagtttcgatggacaaaaatattttcctatggaatatattacatactagactgactattaaattctaaaattcgtttacaggttcaaacaagggacgatacgcatcggacaagaaatggacatcaaatcctccgagaactaaagtttcactcagatcttcgtcgaccttttgagttgcacaatgtctattttgcaacatatgtcgatgtctgagcacagagctcggaagatgtgcgtatcaaccaataggctgtggctgtgcctgcaagatgccctgaaggacgcgcttcttgaaaagtcagaactgcaaaggtgtatgggcgtggaaggtttgcatccatcggatgtgttggaccagcatgttgtagttttgattcgtgctgcgtgcatcgagccatcaggagatctctgcatcggaatcatatctgcacaaagccgtcggaaagatgcaggattcccactgatattttgaaccatcatccaggaggctaggtattagattttatatatacgtggtctgtattttgattaattaaatcaaatcaatcttatacctggtctgtgttttgtttaattaaatcaaataaatcttaagtttatattaaatgtgatggtgttattacc

SEQ ID NO: 63785 - DNA, 1382 bp, Zea Mays
cttggactccttgcatatcggtcagtttgccgtcagaacaaggagaaaaaaaggttccggtcttcatcccttccatttccaaaggacgacgctctcaccattcacgaacggcgactgcggatcgatcgtgcgtcgtctcctgcgccggcctcccttccagtcagaccaaaaaaggctctgtggttagacttagacgcagaaatgcgaaaacggagaggcgagctcggcccgtgctcgctcacctcggcgcgacggagtgggcggggacggcgcccgctggcaggagtgagagtgggagctggggcgccgttgcttcgccggtgctcgcgacccaccgccgtgcagcatcgcttccgcctccgcttctcctgtcttaatataaagcatacaaacatgtaaaaaccacatatcattcgtttcagcaacaagtttcagatagtgtcttcagtgccatggcgccgctacgccagggagcaagtcggtccgccatggctgggtggggcatgtaccacggactgaaacataaaccaacgcaaatccaatgattgttcaaacaagggacgatacgcatcggacaagaaatggacatcaaatcctccgagaactaaagtttcactcagatcttcgtcgaccttttgagttgcacaatgtctattttgcaacatatgtataattatatatgatgacctactcagctctttgaaaacaatttatgtaaatataacagcttaattctacgtagtggacaaaaatgttgactctgattacagctcagataactctatttcatataaacatatagcatctgcagtaattaaattagaaaaaatttctaacgcgcgcagggcgcgcgccagtgactagtatttgttaggtcctcgcagatgctagcaagatgatagtgttgtagcatggaggaccattgtctctagtgtctgaaatacgagactggcatgcaggtcgatgtctgagcacagagctcggaagatgtgcgtatcaaccaataggctgtggctgtgcctgcaagatgccctgaaggacgcgcttcttgaaaagtcagaactgcaaaggtgtatgggcgtggaaggtttgcatccatcggatgtgttggaccagcatgttgtagttttgattcgtgctgcgtgcatcgagccatcaggagatctctgcatcggaatcatatctgcacaaagccgtcggaaagatgcaggattcccactgatattttgaaccatcatccaggaggctaggtattagattttatatatacgtggtctgtattttgattaattaaatcaaatcaatcttatacctggtctgtgttttgtttaattaaatcaaataaatcttaagtttatattaaatgtgatggtgttattacc

SEQ ID NO: 63786 - DNA, 2166 bp, Zea Mays
cttggactccttgcatatcggtcagtttgccgtcagaacaaggagaaaaaaaggttccggtcttcatcccttccatttccaaaggacgacgctctcaccattcacgaacggcgactgcggatcgatcgtgcgtcgtctcctgcgccggcctcccttccagtcaggtgtgttttttctcagattttttcttctcacgcaactttttctagaaaaaaatggcgttagggttttcgtcttccgttggaatgtctcttcctccttcttccgctgtctcactcgatcttccgatgaactgtctcttcctatttcttccgctgcgcaatcacggcacggagaaaaccagaccaaaaaaggctctgtggttagacttagacgcagaaatgcgaaaacggagaggcgagctcggcccgtgctcgctcacctcggcgcgacggagtgggcggggacggcgcccgctggcaggagtgagagtgggagctggggcgccgttgcttcgccggtgctcgcgacccaccgccgtgcagcatcgcttccgcctccgcttctcctgtcttaatataaagcatacaaacatgtaaaaaccacatatcattcgtttcagcaacaagtttcagatagtgtcttcagtgccatggcgccgctacgccagggagcaagtcggtccgccatggctgggtggggcatgtaccacggactgaaacataaaccaacgcaaatccaatgattgttcaaacaagggacgatacgcatcggacaagaaatggacatcaaatcctccgagaactaaagtttcactcagatcttcgtcgaccttttgagttgcacaatgtctattttgcaacatatgtataattatatatgatgacctactcagctctttgaaaacaatttatgtaaatataacagcttaattctacgtagtggacaaaaatgttgactctgattacagctcagataactctatttcatataaacatatagcatctgcagtaattaaattagaaaaaatttctaacgcgcgcagggcgcgcgccagtgactagtatttgttaggtcctcgcagatgctagcaagatgatagtgttgtagcatggaggaccattgtctctagtgtctgaaatacgagactggcatgcaggtcgatgtctgagcacagagctcggaagatgtgcgtatcaaccaataggctgtggctgtgcctgcaagatgccctgaaggacgcgcttcttgaaaagtcagaactgcaaaggtgcgcaaaccaaacctctgattgaatgcttccatggctcatagtccctagattcttgtctctatctgatagcccattgtttaccattgtccgttcatgtgtcagctttgctgcatctgatcacaatgatctctcagcttgttgtaacatcgtcttgaccattgtccattgcgctcatatcagctacatacatggttgaaaaacttgttataaaaatgtgccatttcaaacacggattcgattgtaatttgaaaagttaatttatactgtattatctgatgcatcattcactggagaatgggggataacaggattcgggctaagaacatccattcttttcaccgtgtatctctttgcaatctcagccattcgatctactatactatccatagaacatattccaaaggagataagcagccggtgcacgccccttgggagccaaaggaatatatctgtgtgggtatatgtagcttttcatctccaatgatcctggaaagggaattgactacattccaatcttttcccctgcttgttcatgaaattcacgatgtcacatgatttaccgccacttagatctgtcaaaaggctgccatttcttcgttcaggtgtatgggcgtggaaggtttgcatccatcggatgtgttggaccagcatgttgtagttttgattcgtgctgcgtgcatcgagccatcaggagatctctgcatcggaatcatatctgcacaaagccgtcggaaagatgcaggattcccactgatattttgaaccatcatccaggaggctaggtattagattttatatatacgtggtctgtattttgattaattaaatcaaatcaatcttatacctggtctgtgttttgtttaattaaatcaaataaatcttaagtttatattaaatgtgatggtgttattacc

SEQ ID NO: 63787 - DNA, 1617 bp, Zea Mays
cttggactccttgcatatcggtcagtttgccgtcagaacaaggagaaaaaaaggttccggtcttcatcccttccatttccaaaggacgacgctctcaccattcacgaacggcgactgcggatcgatcgtgcgtcgtctcctgcgccggcctcccttccagtcagtttcagatagtgtcttcagtgccatggcgccgctacgccagggagcaagtcggtccgccatggctgggtggggcatgtaccacggactgaaacataaaccaacgcaaatccaatgattgttcaaacaagggacgatacgcatcggacaagaaatggacatcaaatcctccgagaactaaagtttcactcagatcttcgtcgaccttttgagttgcacaatgtctattttgcaacatatgtataattatatatgatgacctactcagctctttgaaaacaatttatgtaaatataacagcttaattctacgtagtggacaaaaatgttgactctgattacagctcagataactctatttcatataaacatatagcatctgcagtaattaaattagaaaaaatttctaacgcgcgcagggcgcgcgccagtgactagtatttgttaggtcctcgcagatgctagcaagatgatagtgttgtagcatggaggaccattgtctctagtgtctgaaatacgagactggcatgcaggtcgatgtctgagcacagagctcggaagatgtgcgtatcaaccaataggctgtggctgtgcctgcaagatgccctgaaggacgcgcttcttgaaaagtcagaactgcaaagctttgctgcatctgatcacaatgatctctcagcttgttgtaacatcgtcttgaccattgtccattgcgctcatatcagctacatacatggttgaaaaacttgttataaaaatgtgccatttcaaacacggattcgattgtaatttgaaaagttaatttatactgtattatctgatgcatcattcactggagaatgggggataacaggattcgggctaagaacatccattcttttcaccgtgtatctctttgcaatctcagccattcgatctactatactatccatagaacatattccaaaggagataagcagccggtgcacgccccttgggagccaaaggaatatatctgtgtgggtatatgtagcttttcatctccaatgatcctggaaagggaattgactacattccaatcttttcccctgcttgttcatgaaattcacgatgtcacatgatttaccgccacttagatctgtcaaaaggctgccatttcttcgttcaggtgtatgggcgtggaaggtttgcatccatcggatgtgttggaccagcatgttgtagttttgattcgtgctgcgtgcatcgagccatcaggagatctctgcatcggaatcatatctgcacaaagccgtcggaaagatgcaggattcccactgatattttgaaccatcatccaggaggctaggtattagattttatatatacgtggtctgtattttgattaattaaatcaaatcaatcttatacctggtctgtgttttgtttaattaaatcaaataaatcttaagtttatattaaatgtgatggtgttattacc

SEQ ID NO: 63788 - DNA, 1207 bp, Zea Mays
cttggactccttgcatatcggtcagtttgccgtcagaacaaggagaaaaaaaggttccggtcttcatcccttccatttccaaaggacgacgctctcaccattcacgaacggcgactgcggatcgatcgtgcgtcgtctcctgcgccggcctcccttccagtcaggttcaaacaagggacgatacgcatcggacaagaaatggacatcaaatcctccgagaactaaagtttcactcagatcttcgtcgaccttttgagttgcacaatgtctattttgcaacatatgtcgatgtctgagcacagagctcggaagatgtgcgtatcaaccaataggctgtggctgtgcctgcaagatgccctgaaggacgcgcttcttgaaaagtcagaactgcaaagctttgctgcatctgatcacaatgatctctcagcttgttgtaacatcgtcttgaccattgtccattgcgctcatatcagctacatacatggttgaaaaacttgttataaaaatgtgccatttcaaacacggattcgattgtaatttgaaaagttaatttatactgtattatctgatgcatcattcactggagaatgggggataacaggattcgggctaagaacatccattcttttcaccgtgtatctctttgcaatctcagccattcgatctactatactatccatagaacatattccaaaggagataagcagccggtgcacgccccttgggagccaaaggaatatatctgtgtgggtatatgtagcttttcatctccaatgatcctggaaagggaattgactacattccaatcttttcccctgcttgttcatgaaattcacgatgtcacatgatttaccgccacttagatctgtcaaaaggctgccatttcttcgttcaggtgtatgggcgtggaaggtttgcatccatcggatgtgttggaccagcatgttgtagttttgattcgtgctgcgtgcatcgagccatcaggagatctctgcatcggaatcatatctgcacaaagccgtcggaaagatgcaggattcccactgatattttgaaccatcatccaggaggctaggtattagattttatatatacgtggtctgtattttgattaattaaatcaaatcaatcttatacctggtctgtgttttgtttaattaaatcaaataaatcttaagtttatattaaatgtgatggtgttattacc

SEQ ID NO: 63789 - DNA, 1501 bp, Zea Mays
cttggactccttgcatatcggtcagtttgccgtcagaacaaggagaaaaaaaggttccggtcttcatcccttccatttccaaaggacgacgctctcaccattcacgaacggcgactgcggatcgatcgtgcgtcgtctcctgcgccggcctcccttccagtcaggttcaaacaagggacgatacgcatcggacaagaaatggacatcaaatcctccgagaactaaagtttcactcagatcttcgtcgaccttttgagttgcacaatgtctattttgcaacatatgtataattatatatgatgacctactcagctctttgaaaacaatttatgtaaatataacagcttaattctacgtagtggacaaaaatgttgactctgattacagctcagataactctatttcatataaacatatagcatctgcagtaattaaattagaaaaaatttctaacgcgcgcagggcgcgcgccagtgactagtatttgttaggtcctcgcagatgctagcaagatgatagtgttgtagcatggaggaccattgtctctagtgtctgaaatacgagactggcatgcaggtcgatgtctgagcacagagctcggaagatgtgcgtatcaaccaataggctgtggctgtgcctgcaagatgccctgaaggacgcgcttcttgaaaagtcagaactgcaaagagctttgctgcatctgatcacaatgatctctcagcttgttgtaacatcgtcttgaccattgtccattgcgctcatatcagctacatacatggttgaaaaacttgttataaaaatgtgccatttcaaacacggattcgattgtaatttgaaaagttaatttatactgtattatctgatgcatcattcactggagaatgggggataacaggattcgggctaagaacatccattcttttcaccgtgtatctctttgcaatctcagccattcgatctactatactatccatagaacatattccaaaggagataagcagccggtgcacgccccttgggagccaaaggaatatatctgtgtgggtatatgtagcttttcatctccaatgatcctggaaagggaattgactacattccaatcttttcccctgcttgttcatgaaattcacgatgtcacatgatttaccgccacttagatctgtcaaaaggctgccatttcttcgttcaggtgtatgggcgtggaaggtttgcatccatcggatgtgttggaccagcatgttgtagttttgattcgtgctgcgtgcatcgagccatcaggagatctctgcatcggaatcatatctgcacaaagccgtcggaaagatgcaggattcccactgatattttgaaccatcatccaggaggctaggtattagattttatatatacgtggtctgtattttgattaattaaatcaaatcaatcttatacctggtctgtgttttgtttaattaaatcaaataaatcttaagtttatattaaatgtgatggtgttattacc

SEQ ID NO: 63790 - DNA, 1899 bp, Zea Mays
cttggactccttgcatatcggtcagtttgccgtcagaacaaggagaaaaaaaggttccggtcttcatcccttccatttccaaaggacgacgctctcaccattcacgaacggcgactgcggatcgatcgtgcgtcgtctcctgcgccggcctcccttccagtcaggtgtgttttttctcagattttttcttctcacgcaactttttctagaaaaaaatggcgttagggttttcgtcttccgttggaatgtctcttcctccttcttccgctgtctcactcgatcttccgatgaactgtctcttcctatttcttccgctgcgcaatcacggcacggagaaaaccagaccaaaaaaggctctgtggttagacttagacgcagaaatgcgaaaacggagaggcgagctcggcccgtgctcgctcacctcggcgcgacggagtgggcggggacggcgcccgctggcaggagtgagagtgggagctggggcgccgttgcttcgccggtgctcgcgacccaccgccgtgcagcatcgcttccgcctccgcttctcctgtcttaatataaagcatacaaacatgtaaaaaccacatatcattcgtttcagcaacaaggtgaggttcattagtgttaaactgtaaaaacgctaatataaacaaagtagcttgattccttaactacctaaattgttttttagtttcagatagtgtcttcagtgccatggcgccgctacgccagggagcaagtcggtccgccatggctgggtggggcatgtaccacggactgaaacataaaccaacgcaaatccaatgattgttcaaacaagggacgatacgcatcggacaagaaatggacatcaaatcctccgagaactaaagtcgatgtctgagcacagagctcggaagatgtgcgtatcaaccaataggctgtggctgtgcctgcaagatgccctgaaggacgcgcttcttgaaaagtcagaactgcaaaggtgcgcaaaccaaacctctgattgaatgcttccatggctcatagtccctagattcttgtctctatctgatagcccattgtttaccattgtccgttcatgtgtcagctttgctgcatctgatcacaatgatctctcagcttgttgtaacatcgtcttgaccattgtccattgcgctcatatcagctacatacatggttgaaaaacttgttataaaaatgtgccatttcaaacacggattcgattgtaatttgaaaagttaatttatactgtattatctgatgcatcattcactggagaatgggggataacaggattcgggctaagaacatccattcttttcaccgtgtatctctttgcaatctcagccattcgatctactatactatccatagaacatattccaaaggagataagcagccggtgcacgccccttgggagccaaaggaatatatctgtgtgggtatatgtagcttttcatctccaatgatcctggaaagggaattgactacattccaatcttttcccctgcttgttcatgaaattcacgatgtcacatgatttaccgccacttagatctgtcaaaaggctgccatttcttcgttcaggtgtatgggcgtggaaggtttgcatccatcggatgtgttggaccagcatgttgtagttttgattcgtgctgcgtgcatcgagccatcaggagatctctgcatcggaatcatatctgcacaaagccgtcggaaagatgcaggattcccactgatattttgaaccatcatccaggaggctaggtattagattttatatatacgtggtctgtattttgattaattaaatcaaatcaatcttatacctggtctgtgttttgtttaattaaatcaaataaatcttaagtttatattaaatgtgatggtgttattacc

SEQ ID NO: 63791 - DNA, 1520 bp, Zea Mays
cttggactccttgcatatcggtcagtttgccgtcagaacaaggagaaaaaaaggttccggtcttcatcccttccatttccaaaggacgacgctctcaccattcacgaacggcgactgcggatcgatcgtgcgtcgtctcctgcgccggcctcccttccagtcagtttcagatagtgtcttcagtgccatggcgccgctacgccagggagcaagtcggtccgccatggctgggtggggcatgtaccacggactgaaacataaaccaacgcaaatccaatgattgtaaaacatcagtttcgatggacaaaaatattttcctatggaatatattacatactagactgactattaaattctaaaattcgtttacaggttcaaacaagggacgatacgcatcggacaagaaatggacatcaaatcctccgagaactaaagtttcactcagatcttcgtcgaccttttgagttgcacaatgtctattttgcaacatatgtcgatgtctgagcacagagctcggaagatgtgcgtatcaaccaataggctgtggctgtgcctgcaagatgccctgaaggacgcgcttcttgaaaagtcagaactgcaaaggtgcgcaaaccaaacctctgattgaatgcttccatggctcatagtccctagattcttgtctctatctgatagcccattgtttaccattgtccgttcatgtgtcagctttgctgcatctgatcacaatgatctctcagcttgttgtaacatcgtcttgaccattgtccattgcgctcatatcagctacatacatggttgaaaaacttgttataaaaatgtgccatttcaaacacggattcgattgtaatttgaaaagttaatttatactgtattatctgatgcatcattcactggagaatgggggataacaggattcgggctaagaacatccattcttttcaccgtgtatctctttgcaatctcagccattcgatctactatactatccatagaacatattccaaaggagataagcagccggtgcacgccccttgggagccaaaggaatatatctgtgtgggtatatgtagcttttcatctccaatgatcctggaaagggaattgactacattccaatcttttcccctgcttgttcatgaaattcacgatgtcacatgatttaccgccacttagatctgtcaaaaggctgccatttcttcgttcaggtgtatgggcgtggaaggtttgcatccatcggatgtgttggaccagcatgttgtagttttgattcgtgctgcgtgcatcgagccatcaggagatctctgcatcggaatcatatctgcacaaagccgtcggaaagatgcaggattcccactgatattttgaaccatcatccaggaggctaggtattagattttatatatacgtggtctgtattttgattaattaaatcaaatcaatcttatacctggtctgtgttttgtttaattaaatcaaataaatcttaagtttatattaaatgtgatggtgttattacc

SEQ ID NO: 63792 - DNA, 1695 bp, Zea Mays
cttggactccttgcatatcggtcagtttgccgtcagaacaaggagaaaaaaaggttccggtcttcatcccttccatttccaaaggacgacgctctcaccattcacgaacggcgactgcggatcgatcgtgcgtcgtctcctgcgccggcctcccttccagtcagaccaaaaaaggctctgtggttagacttagacgcagaaatgcgaaaacggagaggcgagctcggcccgtgctcgctcacctcggcgcgacggagtgggcggggacggcgcccgctggcaggagtgagagtgggagctggggcgccgttgcttcgccggtgctcgcgacccaccgccgtgcagcatcgcttccgcctccgcttctcctgtcttaatataaagcatacaaacatgtaaaaaccacatatcattcgtttcagcaacaagtttcagatagtgtcttcagtgccatggcgccgctacgccagggagcaagtcggtccgccatggctgggtggggcatgtaccacggactgaaacataaaccaacgcaaatccaatgattgttcaaacaagggacgatacgcatcggacaagaaatggacatcaaatcctccgagaactaaagtttcactcagatcttcgtcgaccttttgagttgcacaatgtctattttgcaacatatgtcgatgtctgagcacagagctcggaagatgtgcgtatcaaccaataggctgtggctgtgcctgcaagatgccctgaaggacgcgcttcttgaaaagtcagaactgcaaaggtgcgcaaaccaaacctctgattgaatgcttccatggctcatagtccctagattcttgtctctatctgatagcccattgtttaccattgtccgttcatgtgtcagctttgctgcatctgatcacaatgatctctcagcttgttgtaacatcgtcttgaccattgtccattgcgctcatatcagctacatacatggttgaaaaacttgttataaaaatgtgccatttcaaacacggattcgattgtaatttgaaaagttaatttatactgtattatctgatgcatcattcactggagaatgggggataacaggattcgggctaagaacatccattcttttcaccgtgtatctctttgcaatctcagccattcgatctactatactatccatagaacatattccaaaggagataagcagccggtgcacgccccttgggagccaaaggaatatatctgtgtgggtatatgtagcttttcatctccaatgatcctggaaagggaattgactacattccaatcttttcccctgcttgttcatgaaattcacgatgtcacatgatttaccgccacttagatctgtcaaaaggctgccatttcttcgttcaggtgtatgggcgtggaaggtttgcatccatcggatgtgttggaccagcatgttgtagttttgattcgtgctgcgtgcatcgagccatcaggagatctctgcatcggaatcatatctgcacaaagccgtcggaaagatgcaggattcccactgatattttgaaccatcatccaggaggctaggtattagattttatatatacgtggtctgtattttgattaattaaatcaaatcaatcttatacctggtctgtgttttgtttaattaaatcaaataaatcttaagtttatattaaatgtgatggtgttattacc

SEQ ID NO: 63793 - DNA, 1149 bp, Zea Mays
cttggactccttgcatatcggtcagtttgccgtcagaacaaggagaaaaaaaggttccggtcttcatcccttccatttccaaaggacgacgctctcaccattcacgaacggcgactgcggatcgatcgtgcgtcgtctcctgcgccggcctcccttccagtcaggttcaaacaagggacgatacgcatcggacaagaaatggacatcaaatcctccgagaactaaagtcgatgtctgagcacagagctcggaagatgtgcgtatcaaccaataggctgtggctgtgcctgcaagatgccctgaaggacgcgcttcttgaaaagtcagaactgcaaagctttgctgcatctgatcacaatgatctctcagcttgttgtaacatcgtcttgaccattgtccattgcgctcatatcagctacatacatggttgaaaaacttgttataaaaatgtgccatttcaaacacggattcgattgtaatttgaaaagttaatttatactgtattatctgatgcatcattcactggagaatgggggataacaggattcgggctaagaacatccattcttttcaccgtgtatctctttgcaatctcagccattcgatctactatactatccatagaacatattccaaaggagataagcagccggtgcacgccccttgggagccaaaggaatatatctgtgtgggtatatgtagcttttcatctccaatgatcctggaaagggaattgactacattccaatcttttcccctgcttgttcatgaaattcacgatgtcacatgatttaccgccacttagatctgtcaaaaggctgccatttcttcgttcaggtgtatgggcgtggaaggtttgcatccatcggatgtgttggaccagcatgttgtagttttgattcgtgctgcgtgcatcgagccatcaggagatctctgcatcggaatcatatctgcacaaagccgtcggaaagatgcaggattcccactgatattttgaaccatcatccaggaggctaggtattagattttatatatacgtggtctgtattttgattaattaaatcaaatcaatcttatacctggtctgtgttttgtttaattaaatcaaataaatcttaagtttatattaaatgtgatggtgttattacc

SEQ ID NO: 63794 - DNA, 1201 bp, Zea Mays
cttggactccttgcatatcggtcagtttgccgtcagaacaaggagaaaaaaaggttccggtcttcatcccttccatttccaaaggacgacgctctcaccattcacgaacggcgactgcggatcgatcgtgcgtcgtctcctgcgccggcctcccttccagtcagatagtgtcttcagtgccatggcgccgctacgccagggagcaagtcggtccgccatggctgggtggggcatgtaccacggactgaaacataaaccaacgcaaatccaatgattgtaaaacatcagtttcgatggacaaaaatattttcctatggaatatattacatactagactgactattaaattctaaaattcgtttacaggttcaaacaagggacgatacgcatcggacaagaaatggacatcaaatcctccgagaactaaagtttcactcagatcttcgtcgaccttttgagttgcacaatgtctattttgcaacatatgtataattatatatgatgacctactcagctctttgaaaacaatttatgtaaatataacagcttaattctacgtagtggacaaaaatgttgactctgattacagctcagataactctatttcatataaacatatagcatctgcagtaattaaattagaaaaaatttctaacgcgcgcagggcgcgcgccagtgactagtatttgttaggtcctcgcagatgctagcaagatgatagtgttgtagcatggaggaccattgtctctagtgtctgaaatacgagactggcatgcaggtcgatgtctgagcacagagctcggaagatgtgcgtatcaaccaataggctgtggctgtgcctgcaagatgccctgaaggacgcgcttcttgaaaagtcagaactgcaaaggtgtatgggcgtggaaggtttgcatccatcggatgtgttggaccagcatgttgtagttttgattcgtgctgcgtgcatcgagccatcaggagatctctgcatcggaatcatatctgcacaaagccgtcggaaagatgcaggattcccactgatattttgaaccatcatccaggaggctaggtattagattttatatatacgtggtctgtattttgattaattaaatcaaatcaatcttatacctggtctgtgttttgtttaattaaatcaaataaatcttaagtttatattaaatgtgatggtgttattacc

SEQ ID NO: 63795 - DNA, 857 bp, Zea Mays
cttggactccttgcatatcggtcagtttgccgtcagaacaaggagaaaaaaaggttccggtcttcatcccttccatttccaaaggacgacgctctcaccattcacgaacggcgactgcggatcgatcgtgcgtcgtctcctgcgccggcctcccttccagtcagtttcagatagtgtcttcagtgccatggcgccgctacgccagggagcaagtcggtccgccatggctgggtggggcatgtaccacggactgaaacataaaccaacgcaaatccaatgattgtaaaacatcagtttcgatggacaaaaatattttcctatggaatatattacatactagactgactattaaattctaaaattcgtttacaggttcaaacaagggacgatacgcatcggacaagaaatggacatcaaatcctccgagaactaaagtcgatgtctgagcacagagctcggaagatgtgcgtatcaaccaataggctgtggctgtgcctgcaagatgccctgaaggacgcgcttcttgaaaagtcagaactgcaaaggtgtatgggcgtggaaggtttgcatccatcggatgtgttggaccagcatgttgtagttttgattcgtgctgcgtgcatcgagccatcaggagatctctgcatcggaatcatatctgcacaaagccgtcggaaagatgcaggattcccactgatattttgaaccatcatccaggaggctaggtattagattttatatatacgtggtctgtattttgattaattaaatcaaatcaatcttatacctggtctgtgttttgtttaattaaatcaaataaatcttaagtttatattaaatgtgatggtgttattacc

SEQ ID NO: 63796 - DNA, 1424 bp, Zea Mays
cttggactccttgcatatcggtcagtttgccgtcagaacaaggagaaaaaaaggttccggtcttcatcccttccatttccaaaggacgacgctctcaccattcacgaacggcgactgcggatcgatcgtgcgtcgtctcctgcgccggcctcccttccagtcaggtgtgttttttctcagattttttcttctcacgcaactttttctagaaaaaaatggcgttagggttttcgtcttccgttggaatgtctcttcctccttcttccgctgtctcactcgatcttccgatgaactgtctcttcctatttcttccgctgcgcaatcacggcacggagaaaaccagaccaaaaaaggctctgtggttagacttagacgcagaaatgcgaaaacggagaggcgagctcggcccgtgctcgctcacctcggcgcgacggagtgggcggggacggcgcccgctggcaggagtgagagtgggagctggggcgccgttgcttcgccggtgctcgcgacccaccgccgtgcagcatcgcttccgcctccgcttctcctgtcttaatataaagcatacaaacatgtaaaaaccacatatcattcgtttcagcaacaaggtgaggttcattagtgttaaactgtaaaaacgctaatataaacaaagtagcttgattccttaactacctaaattgttttttagtttcagatagtgtcttcagtgccatggcgccgctacgccagggagcaagtcggtccgccatggctgggtggggcatgtaccacggactgaaacataaaccaacgcaaatccaatgattgtaaaacatcagtttcgatggacaaaaatattttcctatggaatatattacatactagactgactattaaattctaaaattcgtttacaggttcaaacaagggacgatacgcatcggacaagaaatggacatcaaatcctccgagaactaaagtttcactcagatcttcgtcgaccttttgagttgcacaatgtcgatgtctgagcacagagctcggaagatgtgcgtatcaaccaataggctgtggctgtgcctgcaagatgccctgaaggacgcgcttcttgaaaagtcagaactgcaaaggtgtatgggcgtggaaggtttgcatccatcggatgtgttggaccagcatgttgtagttttgattcgtgctgcgtgcatcgagccatcaggagatctctgcatcggaatcatatctgcacaaagccgtcggaaagatgcaggattcccactgatattttgaaccatcatccaggaggctaggtattagattttatatatacgtggtctgtattttgattaattaaatcaaatcaatcttatacctggtctgtgttttgtttaattaaatcaaataaatcttaagtttatattaaatgtgatggtgttattacc

SEQ ID NO: 63797 - DNA, 1294 bp, Zea Mays
cttggactccttgcatatcggtcagtttgccgtcagaacaaggagaaaaaaaggttccggtcttcatcccttccatttccaaaggacgacgctctcaccattcacgaacggcgactgcggatcgatcgtgcgtcgtctcctgcgccggcctcccttccagtcaggtgtgttttttctcagattttttcttctcacgcaactttttctagaaaaaaatggcgttagggttttcgtcttccgttggaatgtctcttcctccttcttccgctgtctcactcgatcttccgatgaactgtctcttcctatttcttccgctgcgcaatcacggcacggagaaaaccagaccaaaaaaggctctgtggttagacttagacgcagaaatgcgaaaacggagaggcgagctcggcccgtgctcgctcacctcggcgcgacggagtgggcggggacggcgcccgctggcaggagtgagagtgggagctggggcgccgttgcttcgccggtgctcgcgacccaccgccgtgcagcatcgcttccgcctccgcttctcctgtcttaatataaagcatacaaacatgtaaaaaccacatatcattcgtttcagcaacaaggtgaggttcattagtgttaaactgtaaaaacgctaatataaacaaagtagcttgattccttaactacctaaattgttttttagtttcagatagtgtcttcagtgccatggcgccgctacgccagggagcaagtcggtccgccatggctgggtggggcatgtaccacggactgaaacataaaccaacgcaaatccaatgattgttcaaacaagggacgatacgcatcggacaagaaatggacatcaaatcctccgagaactaaagtcgatgtctgagcacagagctcggaagatgtgcgtatcaaccaataggctgtggctgtgcctgcaagatgccctgaaggacgcgcttcttgaaaagtcagaactgcaaaggtgtatgggcgtggaaggtttgcatccatcggatgtgttggaccagcatgttgtagttttgattcgtgctgcgtgcatcgagccatcaggagatctctgcatcggaatcatatctgcacaaagccgtcggaaagatgcaggattcccactgatattttgaaccatcatccaggaggctaggtattagattttatatatacgtggtctgtattttgattaattaaatcaaatcaatcttatacctggtctgtgttttgtttaattaaatcaaataaatcttaagtttatattaaatgtgatggtgttattacc

SEQ ID NO: 63798 - DNA, 1150 bp, Zea Mays
cttggactccttgcatatcggtcagtttgccgtcagaacaaggagaaaaaaaggttccggtcttcatcccttccatttccaaaggacgacgctctcaccattcacgaacggcgactgcggatcgatcgtgcgtcgtctcctgcgccggcctcccttccagtcaggttcaaacaagggacgatacgcatcggacaagaaatggacatcaaatcctccgagaactaaagtcgatgtctgagcacagagctcggaagatgtgcgtatcaaccaataggctgtggctgtgcctgcaagatgccctgaaggacgcgcttcttgaaaagtcagaactgcaaaggctttgctgcatctgatcacaatgatctctcagcttgttgtaacatcgtcttgaccattgtccattgcgctcatatcagctacatacatggttgaaaaacttgttataaaaatgtgccatttcaaacacggattcgattgtaatttgaaaagttaatttatactgtattatctgatgcatcattcactggagaatgggggataacaggattcgggctaagaacatccattcttttcaccgtgtatctctttgcaatctcagccattcgatctactatactatccatagaacatattccaaaggagataagcagccggtgcacgccccttgggagccaaaggaatatatctgtgtgggtatatgtagcttttcatctccaatgatcctggaaagggaattgactacattccaatcttttcccctgcttgttcatgaaattcacgatgtcacatgatttaccgccacttagatctgtcaaaaggctgccatttcttcgttcaggtgtatgggcgtggaaggtttgcatccatcggatgtgttggaccagcatgttgtagttttgattcgtgctgcgtgcatcgagccatcaggagatctctgcatcggaatcatatctgcacaaagccgtcggaaagatgcaggattcccactgatattttgaaccatcatccaggaggctaggtattagattttatatatacgtggtctgtattttgattaattaaatcaaatcaatcttatacctggtctgtgttttgtttaattaaatcaaataaatcttaagtttatattaaatgtgatggtgttattacc

SEQ ID NO: 63799 - DNA, 1117 bp, Zea Mays
cttggactccttgcatatcggtcagtttgccgtcagaacaaggagaaaaaaaggttccggtcttcatcccttccatttccaaaggacgacgctctcaccattcacgaacggcgactgcggatcgatcgtgcgtcgtctcctgcgccggcctcccttccagtcagtttcagatagtgtcttcagtgccatggcgccgctacgccagggagcaagtcggtccgccatggctgggtggggcatgtaccacggactgaaacataaaccaacgcaaatccaatgattgttcaaacaagggacgatacgcatcggacaagaaatggacatcaaatcctccgagaactaaagtttcactcagatcttcgtcgaccttttgagttgcacaatgtctattttgcaacatatgtataattatatatgatgacctactcagctctttgaaaacaatttatgtaaatataacagcttaattctacgtagtggacaaaaatgttgactctgattacagctcagataactctatttcatataaacatatagcatctgcagtaattaaattagaaaaaatttctaacgcgcgcagggcgcgcgccagtgactagtatttgttaggtcctcgcagatgctagcaagatgatagtgttgtagcatggaggaccattgtctctagtgtctgaaatacgagactggcatgcaggtcgatgtctgagcacagagctcggaagatgtgcgtatcaaccaataggctgtggctgtgcctgcaagatgccctgaaggacgcgcttcttgaaaagtcagaactgcaaaggtgtatgggcgtggaaggtttgcatccatcggatgtgttggaccagcatgttgtagttttgattcgtgctgcgtgcatcgagccatcaggagatctctgcatcggaatcatatctgcacaaagccgtcggaaagatgcaggattcccactgatattttgaaccatcatccaggaggctaggtattagattttatatatacgtggtctgtattttgattaattaaatcaaatcaatcttatacctggtctgtgttttgtttaattaaatcaaataaatcttaagtttatattaaatgtgatggtgttattacc

SEQ ID NO: 63800 - DNA, 2454 bp, Zea Mays
acccgtgtgccccgctccgtcctacgccaccgccgccggattcgctcccacctccggcggtcacgcccgttaccaacacccccacctcgcgtcgtccgccagctcctctctgccgcggcgcaaccatctccatctcccacgattacagcgaccacaagaccagcgacgcctccaccaacgagaaggatccattcaattcatccagtccacgcacacccccgtctttgactcgcactccgcttccagatctaggcgggccgaggaacgatgaacggaggcgccgccccaccatcagctgcggccgcggcgacgccgcctcaccggcggctgccggactttctccagagcgtgaacctcaagccgggcgcaccgaccccgaggacctgcggcagctgtggctccacctccagtacaacctcgtgtccgtgctggtcctctccgccgtgctcgtgttcggcgccaccgtctacgtgctcacccgcccccgccccgtgtacctcgtggacttcgcctgctacaagccgcccgcgcacctccaggtccggttcgaggaattcatgcgccactccaagctctgcggcttctccgacgacgcgctggagtttcagcgcaagatcctggagcggtccgggctcagcgaggagacgtacgtccccgaggccatgcacgcgctcccgccccagcccacgatggccaacgcccgcgccgaggccgagaccgtcatgttcggcgcgctcgacagcctgttcaggtccacgggcgtcaggcccaaggacgtgggcgtgctcgtggtgaactgcagcctcttcaacccgacgccgtcgctgtcggccatgatcgtgaacaagtacaagctccgcgggaacgtccgcagcttcaacctgggcgggatgggctgcagcgccggcgtcatcgccgtggacctggcccgcgacatgctgcaggtgcaccgcggcacctacgccgtggtggtgagcacggagaacatcacccagaactggtacttcgggaaccgcaagtcgatgctgatccccaactgcctgttccgcgtgggcggcgcggcggtgctgctgtcgaaccgcggcggcgaccggcggcgcgccaagtacgtcctgaggcacgtggtgcgcacgcacaagggcgcggacgacagggccttcaactgcgtgtaccaggagcaggacggcgagggcaagaccggcgtgtcgctgtccaaggacctgatggccatcgcgggcggcgcgctgaagaccaacatcacgacgctgggcccgctggtgctgcccgtgagcgagcagctgctcttcttcgcgacgctggtggccaagaagctgctggtgagcgccaagacgaagccctacatcccggacttcaagctggcgttcgagcacttctgcatccacgcgggcgggcgcgccgtgatcgacgagctggagaagaacctgcagctgagccccgcgcacgtggaggcgtcccggatgacgctccaccggttcggcaacacctccagcagctccatctggtacgagctcgcctacatggaggccaagggccgcgtccgccgcggccaccgcgtctggcagatcgccttcggcagcgggttcaagtgcaacagcgccgtgtggcacgccctgcgcaacgtcaagccgtcgcccgacagcccctgggaggactgcattgaccgctacccggtggagctcgtcgacggcttccccgcacaccaatagtactagtatccgttctcttctcaatcccacccacccacccaccccggctcccctcccctccacacatccatcgacaaagagatcttagcctcaaatcccctaatctggctggctggctggcatggcaaggagggtgctttccctggacaagtgttcggcggcagcatcgggtctttggtgtgtacttgatggatcatcccccagcttgtgtccaagcgagggcgagcatggtccccctcccccagcttgtgtggctgcacctgcacctgaacctgcggtaagcttgagtacgtactgctgatgattgttgtatgtgcatctgtctgttcagccatcgctgccagccagtgtcatttaccgatattagctagctagtggtccagtatccagatcacagaggaaagtgccgttccttccgtttctaccaaagaaggtcatgttggtgacgaggaaatcctgagtgtcttgagtgtgcccatggaccatggacactctgtttgccgtgttcgattggaaatctcgctcttgcttgtttaactgtacatggatcactggtctgccattgatgaggcgatgtatgatttatatccgttgttttcccttcatcagattatactcttgttaaattcgtaagatcttgttcacaaaagctgtttcacttctccatatcagttttggacctcgttgtcgttgttcctttcgttggcacactagtttttgagttttg

SEQ ID NO: 63801 - DNA, 180 bp, Zea Mays
gcggccaaagacggcgtacacggggcacggcacggcgacggcggcgaaggtgaatccgtcctcctcctcatcgtcgtgacgggcggtggcagtggcagtggcagtggtagtggcacggctgctgctggtggtggccggtgcagcgggaggtgccacgagatccagctggcgggcaacggc

SEQ ID NO: 63802 - DNA, 172 bp, Zea Mays
ctttcgaaatggaatgaaatacttgaaagttcaagtcaattactacatgcgtacaaccgcacacgtcaaaatctctagcgagcacgaattgaacaaagcgttatacacacacgacttattatattgaagtaaaacaacacgaactttcagaacggctggcagctcgggcgga

SEQ ID NO: 63803 - DNA, 2302 bp, Zea Mays
atggcgtcggagatgagcaagaacgtgaaggccctcgacgagcaggaggtcacctcgcagcactcgcgcgcccagaccagcgccgccgccgaggagcaacagcagcagcaggcggtggatccgctggcgcgacagtcgtccatcatgtcgctgacgctggaggagctgcagaactcgctgtgcgagccgggccgcaacttcgggtccatgaacatggacgagttcatggccaacatatggaacaccgaggagttccaggccgccacggccggctgcaacaaggagggcgcgtatcgggagccggtgcccgtggcgacgacgacgggcacaactgtacacaaacaaaagcttgaggcctcgagaagcacccaccaattgggagacgacggtgcacgaaacgaaatacacgactacacgagccgagaagaagtgagacgagccagtaggaaagcgccaagcaagcagcgccactgcaccaggagctgcaacgcaagcgcatccactcatcatcgtccccctgcccggtcgctccactcccctccccccgcgcgcacaaacaacagcagcccgatgtccgccgccgcgtcctctgccaccgcctgcttcctctccccgctcccgccgcctcgccgcccgcgtcatttcctcaggcacctcgcgcgcgccgcggtcaccaagcccgagcccgcctccgcctcctcgctcgccctcccctcgccgtggctttgggcccggcggctctgcgagctggtccccgccgaagccgggggccggcttctgtcgtcggccgcgggctccctcatcgtcgcgctcgcctcagcgtcgcttgtcctaggtgacaccggcgccgcctccgcgttcgtcgtctccacgccgcggaagctgcaggcggacgagctcgccaccgtgcgcctcttccaggagaacacgccatccgtagtctacatcaccaacctcgccgtcaggcaggacgcgttcacgctcgacgtgctcgaggtgcctcagggatccgggtccgggtttgtctgggataagagcggccatatcgtcaccaatttccatgtcatccgtggcgcgtcagacctgagggtgacacttgctgatcagtcagtgtatgaagcgcaagttgttggatttgaccaggacaaggatgttgctgttttgggtatcaaagcaccaaagaataaactaagacctatacctgttggtgtgtcagcagacctactggttggtcagaaagtgtatgccattggaaacccatttggccttgaccacactcttacaacaggtgttatcagtggcttgcgtcgagaaatcagttcagccgccacaggacgtcctatacaagatgtgatacagaccgacgctgctatcaaccctggtaacagcggtggtccactccttgatagttctggaaacttgataggtgtaaacactgctatatactcgccctcaggagcatcatctggtgttgggttttccattccagttgacacagtcgggggcattgtggaccaactcataaaatttggcagggtgacaagacctattctgggaataaaatttgccccagatcaatccgtagagcagcttgggttgagtggagtgcttgtcttggatgctcctccaaacggaccagctggcaaagcggtgagggtctgcaagcaaccaaacgagatccctatggccggcttatcctgggcgatataattacctctgtgaatggtacaaaggtgacaaacggaagcgacttgtataggatactggaccagtgcaaagttggagacacggtgaccgtggaggtcttgcgtggcgaccacaaagagaagatccctgtggtcctggaaccgaaggctgacgaatcctagtactagtaaacccagcttcttcttctgtaccatagcatcagtttctcgctttggtgcagaggcgcaaacacacaaggcgtcttagcattttcgccctccacggggttcattcgctgtacataattcatgcatgtagatgttgttaccatctcttgtctggtggaaaaggggtatccagactccattccaggttgccgtaatgccgtcgtgtattattaatacgatgctcatcagatgaccatccaggccggtcaagggacctgcaggccgacgattgaactcgctgatgtcacagatcaccaaacccgttttttgacgaaaaaaaaagattaattgtgtacgtaccactctgcttttacgaaattggctggttagttcaatttgatgccatgtggtggcatgaaaatgtactagtttcatgacatagttctaat

SEQ ID NO: 63804 - DNA, 2307 bp, Zea Mays
atggcgtcggagatgagcaagaacgtgaaggccctcgacgagcaggaggtcacctcgcagcactcgcgcgcccagaccagcgccgccgccgaggagcaacagcagcagcaggcggtggatccgctggcgcgacagtcgtccatcatgtcgctgacgctggaggagctgcagaactcgctgtgcgagccgggccgcaacttcgggtccatgaacatggacgagttcatggccaacatatggaacaccgaggagttccaggccgccacggccggctgcaacaaggagggcgcgtatcgggagccggtgcccgtggcgacgacgacgggcacaactgtacacaaacaaaagcttgaggcctcgagaagcacccaccaattgggagacgacggtgcacgaaacgaaatacacgactacacgagccgagaagaagtgagacgagccagtaggaaagcgccaagcaagcagcgccactgcaccaggagctgcaacgcaagcgcatccactcatcatcgtccccctgcccggtcgctccactcccctccccccgcgcgcacaaacaacagcagcccgatgtccgccgccgcgtcctctgccaccgcctgcttcctctccccgctcccgccgcctcgccgcccgcgtcatttcctcaggcacctcgcgcgcgccgcggtcaccaagcccgagcccgcctccgcctcctcgctcgccctcccctcgccgtggctttgggcccggcggctctgcgagctggtccccgccgaagccgggggccggcttctgtcgtcggccgcgggctccctcatcgtcgcgctcgcctcagcgtcgcttgtcctaggtgacaccggcgccgcctccgcgttcgtcgtctccacgccgcggaagctgcaggcggacgagctcgccaccgtgcgcctcttccaggagaacacgccatccgtagtctacatcaccaacctcgccgtcaggcaggacgcgttcacgctcgacgtgctcgaggtgcctcagggatccgggtccgggtttgtctgggataagagcggccatatcgtcaccaatttccatgtcatccgtggcgcgtcagacctgagttttatgcagggtgacacttgctgatcagtcagtgtatgaagcgcaagttgttggatttgaccaggacaaggatgttgctgttttgggtatcaaagcaccaaagaataaactaagacctatacctgttggtgtgtcagcagacctactggttggtcagaaagtgtatgccattggaaacccatttggccttgaccacactcttacaacaggtgttatcagtggcttgcgtcgagaaatcagttcagccgccacaggacgtcctatacaagatgtgatacagaccgacgctgctatcaaccctggtaacagcggtggtccactccttgatagttctggaaacttgataggtgtaaacactgctatatactcgccctcaggagcatcatctggtgttgggttttccattccagttgacacagtcgggggcattgtggaccaactcataaaatttggcagggtgacaagacctattctgggaataaaatttgccccagatcaatccgtagagcagcttgggttgagtggagtgcttgtcttggatgctcctccaaacggaccagctggcaaagcgggtctgcaagcaaccaaacgagatccctatggccggcttatcctgggcgatataattacctctgtgaatggtacaaaggtgacaaacggaagcgacttgtataggatactggaccagtgcaaagttggagacacggtgaccgtggaggtcttgcgtggcgaccacaaagagaagatccctgtggtcctggaaccgaaggctgacgaatcctagtactagtaaacccagcttcttcttctgtaccatagcatcagtttctcgctttggtgcagaggcgcaaacacacaaggcgtcttagcattttcgccctccacggggttcattcgctgtacataattcatgcatgtagatgttgttaccatctcttgtctggtggaaaaggggtatccagactccattccaggttgccgtaatgccgtcgtgtattattaatacgatgctcatcagatgaccatccaggccggtcaagggacctgcaggccgacgattgaactcgctgatgtcacagatcaccaaacccgttttttgacgaaaaaaaaagattaattgtgtacgtaccactctgcttttacgaaattggctggttagttcaatttgatgccatgtggtggcatgaaaatgtactagtttcatgacatagttctaat

SEQ ID NO: 63805 - DNA, 3729 bp, Zea Mays
tttacccctgttgcacttgtttactgaaacatctccaagaccaaggtgattgtattcaccaactgtagtctagtttttttcacatcattcaacccatatttcaatgatatcgtttttgtggatcatagttggatgaccaatgataaatgtgataagttgcaaactttattctcagaagatgactggaagttagttcagttggtgcttactttgttccgcaacgtcttggctattcaagaaatcacattgacgcagaaagcatctggagaagctacccacttactcttcctgtctgataactttttggagctcatgttccaagagaatgtgatggacataatcttagttttgactcagcatattgatgagccctctggttaccttaaggaggaaaaccttcttttaatggagatttaccattatctcttcttaggccgagacccaggactgattgcccgagcttctaataaaggtttaaaggatggatctaaatcattgtgcaaagggaacccaagctctgcatctgctaatagcctcttgaaaatacgtaatgtccaaagaggacctcagaaacggatagcctgggacaatgaacttctgtacgtaccaaaggagggtattacagaaatgcttagaagcttcatggatcaatttttatctggagcatacaatatcctgatgcagtcagtctgtggtgatatcatggatgagcaccactccattgagaaatctgacataactacattcttcaaagttgctcggtttgttctagcttttcaacatgaaaaggcttcaaatgatcagaaatctgctaaagggattcaaccatctggggtttctcctagcaatgaacctgatgataatctgccatttcatggtgatatatgtggacctgttgcggccacgttgaatgaagatatgttcaatatagtcatttccaggtggcgtgagacgtatgaggctcttaaggaaactaacgactacaaaactctttcagcagctgggtctttaatgaagaacatgattgacatgatatatttggtgctaaaagtactccctgaagattcaagggaatctcaaacagctcgtgttttgctctataaactgttttatgatcagacagaacatggtctcactcaatttctgctgaacttgttcagatcgtttgatagtcacaagcaacccaaaagtgatctagtggatttattagaaacaattcatatcatgctacagctcatggaaaagcttcaagcacgtggtgcattaagggttgcaaaaaagacaaaaaaggtcagaagaaagaagtccacaaatgataaaaaggagaattcagaacccaaagtggataatgcagaaccaaacgatgctaatcctacagatggaacgaaatgctcacctgaaacacttccagatttgagaagcgagggtcctgctttagaatcttctccctcagaacctggaaaagtagacactagtggcgcacatgtactggatacacttgtggacactgtagttaacattgagagtaccgcacatgctgaaggtgacccatcttgcacagacagtggcgtaatgaagagaaatctcattgaagaagagggtgagacttcagattcttcagttgatcaccaacctgctacaagtgaagttgattttaatgtttctcggttaatatctagtcttgcaaacaattctgttgtgcaaaatatttgctggctgttgaagcattacaaaagtaactcctaccgtacaaaccattacataatatgcatgctacggagattctgtgaagacctagagctgtcaccgatgctgtatcagctatcacttttaacaactttctatgatatattagcggaacaaaagttgtctagttcaaaggagtacacaaacattgtaaattttctttctaaagttgtgaggaaaatgttgagaacaataaaaaaacagccactgctatttgtcgacatactattttggaagacgcgaaaggagtgtcattgcattgatgctgatgcactactgaatgagcttaagaatgatgttggaagcaaagacagtgaaattggttcaagtaaggggtggagagatcgaataaatatagcagattctcttggtgacgatgaagttgacgtagttataccgcaggcaccttatgatgctgataaggatggagatctatcagctggtgaacatactgatgactttaggaagagtagtactaaatataaacggagcagattgtcactttcagatagtgaggctgatgaaatcgagaggaaccatgtatcaagagattcggtgcccaaagttccaaaacgacgaggtcgttctctttttacggaagagcaagagaggctcataagagacctttatgaaaaatataaggatggtcctaaatgcagtcatataatagctgagtctttagaccccagcgggaagatatcttctgctcaagtttctcgtaagcttacacagttaggtctcaggaatgtcacaaggagaaaaaaggttgcaggcgaacagaaccatggctccaaggctaaaagctccaggcccagaaggaaaaaattacacacggcaagtgatgaccatgatgacacaagtcagagaaaatcatctgatgaagacacattacaagtacttaaaagcagatcaaaaagtaagaaagttccattggtggatagttcactgagtggatcacagcatcaagaagctcagcatgacccagactctgatgatgcgaccataggatccatgattagaagtagaaaaaagaagaggttatccacgtcagattttgaagggaatgtacgaaaccatcaagaatcttcagacaacaccaaagccaaggactgttcaccgattatatcccaacatgagaaagcattgcaagacatttatcctgatgatgagaccattggatccatcattagaagtgtgaaaaagaagagatcagtgacatcaaatttctcagcgaatatagaagcccaagagtctttgagaaatattaacctacaagatgaaactgttgtttctaatatcatggatgcttctgtaaatcatgggtctgatccagtcaataacagtgacaatactgttgaagatgaacttttggatgattttgaaactgagctagtcaataacggtggcaatactgttgaagctgaacttttggatgattttgaagttgagctagatgatcatgagcatactgaccaaaggatcactgatgatgaaattatgactgaatcagggaaagcaacaaactccgatgctaagggaagggctggtttgaaaagaagacacagaatggttattgacgatgaggatgatgattagtaactgttcaggactgaagaacccgtaactattgaggagtggagtttcaaatgggaaatgggattaaaaaaagaacttttcaggattgtttcccttgcactgctaagctctgagcacgattcaagctgtttcacacctactagtgccagatgttcttccatctgtaatgtttagtggggtcacaatctaatggaattttgcagatgcaaagttcaggctgccctgctgtgtggcctgctgtacagactgataatttcgagtactgttttttttgaaatgaaatactgtagagaagccccccgcagcaatttcgagtactgttggctgtatttgaaactccgaacactgcaactctagcgaatgcgctcagttatactgttttcactt

SEQ ID NO: 63806 - DNA, 3866 bp, Zea Mays
tttacccctgttgcacttgtttactgaaacatctccaagaccaaggtgattgtattcaccaactgtagtctagtttttttcacatcattcaacccatatttcaatgatatcgtttttgtggatcatagttggatgaccaatgataaatgtgataagttgcaaactttattctcagaagatgactggaagttagttcagttggtgcttactttgttccgcaacgtcttggctattcaagaaatcacattgacgcagaaagcatctggagaagctacccacttactcttcctgtctgataactttttggagctcatgttccaagagaatgtgatggacataatcttagttttgactcagcatattgatgagccctctggttaccttaaggaggaaaaccttcttttaatggagatttaccattatctcttcttaggccgagacccaggactgattgcccgagcttctaataaaggtttaaaggatggatctaaatcattgtgcaaagggaacccaagctctgcatctgctaatagcctcttgaaaatacgtaatgtccaaagaggacctcagaaacggatagcctgggacaatgaacttctgtacgtaccaaaggagggtattacagaaatgcttagaagcttcatggatcaatttttatctggagcatacaatatcctgatgcagtcagtctgtggtgatatcatggatgagcaccactccattgagaaatctgacataactacattcttcaaagttgctcggtttgttctagcttttcaacatgaaaaggcttcaaatgatcagaaatctgctaaagggattcaaccatctggggtttctcctagcaatgaacctgatgataatctgccatttcatggtgatatatgtggacctgttgcggccacgttgaatgaagatatgttcaatatagtcatttccaggtggcgtgagacgtatgaggctcttaaggaaactaacgactacaaaactctttcagcagctgggtctttaatgaagaacatgattgacatgatatatttggtgctaaaagtactccctgaagattcaagggaatctcaaacagctcgtgttttgctctataaactgttttatgatcagacagaacatggtctcactcaatttctgctgaacttgttcagatcgtttgatagtcacaagcaacccaaaagtgatctagtggatttattagaaacaattcatatcatgctacagctcatggaaaagcttcaagcacgtggtgcattaagggttgcaaaaaagacaaaaaaggtcagaagaaagaagtccacaaatgataaaaaggagaattcagaacccaaagtggataatgcagaaccaaacgatgctaatcctacagatggaacgaaatgctcacctgaaacacttccagatttgagaagcgagggtcctgctttagaatcttctccctcagaacctggaaaagtagacactagtggcgcacatgtactggatacacttgtggacactgtagttaacattgagagtaccgcacatgctgaaggtgacccatcttgcacagacagtggcgtaatgaagagaaatctcattgaagaagagggtgagacttcagattcttcagttgatcaccaacctgctacaagtgaagttgattttaatgtttctcggttaatatctagtcttgcaaacaattctgttgtgcaaaatatttgctggctgttgaagcattacaaaagtaactcctaccgtacaaaccattacataatatgcatgctacggagattctgtgaagacctagagctgtcaccgatgctgtatcaggtaaaagaaatgcctacatatgtttcctcacagtcgtttcttctttgagagtttatattctactgcctttttgcagctatcacttttaacaactttctatgatatattagcggaacaaaagttgtctagttcaaaggagtacacaaacattgtaaattttctttctaaagttgtgaggaaaatgttgagaacaataaaaaaacagccactgctatttgtcgacatactattttggaagacgcgaaaggagtgtcattgcattgatgctgatgcactactgaatgagcttaagaatgatgttggaagcaaagacagtgaaattggttcaagtaaggggtggagagatcgaataaatatagcagattctcttggtgacgatgaagttgacgtagttataccgcaggcaccttatgatgctgataaggatggagatctatcagctggtgaacatactgatgactttaggaagagtagtactaaatataaacggagcagattgtcactttcagatagtgaggctgatgaaatcgagaggaaccatgtatcaagagattcggtgcccaaagttccaaaacgacgaggtcgttctctttttacggaagagcaagagaggctcataagagacctttatgaaaaatataaggatggtcctaaatgcagtcatataatagctgagtctttagaccccagcgggaagatatcttctgctcaagtttctcgtaagcttacacagttaggtctcaggaatgtcacaaggagaaaaaaggttgcaggtgaatctctttcaactggagatcggactatagaacaacaagacaactcgcttgatgatctgaaccccatgctaggcgaacagaaccatggctccaaggctaaaagctccaggcccagaaggaaaaaattacacacggcaagtgatgaccatgatgacacaagtcagagaaaatcatctgatgaagacacattacaaatcaaaaagtaagaaagttccattggtggatagttcactgagtggatcacagcatcaagaagctcagcatgacccagactctgatgatgcgaccataggatccatgattagaagtagaaaaaagaagaggttatccacgtcagattttgaagggaatgtacgaaaccatcaagaatcttcagacaacaccaaagccaaggactgttcaccgattatatcccaacatgagaaagcattgcaagacatttatcctgatgatgagaccattggatccatcattagaagtgtgaaaaagaagagatcagtgacatcaaatttctcagcgaatatagaagcccaagagtctttgagaaatattaacctacaagatgaaactgttgtttctaatatcatggatgcttctgtaaatcatgggtctgatccagtcaataacagtgacaatactgttgaagatgaacttttggatgattttgaaactgagctagtcaataacggtggcaatactgttgaagctgaacttttggatgattttgaagttgagctagatgatcatgagcatactgaccaaaggatcactgatgatgaaattatgactgaatcagggaaagcaacaaactccgatgctaagggaagggctggtttgaaaagaagacacagaatggttattgacgatgaggatgatgattagtaactgttcaggactgaagaacccgtaactattgaggagtggagtttcaaatgggaaatgggattaaaaaaagaacttttcaggattgtttcccttgcactgctaagctctgagcacgattcaagctgtttcacacctactagtgccagatgttcttccatctgtaatgtttagtggggtcacaatctaatggaattttgcagatgcaaagttcaggctgccctgctgtgtggcctgctgtacagactgataatttcgagtactgttttttttgaaatgaaatactgtagagaagccccccgcagcaatttcgagtactgttggctgtatttgaaactccgaacactgcaactctagcgaatgcgctcagttatactgttttcactt

SEQ ID NO: 63807 - DNA, 3796 bp, Zea Mays
tttacccctgttgcacttgtttactgaaacatctccaagaccaaggtgattgtattcaccaactgtagtctagtttttttcacatcattcaacccatatttcaatgatatcgtttttgtggatcatagttggatgaccaatgataaatgtgataagttgcaaactttattctcagaagatgactggaagttagttcagttggtgcttactttgttccgcaacgtcttggctattcaagaaatcacattgacgcagaaagcatctggagaagctacccacttactcttcctgtctgataactttttggagctcatgttccaagagaatgtgatggacataatcttagttttgactcagcatattgatgagccctctggttaccttaaggaggaaaaccttcttttaatggagatttaccattatctcttcttaggccgagacccaggactgattgcccgagcttctaataaaggtttaaaggatggatctaaatcattgtgcaaagggaacccaagctctgcatctgctaatagcctcttgaaaatacgtaatgtccaaagaggacctcagaaacggatagcctgggacaatgaacttctgtacgtaccaaaggagggtattacagaaatgcttagaagcttcatggatcaatttttatctggagcatacaatatcctgatgcagtcagtctgtggtgatatcatggatgagcaccactccattgagaaatctgacataactacattcttcaaagttgctcggtttgttctagcttttcaacatgaaaaggcttcaaatgatcagaaatctgctaaagggattcaaccatctggggtttctcctagcaatgaacctgatgataatctgccatttcatggtgatatatgtggacctgttgcggccacgttgaatgaagatatgttcaatatagtcatttccaggtggcgtgagacgtatgaggctcttaaggaaactaacgactacaaaactctttcagcagctgggtctttaatgaagaacatgattgacatgatatatttggtgctaaaagtactccctgaagattcaagggaatctcaaacagctcgtgttttgctctataaactgttttatgatcagacagaacatggtctcactcaatttctgctgaacttgttcagatcgtttgatagtcacaagcaacccaaaagtgatctagtggatttattagaaacaattcatatcatgctacagctcatggaaaagcttcaagcacgtggtgcattaagggttgcaaaaaagacaaaaaaggtcagaagaaagaagtccacaaatgataaaaaggagaattcagaacccaaagtggataatgcagaaccaaacgatgctaatcctacagatggaacgaaatgctcacctgaaacacttccagatttgagaagcgagggtcctgctttagaatcttctccctcagaacctggaaaagtagacactagtggcgcacatgtactggatacacttgtggacactgtagttaacattgagagtaccgcacatgctgaaggtgacccatcttgcacagacagtggcgtaatgaagagaaatctcattgaagaagagggtgagacttcagattcttcagttgatcaccaacctgctacaagtgaagttgattttaatgtttctcggttaatatctagtcttgcaaacaattctgttgtgcaaaatatttgctggctgttgaagcattacaaaagtaactcctaccgtacaaaccattacataatatgcatgctacggagattctgtgaagacctagagctgtcaccgatgctgtatcagctatcacttttaacaactttctatgatatattagcggaacaaaagttgtctagttcaaaggagtacacaaacattgtaaattttctttctaaagttgtgaggaaaatgttgagaacaataaaaaaacagccactgctatttgtcgacatactattttggaagacgcgaaaggagtgtcattgcattgatgctgatgcactactgaatgagcttaagaatgatgttggaagcaaagacagtgaaattggttcaagtaaggggtggagagatcgaataaatatagcagattctcttggtgacgatgaagttgacgtagttataccgcaggcaccttatgatgctgataaggatggagatctatcagctggtgaacatactgatgactttaggaagagtagtactaaatataaacggagcagattgtcactttcagatagtgaggctgatgaaatcgagaggttcttgaaccatgtatcaagagattcggtgcccaaagttccaaaacgacgaggtcgttctctttttacggaagagcaagagaggctcataagagacctttatgaaaaatataaggatggtcctaaatgcagtcatataatagctgagtctttagaccccagcgggaagatatcttctgctcaagtttctcgtaagcttacacagttaggtctcaggaatgtcacaaggagaaaaaaggttgcaggtgaatctctttcaactggagatcggactatagaacaacaagacaactcgcttgatgatctgaaccccatgctaggcgaacagaaccatggctccaaggctaaaagctccaggcccagaaggaaaaaattacacacggcaagtgatgaccatgatgacacaagtcagagaaaatcatctgatgaagacacattacaaatcaaaaagtaagaaagttccattggtggatagttcactgagtggatcacagcatcaagaagctcagcatgacccagactctgatgatgcgaccataggatccatgattagaagtagaaaaaagaagaggttatccacgtcagattttgaagggaatgtacgaaaccatcaagaatcttcagacaacaccaaagccaaggactgttcaccgattatatcccaacatgagaaagcattgcaagacatttatcctgatgatgagaccattggatccatcattagaagtgtgaaaaagaagagatcagtgacatcaaatttctcagcgaatatagaagcccaagagtctttgagaaatattaacctacaagatgaaactgttgtttctaatatcatggatgcttctgtaaatcatgggtctgatccagtcaataacagtgacaatactgttgaagatgaacttttggatgattttgaaactgagctagtcaataacggtggcaatactgttgaagctgaacttttggatgattttgaagttgagctagatgatcatgagcatactgaccaaaggatcactgatgatgaaattatgactgaatcagggaaagcaacaaactccgatgctaagggaagggctggtttgaaaagaagacacagaatggttattgacgatgaggatgatgattagtaactgttcaggactgaagaacccgtaactattgaggagtggagtttcaaatgggaaatgggattaaaaaaagaacttttcaggattgtttcccttgcactgctaagctctgagcacgattcaagctgtttcacacctactagtgccagatgttcttccatctgtaatgtttagtggggtcacaatctaatggaattttgcagatgcaaagttcaggctgccctgctgtgtggcctgctgtacagactgataatttcgagtactgttttttttgaaatgaaatactgtagagaagccccccgcagcaatttcgagtactgttggctgtatttgaaactccgaacactgcaactctagcgaatgcgctcagttatactgttttcactt

SEQ ID NO: 63808 - DNA, 3945 bp, Zea Mays
tttacccctgttgcacttgtttactgaaacatctccaagaccaaggtgattgtattcaccaactgtagtctagtttttttcacatcattcaacccatatttcaatgatatcgtttttgtggatcatagttggatgaccaatgataaatgtgataagttgcaaactttattctcagaagatgactggaagttagttcagttggtgcttactttgttccgcaacgtcttggctattcaagaaatcacattgacgcagaaagcatctggagaagctacccacttactcttcctgtctgataactttttggagctcatgttccaagagaatgtgatggacataatcttagttttgactcagcatattgatgagccctctggttaccttaaggaggaaaaccttcttttaatggagatttaccattatctcttcttaggccgagacccaggactgattgcccgagcttctaataaaggtttaaaggatcgtgttaacggagatattgtttcatcagttgattcattgagattgatgatggaagaggaagaaaggaaaaaaagaatgttcaggcaattgaactcagaacatagctcgcttagtgggacttttacgtgcttttctgtggatggatctaaatcattgtgcaaagggaacccaagctctgcatctgctaatagcctcttgaaaatacgtaatgtccaaagaggacctcagaaacggatagcctgggacaatgaacttctgtacgtaccaaaggagggtattacagaaatgcttagaagcttcatggatcaatttttatctggagcatacaatatcctgatgcagtcagtctgtggtgatatcatggatgagcaccactccattgagaaatctgacataactacattcttcaaagttgctcggtttgttctagcttttcaacatgaaaaggcttcaaatgatcagaaatctgctaaagggattcaaccatctggggtttctcctagcaatgaacctgatgataatctgccatttcatggtgatatatgtggacctgttgcggccacgttgaatgaagatatgttcaatatagtcatttccaggtggcgtgagacgtatgaggctcttaaggaaactaacgactacaaaactctttcagcagctgggtctttaatgaagaacatgattgacatgatatatttggtgctaaaagtactccctgaagattcaagggaatctcaaacagctcgtgttttgctctataaactgttttatgatcagacagaacatggtctcactcaatttctgctgaacttgttcagatcgtttgatagtcacaagcaacccaaaagtgatctagtggatttattagaaacaattcatatcatgctacagctcatggaaaagcttcaagcacgtggtgcattaagggttgcaaaaaagacaaaaaaggtcagaagaaagaagtccacaaatgataaaaaggagaattcagaacccaaagtggataatgcagaaccaaacgatgctaatcctacagatggaacgaaatgctcacctgaaacacttccagatttgagaagcgagggtcctgctttagaatcttctccctcagaacctggaaaagtagacactagtggcgcacatgtactggatacacttgtggacactgtagttaacattgagagtaccgcacatgctgaaggtgacccatcttgcacagacagtggcgtaatgaagagaaatctcattgaagaagagggtgagacttcagattcttcagttgatcaccaacctgctacaagtgaagttgattttaatgtttctcggttaatatctagtcttgcaaacaattctgttgtgcaaaatatttgctggctgttgaagcattacaaaagtaactcctaccgtacaaaccattacataatatgcatgctacggagattctgtgaagacctagagctgtcaccgatgctgtatcagctatcacttttaacaactttctatgatatattagcggaacaaaagttgtctagttcaaaggagtacacaaacattgtaaattttctttctaaagttgtgaggaaaatgttgagaacaataaaaaaacagccactgctatttgtcgacatactattttggaagacgcgaaaggagtgtcattgcattgatgctgatgcactactgaatgagcttaagaatgatgttggaagcaaagacagtgaaattggttcaagtaaggggtggagagatcgaataaatatagcagattctcttggtgacgatgaagttgacgtagttataccgcaggcaccttatgatgctgataaggatggagatctatcagctggtgaacatactgatgactttaggaagagtagtactaaatataaacggagcagattgtcactttcagatagtgaggctgatgaaatcgagaggaaccatgtatcaagagattcggtgcccaaagttccaaaacgacgaggtcgttctctttttacggaagagcaagagaggctcataagagacctttatgaaaaatataaggatggtcctaaatgcagtcatataatagctgagtctttagaccccagcgggaagatatcttctgctcaagtttctcgtaagcttacacagttaggtctcaggaatgtcacaaggagaaaaaaggttgcaggtgaatctctttcaactggagatcggactatagaacaacaagacaactcgcttgatgatctgaaccccatgctaggcgaacagaaccatggctccaaggctaaaagctccaggcccagaaggaaaaaattacacacggcaagtgatgaccatgatgacacaagtcagagaaaatcatctgatgaagacacattacaagtacttaaaagcagatcaaaaagtaagaaagttccattggtggatagttcactgagtggatcacagcatcaagaagctcagcatgacccagactctgatgatgcgaccataggatccatgattagaagtagaaaaaagaagaggttatccacgtcagattttgaagggaatgtacgaaaccatcaagaatcttcagacaacaccaaagccaaggactgttcaccgattatatcccaacatgagaaagcattgcaagacatttatcctgatgatgagaccattggatccatcattagaagtgtgaaaaagaagagatcagtgacatcaaatttctcagcgaatatagaagcccaagagtctttgagaaatattaacctacaagatgaaactgttgtttctaatatcatggatgcttctgtaaatcatgggtctgatccagtcaataacagtgacaatactgttgaagatgaacttttggatgattttgaaactgagctagtcaataacggtggcaatactgttgaagctgaacttttggatgattttgaagttgagctagatgatcatgagcatactgaccaaaggatcactgatgatgaaattatgactgaatcagggaaagcaacaaactccgatgctaagggaagggctggtttgaaaagaagacacagaatggttattgacgatgaggatgatgattagtaactgttcaggactgaagaacccgtaactattgaggagtggagtttcaaatgggaaatgggattaaaaaaagaacttttcaggattgtttcccttgcactgctaagctctgagcacgattcaagctgtttcacacctactagtgccagatgttcttccatctgtaatgtttagtggggtcacaatctaatggaattttgcagatgcaaagttcaggctgccctgctgtgtggcctgctgtacagactgataatttcgagtactgttttttttgaaatgaaatactgtagagaagccccccgcagcaatttcgagtactgttggctgtatttgaaactccgaacactgcaactctagcgaatgcgctcagttatactgttttcactt

SEQ ID NO: 63809 - DNA, 3685 bp, Zea Mays
tttacccctgttgcacttgtttactgaaacatctccaagaccaaggtgattgtattcaccaactgtagtctagtttttttcacatcattcaacccatatttcaatgatatcgtttttgtggatcatagttggatgaccaatgataaatgtgataagttgcaaactttattctcagaagatgactggaagttagttcagttggtgcttactttgttccgcaacgtcttggctattcaagaaatcacattgacgcagaaagcatctggagaagctacccacttactcttcctgtctgataactttttggagctcatgttccaagagaatgtgatggacataatcttagttttgactcagcatattgatgagccctctggttaccttaaggaggaaaaccttcttttaatggagatttaccattatctcttcttaggccgagacccaggactgattgcccgagcttctaataaaggtttaaaggatggatctaaatcattgtgcaaagggaacccaagctctgcatctgctaatagcctcttgaaaatacgtaatgtccaaagaggacctcagaaacggatagcctgggacaatgaacttctgtacgtaccaaaggagggtattacagaaatgcttagaagcttcatggatcaatttttatctggagcatacaatatcctgatgcagtcagtctgtggtgatatcatggatgagcaccactccattgagaaatctgacataactacattcttcaaagttgctcggtttgttctagcttttcaacatgaaaaggcttcaaatgatcagaaatctgctaaagggattcaaccatctggggtttctcctagcaatgaacctgatgataatctgccatttcatggtgatatatgtggacctgttgcggccacgttgaatgaagatatgttcaatatagtcatttccaggtggcgtgagacgtatgaggctcttaaggaaactaacgactacaaaactctttcagcagctgggtctttaatgaagaacatgggctcacattttaaccttgattctctatctagttatttaaaggtttataaaaaaactcgatctgtggggcatcttgcattgcagattgacatgatatatttggtgctaaaagtactccctgaagattcaagggaatctcaaacagctcgtgttttgctctataaactgttttatgatcagacagaacatggtctcactcaatttctgctgaacttgttcagatcgtttgatagtcacaagcaacccaaaagtgatctagtggatttattagaaacaattcatatcatgctacagctcatggaaaagcttcaagcacgtggtgcattaagggttgcaaaaaagacaaaaaaggtcagaagaaagaagtccacaaatgataaaaaggagaattcagaacccaaagtggataatgcagaaccaaacgatgctaatcctacagatggaacgaaatgctcacctgaaacacttccagatttgagaagcgagggtcctgctttagaatcttctccctcagaacctggaaaagtagacactagtggcgcacatgtactggatacacttgtggacactgtagttaacattgagagtaccgcacatgctgaaggtgacccatcttgcacagacagtggcgtaatgaagagaaatctcattgaagaagagggtgagacttcagattcttcagttgatcaccaacctgctacaagtgaagttgattttaatgtttctcggttaatatctagtcttgcaaacaattctgttgtgcaaaatatttgctggctgttgaagcattacaaaagtaactcctaccgtacaaaccattacataatatgcatgctacggagattctgtgaagacctagagctgtcaccgatgctgtatcagctatcacttttaacaactttctatgatatattagcggaacaaaagttgtctagttcaaaggagtacacaaacattgtaaattttctttctaaagttgtgaggaaaatgttgagaacaataaaaaaacagccactgctatttgtcgacatactattttggaagacgcgaaaggagtgtcattgcattgatgctgatgcactactgaatgagcttaagaatgatgttggaagcaaagacagtgaaattggttcaagtaaggggtggagagatcgaataaatatagcagattctcttggtgacgatgaagttgacgtagttataccgcaggcaccttatgatgctgataaggatggagatctatcagctggtgaacatactgatgactttaggaagagtagtactaaatataaacggagcagattgtcactttcagatagtgaggctgatgaaatcgagaggttcttgaaccatgtatcaagagattcggtgcccaaagttccaaaacgacgaggtcgttctctttttacggaagagcaagagaggctcataagagacctttatgaaaaatataaggatggtcctaaatgcagtcatataatagctgagtctttagaccccagcgggaagatatcttctgctcaagtttctcgtaagcttacacagttaggtctcaggaatgtcacaaggagaaaaaaggttgcaggtgaatctctttcaactggagatcggactatagaacaacaagacaactcgcttgatgatctgaaccccatgctaggcgaacagaaccatggctccaaggctaaaagctccaggcccagaaggaaaaaattacacacggcaagtgatgaccatgatgacacaagtcagagaaaatcatctgatgaagacacattacaagtacttaaaagcagatcaaaaagtaagaaagttccattggtggatagttcactgagtggatcacagcatcaagaagctcagcatgacccagactctgatgatgcgaccataggatccatgattagaagtagaaaaaagaagaggttatccacgtcagattttgaagggaatgtacgaaaccatcaagaatcttcagacaacaccaaagccaaggactgttcaccgattatatcccaacatgagaaagcattgcaagacatttatcctgatgatgagaccattggatccatcattagaagtgtgaaaaagaagagatcagtgacatcaaatttctcagcgaatatagaagcccaagagtctttgagaaatattaacctacaagatgaaactgttgtttctaatatcatggaaagcaacaaactccgatgctaagggaagggctggtttgaaaagaagacacagaatggttattgacgatgaggatgatgattagtaactgttcaggactgaagaacccgtaactattgaggagtggagtttcaaatgggaaatgggattaaaaaaagaacttttcaggattgtttcccttgcactgctaagctctgagcacgattcaagctgtttcacacctactagtgccagatgttcttccatctgtaatgtttagtggggtcacaatctaatggaattttgcagatgcaaagttcaggctgccctgctgtgtggcctgctgtacagactgataatttcgagtactgttttttttgaaatgaaatactgtagagaagccccccgcagcaatttcgagtactgttggctgtatttgaaactccgaacactgcaactctagcgaatgcgctcagttatactgttttcactt

SEQ ID NO: 63810 - DNA, 3861 bp, Zea Mays
tttacccctgttgcacttgtttactgaaacatctccaagaccaaggtgattgtattcaccaactgtagtctagtttttttcacatcattcaacccatatttcaatgatatcgtttttgtggatcatagttggatgaccaatgataaatgtgataagttgcaaactttattctcagaagatgactggaagttagttcagttggtgcttactttgttccgcaacgtcttggctattcaagaaatcacattgacgcagaaagcatctggagaagctacccacttactcttcctgtctgataactttttggagctcatgttccaagagaatgtgatggacataatcttagttttgactcagcatattgatgagccctctggttaccttaaggaggaaaaccttcttttaatggagatttaccattatctcttcttaggccgagacccaggactgattgcccgagcttctaataaaggtttaaaggatggatctaaatcattgtgcaaagggaacccaagctctgcatctgctaatagcctcttgaaaatacgtaatgtccaaagaggacctcagaaacggatagcctgggacaatgaacttctgtacgtaccaaaggagggtattacagaaatgcttagaagcttcatggatcaatttttatctggagcatacaatatcctgatgcagtcagtctgtggtgatatcatggatgagcaccactccattgagaaatctgacataactacattcttcaaagttgctcggtttgttctagcttttcaacatgaaaaggcttcaaatgatcagctaccgcagttatatcttggcttatttgtgatgaatatcataactatgtctatccagaaatctgctaaagggattcaaccatctggggtttctcctagcaatgaacctgatgataatctgccatttcatggtgatatatgtggacctgttgcggccacgttgaatgaagatatgttcaatatagtcatttccaggtggcgtgagacgtatgaggctcttaaggaaactaacgactacaaaactctttcagcagctgggtctttaatgaagaacatgattgacatgatatatttggtgctaaaagtactccctgaagattcaagggaatctcaaacagctcgtgttttgctctataaactgttttatgatcagacagaacatggtctcactcaatttctgctgaacttgttcagatcgtttgatagtcacaagcaacccaaaagtgatctagtggatttattagaaacaattcatatcatgctacagctcatggaaaagcttcaagcacgtggtgcattaagggttgcaaaaaagacaaaaaaggtcagaagaaagaagtccacaaatgataaaaaggagaattcagaacccaaagtggataatgcagaaccaaacgatgctaatcctacagatggaacgaaatgctcacctgaaacacttccagatttgagaagcgagggtcctgctttagaatcttctccctcagaacctggaaaagtagacactagtggcgcacatgtactggatacacttgtggacactgtagttaacattgagagtaccgcacatgctgaaggtgacccatcttgcacagacagtggcgtaatgaagagaaatctcattgaagaagagggtgagacttcagattcttcagttgatcaccaacctgctacaagtgaagttgattttaatgtttctcggttaatatctagtcttgcaaacaattctgttgtgcaaaatatttgctggctgttgaagcattacaaaagtaactcctaccgtacaaaccattacataatatgcatgctacggagattctgtgaagacctagagctgtcaccgatgctgtatcagctatcacttttaacaactttctatgatatattagcggaacaaaagttgtctagttcaaaggagtacacaaacattgtaaattttctttctaaagttgtgaggaaaatgttgagaacaataaaaaaacagccactgctatttgtcgacatactattttggaagacgcgaaaggagtgtcattgcattgatgctgatgcactactgaatgagcttaagaatgatgttggaagcaaagacagtgaaattggttcaagtaaggggtggagagatcgaataaatatagcagattctcttggtgacgatgaagttgacgtagttataccgcaggcaccttatgatgctgataaggatggagatctatcagctggtgaacatactgatgactttaggaagagtagtactaaatataaacggagcagattgtcactttcagatagtgaggctgatgaaatcgagaggaaccatgtatcaagagattcggtgcccaaagttccaaaacgacgaggtcgttctctttttacggaagagcaagagaggctcataagagacctttatgaaaaatataaggatggtcctaaatgcagtcatataatagctgagtctttagaccccagcgggaagatatcttctgctcaagtttctcgtaagcttacacagttaggtctcaggaatgtcacaaggagaaaaaaggttgcaggtgaatctctttcaactggagatcggactatagaacaacaagacaactcgcttgatgatctgaaccccatgctaggcgaacagaaccatggctccaaggctaaaagctccaggcccagaaggaaaaaattacacacggcaagtgatgaccatgatgacacaagtcagagaaaatcatctgatgaagacacattacaagtacttaaaagcagatcaaaaagtaagaaagttccattggtggatagttcactgagtggatcacagcatcaagaagctcagcatgacccagactctgatgatgcgaccataggatccatgattagaagtagaaaaaagaagaggttatccacgtcagattttgaagggaatgtacgaaaccatcaagaatcttcagacaacaccaaagccaaggactgttcaccgattatatcccaacatgagaaagcattgcaagacatttatcctgatgatgagaccattggatccatcattagaagtgtgaaaaagaagagatcagtgacatcaaatttctcagcgaatatagaagcccaagagtctttgagaaatattaacctacaagatgaaactgttgtttctaatatcatggatgcttctgtaaatcatgggtctgatccagtcaataacagtgacaatactgttgaagatgaacttttggatgattttgaaactgagctagtcaataacggtggcaatactgttgaagctgaacttttggatgattttgaagttgagctagatgatcatgagcatactgaccaaaggatcactgatgatgaaattatgactgaatcagggaaagcaacaaactccgatgctaagggaagggctggtttgaaaagaagacacagaatggttattgacgatgaggatgatgattagtaactgttcaggactgaagaacccgtaactattgaggagtggagtttcaaatgggaaatgggattaaaaaaagaacttttcaggattgtttcccttgcactgctaagctctgagcacgattcaagctgtttcacacctactagtgccagatgttcttccatctgtaatgtttagtggggtcacaatctaatggaattttgcagatgcaaagttcaggctgccctgctgtgtggcctgctgtacagactgataatttcgagtactgttttttttgaaatgaaatactgtagagaagccccccgcagcaatttcgagtactgttggctgtatttgaaactccgaacactgcaactctagcgaatgcgctcagttatactgttttcactt

SEQ ID NO: 63811 - DNA, 3810 bp, Zea Mays
tttacccctgttgcacttgtttactgaaacatctccaagaccaaggtgattgtattcaccaactgtagtctagtttttttcacatcattcaacccatatttcaatgatatcgtttttgtggatcatagttggatgaccaatgataaatgtgataagttgcaaactttattctcagaagatgactggaagttagttcagttggtgcttactttgttccgcaacgtcttggctattcaagaaatcacattgacgcagaaagcatctggagaagctacccacttactcttcctgtctgataactttttggagctcatgttccaagagaatgtgatggacataatcttagttttgactcagcatattgatgagccctctggttaccttaaggaggaaaaccttcttttaatggagatttaccattatctcttcttaggccgagacccaggactgattgcccgagcttctaataaaggtttaaaggatggatctaaatcattgtgcaaagggaacccaagctctgcatctgctaatagcctcttgaaaatacgtaatgtccaaagaggacctcagaaacggatagcctgggacaatgaacttctgtacgtaccaaaggagggtattacagaaatgcttagaagcttcatggatcaatttttatctggagcatacaatatcctgatgcagtcagtctgtggtgatatcatggatgagcaccactccattgagaaatctgacataactacattcttcaaagttgctcggtttgttctagcttttcaacatgaaaaggcttcaaatgatcagaaatctgctaaagggattcaaccatctggggtttctcctagcaatgaacctgatgataatctgccatttcatggtgatatatgtggacctgttgcggccacgttgaatgaagatatgttcaatatagtcatttccaggtggcgtgagacgtatgaggctcttaaggaaactaacgactacaaaactctttcagcagctgggtctttaatgaagaacatgattgacatgatatatttggtgctaaaagtactccctgaagattcaagggaatctcaaacagctcgtgttttgctctataaactgttttatgatcagacagaacatggtctcactcaatttctgctgaacttgttcagatcgtttgatagtcacaagcaacccaaaagtgatctagtggatttattagaaacaattcatatcatgctacagctcatggaaaagcttcaagcacgtggtgcattaagggttgcaaaaaagacaaaaaaggtcagaagaaagaagtccacaaatgataaaaaggagaattcagaacccaaagtggataatgcagaaccaaacgatgctaatcctacagatggaacgaaatgctcacctgaaacacttccagatttgagaagcgagggtcctgctttagaatcttctccctcagaacctggaaaagtagacactagtggcgcacatgtactggatacacttgtggacactgtagttaacattgagagtaccgcacatgctgaaggtgacccatcttgcacagacagtggcgtaatgaagagaaatctcattgaagaagagggtgagacttcagattcttcagttgatcaccaacctgctacaagtgaagttgattttaatgtttctcggttaatatctagtcttgcaaacaattctgttgtgcaaaatatttgctggctgttgaagcattacaaaagtaactcctaccgtacaaaccattacataatatgcatgctacggagattctgtgaagacctagagctgtcaccgatgctgtatcagctatcacttttaacaactttctatgatatattagcggaacaaaagttgtctagttcaaaggagtacacaaacattgtaaattttctttctaaagttgtgaggaaaatgttgagaacaataaaaaaacagccactgctatttgtcgacatactattttggaagacgcgaaaggagtgtcattgcattgatgctgatgcactactgaatgagcttaagaatgatgttggaagcaaagacagtgaaattggttcaagtaaggggtggagagatcgaataaatatagcagattctcttggtgacgatgaagttgacgtagttataccgcaggcaccttatgatgctgataaggatggagatctatcagctggtgaacatactgatgactttaggaagagtagtactaaatataaacggagcagattgtcactttcagatagtgaggctgatgaaatcgagaggttcttgaaccatgtatcaagagattcggtgcccaaagttccaaaacgacgaggtcgttctctttttacggaagagcaagagaggctcataagagacctttatgaaaaatataaggatggtcctaaatgcagtcatataatagctgagtctttagaccccagcgggaagatatcttctgctcaagtttctcgtaagcttacacagttaggtctcaggaatgtcacaaggagaaaaaaggttgcaggtgaatctctttcaactggagatcggactatagaacaacaagacaactcgcttgatgatctgaaccccatgctaggcgaacagaaccatggctccaaggctaaaagctccaggcccagaaggaaaaaattacacacggcaagtgatgaccatgatgacacaagtcagagaaaatcatctgatgaagacacattacaagtacttaaaagcagatcaaaaagtaagaaagttccattggtggatagttcactgagtggatcacagcatcaagaagctcagcatgacccagactctgatgatgcgaccataggatccatgattagaagtagaaaaaagaagaggttatccacgtcagattttgaagggaatgtacgaaaccatcaagaatcttcagacaacaccaaagccaaggactgttcaccgattatatcccaacatgagaaagcattgcaagacatttatcctgatgatgagaccattggatccatcattagaagtgtgaaaaagaagagatcagtgacatcaaatttctcagcgaatatagaagcccaagagtctttgagaaatattaacctacaagatgaaactgttgtttctaatatcatggatgcttctgtaaatcatgggtctgatccagtcaataacagtgacaatactgttgaagatgaacttttggatgattttgaaactgagctagtcaataacggtggcaatactgttgaagctgaacttttggatgattttgaagttgagctagatgatcatgagcatactgaccaaaggatcactgatgatgaaattatgactgaatcagggaaagcaacaaactccgatgctaagggaagggctggtttgaaaagaagacacagaatggttattgacgatgaggatgatgattagtaactgttcaggactgaagaacccgtaactattgaggagtggagtttcaaatgggaaatgggattaaaaaaagaacttttcaggattgtttcccttgcactgctaagctctgagcacgattcaagctgtttcacacctactagtgccagatgttcttccatctgtaatgtttagtggggtcacaatctaatggaattttgcagatgcaaagttcaggctgccctgctgtgtggcctgctgtacagactgataatttcgagtactgttttttttgaaatgaaatactgtagagaagccccccgcagcaatttcgagtactgttggctgtatttgaaactccgaacactgcaactctagcgaatgcgctcagttatactgttttcactt

SEQ ID NO: 63812 - DNA, 3951 bp, Zea Mays
tttacccctgttgcacttgtttactgaaacatctccaagaccaaggtgattgtattcaccaactgtagtctagtttttttcacatcattcaacccatatttcaatgatatcgtttttgtggatcatagttggatgaccaatgataaatgtgataagttgcaaactttattctcagaagatgactggaagttagttcagttggtgcttactttgttccgcaacgtcttggctattcaagaaatcacattgacgcagaaagcatctggagaagctacccacttactcttcctgtctgataactttttggagctcatgttccaagagaatgtgatggacataatcttagttttgactcagcatattgatgagccctctggttaccttaaggaggaaaaccttcttttaatggagatttaccattatctcttcttaggccgagacccaggactgattgcccgagcttctaataaaggtttaaaggatcgtgttaacggagatattgtttcatcagttgattcattgagattgatgatggaagaggaagaaaggaaaaaaagaatgttcaggcaattgaactcagaacatagctcgcttagtgggacttttacgtgcttttctgtggatggatctaaatcattgtgcaaagggaacccaagctctgcatctgctaatagcctcttgaaaatacgtaatgtccaaagaggacctcagaaacggatagcctgggacaatgaacttctgtacgtaccaaaggagggtattacagaaatgcttagaagcttcatggatcaatttttatctggagcatacaatatcctgatgcagtcagtctgtggtgatatcatggatgagcaccactccattgagaaatctgacataactacattcttcaaagttgctcggtttgttctagcttttcaacatgaaaaggcttcaaatgatcagaaatctgctaaagggattcaaccatctggggtttctcctagcaatgaacctgatgataatctgccatttcatggtgatatatgtggacctgttgcggccacgttgaatgaagatatgttcaatatagtcatttccaggtggcgtgagacgtatgaggctcttaaggaaactaacgactacaaaactctttcagcagctgggtctttaatgaagaacatgattgacatgatatatttggtgctaaaagtactccctgaagattcaagggaatctcaaacagctcgtgttttgctctataaactgttttatgatcagacagaacatggtctcactcaatttctgctgaacttgttcagatcgtttgatagtcacaagcaacccaaaagtgatctagtggatttattagaaacaattcatatcatgctacagctcatggaaaagcttcaagcacgtggtgcattaagggttgcaaaaaagacaaaaaaggtcagaagaaagaagtccacaaatgataaaaaggagaattcagaacccaaagtggataatgcagaaccaaacgatgctaatcctacagatggaacgaaatgctcacctgaaacacttccagatttgagaagcgagggtcctgctttagaatcttctccctcagaacctggaaaagtagacactagtggcgcacatgtactggatacacttgtggacactgtagttaacattgagagtaccgcacatgctgaaggtgacccatcttgcacagacagtggcgtaatgaagagaaatctcattgaagaagagggtgagacttcagattcttcagttgatcaccaacctgctacaagtgaagttgattttaatgtttctcggttaatatctagtcttgcaaacaattctgttgtgcaaaatatttgctggctgttgaagcattacaaaagtaactcctaccgtacaaaccattacataatatgcatgctacggagattctgtgaagacctagagctgtcaccgatgctgtatcagctatcacttttaacaactttctatgatatattagcggaacaaaagttgtctagttcaaaggagtacacaaacattgtaaattttctttctaaagttgtgaggaaaatgttgagaacaataaaaaaacagccactgctatttgtcgacatactattttggaagacgcgaaaggagtgtcattgcattgatgctgatgcactactgaatgagcttaagaatgatgttggaagcaaagacagtgaaattggttcaagtaaggggtggagagatcgaataaatatagcagattctcttggtgacgatgaagttgacgtagttataccgcaggcaccttatgatgctgataaggatggagatctatcagctggtgaacatactgatgactttaggaagagtagtactaaatataaacggagcagattgtcactttcagatagtgaggctgatgaaatcgagaggttcttgaaccatgtatcaagagattcggtgcccaaagttccaaaacgacgaggtcgttctctttttacggaagagcaagagaggctcataagagacctttatgaaaaatataaggatggtcctaaatgcagtcatataatagctgagtctttagaccccagcgggaagatatcttctgctcaagtttctcgtaagcttacacagttaggtctcaggaatgtcacaaggagaaaaaaggttgcaggtgaatctctttcaactggagatcggactatagaacaacaagacaactcgcttgatgatctgaaccccatgctaggcgaacagaaccatggctccaaggctaaaagctccaggcccagaaggaaaaaattacacacggcaagtgatgaccatgatgacacaagtcagagaaaatcatctgatgaagacacattacaagtacttaaaagcagatcaaaaagtaagaaagttccattggtggatagttcactgagtggatcacagcatcaagaagctcagcatgacccagactctgatgatgcgaccataggatccatgattagaagtagaaaaaagaagaggttatccacgtcagattttgaagggaatgtacgaaaccatcaagaatcttcagacaacaccaaagccaaggactgttcaccgattatatcccaacatgagaaagcattgcaagacatttatcctgatgatgagaccattggatccatcattagaagtgtgaaaaagaagagatcagtgacatcaaatttctcagcgaatatagaagcccaagagtctttgagaaatattaacctacaagatgaaactgttgtttctaatatcatggatgcttctgtaaatcatgggtctgatccagtcaataacagtgacaatactgttgaagatgaacttttggatgattttgaaactgagctagtcaataacggtggcaatactgttgaagctgaacttttggatgattttgaagttgagctagatgatcatgagcatactgaccaaaggatcactgatgatgaaattatgactgaatcagggaaagcaacaaactccgatgctaagggaagggctggtttgaaaagaagacacagaatggttattgacgatgaggatgatgattagtaactgttcaggactgaagaacccgtaactattgaggagtggagtttcaaatgggaaatgggattaaaaaaagaacttttcaggattgtttcccttgcactgctaagctctgagcacgattcaagctgtttcacacctactagtgccagatgttcttccatctgtaatgtttagtggggtcacaatctaatggaattttgcagatgcaaagttcaggctgccctgctgtgtggcctgctgtacagactgataatttcgagtactgttttttttgaaatgaaatactgtagagaagccccccgcagcaatttcgagtactgttggctgtatttgaaactccgaacactgcaactctagcgaatgcgctcagttatactgttttcactt

SEQ ID NO: 63813 - DNA, 3839 bp, Zea Mays
tttacccctgttgcacttgtttactgaaacatctccaagaccaaggtgattgtattcaccaactgtagtctagtttttttcacatcattcaacccatatttcaatgatatcgtttttgtggatcatagttggatgaccaatgataaatgtgataagttgcaaactttattctcagaagatgactggaagttagttcagttggtgcttactttgttccgcaacgtcttggctattcaagaaatcacattgacgcagaaagcatctggagaagctacccacttactcttcctgtctgataactttttggagctcatgttccaagagaatgtgatggacataatcttagttttgactcagcatattgatgagccctctggttaccttaaggaggaaaaccttcttttaatggagatttaccattatctcttcttaggccgagacccaggactgattgcccgagcttctaataaaggtttaaaggatcgtgttaacggagatattgtttcatcagttgattcattgagattgatgatggaagaggaagaaaggaaaaaaagaatgttcaggcaattgaactcagaacatagctcgcttagtgggacttttacgtgcttttctgtggatggatctaaatcattgtgcaaagggaacccaagctctgcatctgctaatagcctcttgaaaatacgtaatgtccaaagaggacctcagaaacggatagcctgggacaatgaacttctgtacgtaccaaaggagggtattacagaaatgcttagaagcttcatggatcaatttttatctggagcatacaatatcctgatgcagtcagtctgtggtgatatcatggatgagcaccactccattgagaaatctgacataactacattcttcaaagttgctcggtttgttctagcttttcaacatgaaaaggcttcaaatgatcagaaatctgctaaagggattcaaccatctggggtttctcctagcaatgaacctgatgataatctgccatttcatggtgatatatgtggacctgttgcggccacgttgaatgaagatatgttcaatatagtcatttccaggtggcgtgagacgtatgaggctcttaaggaaactaacgactacaaaactctttcagcagctgggtctttaatgaagaacatgattgacatgatatatttggtgctaaaagtactccctgaagattcaagggaatctcaaacagctcgtgttttgctctataaactgttttatgatcagacagaacatggtctcactcaatttctgctgaacttgttcagatcgtttgatagtcacaagcaacccaaaagtgatctagtggatttattagaaacaattcatatcatgctacagctcatggaaaagcttcaagcacgtggtgcattaagggttgcaaaaaagacaaaaaaggtcagaagaaagaagtccacaaatgataaaaaggagaattcagaacccaaagtggataatgcagaaccaaacgatgctaatcctacagatggaacgaaatgctcacctgaaacacttccagatttgagaagcgagggtcctgctttagaatcttctccctcagaacctggaaaagtagacactagtggcgcacatgtactggatacacttgtggacactgtagttaacattgagagtaccgcacatgctgaaggtgacccatcttgcacagacagtggcgtaatgaagagaaatctcattgaagaagagggtgagacttcagattcttcagttgatcaccaacctgctacaagtgaagttgattttaatgtttctcggttaatatctagtcttgcaaacaattctgttgtgcaaaatatttgctggctgttgaagcattacaaaagtaactcctaccgtacaaaccattacataatatgcatgctacggagattctgtgaagacctagagctgtcaccgatgctgtatcagctatcacttttaacaactttctatgatatattagcggaacaaaagttgtctagttcaaaggagtacacaaacattgtaaattttctttctaaagttgtgaggaaaatgttgagaacaataaaaaaacagccactgctatttgtcgacatactattttggaagacgcgaaaggagtgtcattgcattgatgctgatgcactactgaatgagcttaagaatgatgttggaagcaaagacagtgaaattggttcaagtaaggggtggagagatcgaataaatatagcagattctcttggtgacgatgaagttgacgtagttataccgcaggcaccttatgatgctgataaggatggagatctatcagctggtgaacatactgatgactttaggaagagtagtactaaatataaacggagcagattgtcactttcagatagtgaggctgatgaaatcgagaggttcttgaaccatgtatcaagagattcggtgcccaaagttccaaaacgacgaggtcgttctctttttacggaagagcaagagaggctcataagagacctttatgaaaaatataaggatggtcctaaatgcagtcatataatagctgagtctttagaccccagcgggaagatatcttctgctcaagtttctcgtaagcttacacagttaggtctcaggaatgtcacaaggagaaaaaaggttgcaggcccagaaggaaaaaattacacacggcaagtgatgaccatgatgacacaagtcagagaaaatcatctgatgaagacacattacaagtacttaaaagcagatcaaaaagtaagaaagttccattggtggatagttcactgagtggatcacagcatcaagaagctcagcatgacccagactctgatgatgcgaccataggatccatgattagaagtagaaaaaagaagaggttatccacgtcagattttgaagggaatgtacgaaaccatcaagaatcttcagacaacaccaaagccaaggactgttcaccgattatatcccaacatgagaaagcattgcaagacatttatcctgatgatgagaccattggatccatcattagaagtgtgaaaaagaagagatcagtgacatcaaatttctcagcgaatatagaagcccaagagtctttgagaaatattaacctacaagatgaaactgttgtttctaatatcatggatgcttctgtaaatcatgggtctgatccagtcaataacagtgacaatactgttgaagatgaacttttggatgattttgaaactgagctagtcaataacggtggcaatactgttgaagctgaacttttggatgattttgaagttgagctagatgatcatgagcatactgaccaaaggatcactgatgatgaaattatgactgaatcagggaaagcaacaaactccgatgctaagggaagggctggtttgaaaagaagacacagaatggttattgacgatgaggatgatgattagtaactgttcaggactgaagaacccgtaactattgaggagtggagtttcaaatgggaaatgggattaaaaaaagaacttttcaggattgtttcccttgcactgctaagctctgagcacgattcaagctgtttcacacctactagtgccagatgttcttccatctgtaatgtttagtggggtcacaatctaatggaattttgcagatgcaaagttcaggctgccctgctgtgtggcctgctgtacagactgataatttcgagtactgttttttttgaaatgaaatactgtagagaagccccccgcagcaatttcgagtactgttggctgtatttgaaactccgaacactgcaactctagcgaatgcgctcagttatactgttttcactt

SEQ ID NO: 63814 - DNA, 4002 bp, Zea Mays
tttacccctgttgcacttgtttactgaaacatctccaagaccaaggtgattgtattcaccaactgtagtctagtttttttcacatcattcaacccatatttcaatgatatcgtttttgtggatcatagttggatgaccaatgataaatgtgataagttgcaaactttattctcagaagatgactggaagttagttcagttggtgcttactttgttccgcaacgtcttggctattcaagaaatcacattgacgcagaaagcatctggagaagctacccacttactcttcctgtctgataactttttggagctcatgttccaagagaatgtgatggacataatcttagttttgactcagcatattgatgagccctctggttaccttaaggaggaaaaccttcttttaatggagatttaccattatctcttcttaggccgagacccaggactgattgcccgagcttctaataaaggtttaaaggatcgtgttaacggagatattgtttcatcagttgattcattgagattgatgatggaagaggaagaaaggaaaaaaagaatgttcaggcaattgaactcagaacatagctcgcttagtgggacttttacgtgcttttctgtggatggatctaaatcattgtgcaaagggaacccaagctctgcatctgctaatagcctcttgaaaatacgtaatgtccaaagaggacctcagaaacggatagcctgggacaatgaacttctgtacgtaccaaaggagggtattacagaaatgcttagaagcttcatggatcaatttttatctggagcatacaatatcctgatgcagtcagtctgtggtgatatcatggatgagcaccactccattgagaaatctgacataactacattcttcaaagttgctcggtttgttctagcttttcaacatgaaaaggcttcaaatgatcagctaccgcagttatatcttggcttatttgtgatgaatatcataactatgtctatccagaaatctgctaaagggattcaaccatctggggtttctcctagcaatgaacctgatgataatctgccatttcatggtgatatatgtggacctgttgcggccacgttgaatgaagatatgttcaatatagtcatttccaggtggcgtgagacgtatgaggctcttaaggaaactaacgactacaaaactctttcagcagctgggtctttaatgaagaacatgattgacatgatatatttggtgctaaaagtactccctgaagattcaagggaatctcaaacagctcgtgttttgctctataaactgttttatgatcagacagaacatggtctcactcaatttctgctgaacttgttcagatcgtttgatagtcacaagcaacccaaaagtgatctagtggatttattagaaacaattcatatcatgctacagctcatggaaaagcttcaagcacgtggtgcattaagggttgcaaaaaagacaaaaaaggtcagaagaaagaagtccacaaatgataaaaaggagaattcagaacccaaagtggataatgcagaaccaaacgatgctaatcctacagatggaacgaaatgctcacctgaaacacttccagatttgagaagcgagggtcctgctttagaatcttctccctcagaacctggaaaagtagacactagtggcgcacatgtactggatacacttgtggacactgtagttaacattgagagtaccgcacatgctgaaggtgacccatcttgcacagacagtggcgtaatgaagagaaatctcattgaagaagagggtgagacttcagattcttcagttgatcaccaacctgctacaagtgaagttgattttaatgtttctcggttaatatctagtcttgcaaacaattctgttgtgcaaaatatttgctggctgttgaagcattacaaaagtaactcctaccgtacaaaccattacataatatgcatgctacggagattctgtgaagacctagagctgtcaccgatgctgtatcagctatcacttttaacaactttctatgatatattagcggaacaaaagttgtctagttcaaaggagtacacaaacattgtaaattttctttctaaagttgtgaggaaaatgttgagaacaataaaaaaacagccactgctatttgtcgacatactattttggaagacgcgaaaggagtgtcattgcattgatgctgatgcactactgaatgagcttaagaatgatgttggaagcaaagacagtgaaattggttcaagtaaggggtggagagatcgaataaatatagcagattctcttggtgacgatgaagttgacgtagttataccgcaggcaccttatgatgctgataaggatggagatctatcagctggtgaacatactgatgactttaggaagagtagtactaaatataaacggagcagattgtcactttcagatagtgaggctgatgaaatcgagaggaaccatgtatcaagagattcggtgcccaaagttccaaaacgacgaggtcgttctctttttacggaagagcaagagaggctcataagagacctttatgaaaaatataaggatggtcctaaatgcagtcatataatagctgagtctttagaccccagcgggaagatatcttctgctcaagtttctcgtaagcttacacagttaggtctcaggaatgtcacaaggagaaaaaaggttgcaggtgaatctctttcaactggagatcggactatagaacaacaagacaactcgcttgatgatctgaaccccatgctaggcgaacagaaccatggctccaaggctaaaagctccaggcccagaaggaaaaaattacacacggcaagtgatgaccatgatgacacaagtcagagaaaatcatctgatgaagacacattacaagtacttaaaagcagatcaaaaagtaagaaagttccattggtggatagttcactgagtggatcacagcatcaagaagctcagcatgacccagactctgatgatgcgaccataggatccatgattagaagtagaaaaaagaagaggttatccacgtcagattttgaagggaatgtacgaaaccatcaagaatcttcagacaacaccaaagccaaggactgttcaccgattatatcccaacatgagaaagcattgcaagacatttatcctgatgatgagaccattggatccatcattagaagtgtgaaaaagaagagatcagtgacatcaaatttctcagcgaatatagaagcccaagagtctttgagaaatattaacctacaagatgaaactgttgtttctaatatcatggatgcttctgtaaatcatgggtctgatccagtcaataacagtgacaatactgttgaagatgaacttttggatgattttgaaactgagctagtcaataacggtggcaatactgttgaagctgaacttttggatgattttgaagttgagctagatgatcatgagcatactgaccaaaggatcactgatgatgaaattatgactgaatcagggaaagcaacaaactccgatgctaagggaagggctggtttgaaaagaagacacagaatggttattgacgatgaggatgatgattagtaactgttcaggactgaagaacccgtaactattgaggagtggagtttcaaatgggaaatgggattaaaaaaagaacttttcaggattgtttcccttgcactgctaagctctgagcacgattcaagctgtttcacacctactagtgccagatgttcttccatctgtaatgtttagtggggtcacaatctaatggaattttgcagatgcaaagttcaggctgccctgctgtgtggcctgctgtacagactgataatttcgagtactgttttttttgaaatgaaatactgtagagaagccccccgcagcaatttcgagtactgttggctgtatttgaaactccgaacactgcaactctagcgaatgcgctcagttatactgttttcactt

SEQ ID NO: 63815 - DNA, 2168 bp, Zea Mays
ctgccattcattgcatgtggaaatatgttagagagattcttggatgtgacttgataaatgggggtcaggatttgtcgttgttagatgaggcaccagtttccatcggtgaagatgacactgaatctagtttgctacttaacttcctttctcaattgaaagaagaaaaggcgatgcagtctgccaagttatcggcagagcttggaagcttacaaacagatatcacagaggttgacaaaagacactcagcaagaatgagattgagtttagatgatacagatgtactgccaagttctagtgctttgtcaggagcttctgtgagtgcccttcaaggtgcattgctgtcaggtttgttaccagcgtcatacaagtcgagcatatatgaggagagggtaatgaggaatttggtgcagcttgaaaatgcatactactccatgaggtcctcgctggacacctgtgaaacaaatgtaatcaaacggccagataacgaggctttgagggcccgtgaaaatttccatcaacttcatagtgattctgatgccaaggacgagaaaacagatcgtcttggatgcttttttgatggtttatgcaaatatgcccggcacaataggtttgaggtacgaggaattttgaagaatgcagatatacttaactctccgaatgtcatctgttcgttgagttttgatagggatgaagaatattttgctgctgctggagtttcaaagaaaataaaaatatttgaatttgatgcactcttaaatgatcgtgttgatattcattacccactgatagagatgcctagcaagtccaagcttagctgtgtctgttggaacaactatataaagaactacctggcttcaacagactatgatggcactgttcagctatgggatgccagctctggtcaaggattcacacagtttacagagcaccggaaaaggacttggtctgtgagtttttcagatgtcgaccctactaagttggcaagtggtagtgatgattgttgcgtgaaagtatggagtattaatcagaaaaattgtgttgatacaatcagaaatgtggccaatgtatgctgtgtacaattctctccatactcctcccgcatgctagcttttggttcagctgattacaagatatactgttatgatctgaggaacacaaggataccttggtgtactattttgggacatgggaaagctgtcagttatgtgaggttcttggatccatacacacttgtctctgcatcaaccgacaacacattgaagatatgggatcttaaccagactaattgcagtggattatctaccgattcttgcagcctgactctgaatggtcataccaatgagaagaattttgtagggctatctgttcatgatggatacataacttgtggctctgaaaccaatgaagtgttttcttactacaaaactttccccatgccaataacttctcataggtttggttctattgacccgataactggacaagtgacaaatgaagacaaccagcaatttgtgtccagtgtttgctggagagggaagtcaaacatggtagtggctgccaactccagtggtagcatcaaagtgcttgagcttgtgtgaatgaacgagagtcatattggagaagaaggttctagtgttgccatgcgggcctgcgatgctttcgtgcccttgggcactaaaagactcgactgctctatgcaagcatcctacaacaccgatcattggttattggaagctttgcttgaaactcacaagcaaactaaagtttttttttttccaagagtatgatggcctcacctccatttttgtgtttggcattttgagacggtacctattcatcgtgatgcaaacttcttttgggctagaggtgcgcgggacttgctatgactgttaagagcaaacgatggaaagaaagggaaaaaaatgatcatgtagctcgaagaagttaatcgtgctgtgtgaatgtttcaaggagaatgtctcaaatagttttatacccccttcattattgtacatatatctagggctgcctaatgaaaggccttgtaagttgtaactagagtagaatgctgatcatgagttaagtataatgaatggtcttcacaaaagattaatcaatggaagattcatacaaagtataatgaatgattatccttttggctggaacaa

SEQ ID NO: 63816 - DNA, 2196 bp, Zea Mays
tttggagacaaaataagaaaaatgcttactgattagtaattagtttgatacaagtaaagagagattcttggatgtgacttgataaatgggggtcaggatttgtcgttgttagatgaggcaccagtttccatcggtgaagatgacactgaatctagtttgctacttaacttcctttctcaattgaaagaagaaaaggcgatgcagtctgccaagttatcggcagagcttggaagcttacaaacagatatcacagaggttgacaaaagacactcagcaagaatgagattgagtttagatgatacagatgtactgccaagttctagtgctttgtcaggagcttctgtgagtgcccttcaaggtgcattgctgtcaggtttgttaccagcgtcatacaagtcgagcatatatgaggagagggtaatgaggaatttggtgcagcttgaaaatgcatactactccatgaggtcctcgctggacacctgtgaaacaaatgtaatcaaacggccagataacgaggctttgagggcccgtgaaaatttccatcaacttcatagtgattctgatgccaaggacgagaaaacagatcgtcttggatgcttttttgatggtttatgcaaatatgcccggcacaataggtttgaggtacgaggaattttgaagaatgcagatatacttaactctccgaatgtcatctgttcgttgagttttgatagggatgaagaatattttgctgctgctggagtttcaaagaaaataaaaatatttgaatttgatgcactcttaaatgatcgtgttgatattcattacccactgatagagatgcctagcaagtccaagcttagctgtgtctgttggaacaactatataaagaactacctggcttcaacagactatgatggcactgttcagctatgggatgccagctctggtcaaggattcacacagtttacagagcaccggaaaaggacttggtctgtgagtttttcagatgtcgaccctactaagttggcaagtggtagtgatgattgttgcgtgaaagtatggagtattaatcagaaaaattgtgttgatacaatcagaaatgtggccaatgtatgctgtgtacaattctctccatactcctcccgcatgctagcttttggttcagctgattacaagatatactgttatgatctgaggaacacaaggataccttggtgtactattttgggacatgggaaagctgtcagttatgtgaggttcttggatccatacacacttgtctctgcatcaaccgacaacacattgaagatatgggatcttaaccagactaattgcagtggattatctaccgattcttgcagcctgactctgaatggtcataccaatgagaagaattttgtagggctatctgttcatgatggatacataacttgtggctctgaaaccaatgaagtgttttcttactacaaaactttccccatgccaataacttctcataggtttggttctattgacccgataactggacaagtgacaaatgaagacaaccagcaatttgtgtccagtgtttgctggagagggaagtcaaacatggtagtggctgccaactccagtggtagcatcaaagtgcttgagcttgtgtgaatgaacgagagtcatattggagaagaaggttctagtgttgccatgcgggcctgcgatgctttcgtgcccttgggcactaaaagactcgactgctctatgcaagcatcctacaacaccgatcattggttattggaagctttgcttgaaactcacaagcaaactaaagtttttttttttccaagagtatgatggcctcacctccatttttgtgtttggcattttgagacggtacctattcatcgtgatgcaaacttcttttgggctagaggtgcgcgggacttgctatgactgttaagagcaaacgatggaaagaaagggaaaaaaatgatcatgtagctcgaagaagttaatcgtgctgtgtgaatgtttcaaggagaatgtctcaaatagttttatacccccttcattattgtacatatatctagggctgcctaatgaaaggccttgtaagttgtaactagagtagaatgctgatcatgagttaagtataatgaatggtcttcacaaaagattaatcaatggaagattcatacaaagtataatgaatgattatccttttggctggaacaa

SEQ ID NO: 63817 - DNA, 4118 bp, Zea Mays
gcggctcgctgctggtctgttgcgcgcgcccgccgcgaggtatggctccccgccgctgaatcggtcctggggcggtttttgcctttgcgcgacttggcccgtgcgccgtgaccttattgcgcgggcgacgcgcggttttcgcagggtaggtttggtgccatggaagggacggcggcggaggtgggcggcgctggcgctgacgcggccggggatgtgcagattaagggtgccaaggagaatgcgcagcccacggcggcgcagcagcagcagccgtccggcagcgaggcgctggagatgccggccacgccactccagcgggacatagactggtccgagcatttctccttcttcacctcgctgggtgggttcgggggcagctcggacggcgcgaggggcctcaccagcgtcggcctgtccaattccgagtccaggccagacagtgtggcacagcgtggcttggaccacgacactgaagagagggtggaggagctcacattgaagaattgcatcaatactggtatccagcctgaggtttctgctggtgggagcacaagcagcagggataggcctacccgtattaagggcctgtggggtaattttacacggatcgcccggagaactagcgatttggccagcagggaaaacaccgcactgagttctggcgacattgcaaacttgagggctggtgatgcttctagcatggaaaagctggcgacgagccttgccagcaatatcatctcaaggaacaacaatgcgtctggcaatgaggcacctatgagtcatgttggatatgtcaataatgagttcatgatgtgcagccagcagattctcttgtctccatggtctaatcaggataatgctcttaaagtaagcagcttctcaaataggattcttaaccggatgagaagtaagactgtggcaccctcatctagggttctacgatcaccacttcaaatcaaatcaaaaggtaaaggggttgtgtgccaaggtgcacgggaggagatccaagtgcaagctaatgcaagacccagagaccctttggacaagattccgactattcctagctcaattcatgattgtatggccagagtggaccatatgcttttcagtactggtggaaatgttacaaaatcccactctgagggatctagcctgagggaactgattaagcctgggtggcaaacaatgactaagtttgagaaaatgcatttgtttaagcagatcattgatcttgtggataagtgtcatgcacagggttttactttgcagcatttgcgaccatcatattttatggtcctttcttcaaatcaagttaaatatatcggctcttataccacacaagatttgccaacatcaatcaaacaagaggttgctagagaagatcttgtgaatagaaaaagaacttttggacagagaattgatcaccaagagtctaatgaccatggaaatttgacgctgaagtatcaaaaggttgatgagcaaggctcagtcgctatcaggcaaccagcaaatacattttggaccgacaaaatatgtgacaatcaaaatgaagatgtcaatcgaggtgttttgaggcaagaaaattttagccacactgccagagaaggttttaagttggtcgaaccatatggcagtaatatatcttgtgctcagcatgtatctagttctgccacccaacaaccagcatttgaattgaggaatcttgaggaaagctggtacaaaagcccagaggagctcagtcaatttaaaggcacattcccatcaaacatctacagccttggggttcttctatttgagctcttttgctgttctgagacatgggaggtgcactgtgctgcaatgtcaaatcttcgtcaacgcatcctgcctccaaattttctttcagaaagtcccaaggaggctggcttctgcctttggttgctgcatccagatccttgttcaagaccaaaagcaaaagagattcttggatgtgacttgataaatgggggtcaggatttgtcgttgttagatgaggcaccagtttccatcggtgaagatgacactgaatctagtttgctacttaacttcctttctcaattgaaagaagaaaaggcgatgcagtctgccaagttatcggcagagcttggaagcttacaaacagatatcacagaggttgacaaaagacactcagcaagaatgagattgagtttagatgatacagatgtactgccaagttctagtgctttgtcaggagcttctgtgagtgcccttcaaggtgcattgctgtcaggtttgttaccagcgtcatacaagtcgagcatatatgaggagagggtaatgaggaatttggtgcagcttgaaaatgcatactactccatgaggtcctcgctggacacctgtgaaacaaatgtaatcaaacggccagataacgaggctttgagggcccgtgaaaatttccatcaacttcatagtgattctgatgccaaggacgagaaaacagatcgtcttggatgcttttttgatggtttatgcaaatatgcccggcacaataggtttgaggtacgaggaattttgaagaatgcagatatacttaactctccgaatgtcatctgttcgttgagttttgatagggatgaagaatattttgctgctgctggagtttcaaagaaaataaaaatatttgaatttgatgcactcttaaatgatcgtgttgatattcattacccactgatagagatgcctagcaagtccaagcttagctgtgtctgttggaacaactatataaagaactacctggcttcaacagactatgatggcactgttcagctatgggatgccagctctggtcaaggattcacacagtttacagagcaccggaaaaggacttggtctgtgagtttttcagatgtcgaccctactaagttggcaagtggtagtgatgattgttgcgtgaaagtatggagtattaatcagaaaaattgtgttgatacaatcagaaatgtggccaatgtatgctgtgtacaattctctccatactcctcccgcatgctagcttttggttcagctgattacaagatatactgttatgatctgaggaacacaaggataccttggtgtactattttgggacatgggaaagctgtcagttatgtgaggttcttggatccatacacacttgtctctgcatcaaccgacaacacattgaagatatgggatcttaaccagactaattgcagtggattatctaccgattcttgcagcctgactctgaatggtcataccaatgagaaggtgttttcttactacaaaactttccccatgccaataacttctcataggtttggttctattgacccgataactggacaagtgacaaatgaagacaaccagcaatttgtgtccagtgtttgctggagagggaagtcaaacatggtagtggctgccaactccagtggtagcatcaaagtgcttgagcttgtgtgaatgaacgagagtcatattggagaagaaggttctagtgttgccatgcgggcctgcgatgctttcgtgcccttggtgatgctctgatggccctgcttatccagtgtctgcaccctcaatggaagcactaaccattggtctgcatttcactgttttgacagggcactaaaagactcgactgctctatgcaagcatcctacaacaccgatcattggttattggaagctttgcttgaaactcacaagcaaactaaagtttttttttttccaagagtatgatggcctcacctccatttttgtgtttggcattttgagacggtacctattcatcgtgatgcaaacttcttttgggctagaggtgcgcgggacttgctatgactgttaagagcaaacgatggaaagaaagggaaaaaaatgatcatgtagctcgaagaagttaatcgtgctgtgtgaatgtttcaaggagaatgtctcaaatagttttatacccccttcattattgtacatatatctagggctgcctaatgaaaggccttgtaagttgtaactagagtagaatgctgatcatgagttaagtataatgaatggtcttcacaaaagattaatcaatggaagattcatacaaagtataatgaatgattatccttttggctggaacaa

SEQ ID NO: 63818 - DNA, 4005 bp, Zea Mays
cgaggatgcgccgcgcgggcggctcgctgctggtctgttgcgcgcgcccgccgcgagggtaggtttggtgccatggaagggacggcggcggaggtgggcggcgctggcgctgacgcggccggggatgtgcagattaagggtgccaaggagaatgcgcagcccacggcggcgcagcagcagcagccgtccggcagcgaggcgctggagatgccggccacgccactccagcgggacatagactggtccgagcatttctccttcttcacctcgctgggtgggttcgggggcagctcggacggcgcgaggggcctcaccagcgtcggcctgtccaattccgagtccaggccagacagtgtggcacagcgtggcttggaccacgacactgaagagagggtggaggagctcacattgaagaattgcatcaatactggtatccagcctgaggtttctgctggtgggagcacaagcagcagggataggcctacccgtattaagggcctgtggggtaattttacacggatcgcccggagaactagcgatttggccagcagggaaaacaccgcactgagttctggcgacattgcaaacttgagggctggtgatgcttctagcatggaaaagctggcgacgagccttgccagcaatatcatctcaaggaacaacaatgcgtctggcaatgaggcacctatgagtcatgttggatatgtcaataatgagttcatgatgtgcagccagcagattctcttgtctccatggtctaatcaggataatgctcttaaagtaagcagcttctcaaataggattcttaaccggatgagaagtaagactgtggcaccctcatctagggttctacgatcaccacttcaaatcaaatcaaaaggtaaaggggttgtgtgccaaggtgcacgggaggagatccaagtgcaagctaatgcaagacccagagaccctttggacaagattccgactattcctagctcaattcatgattgtatggccagagtggaccatatgcttttcagtactggtggaaatgttacaaaatcccactctgagggatctagcctgagggaactgattaagcctgggtggcaaacaatgactaagtttgagaaaatgcatttgtttaagcagatcattgatcttgtggataagtgtcatgcacagggttttactttgcagcatttgcgaccatcatattttatggtcctttcttcaaatcaagttaaatatatcggctcttataccacacaagatttgccaacatcaatcaaacaagaggttgctagagaagatcttgtgaatagaaaaagaacttttggacagagaattgatcaccaagagtctaatgaccatggaaatttgacgctgaagtatcaaaaggttgatgagcaaggctcagtcgctatcaggcaaccagcaaatacattttggaccgacaaaatatgtgacaatcaaaatgaagatgtcaatcgaggtgttttgaggcaagaaaattttagccacactgccagagaaggttttaagttggtcgaaccatatggcagtaatatatcttgtgctcagcatgtatctagttctgccacccaacaaccagcatttgaattgaggaatcttgaggaaagctggtacaaaagcccagaggagctcagtcaatttaaaggcacattcccatcaaacatctacagccttggggttcttctatttgagctcttttgctgttctgagacatgggaggtgcactgtgctgcaatgtcaaatcttcgtcaacgcatcctgcctccaaattttctttcagaaagtcccaaggaggctggcttctgcctttggttgctgcatccagatccttgttcaagaccaaaagcaaaagagattcttggatgtgacttgataaatgggggtcaggatttgtcgttgttagatgaggcaccagtttccatcggtgaagatgacactgaatctagtttgctacttaacttcctttctcaattgaaagaagaaaaggcgatgcagtctgccaagttatcggcagagcttggaagcttacaaacagatatcacagaggttgacaaaagacactcagcaagaatgagattgagtttagatgatacagatgtactgccaagttctagtgctttgtcaggagcttctgtgagtgcccttcaaggtgcattgctgtcaggtttgttaccagcgtcatacaagtcgagcatatatgaggagagggtaatgaggaatttggtgcagcttgaaaatgcatactactccatgaggtcctcgctggacacctgtgaaacaaatgtaatcaaacggccagataacgaggctttgagggcccgtgaaaatttccatcaacttcatagtgattctgatgccaaggacgagaaaacagatcgtcttggatgcttttttgatggtttatgcaaatatgcccggcacaataggtttgaggtacgaggaattttgaagaatgcagatatacttaactctccgaatgtcatctgttcgttgagttttgatagggatgaagaatattttgctgctgctggagtttcaaagaaaataaaaatatttgaatttgatgcactcttaaatgatcgtgttgatattcattacccactgatagagatgcctagcaagtccaagcttagctgtgtctgttggaacaactatataaagaactacctggcttcaacagactatgatggcactgttcagctatgggatgccagctctggtcaaggattcacacagtttacagagcaccggaaaaggacttggtctgtgagtttttcagatgtcgaccctactaagttggcaagtggtagtgatgattgttgcgtgaaagtatggagtattaatcagaaaaattgtgttgatacaatcagaaatgtggccaatgtatgctgtgtacaattctctccatactcctcccgcatgctagcttttggttcagctgattacaagatatactgttatgatctgaggaacacaaggataccttggtgtactattttgggacatgggaaagctgtcagttatgtgaggttcttggatccatacacacttgtctctgcatcaaccgacaacacattgaagatatgggatcttaaccagactaattgcagtggattatctaccgattcttgcagcctgactctgaatggtcataccaatgagaagaattttgtagggctatctgttcatgatggatacataacttgtggctctgaaaccaatgaagtgttttcttactacaaaactttccccatgccaataacttctcataggtttggttctattgacccgataactggacaagtgacaaatgaagacaaccagcaatttgtgtccagtgtttgctggagagggaagtcaaacatggtagtggctgccaactccagtggtagcatcaaagtgcttgagcttgtgtgaatgaacgagagtcatattggagaagaaggttctagtgttgccatgcgggcctgcgatgctttcgtgcccttgggcactaaaagactcgactgctctatgcaagcatcctacaacaccgatcattggttattggaagctttgcttgaaactcacaagcaaactaaagtttttttttttccaagagtatgatggcctcacctccatttttgtgtttggcattttgagacggtacctattcatcgtgatgcaaacttcttttgggctagaggtgcgcgggacttgctatgactgttaagagcaaacgatggaaagaaagggaaaaaaatgatcatgtagctcgaagaagttaatcgtgctgtgtgaatgtttcaaggagaatgtctcaaatagttttatacccccttcattattgtacatatatctagggctgcctaatgaaaggccttgtaagttgtaactagagtagaatgctgatcatgagttaagtataatgaatggtcttcacaaaagattaatcaatggaagattcatacaaagtataatgaatgattatccttttggctggaacaa

SEQ ID NO: 63819 - DNA, 769 bp, Zea Mays
cggtaaaccattcccctccgccccacctcttgtccagtgccccaaatgctggcgaccacctgcagccggccgccgtgcccgtgcccgtgcgcgcggtcgcggcggctccccgcggcgaccttcggcggcaccagtagcgcgaagcgaagggcgccgaggagagcggcggcggcggtgcggtgcgggctgctgcccgtggacccgtgggcgccgacgatggactcccagagcgtggcgtcgcagctcttcgccgtctcgctcttcccctacctgggattcctctacttcatgaccaggtccaagaccgcgcccgggctcacgctcttcggtttctacttcctcctcgtcttcgtcggcgccaccattcattatggtacctcactgtccaacgttgactggctgcacgggggcgctgaatcgctgctgactctcaccaacctgtttatcgttttggggctgaggggagccctgaggaagctggaggaagagggcacagacgagattgtttctgaagcttctcaagacagtgcagaaaaaagttctgtctagatgggttcatcatcagtacccctgaaggtgcacgagtgcgctgtttttcttcttctgcagctcaactagctcgtagtgatgttttgggtgtaaggaaatctggcagatctactctgtgcatattatgctgataagaaaacaatgtacaggcatctcctgcaattctgagtagtaacatattatgctgacgctggcttatatgatttgcaactctgcatgg

SEQ ID NO: 63820 - DNA, 3864 bp, Zea Mays
gctaaaccttcaaccttacatgggccctggcccgctatctcgacgtcgagctaatatattgtatctccaaagcccctggcctgcagttttccccctttcctttcctctaaacctctctaaaaccctgcgccccaatccatggccagaccctgcggcgccgcgctccagcggcacgcggcagtggccgtccttcgcgcggccgccgccgctggcgacctgtccaaggggaaggcgctccacgcccgtctcatcacagccgcccatttcgacgtcgtcctgcacaacaacctcatctccttctacgccaagtgcggccgggtcgggctcgcccgcacggtgttcgacgccatgcccttccggaacgccgtgtccgcaaacctcctcatgtccggatacgcttcctcggggcgccataaggaatcgctccagctgctcagggtggtcgactttggcatgaacgagtacgttctgtcggcagcggtgtccgcgaccgccaatgtcaggagctatgacatggggaggcagtgccatgggtatgctgttaaggctggcttcgcggagcaacgctatgttttcaacgcggtgctatatatgtactgccagtgtgctcacatggaggatgcgtccaaggtatttgagagtgtgtccggttttgatgcattcgcgttcaactcaatgataaatgggtatcttgatcgagggcaactggatggttcattagggattgtgagaaatatgaccggggaggctgagaaatgggattatgtgtcttatgtcgcagttcttggtcattgtgctagcatgaaggactctgttcttggggctcaggtgcatgcccaggctttgaagaagaggctagaactaaatgtgtatgtggggagtgcacttgttgatatgtatgggaaatgtgaccatgttcatgatgctaatcgtgcatttgaggttttgccagaaaagaatgttgtttcttggacagctgttatgactgcttacacccagaatgagctgtatgaagatgcattgcagttgttcttggacatggagatggaaggagttcaacccaatgagttcacttatgctgtggctctcaacagctgtgctggccttgcagccttgagaactggtaacgcccttggtgcctgtgttatgaaaactgggcattgggaccatttgctagtcagtaatgccctcatgaacatgtactcaaagagtggaagcattgaggatgcgcacagggtcttcatttccatgccacttcgtgatgtagtctcttggaatttgatcatcacaggctatgcgcatcatggccttgcaagggaaggaatggaagcatttcacagtatgctatcagcagcagtgatcccatcctatgtcacctttgtcggagtattgtcagcttgtgctcagttgggtcttgttgatgaagcattctactacttgaatactatgatgaaggaagttggaattacacctgggaaggaacattatacttgtatggttggtttattatgcagagttggaaggctagatgaggctgagaggttcatagtgaataactgcattggcacagatgttgttgcatggcgatcactgctaaattcttgtcaggtatataaaaattatggtcttggtcatcgagtagctgaacagattcttcagttggagcccagtgatgttggaacctatgttttactctctaacatgtatgcaaaagccaaccgatgggatggcgttgtgaaggtccggaagcatatgagggagagggccgttaggaagtcacctggtgttagttggattcacgtgggaagtgatgttcatgttttcacatcggaggagaaggtacatccgcagatggaccaaatcgccaaaaaacttgaagagctgatcgaccagataaaagctatcggatatgttccaaacttcgcagtggtccttcatgatattgatgatgaacgaaaagaggagcaccttatgtatcatagtgagaaattggctctagcctttggccttattcacacacctaagggagcaacaatccatatcatgaaaaacctcaggatatgtgatgattgccatgttgctatcaaactcatatcagttgttactagcagaaaaatagttgtaagagatgctgttcgatttcattgtatagaaggtggcatttgctcatgcaatgattattggtgatttgtggtgcaattgtcttgatagcatgtggcttgttgagtcaggttagtgtaacacgatggtaatacttaaattcctgagcattctcacttcatgcattcattaggtttccagctgggcttacaaagttgagctccagacaacagatcttagacatctaaagttgcacagcttacaaaatacaaatttgtgagagcttggaacaaagacttagacgacatatttcgatgattagtgcagaagctatagctcttgctcattgttttgatcccggagcgcagcacagacactgtatttgtaattccagctgctcagctgcatcaaaaagacattgctggtaaatctgaaagatcaacacacaaatgaacttagaagcaggaaatctaattggaaaatagatctagaaattcctggagaagcatgcaaatatgtgttgtcttaagaccatttttgacccgatcgcaaggtacaagccagattgtctctacggtagcacagccatggattggcgaataatcgccaattctcttgtgcaggcagaacactaagaaaacagagagaaataagtggtatttttggagaataaaggaatgagcgtgaagctattttccatttccatcatacacttgataggtatacagtgtatttgtagatgactggatgtatgtcatcttgcagtggagttagtccaccatggtagcatgtggcagaggacttgataagccagaggatcagcttgtgactgagcacaaagattcagtctgagcattttttttcttctcgaaaatggattcagtcgaaacatgcatgcaggaggacgatgcagcgtgcatgcaagcaaccggtcatggcagctgcacttcatcttgaagaatacatgttctggccatgaagtttgagagaataatactgtatgagacatcagctagagatgtatctgccaaagatgtccgtattcacggaaattatacattttgatcctcatggggtccagggaagaagttttgccggagagcacgccagtaaatgcgttcctgattgcggcaaggcaaccgagtgagcggaagggtcgttgagagctgcagatggcttcaggctgctggatcggcctgtcccttcgcattgctctggtgctgtcagcacgatagatgcgtggcgtggcgccctacggaagcggtggaccggtcgacaccgtgagcgctagttgtctgctagtcgtggtcgtggtcgtggcggatgcctgtgcctggcagtgtcggccctgcccgtcgcgggctcgcggccgcacgagattgcccagcgtctgggatctccgtgtcctgcgcgcgcgacacaggcgctacctacaggcagaggcagctgcgtgcttcggccggagacggagagcggcaacctgtacgtggaacgccaaacaaaacgccatggcatgactgtatctaactggagtacgtctggcctgctgaagaatttgtccacatatcctgaagattcttctttaacccgagacacgtacgtgctaggatataaaatattgatggattttggtgtaaactaagtggcgtctaaaatttcgacacgcaattttttttttgcctatcacaatttgtcgatcatttgagagatgtatctagtgattttttttaaaaaaataaccacagcactgagaacatgatcttt

SEQ ID NO: 63821 - DNA, 50 bp, Zea Mays
gctcatacctacaggcatcaaagaccaaatgacaagaaagaccttgggag

SEQ ID NO: 63822 - DNA, 2273 bp, Zea Mays
gtcgccttcgcctgctctgggacatatccatacctcaacatcgatgccggaaccatgtctccgctcgagcatggcgaagtgtttgttttggacgacggcggtgaggtggacttggaccttggaaactacgaacgatttctggacatcaagctgactcgtgacaacaacataaccacggggaagatctaccagtctgttattgacaaggaacgtagaggggattacctaggaaaaactgttcaggttgtgccgcacatcacagatgaaatacaagagtggattgaacgtgtggcaatgaatccagttgatggcacagaagagccagctgatgtttgtgtcatagaacttggtggcactataggggacattgaatcaatgcctttcattgaagcattaggtcaattttcataccgtgtagggcctggaaacttctgcttggtgcatgtcagtcttgtaccagttttaaatgtggttggtgagcagaaaacaaagcccacccaacatagtgttcgcggacttagaggacttggactcatgcctgatattttggcatgccgtagtacacagccacttgaagaacatgtgaaagtgaagctcgcacaattttgtcatgttccgatatcaaatatcattaatctccgtgatgtaacgaacatttggcacatccctttgttgctcagagaccagaaggcccatgaagctattttgaaagtgttagacattcagtgtgtgggtaaagttgctcgagaaccccagttgtctgaatggactgaaagagccagcagatgtgacagattgaaatctccggttaggattgctatggttggaaagtatactggcctgtcagattcctacctatctgttatcaaggctcttttgcatgcgtcggttgctttggacaggaaacttgtggtagactgggttccttcctgtgatcttgaagattctgcagcagaagagaatcttgatgcctacgaaaaagcatgggaattgttaaagggtgcagatggtgtgttggtgccagggggttttggagacagaggagttcaagggaaaattctggctgcaaaatatgcgcgagaaaacaacattccatatcttggcatttgcttgggcatgcaaattgcagtgattgagtttgcacgttctatcatgaagttgcacggtgcaaacagcacagagttcgatccaaccacaaaaaccccatgtgttattttcatgccagaggggtcaaaaacccatatgggggcaacaatgcgccttggatcaaggaggacctttttccaggtcactaactgcaaatctgctaaactgtatgggaatgctagctacgttgatgaacggcaccgccacagatacgaggtgaatcctgatatggtcccagaatttgagaaggcagggctttctttcgttggcagggatgaaagtggtaaacgcatggagattatcgaactgccaactcataggtttttcgtcggtgcacaatttcatcctgaattcaagtcaaggcccggcaagccatctccgcttttcttaggattggtagcagcgtcatcaggtcagcttgatcacctgctccaacctggtcttatcagttcgactggcagacacacctgcagcaaaggaggagcgcaaaaattaaaggctgggcacgtcatgaagccactgaatggcctggtgaacgcacactattcagcaaccggcaatggcgccattcccatctagcagcgcagagctgcgacgcgtcgcgtgcttgtttgggatttctcttctaccgttactgcttgttctttttttttccctttccttcgagggtgttcttccgtacgttctgccaggccaactgagaagaagagaagggctgtttgctctagcgacacgggcagccgcgtttccgatgttttaacgtggaagcatttggcatggaagctgtcgcatgcatcaagaggcaaatctagcaggttagctagagtttgattagtagtggtaatccgatatatatgctggttgatttgttcgtttgtttgctaagattacaagggccggtgatgtgcagctagctggtagtgtagcctgccgtctcgcctcatttgtacattgtaaaacaactgctactctccattgactgactgaatggacgagtataaacgtattggaccaacatgctgcgtgtgtgtttagtttatcactggtagaaaagctactatcgaatgccagttttatatacaggcgaggccgatacagaagggattttcagtctaaatttgaattgc

SEQ ID NO: 63823 - DNA, 2616 bp, Zea Mays
ccccaacctcccttggtttggctggcggctagcccctaaccaaaaaaaataaaataaaaccaactctcccattcggccatttgcccatttcccatctcgccttcgcttcccacgcccctccgtcccgcctcgccgcggcaaggcaccgccgccaaccgccctcgtccctcttcgactcgaccgcgtgagtgagacgaccgcgcgcgcccctcgcccgcccgccaggaggagatcgacccccgaacgcgtcatgaagtacgtgctggtgaccggcggcgtggtgagcgggctcgggaagggcgtgacggccagcagcgtcggggtcgtcctcaagtcctgcggcctccgcgtcacctccatcaagatcgatccatacctcaacatcgatgccggaaccatgtctccgctcgagcatggcgaagtgtttgttttggacgacggcggtgaggtggacttggaccttggaaactacgaacgatttctggacatcaagctgactcgtgacaacaacataaccacggggaagatctaccagtctgttattgacaaggaacgtagaggggattacctaggaaaaactgttcaggttgtgccgcacatcacagatgaaatacaagagtggattgaacgtgtggcaatgaatccagttgatggcacagaagagccagctgatgtttgtgtcatagaacttggtggcactataggggacattgaatcaatgcctttcattgaagcattaggtcaattttcataccgtgtagggcctggaaacttctgcttggtgcatgtcagtcttgtaccagttttaaatgtggttggtgagcagaaaacaaagcccacccaacatagtgttcgcggacttagaggacttggactcatgcctgatattttggcatgccgtagtacacagccacttgaagaacatgtgaaagtgaagctcgcacaattttgtcatgttccgatatcaaatatcattaatctccgtgatgtaacgaacatttggcacatccctttgttgctcagagaccagaaggcccatgaagctattttgaaagtgttagacattcagtgtgtgggtaaagttgctcgagaaccccagttgtctgaatggactgaaagagccagcagatgtgacagattgaaatctccggttaggattgctatggttggaaagtatactggcctgtcagattcctacctatctgttatcaaggctcttttgcatgcgtcggttgctttggacaggaaacttgtggtagactgggttccttcctgtgatcttgaagattctgcagcagaagagaatcttgatgcctacgaaaaagcatgggaattgttaaagggtgcagatggtgtgttggtgccagggggttttggagacagaggagttcaagggaaaattctggctgcaaaatatgcgcgagaaaacaacattccatatcttggcatttgcttgggcatgcaaattgcagtgattgagtttgcacgttctatcatgaagttgcacggtgcaaacagcacagagttcgatccaaccacaaaaaccccatgtgttattttcatgccagaggggtcaaaaacccatatgggggcaacaatgcgccttggatcaaggaggacctttttccaggtcactaactgcaaatctgctaaactgtatgggaatgctagctacgttgatgaacggcaccgccacagatacgaggtgaatcctgatatggtcccagaatttgagaaggcagggctttctttcgttggcagggatgaaagtggtaaacgcatggagattatcgaactgccaactcataggtttttcgtcggtgcacaatttcatcctgaattcaagtcaaggcccggcaagccatctccgcttttcttaggattggtagcagcgtcatcaggtcagcttgatcacctgctccaacctggtcttatcagttcgactggcagacacacctgcagcaaaggaggagcgcaaaaattaaaggctgggcacgtcatgaagccactgaatggcctggtgaacgcacactattcagcaaccggcaatggcgccattcccatctagcagcgcagagctgcgacgcgtcgcgtgcttgtttgggatttctcttctaccgttactgcttgttctttttttttccctttccttcgagggtgttcttccgtacgttctgccaggccaactgagaagaagagaagggctgtttgctctagcgacacgggcagccgcgtttccgatgttttaacgtggaagcatttggcatggaagctgtcgcatgcatcaagaggcaaatctagcaggttagctagagtttgattagtagtggtaatccgatatatatgctggttgatttgttcgtttgtttgctaagattacaagggccggtgatgtgcagctagctggtagtgtagcctgccgtctcgcctcatttgtacattgtaaaacaactgctactctccattgactgactgaatggacgagtataaacgtattggaccaacatgctgcgtgtgtgtttagtttatcactggtagaaaagctactatcgaatgccagttttatatacaggcgaggccgatacagaagggattttcagtctaaatttgaattgc

SEQ ID NO: 63824 - DNA, 2533 bp, Zea Mays
ctaccctaccactccgaccgacagacgacgagcgagcgcagcccaagcccaagcaagcagggcacggccatgcccgtggcccaatcctaggcgtccatttcgtattccacggccggcgaagcagcagcagcagcagcagccatggtggccggcagggtcaaggcggccatgggcttccagcggagcccggccacgcccaagcccggggcctcctcctcctcctcctcctcgcgcaaggcgccgccgccgctgcagctgcccgggtcggccgcgctgccggagacgccgcgccggaggtcctcgggctctccggcgccgccaggctccgggtccaagggcggcggcggcccattctcgcgctacttcccgcggtcgtccgcgcaggtgcagccggcgcgcgcgtcgggccagcccgagccgccgccgccgccgccgccgccgccgtcgtgcccgggccccgccgccgccgctgacctcgcccgcctcgtcgaggagctccgggagcgcgagtcccgcctccgcaccgagctgctggagcacaagatcctcaaggagaccgtcgccatcgtgccgttcctcgagaccgagctcgccgccaagagcagcgacctcggccgctgccgcgacgcgctgtcgcgcctcgaggccgagaacgcaagcctccgcgccgagctccacgccgccaggggcagccagcagagggtggttcagctggagaaggagctggcggaggtgaagaggcaccgtcgccgggactccggccccgatgccgaccgtcacgatgatgactgctcgtcgtcggtgtcgtcgcacaactccgactccgatcgctccaatgcgccgaccaacgcggtcgtgcccgggctgttgatcgtccctcctcctgctcctcctcctcctcccccgccgccgccgccgccttcttacaagtccaggtcctacttctctgcctcgtcgcgcgcatcgccggccaactcctcctcgtccagctccacctcgtccgcgccatcgacgccaacctactcttcagacaccgcggcgtcgcgaaaccgcgtgccggagctctcccagctcccgccgatacccgccccacccccgccgccgcccccacccccgccaccggcaatgccggcgcgcggacgccgcagcgcgtgctcgtcaccttcgacctcgagcggcagcagcggcggcggctgcggcagaggctcggggcctcctgcgccgccgccgccgcctccgcctgcggcgaggaggagctccagagcttcgtcccctgcggcttcgggaacggccccggcgcccgccccctgcgtcaggcgagtccccgaggtggtggaattctaccactcgctaatgcggagggactccaggtctagggacgccgccgctgccgccgaagctggcgccagtgggggtgccgccgccgcgagggatatgatcggcgagatcgagaaccgctcttctcatcttctcgcgatcaaatcagacgtggagaggcagggcgacttcatccggttcctgatcaaggaggtgcagggcgcggcgttcgtcgacatcgaggacgtggtcacctttgtcaagtggctggacgtcgagctctcacgtctggtggacgagagggcggtgctgaagcacttcgactggccggaggggaaggcggacgcgctgcgtgaggccgcgttcgggtaccgcgacctgaagaaggtcgagtcggaggcgtcgtccttctgcgatgacccccggcagccctgctcttctgctctcaagaagatgcaggccgtcttcgagaacaggttagagcatggagtgtacagccttgtgcgtgtgcgagacggcgcaatgagccggtaccgtgggtatcagatcccatgggagtggatgcaggacactggaattgttagtcagatcaaactgcaatcagtgaagctggcaatgaagtacctgaggagggtttcctcagagattcaggccatacaggtcggccctgacgaagaggagctggtgcttcaaggagtccgatttgccttcagagtgcaccagtttgcaggcggtttcgacgtcgatacgatgcgcgcctttcaggagttgaaggagacggcgtcagcctttcagcagtggggaggccaaaaccaacacctgcatcagcaaaggctcgctggcagaagttgagacgcatgtatttatagcaatccgttactacaggatagtggaagcatctatttacctggccaaatgctccactccttttctttttttttaaccttcccgtcaagaagctatatttcgacagattctttattatttttaatatgcataagagcatgcagaaagacgcttagcgtgtcaataccttgcgtgtgggctatcatttacacgctcctatgagtgattaactcgcatccatcgatggacatttctctcttcttacgttctcgcctcaagacaaggattttacaggtgcgaaaacacccgtgtctgcttgtcgtgattgattttttttctatcacaaattatcgacattaatttatttttt

SEQ ID NO: 63825 - DNA, 2664 bp, Zea Mays
gctgcattcatcactccagcttgcttcttcccagctgcagaccaaaccaaaagaccgttccttgaacgccgtgtccaactccacctccctcttttaaaatcccacacccaaccggcaaccgcacaccaaaaagcctaccctaccactccgaccgacagacgacgagcgagcgcagcccaagcccaagcaagcagggcacggccatgcccgtggcccaatcctaggcgtccatttcgtattccacggccggcgaagcagcagcagcagcagcagccatggtggccggcagggtcaaggcggccatgggcttccagcggagcccggccacgcccaagcccggggcctcctcctcctcctcctcctcgcgcaaggcgccgccgccgctgcagctgcccgggtcggccgcgctgccggagacgccgcgccggaggtcctcgggctctccggcgccgccaggctccgggtccaagggcggcggcggcccattctcgcgctacttcccgcggtcgtccgcgcaggtgcagccggcgcgcgcgtcgggccagcccgagccgccgccgccgccgccgccgccgccgtcgtgcccgggccccgccgccgccgctgacctcgcccgcctcgtcgaggagctccgggagcgcgagtcccgcctccgcaccgagctgctggagcacaagatcctcaaggagaccgtcgccatcgtgccgttcctcgagaccgagctcgccgccaagagcagcgacctcggccgctgccgcgacgcgctgtcgcgcctcgaggccgagaacgcaagcctccgcgccgagctccacgccgccaggggcagccagcagagggtggttcagctggagaaggagctggcggaggtgaagaggcaccgtcgccgggactccggccccgatgccgaccgtcacgatgatgactgctcgtcgtcggtgtcgtcgcacaactccgactccgatcgctccaatgcgccgaccaacgcggtcgtgcccgggctgttgatcgtccctcctcctgctcctcctcctcctcccccgccgccgccgccgccttcttacaagtccaggtcctacttctctgcctcgtcgcgcgcatcgccggccaactcctcctcgtccagctccacctcgtccgcgccatcgacgccaacctactcttcagacaccgcggcgtcgcgaaaccgcgtgccggagctctcccagctcccgccgatacccgccccacccccgccgccgcccccacccccgccaccggcaatgccggcgcgcggacgccgcagcgcgtgctcgtcaccttcgacctcgagcggcagcagcggcggcggctgcggcagaggctcggggcctcctgcgccgccgccgccgcctccgcctgcggcgaggaggagctccagagcttcgtcccctgcggcttcgggaacggccccggcgcccgccccctgcgtcaggcgagtccccgaggtggtggaattctaccactcgctaatgcggagggactccaggtctagggacgccgccgctgccgccgaagctggcgccagtgggggtgccgccgccgcgagggatatgatcggcgagatcgagaaccgctcttctcatcttctcgcgatcaaatcagacgtggagaggcagggcgacttcatccggttcctgatcaaggaggtgcagggcgcggcgttcgtcgacatcgaggacgtggtcacctttgtcaagtggctggacgtcgagctctcacgtctggtggacgagagggcggtgctgaagcacttcgactggccggaggggaaggcggacgcgctgcgtgaggccgcgttcgggtaccgcgacctgaagaaggtcgagtcggaggcgtcgtccttctgcgatgacccccggcagccctgctcttctgctctcaagaagatgcaggccgtcttcgagaagttagagcatggagtgtacagccttgtgcgtgtgcgagacggcgcaatgagccggtaccgtgggtatcagatcccatgggagtggatgcaggacactggaattgttagtcagatcaaactgcaatcagtgaagctggcaatgaagtacctgaggagggtttcctcagagattcaggccatacaggtcggccctgacgaagaggagctggtgcttcaaggagtccgatttgccttcagagtgcaccagtttgcaggcggtttcgacgtcgatacgatgcgcgcctttcaggagttgaaggagacggcgtcagcctttcagcagtggggaggccaaaaccaacacctgcatcagcaaaggctcgctggcagaagttgagacgcatgtatttatagcaatccgttactacaggatagtggaagcatctatttacctggccaaatgctccactccttttctttttttttaaccttcccgtcaagaagctatatttcgacagattctttattatttttaatatgcataagagcatgcagaaagacgcttagcgtgtcaataccttgcgtgtgggctatcatttacacgctcctatgagtgattaactcgcatccatcgatggacatttctctcttcttacgttctcgcctcaagacaaggattttacaggtgcgaaaacacccgtgtctgcttgtcgtgattgattttttttctatcacaaattatcgacattaatttatttttt

SEQ ID NO: 63826 - DNA, 3167 bp, Zea Mays
agaaagaatatagcgaagccgttgtcatcgacgcgacccggccgcatctatccactctatctagctagcgatatatatatatacacaccccaagcaagcagcaatgcaagctgaaagagaagctacagccagcaacagcaagcaggccgaaccaaactccagcgagcaagcaagctatagctagctagtagccaagcagaagccaaatacccaaaggcgagcgatggcgcccggaagcatcgccagccggtggcgcgagctccagggcgcggactcctggtcggggctgctggacccgctggacatcgacctgcgcgcgaacctgatcgcctacggcgagctcacgcaggccacctacgacgggttcaaccaggagcggcggtcgccgcacgccggcgcctgcgtgttcggctactccaacctgctggccggctcgggcgccgcggcggccgggagctacgccgtcaccaggttcatctacgccacgtcggcgctccccggcgtgcccgaggcgttcctgctgctgccgctgccggacctgctgcccgagtcctggagccgggagtccaactggatgggctacgtcgccgtcgccaccgacgacggcgtcgccgcgctcggccgccgcgacatcctcgtcgcgtggcgcggcaccatgcgcggcctcgagtgggtcaacgacttcgacttcacgcccgtgtccgccgcgcccgtgctgggccccgccgccgccgccaacccgttcgccttggtgcaccggggcttcctctccgtgtacacgtccagcaacccggactccaagtacaaccagaccagcgccagagaccaggtcctggcggaggtgagcaggctggtggcactgtacaaggacgaggtgacgagcatcacggtgtgcgggcacagcctgggcgcgtcgctggcgacgctgaacgccgtggacctcgcggccaacggcgtgaacgcgccgccggccgggtcgtcgcagccgccgtgccccgtgacggcgctggtgttcgcgagcccgcgcgtcggggacggcaacttcaagagggcgatcgcgtcgttcccggacctgcgggcgctccacgtgaagaacgccggcgacatcgtgccgacgtacccgccgctggggtacgtggacgtggccgtgcagctgcccatcgccacggggcggtcgccgtacctgcggcagcccgggacgatcgcgacgctgcacaacctcgagtgctacctgcacggcgtggccggcgagcagggcagcgccggggggttcaggctggaggtggaccgcgacgtcgcgctggtcaacaagggcgaggacgcgctcaaggaccagtacccggtgcccgcccagtggtgggtcgccaagaacaagtgcatggtcaagggcgccgacggccactatgcgctccaggacttcgagcagatctgatcagtggtcagagcgagctcgccgctgcatgccatgcatgatgcaggtgtcgtgcgtgctcgtaaactactactacctctctatcggtcgatcacgatgtatgaagtatgaataatgagcgtcgtcgatacgcatgcgtgtatgatcatccagattcaggttgtgtgtgtgatgcttctcacctcttcctcctacgaaccggagattgtgacggggagtcagttatatttataaataaaccatcctctgattgtgattgtgtctcatacatggcgtcataataatcatgcacaaacgaaacctacaagagcagctaccgatgttgtctgctgccactgccagcatgccaagcgtttactcagactgctgtctactactcatcatcctcgtcctcctcgcaatccaccaagctccagcgcccgtcggcgccctccaccattcccctgttgagcggcacccaccaccctggcggcaccccgtggtggtcccgcagggcgtcgtacgccttgttcaccagcgccacgtcccgcgccacggcgagctcgaacccgccgcgcgcgccccgcgtgcccgccacgccgtgcaggtacacctcgaggttgtgccaggtctgctcgcccccggggcttctcaggtacggcgactcccccgtgtcgatcgcgagctccgcgcctacgtcgtggtagaacacgaccgggtacttgggaaccacgtcgcgggcgttgcggacgcggaggagccgcagccccgggacggcgtcgaaccgcttcttgaagccgccgccgccgacgcgcgggctggcgaacgcgaacgaggtcaccgggcaggcggccgcgcccgtggccgccacgttgtagccgttggcggcgatgtcgaacgcgttgagcgtggcgagcgccgcgccgaggctgtggcccgtcacggtgatgctcagctcctcgcccctgtacgcgtccaccagcctccgcacctcgcccagcgcctgatgccgtgcgctgtcctggttgtggctggacgccgggtcgctggaggtgtacatggacagccagccgcggtgcaccatggcgtcgccgtccccgaggaggcctcccgtcggcaccatggggaactcgaggtcgtcggcccactccagcgcccgcatggtgccgcgccacgcgaccacgacgtcgcggcggccgagcgcggccttcccttcgtcggtggccaccgcgacgtagccgatccagttggactccctgcaccggcgcgacctggacacggacctgaggatgaaggcgtccggcacggccaccgacgacgtggcgtacaggaacctggtgacccggtacgcggcggcgtgcgccggcagccgcacccggtcgaagaagtgcgccctggcgaagcgggacagccccgcgtgcggcgacgcccgctcgcggttgaaggcgtcgtaggtcgcctgcgccatctcgccgtagcggagcacggtgcgccgcaggtcgaggtccagcgggtccagcattcccgcccagccgccgtcgccgtggagctcgcgccaccgccgggccgtgtcgccgaggccgccgtgctgggacatgttgccttgctgctgcttctgatgatgatgatccagcttgctcagcgtcgttatctatgtgtttatatggaggatacagtgatggtagcttgcttggtctcttgcttctgatgacgaaggttgccaaacggcaaaggcgtgacatgcaccgtgctggga

SEQ ID NO: 63827 - DNA, 1358 bp, Zea Mays
gccagcctcaatgccttgatattgccacctgaagtaaagaggactcacttgctctagagctcatatagatatgttaacatccacgtgctttgcatatgagatgctcttgtcaatatgatcagcaaccctgtcaactccactgtcccgattgcggcggaggttttcaagaaggctggtacttatgatgagaagaagctgtttggtgtgactactcttgatgttgttcgtgctaaaactttttatgctggaaaagcgggtgtgccagttactggggtgaatgttcctgttgtcggaggccatgcgggtattactattctgccactcttctcgcaggccactcctgcaagcaattcattgtcccaagaagacattgaggccctcaccaagaggacacaagatggtgggacagaggtggttgaagcaaaggcgggaaaaggctctgcaacgttgtccatggcatatgctggtgctgtttttgcagatgcatgtttgaagggtctgaatggagttccagacattgtagagtgctcttttgtgcaatcaactgtgacagagttgccattctttgcctccaaggttcggctcggcaagaatggagtggaggaagtgcttggtctgggtgagctcaacgagttcgagaagaaggggctggaaaacctcaagggcgagctcaagtcttccatcgacaagggtatcaagtttgcccacgggaactaggcaccttgcccggcttctaacaattgatgccccttgcatttttgtttgactgcctatttttcctgccccccgtatggttggggcaatgaggcgtagtggtcgataataaaacccagcggaacaaagaaaacgtgtaccagaaactgtttgcaaacaccggtgcctttttttttgtgttgaaccaccattagttgagccgtgagggaatggtgaacaagctttccacttgctcatttccgagcgcttctctttgattgtatgcatggtttggactcatgactggacttcttggcagttggcttggcacccaggaatctaatcactggagttgctgctgttatcgagattttgcagcgttgcattctgatcggaactgttgagctggacaatttgatggttctaaatgcatcgtatggatgcttgttcgtatgcacccattgatgccactaaacgcaatgcatggatgcttgcttgtatgttgtatagttagaatttatattgtctagtttatctaaggtcatatgcagaaattctaataaacctcaagcataatactaaggtcctttttggtagctccaatctcatttctgctctactccacaactctatgtagggtaggctccatatagagttgttcctag

SEQ ID NO: 63828 - DNA, 1280 bp, Zea Mays
tagatctgcagcttaggcatctaggctcttgtcaatatgatcagcaaccctgtcaactccactgtcccgattgcggcggaggttttcaagaaggctggtacttatgatgagaagaagctgtttggtgtgactactcttgatgttgttcgtgctaaaactttttatgctggaaaagcgggtgtgccagttactggggtgaatgttcctgttgtcggaggccatgcgggtattactattctgccactcttctcgcaggccactcctgcaagcaattcattgtcccaagaagacattgaggccctcaccaagaggacacaagatggtgggacagaggtggttgaagcaaaggcgggaaaaggctctgcaacgttgtccatggcatatgctggtgctgtttttgcagatgcatgtttgaagggtctgaatggagttccagacattgtagagtgctcttttgtgcaatcaactgtgacagagttgccattctttgcctccaaggttcggctcggcaagaatggagtggaggaagtgcttggtctgggtgagctcaacgagttcgagaagaaggggctggaaaacctcaagggcgagctcaagtcttccatcgacaagggtatcaagtttgcccacgggaactaggcaccttgcccggcttctaacaattgatgccccttgcatttttgtttgactgcctatttttcctgccccccgtatggttggggcaatgaggcgtagtggtcgataataaaacccagcggaacaaagaaaacgtgtaccagaaactgtttgcaaacaccggtgcctttttttttgtgttgaaccaccattagttgagccgtgagggaatggtgaacaagctttccacttgctcatttccgagcgcttctctttgattgtatgcatggtttggactcatgactggacttcttggcagttggcttggcacccaggaatctaatcactggagttgctgctgttatcgagattttgcagcgttgcattctgatcggaactgttgagctggacaatttgatggttctaaatgcatcgtatggatgcttgttcgtatgcacccattgatgccactaaacgcaatgcatggatgcttgcttgtatgttgtatagttagaatttatattgtctagtttatctaaggtcatatgcagaaattctaataaacctcaagcataatactaaggtcctttttggtagctccaatctcatttctgctctactccacaactctatgtagggtaggctccatatagagttgttcctag

SEQ ID NO: 63829 - DNA, 1339 bp, Zea Mays
aactccgtttcgaattctagggttttgctgctctccgaccccgagctccgaaggccgcagcatcaggcgcggcccccctcgcgtgtgaccgagatggtgagcgccccgcccccgcacggatccgatctccgccgtgtttgatccccggatctgcggctgcgtgtttctgacccgatatgttttgttgtttttttttgcaggcgctgccgaatcaggggaccgttgattaccccagcttcaagctcgtcatcgtcggcgatggtggaactggtaaaactacatttgtgaagaggcatctcactggagagtttgagaagaaatatgaaccaaccattggtgtggaagttcatccgttggatttcaccactaactgtggtaagatcaggttctactgctgggataccgcagggcaagagaagtttggtggcctcagggatggatactatatccatggccagtgtgcgatcatcatgtttgatgtaacctcaaggcttacttacaagaatgttcctacgtggcatagggacctgtgcagggtctgtgaaaacatccccattgtcctctgcggtaataaggttgatgtgaagaacaggcaggtcaaagccaagcaggttactttccacaggaagaagaatctgcagtactatgaaatttctgccaagagcaactacaactttgagaaacctttcctgtacctcgcaaggaagctggctgggtaattgactacccttcttctgtgcattgcatttagtagtcacaaccaattaccactctatgtttgttcttgacaatgtctttgtttttaacagtgatccgaaccttcactttgttgaagctgttgctcttaagcctccggaagttaccatcgacatggctatgcagcagcatgaagctgagcttgctgcagcagctgcacaacctcttcctgatgacgatgatgatctgattgagtagaaaggatcatgagtcttggacttgagcaggagttgtgccttgcacgatttaagttgttctagggtggactctctcttgagttatcattgtctggatcatttttttctccttggacttgttgcaacttttgagtgtggaaatggattggaatagtcgccatgaatttgctggctactttatacatgtctttgttcataaaccttgttttaagatgaagttgtggcaatcctcttagtgctaatataatgttctattgtcagctgtacaatgtagaaatgcttctatcttttttttttcgtgcacgttccaggtgtatttttaggtttagggcttagtgtatctaaactagcgcttagtgtatagttcgtatcatcgtgtgtttggt

SEQ ID NO: 63830 - DNA, 1216 bp, Zea Mays
gcagtcgcgagtaaagaacaacagcaggccaccgctgctataaaaccctccgcctccaccggcggctcgccaaactccgtttcgaattctagggttttgctgctctccgaccccgagctccgaaggccgcagcatcaggcgcggcccccctcgcgtgtgaccgagatggcgctgccgaatcaggggaccgttgattaccccagcttcaagctcgtcatcgtcggcgatggtggaactggtaaaactacatttgtgaagaggcatctcactggagagtttgagaagaaatatgaaccaaccattggtgtggaagttcatccgttggatttcaccactaactgtggtaagatcaggttctactgctgggataccgcagggcaagagaagtttggtggcctcagggatggatactatatccatggccagtgtgcgatcatcatgtttgatgtaacctcaaggcttacttacaagaatgttcctacgtggcatagggacctgtgcagggtctgtgaaaacatccccattgtcctctgcggtaataaggttgatgtgaagaacaggcaggtcaaagccaagcaggttactttccacaggaagaagaatctgcagtactatgaaatttctgccaagagcaactacaactttgagaaacctttcctgtacctcgcaaggaagctggctggtgatccgaaccttcactttgttgaagctgttgctcttaagcctccggaagttaccatcgacatggctatgcagcagcagcatgaagctgagcttgctgcagcagctgcacaacctcttcctgatgacgatgatgatctgattgagtagaaaggatcatgagtcttggacttgagcaggagttgtgccttgcacgatttaagttgttctagggtggactctctcttgagttatcattgtctggatcatttttttctccttggacttgttgcaacttttgagtgtggaaatggattggaatagtcgccatgaatttgctggctactttatacatgtctttgttcataaaccttgttttaagatgaagttgtggcaatcctcttagtgctaatataatgttctattgtcagctgtacaatgtagaaatgcttctatcttttttttttcgtgcacgttccaggtgtatttttaggtttagggcttagtgtatctaaactagcgcttagtgtatagttcgtatcatcgtgtgtttggt

SEQ ID NO: 63831 - DNA, 1580 bp, Zea Mays
gggaccgttgattaccccagcttcaagctcgtcatcgtcggcgatggtggaactggtgagtttccgaatggctccgtgtctccattggttgttagaaatggtagaagctgccgatgtttctacgagatctggcagattggacttgggcgctgtgtgcaatctgttgatattatgcctcttagaattatagtggctgtctcccatagtgtcctcacgacctccgtgacgtgactggaatattacacagttccactagtactgattcctaatcacgtttatgccgtagttgtttccactcaatagaattcatattcacatatagtaatctatagaaatatattgtaccttaggatcatagagtctccttaccctctacctaatgtcgtattaacacttcaaaaaaattgtaagaacttgtatttgtatttcgcttttattatcatattctgtgttgtatcaaatccgtttgctattcaatgtaaggcctcagatgtgatgcaatgaaactaaacttgaggcggaggttcttcatttcgtgtttcaaatattttgaatccttatagcatagaaattctgtcgtcgcacggctcttgaatggaaataacatggttgtttgttgaatactcttttgtctgttaggatgtcagttacatttatctgcaaccttcataagctagatggtttgaatttcagttgttatggcgcccttgtaggctttagattcaataatatttatattctctacatcacacctgtcctattatattctcatctgttgacctgtatgacttttctcactgatgttttcttgttgcaggtaaaactacatttgtgaagaggcatctcactggagagtttgagaagaaatatgaacgtaagtaccacattgattgggattttcttcatttagttatcatcattaatacttccagcttctctaatgcattttgttgtttcagcaaccattggtgtggaagttcatccgttggatttcaccactaactgtggtaagatcaggttctactgctgggataccgcagggcaagagaagtttggtggcctcagggatggatactagtaagtattatttgtgatgtctgaaataatgtgtgtacatatgctgtaaaatcaatgtatacttttagtacttaactatttttgttacattctctgatgctctttctgttttttgttcccattcagtatccatggccagtgtgcgatcatcatgtttgatgtaacctcaaggcttacttacaagaatgttcctacgtggcatagggacctgtgcaggtatgttgatgtctttctttgtcgtaaacttgtactgatgtataattttgttggaaaattttgatgtccagttatgaattcatgcagggtctgtgaaaacatccccattgtcctctgcggtaataaggttgatgtgaagaacaggcaggtcaaagccaagcaggttactttccacaggaagaagaatctgcagtactatgaaatttctgccaagagcaactacaactttgagaaacctttcctgtaccttgcaaggaagctggctggtgatccgaaccttcactttg

SEQ ID NO: 63832 - DNA, 1267 bp, Zea Mays
gattatataatctataagctgaaacaaacaggcccacaatacccttgtttgtttatttgaggtgagaaaagaaggatgacatatattgtaatttctatttacataaccatgggtagcgggtcttttaccagaataatctcaaataagctactcttggggagattatgagattatcataatctaggttttaaattatataatctaaatccataatctagttgtttgtttacctaatggattatttgcgctagattatataatctggagagattataatctgaaacaaacaggtcctaagtctattaagcggtaaaatggttcaataaatcaaacggactagtggttccccttcagttttatagaatataatttcagggatttgggcaggcaactgtcatagtatataaactcatatgttattgttctacctaatgtttctctccagcgtagcgcaaaagggccacggataggactgctgtcttttcactttcagttgtcaatactgactggaagttaatcctgaacttgatgggttgcaatactgactggaagttgctatttttttaccgagaaaactggaagttgctgttgttcgaaacccgcaagagaaagcctttcggtcccatgttgaattttaacgcagaagaagtggttgaataccagcttgagtccttaaaatacaatgaccagccccggcaagattatgggatagaggtcatgtaccggtttgcaggctttgaaccccttcgaaaggtcaacttagtttggatgacagtttggtctaggacaggaccggtttaaacaaagagtttggttagaaggagcccggccagaggaggaagaaatatttcaatccacaatggttcagagagtcggaggctcatgggatggttactggctaacggagagcttaataataaacgatggagacgcattctcgggtcgcttactgatgtagtgaattggtccaaatcagcccgtgttctcggttctcgcgacctacgacggcttaaaatgcattgtttttacagtacagaacagagaccgctgtgctgcaatgaatatatttgtagtaacgggattcacactcaccggaaaggctacctaggaggaaacttgcagtgcttgcgattgggcacgtcagtagcgtgcttgtgagacgaaaggaacatgagatcggctgtgtatatccatcctctgaccactatgtatgatctatgcagtgtgatgtgatcaggtggtttggtgaataaagtagcacctcttt

SEQ ID NO: 63833 - DNA, 1543 bp, Zea Mays
atataatttagattataatccagattatataatctataagctgaaacaaacaggcccacaatacccttgtttgtttatttgaggtgagaaaagaaggatgacatatattgtaatttctatttacataaccatgggtagcgggtcttttaccagaataatctcaaataagctactcttggggagattatgagattatcataatctaggttttaaattatataatctaaatccataatctagttgtttgtttacctaatggattatttgcgctagattatataatctggagagattataatctgaaacaaacaggtcctaagtctattaagcggtaaaatggttcaataaatcaaacggactagtggttccccttcagttttatagaatataatttcagggatttgggcaggcaactgtcatagtatataaactcatatgttattgttctacctaatgtttctctccagcgtagcgcaaaagggccacggataggactgctgtcttttcactttcagttgtcaatactgactggaagttaatcctgaacttgatgggttgcaatactgactggaagttgctatttttttaccgagaaaactggaagttgctgttgttcgaaacccgcaagagaaagcctttcggtcccatgttgaatgtgatatctttgttctgtctgaaaataatcgcaaaagagcataaacattttggtcgacatttatgatgactctatcgttcagtttaacgcagaagaagtggttgaataccagcttgagtccttaaaatacaatgaccagccccggcaagattatgggatagagtttgcaggctttgaaccccttcgaaaggtcaacttagtttggatgacagtttggtctaggacaggtggtctgaaacctattcctactggctttacactggcagccagactgtgttacttactgattgccgccaatactgttcctgtttgaacgcttccggcgtctgttccaccattcagcttacagagcgctgctgggccacaaaggaagaaacatactaagcactaagcagcttatgggttgaagaggaccggtttaaacaaagagtttggttagaaggagcccggccagaggaggaagaaatatttcaatccacaatggttcagagagtcggaggctcatgggatggttactggctaacggagagcttaataataaacgatggagacgcattctcgggtcgcttactgatgtagtgaattggtccaaatcagcccgtgttctcggttctcgcgacctacgacggcttaaaatgcattgtttttacagtacagaacagagaccgctgtgctgcaatgaatatatttgtagtaacgggattcacactcaccggaaaggctacctaggaggaaacttgcagtgcttgcgattgggcacgtcagtagcgtgcttgtgagacgaaaggaacatgagatcggctgtgtatatccatcctctgaccactatgtatgatctatgcagtgtgatgtgatcaggtggtttggtgaataaagtagcacctcttt

SEQ ID NO: 63834 - DNA, 1604 bp, Zea Mays
atataatttagattataatccagattatataatctataagctgaaacaaacaggcccacaatacccttgtttgtttatttgaggtgagaaaagaaggatgacatatattgtaatttctatttacataaccatgggtagcgggtcttttaccagaataatctcaaataagctactcttggggagattatgagattatcataatctaggttttaaattatataatctaaatccataatctagttgtttgtttacctaatggattatttgcgctagattatataatctggagagattataatctgaaacaaacaggtcctaagtctattaagcggtaaaatggttcaataaatcaaacggactagtggttccccttcagttttatagaatataatttcagggatttgggcaggcaactgtcatagtatataaactcatatgttattgttctacctaatgtttctctccagcgtagcgcaaaagggccacggataggactgctgtcttttcactttcagttgtcaatactgactggaagttaatcctgaacttgatgggttgcaatactgactggaagttgctatttttttaccgagaaaactggaagttgctgttgttcgaaacccgcaagagaaagcctttcggtcccatgttgaatgtgatatctttgttctgtctgaaaataatcgcaaaagagcataaacattttggtcgacatttatgatgactctatcgttcagtttaacgcagaagaagtggttgaataccagcttgagtccttaaaatacaatgaccagccccggcaagattatgggatagaggtcatgtaccggtttgcaggctttgaaccccttcgaaaggtcaacttagtttggatgacagtttggtctaggacaggtggtctgaaacctattcctactggctttacactggcagccagactgtgttacttactgattgccgccaatactgttcctgtttgaacgcttccggcgtctgttccaccattcagcttacagagcgctgctgggccacaaaggaagaaacatactaagcactaagcagcttatgggttgaagaggaccggtttaaacaaagagtttggttagaaggagcccggccagaggaggaagaaatatttcaatccacaatggttcagagagtcggaggctcatgggatggttactggctaacggagagcttaataataaacgatggagacgcattctcgggtcgcttactgatgtagtgaattggtccaaatcaggtgcgttgaactcatgcggatacaggtcaatgacgtgatcaagcagcagcccgtgttctcggttctcgcgacctacgacggcttaaaatgcattgtttttacagtacagaacagagaccgctgtgctgcaatgaatatatttgtagtaacgggattcacactcaccggaaaggctacctaggaggaaacttgcagtgcttgcgattgggcacgtcagtagcgtgcttgtgagacgaaaggaacatgagatcggctgtgtatatccatcctctgaccactatgtatgatctatgcagtgtgatgtgatcaggtggtttggtgaataaagtagcacctcttt

SEQ ID NO: 63835 - DNA, 1555 bp, Zea Mays
atataatttagattataatccagattatataatctataagctgaaacaaacaggcccacaatacccttgtttgtttatttgaggtgagaaaagaaggatgacatatattgtaatttctatttacataaccatgggtagcgggtcttttaccagaataatctcaaataagctactcttggggagattatgagattatcataatctaggttttaaattatataatctaaatccataatctagttgtttgtttacctaatggattatttgcgctagattatataatctggagagattataatctgaaacaaacaggtcctaagtctattaagcggtaaaatggttcaataaatcaaacggactagtggttccccttcagttttatagaatataatttcagggatttgggcaggcaactgtcatagtatataaactcatatgttattgttctacctaatgtttctctccagcgtagcgcaaaagggccacggataggactgctgtcttttcactttcagttgtcaatactgactggaagttaatcctgaacttgatgggttgcaatactgactggaagttgctatttttttaccgagaaaactggaagttgctgttgttcgaaacccgcaagagaaagcctttcggtcccatgttgaatgtgatatctttgttctgtctgaaaataatcgcaaaagagcataaacattttggtcgacatttatgatgactctatcgttcagtttaacgcagaagaagtggttgaataccagcttgagtccttaaaatacaatgaccagccccggcaagattatgggatagaggtcatgtaccggtttgcaggctttgaaccccttcgaaaggtcaacttagtttggatgacagtttggtctaggacaggtggtctgaaacctattcctactggctttacactggcagccagactgtgttacttactgattgccgccaatactgttcctgtttgaacgcttccggcgtctgttccaccattcagcttacagagcgctgctgggccacaaaggaagaaacatactaagcactaagcagcttatgggttgaagaggaccggtttaaacaaagagtttggttagaaggagcccggccagaggaggaagaaatatttcaatccacaatggttcagagagtcggaggctcatgggatggttactggctaacggagagcttaataataaacgatggagacgcattctcgggtcgcttactgatgtagtgaattggtccaaatcagcccgtgttctcggttctcgcgacctacgacggcttaaaatgcattgtttttacagtacagaacagagaccgctgtgctgcaatgaatatatttgtagtaacgggattcacactcaccggaaaggctacctaggaggaaacttgcagtgcttgcgattgggcacgtcagtagcgtgcttgtgagacgaaaggaacatgagatcggctgtgtatatccatcctctgaccactatgtatgatctatgcagtgtgatgtgatcaggtggtttggtgaataaagtagcacctcttt

SEQ ID NO: 63836 - DNA, 4578 bp, Zea Mays
acctttcatgacatgtgtgagaatcttaggtcccattacttgagtataactttccctactgccatgtaacaggttgagtatctgcacaaactgctatacagaacgcaatgtgttctgcttagtattgacagcattgtatcgccatggcattgtattgacaggatgaacgtgtacaagatgaataatagcacaagggtatatccgtatatgcaacataattaagcttgcctcccctctgcaagaacttcatccaaaaccttcatctccacacgaacaacttccatccttaaaatggtggagttgcttactgtccctaacaattatatctcttcgtactatattagaaatcatcttcaatatcctgtgacaactctgacatgtgtattggtttttggtgacagaaattgaggtgccaggtgtggtattgatcaaaccaaaagcaacagcaagtctttcgctatgaccacaaaagatgtcatccttcaatacttcatcttcaggacaatgagattcaacaggagcataaccagatgctttcatccgctcatatattccttcaagaacagtatttatttctctgatttgtggatgcgactcatcatctgtaagaaatgcatggaccactcctttaacctcaacccagctacatccagaatcatgatccagtcctttctcccgcatggttttcctcaccctagccaatttatcccataaacaagcatcagcatacagatcacacaataggacatgatatccggcatcattaggctccaatgcaaggacatattttgcagcaagctccccaagttcaacatgccggtgtattcggcatccatttagcaaggctccccaaacagcagcatctggtgtgataggcatttcatttatgaagttgtaagcttctgtcagctgcccagcacgacttagaagatccaccatgcatgcatagtgcttgagatttggaacgatagagtatttctcagtcatgctgtggaaaagctcccaaccttcgctgaccattccacccctactacaagcacatagcagagcgacaaatgtaacttcatctgggcattctcctattttcaccatttgattgaagaacgataaagcggtatccccatgaccatgagcaacaaaacctgcaatcatgatattccacgacacaacatcctttgcaccatgtgcacagaactgtgcccaagcatagcctgtctggccacattttacatacaagtcgataagggcattgggcaaataaccttcatattcaataccacaccttaaaacatgtgcatggatctccttaccactcctcaaagccccagtagcagcacaagcagcaagcgcagcaataaaagtgacagaattgggcttaacatctgcaagcatatgcctgaaatagtaaagagcctcaaagttcctatggttgaagcaaaatcctgcgatcattgaactccatgacactacgtccttctcatgcatgcacttaaaaacttcaatagccttatcaatacgcttggactttgcatacatttcaaggattgcatttgtaactacgatgtagcttatgaatcccttgctctcagcaagttcgtgcaacttgacaccaacatccaaactccccaagcaagcacaagcagcaagggcacttgcaatagtaatatcatcaggacttacattgttcacttccataagtgcatacacttcaagagctttatctgggaagccgtttttctcatacccagatatcatagctgtccatgtcatggcatctctagtatccattcttgagaacactgttcttgcttgcctcatcataccaagactcgcatacatctgaatcaaagagttacagaatgcaacatcaccggcaaaacccctcttcactgcaagtccatgcatttcctttgcaaaggttacgtcagataacaagcctgatgcaacagtaacactagttattgtcatgaggttaggctgaacctcatcatgtagcatggtaagaaacaactccaaccctgcattgcattcaccattctcaaaatgcccagcaatcatcgcattccatgagatacaatccatgacggtcatactgtcaaacaccttccgtgcagccataacgtccccacatttggcgtacatggtcatgagtgcattcaggacatcgacctcctccccaaacccaaaccgaagaacatgtgcatgcacctccctccccatcctccagtctgggacgcccccacagctccgcagaacacaggggaacgtgtacacgtccggtctcacacctgcccacatcatcctgtggtacaggtccagcgcctcatccagcaaaccggacttcccgtacccgcccaccatgacgttccaggagaagacatcccgttcaggcattttggcaaacaccctccacgcgtgccacgtctccccgaacctgacgagcatgctgagcatggcgttcccgaggcggagaccgaaccaggcgtgccggtcgtctgcgtgcgcgcacgcgcgcagccccggttccactgcgcggcgccactcgcagaggcggaacagcgcgacgtaggcgtcctcgtcgggcggctccgccgaggactcgaggagccagagcgcctgcgcgagctggccatgggagcagagcgctcgcagctccgtgctcgggtccgcggaagaggaggtggacgccgcagccgagacggcggccgagctgagaccgcgtaggcgcttctttgcgtggaggcggatgggcgggagggcgcgcggcaaggcaagggaggcgagtgggaggaggaacggattgagtgcgggtgcgggcttagtgggcagcagcggcatctctggaagcggaggcggaggaggcgcgcatggcgctgggagccacggccgcagggttttggagaggtttcggggccgacgagcggaggagcgcgtggccaagctggtgaccgcttgctccgcgagcgcgagtggataagcagcgcgagggcgaagcgagagggtcgtttgattattattatgtcctcctccatcaaccttactgggcctccatcatcctaaggccaccacgacttagcggaagcgtggagccgggctcagcccaagcccaaaaacgttgaggaaaattcaccggcttgaatcttctggtcctgaataaattggaggcggaaacgaagcagaaacatctcaagttgcaacaatggcatcgtccgctgctgcaaacacgaagccgatcgcgctcccgccaaggccagcgccaacccgcgtcggctgctgctgctggaggacaacagacacccaggcccacggtcccgtcgccgcggcgccgcggcgcgcctcagggtctcagcctccgccgccccgtcggacgtgccggacttcctctcttccaattcgcgtagcgcaaaagggccacggataggactgctgtcttttcactttcagttgtcaatactgactggaagttaatcctgaacttgatgggttgcaatactgactggaagttgctatttttttaccgagaaaactggaagttgctgttgttcgaaacccgcaagagaaagcctttcggtcccatgttgaatgtgatatctttgttctgtctgaaaataatcgcaaaagagcataaacattttggtcgacatttatgatgactctatcgttcagtttaacgcagaagaagtggttgaataccagcttgagtccttaaaatacaatgaccagccccggcaagattatgggatagaggtcatgtaccgggtaactatacaagcatgaaaactgttcatttccttgggtatggtgttaaatgaactcaactttggtcagactgacaagtcgtgcggtcctactagtttgcaggctttgaaccccttcgaaaggtcaacttagtttggatgacagtttggtctaggacaggaccggtttaaacaaagagtttggttagaaggagcccggccagaggaggaagaaatatttcaatccacaatggttcagagagtcggaggctcatgggatggttactggctaacggagagcttaataataaacgatggagacgcattctcgggtcgcttactgatgtagtgaattggtccaaatcaggtgcgttgaactcatgcggatacaggtcaatgacgtgatcaagcagcaggtgaacgcgtatttgcagcaaactacggcgcggttcttctttcttaacatccttttctgagttttgacgactgcctctttttttcacttctgttctacgtgtccggtggattctgtgtcgtcgcttttggtcagcccgtgttctcggttctcgcgacctacgacggcttaaaatgcattgtttttacagtacagaacagagaccgctgtgctgcaatgaatatatttgtagtaacgggattcacactcaccggaaaggctacctaggaggaaacttgcagtgcttgcgattgggcacgtcagtagcgtgcttgtgagacgaaaggaacatgagatcggctgtgtatatccatcctctgaccactatgtatgatctatgcagtgtgatgtgatcaggtggtttggtgaataaagtagcacctcttt

SEQ ID NO: 63837 - DNA, 4166 bp, Zea Mays
ttctattcaacacaacattagacaccaactagactatcctgtatagctcaagcttacttggttgtttcttttttggcaagttgttgcaagcaaagatcagctccaagaatcaattcttaaagagactgcaaggaagaaaaataagtgttagaaaaacaacattgatttttatcaactaaccagggaaagacaagaagcatgaaattacctttcatgacatgtgtgagaatcttaggtcccattacttgagtataactttccctactgccatgtaacaggatgaacgtgtacaagatgaataatagcacaaggaaattgaggtgccaggtgtggtattgatcaaaccaaaagcaacagcaagtctttcgctatgaccacaaaagatgtcatccttcaatacttcatcttcaggacaatgagattcaacaggagcataaccagatgctttcatccgctcatatattccttcaagaacagtatttatttctctgatttgtggatgcgactcatcatctgtaagaaatgcatggaccactcctttaacctcaacccagctacatccagaatcatgatccagtcctttctcccgcatggttttcctcaccctagccaatttatcccataaacaagcatcagcatacagatcacacaataggacatgatatccggcatcattaggctccaatgcaaggacatattttgcagcaagctccccaagttcaacatgccggtgtattcggcatccatttagcaaggctccccaaacagcagcatctggtgtgataggcatttcatttatgaagttgtaagcttctgtcagctgcccagcacgacttagaagatccaccatgcatgcatagtgcttgagatttggaacgatagagtatttctcagtcatgctgtggaaaagctcccaaccttcgctgaccattccacccctactacaagcacatagcagagcgacaaatgtaacttcatctgggcattctcctattttcaccatttgattgaagaacgataaagcggtatccccatgaccatgagcaacaaaacctgcaatcatgatattccacgacacaacatcctttgcaccatgtgcacagaactgtgcccaagcatagcctgtctggccacattttacatacaagtcgataagggcattgggcaaataaccttcatattcaataccacaccttaaaacatgtgcatggatctccttaccactcctcaaagccccagtagcagcacaagcagcaagcgcagcaataaaagtgacagaattgggcttaacatctgcaagcatatgcctgaaatagtaaagagcctcaaagttcctatggttgaagcaaaatcctgcgatcattgaactccatgacactacgtccttctcatgcatgcacttaaaaacttcaatagccttatcaatacgcttggactttgcatacatttcaaggattgcatttgtaactacgatgtagcttatgaatcccttgctctcagcaagttcgtgcaacttgacaccaacatccaaactccccaagcaagcacaagcagcaagggcacttgcaatagtaatatcatcaggacttacattgttcacttccataagtgcatacacttcaagagctttatctgggaagccgtttttctcatacccagatatcatagctgtccatgtcatggcatctctagtatccattcttgagaacactgttcttgcttgcctcatcataccaagactcgcatacatctgaatcaaagagttacagaatgcaacatcaccggcaaaacccctcttcactgcaagtccatgcatttcctttgcaaaggttacgtcagataacaagcctgatgcaacagtaacactagttattgtcatgaggttaggctgaacctcatcatgtagcatggtaagaaacaactccaaccctgcattgcattcaccattctcaaaatgcccagcaatcatcgcattccatgagatacaatccatgacggtcatactgtcaaacaccttccgtgcagccataacgtccccacatttggcgtacatggtcatgagtgcattcaggacatcgacctcctccccaaacccaaaccgaagaacatgtgcatgcacctccctccccatcctccagtctgggacgcccccacagctccgcagaacacaggggaacgtgtacacgtccggtctcacacctgcccacatcatcctgtggtacaggtccagcgcctcatccagcaaaccggacttcccgtacccgcccaccatgacgttccaggagaagacatcccgttcaggcattttggcaaacaccctccacgcgtgccacgtctccccgaacctgacgagcatgctgagcatggcgttcccgaggcggagaccgaaccaggcgtgccggtcgtctgcgtgcgcgcacgcgcgcagccccggttccactgcgcggcgccactcgcagaggcggaacagcgcgacgtaggcgtcctcgtcgggcggctccgccgaggactcgaggagccagagcgcctgcgcgagctggccatgggagcagagcgctcgcagctccgtgctcgggtccgcggaagaggaggtggacgccgcagccgagacggcggccgagctgagaccgcgtaggcgcttctttgcgtggaggcggatgggcgggagggcgcgcggcaaggcaagggaggcgagtgggaggaggaacggattgagtgcgggtgcgggcttagtgggcagcagcggcatctctggaagcggaggcggaggaggcgcgcatggcgctgggagccacggccgcagggttttggagaggtttcggggccgacgagcggaggagcgcgtggccaagctggtgaccgcttgctccgcgagcgcgagtggataagcagcgcgagggcgaagcgagagggtcgtttgattattattatgtcctcctccatcaaccttactgggcctccatcatcctaaggccaccacgacttagcggaagcgtggagccgggctcagcccaagcccaaaaacgttgaggaaaattcaccggcttgaatcttctggtcctgaataaattggaggcggaaacgaagcagaaacatctcaagttgcaacaatggcatcgtccgctgctgcaaacacgaagccgatcgcgctcccgccaaggccagcgccaacccgcgtcggctgctgctgctggaggacaacagacacccaggcccacggtcccgtcgccgcggcgccgcggcgcgcctcagggtctcagcctccgccgccccgtcggacgtgccggacttcctctcttccaattcgttcgaaacccgcaagagaaagcctttcggtcccatgttgaattttaacgcagaagaagtggttgaataccagcttgagtccttaaaatacaatgaccagccccggcaagattatgggatagaggtcatgtaccggtttgcaggctttgaaccccttcgaaaggtcaacttagtttggatgacagtttggtctaggacaggaccggtttaaacaaagagtttggttagaaggagcccggccagaggaggaagaaatatttcaatccacaatggttcagagagtcggaggctcatgggatggttactggctaacggagagcttaataataaacgatggagacgcattctcgggtcgcttactgatgtagtgaattggtccaaatcaggtgcgttgaactcatgcggatacaggtcaatgacgtgatcaagcagcaggtgaacgcgtatttgcagcaaactacggcgcggttcttctttcttaacatccttttctgagttttgacgactgcctctttttttcacttctgttctacgtgtccggtggattctgtgtcgtcgcttttggtcagcccgtgttctcggttctcgcgacctacgacggcttaaaatgcattgtttttacagtacagaacagagaccgctgtgctgcaatgaatatatttgtagtaacgggattcacactcaccggaaaggctacctaggaggaaacttgcagtgcttgcgattgggcacgtcagtagcgtgcttgtgagacgaaaggaacatgagatcggctgtgtatatccatcctctgaccactatgtatgatctatgcagtgtgatgtgatcaggtggtttggtgaataaagtagcacctcttt

SEQ ID NO: 63838 - DNA, 3982 bp, Zea Mays
taccggcttccaagccacaagtctttcgctctgtacttcacggccgggccaaagcagcagccacgaagaggcgttctttcctccctgtaccatcagcatttagaaattttgtctgctaccagatagtacgacagtatactggacacagacatgaaagtgacttgcatgagttcgtttttgcaaccggataaacacataagaagcaatcgcagcgccgaaataggatgaataaaaccagccacatgttccggtggtgtgtgttcatcagcactcgcacgcaagcagctcctccaatccatctccatctctgggctaaaagatatgaagagagttttagcctgataggccactcgtacctgctgctctaactccgggtcaccattttttgatgagtagagggggctccccgtctcggccctcctgccggttgaggccagcagagtgatgagtgaacggagtcatgcttgtgagattaggctttgtcgttgtagcctccgtcgcagctttaactcttcagagagctaacagtggggccaggcacagcaaagactatgtccaagcaaggaaaaggaaggataaggctaacaattctgaacatggggagaaagaagaagagaaggaagaggttaaaacaatcagcggcataatcaactcagcccgctcgctaggcgatgacgacgatgatatgctttccgagatcgaaagcctcctatcaggagacattgacatccctataccaagcgatcgcttcgacgttaatggacggtcacggtacaacaacgcttacatggctaacgaggcctctgagatagagaagctgcgcagcctggtgagggaaatggaagagagagaggcgaagcttgagggcgagctgctagagtactatggaatgaaggaaatggagactgacatcgccgaactgcaaaagcagctcaagatcaagacagcggagatcaacatgctcaacgacaccataaactcactgcaggcggagcggaagaagctgcaagatgacgttgcatgtggagaggttgccaataaagagcttgaagcggctagaggcaagatcaaggagctgcagcggcagatacagctagaagcaggccagacaaagggtcagctgatgttgctgaaacaacaggtcatcggattgaaggccaaggaggaagaggcggggaaaaaggaagctgaggttcaacggaagctgaagaagctcagggagttggaagtggaggtacttgagctaaggaggaagaacaaggagttgttgtatgagaagagagatctcattgtgaagttggatgcagctgaagggaaaataactgagagtgatgtagttgccaatgcaagagaagagataaacaagctgaggcatacaaatgaggacctcacaaagcaagtggaaggcctacagatgaacaggttcagtgaagtagaggagttggtatacctgcgctgggtcaatgcctgtctgagattcgagctccgcaattatcagactccatcagggaaggtctctgcacgtgatcttaacaggacactgagccccaaatcacaggagagggccaaacaactgatgttggagtacgcaggatctgaacggggtcagggtgacacagaccttgagagtgttgtttcttcaatgccttcttcacctggaagcgaagactttgacaacatgtcaattgacagttcttccagcagatacagcttcctaagcaaaaggtctaatctgatgcaaaaattcaaaaggtggggaaggagcaaggatgacagcagtagtttagcctcctccatcagtggctctccaaggaggaaaccaaagggcccactggaagctctaatgctaaaaaacgctggagatggtacagccataacaacatacggaaagagggatcccaatgatgtcttggatgacgaaaatgtcgcgtcctcattccaattgatgtccaagacagttgaaggttttgctgatgagaagtatcctgcttacaaagataggcacaaacttgcaactgaacgggagaaggctataaaagagaaggctgggcaagcaagagcacaaaggtttggtggtggccacagttcagctctaatttcctctccaaaaggtgcactccctccaaaacttgctcaaattaaggagagatcccctgcagctaatgctgaatccagtgagcaatccagtgacaaccaaaacaacaccctggtggtgagccagatgaagcttgccaacgttgagaagagagcaacaagagttcccagaccacctccccctcgatcaaccgctgcttcaggggctaccagtattgcaagtggagtacaaacgccacgggcaccaggtgcaccacctcctccaccaccacctccagggaaagttggtggcccaccgccaccaccgccacctccaggtgctctaccaaggaaccttggcgggggtgacaaggtacaccgtgcgccggagattgtagagttctatcaaagtctcatgaagcgtgaagcaaaaagggagacatctttagggtcaatatcatccaatgtatctgatgccagaagtaatatgattggagagattgagaacagatcaacattcctcttagctgtaaaagctgatgtggagacacaaggagaatttgttgaatctctagcaaatgaggtccgagcagcaagcttcataaatattgatgacgttgttgcatttgtaaattggttggatgaggagttgtctttcttggttgatgagagagcagtgctaaaacattttgattggccagagagcaaaacagatgcaataagagaagcagcttttgagtaccaggatctgataaagctacagaacagggtttcaacctttaccgatgatccacaacttgcgtgtgaagaagctctcaagaagatgtattctttgcttgaaaaagtggagcagagtgtctatgcactactccgtacaagagacatgaccgtctcacgctacaaggagtacgggatcccatttgactggctgtcagattctggagtagttggcaagatcaaagtggcatctgtccagcttgcaaacaagtatatgaagagggttgcctcagaacttgatgcattagaaggcactgagaaagagcccaatagagagtttttgcttctccagggtgtgaggttcgctttccgggttcatcagtttgctgggggctttgatgcagaaagcatgaaagcttttgaagagctaagaagcaagatgaccacacaggcatctgctccaccaatatctcaaggctgaagcataaattgagcacaggattcagcacacatctggtcttacttgctggagagtgatttttagttgtgtatattaagtgtacagactacagaagagagattcaaattccggtgttgtgtcaagcaagttgtatatgccaagataatacaagtcagctgcagcagtccaaacttgttgctttaatccgaagcaaacagttactaccaacatacatacagtgctagactagcagatctgacttgaagaatgacatatcaagaaaaaaaaaatccacctggacggagaaggtcgatgttgcggcgacgagctctacctgaacgtggaagtggaaccgaacacttcgagtggttggctgtggctgcctactagtcgccggggggccgggccccgcctctcggctggcttcagcgcctccgagcgcggtggcagtgtcgccgtcgcgtgggtggaagaactcgtcggttgggttccggctccgggcgcggccgcttgccggggaatccaaccgggagaccgtgaatcgtggttatattattacttgggccctatcaaggccaccacgtctatgactgtgagcttattgtttgggcttgggccgatattcctcttcatccattagatcagtttttaagccctctttattttttaaaaacggttcattgttgcactcttagccgtttttatagtggttttgccgatgtgaaacagaag

SEQ ID NO: 63839 - DNA, 5041 bp, Zea Mays
ctaccggcttccaagccacaagtctttcgctctgtacttcacggccgggccaaagcagcagccacgaagaggcgttctttcctccctgtaccatcagcatttagaaattttgtctgctaccagatagtacgacagtatactggacacagacatgaaagtgacttgcatgagttcgtttttgcaaccggataaacacataagaagcaatcgcagcgccgaaataggatgaataaaaccagccacatgttccggtggtgtgtgttcatcagcactcgcacgcaagcagctcctccaatccatctccatctctgggctaaaagatatgaagagagttttagcctgataggccactcgtacctgctgctctaactccgggtcaccattttttgatgagtagagggggctccccgtctcggccctcctgccggttgaggccagcagagtgatgagtgaacggagtcatgcttgtgagattaggctttgtcgttgtagcctccgtcgcagctttaactcttcagagagctaacagtggggccaggcacagcaaagactatgtccaagcaaggaaaaggaaggataaggctaacaattctgaacatggggagaaagaagaagagaaggaagaggttaaaacaatcagcggcataatcaactcagcccgctcgctaggcgatgacgacgatgatatgctttccgagatcgaaagcctcctatcaggagacattgacatccctataccaagcgatcgcttcgacgttaatggacggtcacggtacaacaacgcttacatggctaacgaggcctctgagatagagaagctgcgcagcctggtgagggaaatggaagagagagaggcgaagcttgagggcgagctgctagagtactatggaatgaaggaaatggagactgacatcgccgaactgcaaaagcagctcaagatcaagacagcggagatcaacatgctcaacgacaccataaactcactgcaggcggagcggaagaagctgcaagatgacgttgcatgtggagaggttgccaataaagagcttgaagcggctagaggcaagatcaaggagctgcagcggcagatacagctagaagcaggccagacaaagggtcagctgatgttgctgaaacaacaggtcatcggattgaaggccaaggaggaagaggcggggaaaaaggaagctgaggttcaacggaagctgaagaagctcagggagttggaagtggaggtacttgagctaaggaggaagaacaaggagttgttgtatgagaagagagatctcattgtgaagttggatgcagctgaagggaaaataactgaggtatcttagtattatgagtctctacaagttgcccttctcataaacagaaaacaaatctcatcaagatgactgcaaaattgaaatttcgtcttatacatgattatcattatgcaagatattacacagcatagaattaacatattttcagaccagtacaatgaaaatgcagttacctaaagtacttactaaagcatgatttcagaggtagcattacatttaacaactatgtcagaatttaaggttctctaagggttagtttggaaacttaaattccctccgggattcccggggattgatgggaaaatgggaaaatgagctaatttcccgctcaatttccgggaatcccggaggggatttaagtttccaaactagcctgagaggcaagaatgcacctagagatttctgcaaagtattcatatagtttgatatactttgagaagctggaacatgtgctaatgacacaccctactgtatatcatgcagagtgatgtagttgccaatgcaagagaagagataaacaagctgaggcatacaaatgaggacctcacaaagcaagtggaaggcctacagatgaacaggttcagtgaagtagaggagttggtatacctgcgctgggtcaatgcctgtctgagattcgagctccgcaattatcagactccatcagggaaggtctctgcacgtgatcttaacaggacactgagccccaaatcacaggagagggccaaacaactgatgttggagtacgcaggatctgaacggggtcagggtgacacagaccttgagagtgttgtttcttcaatgccttcttcacctggaagcgaagactttgacaacatgtcaattgacagttcttccagcagatacagcttcctaagcaaaaggtctaatctgatgcaaaaattcaaaaggtggggaaggagcaaggatgacagcagtagtttagcctcctccatcagtggctctccaaggaggaaaccaaagggcccactggaagctctaatgctaaaaaacgctggagatggtacagccataacaacatacggaaagagggatcccaatgatgtcttggatgacgaaaatgtcgcgtcctcattccaattgatgtccaagacagttgaaggttttgctgatgagaagtatcctgcttacaaagataggcacaaacttgcaactgaacgggagaaggctataaaagagaaggctgggcaagcaagagcacaaaggtttggtggtggccacagttcagctctaatttcctctccaaaaggtgcactccctccaaaacttgctcaaattaaggagagatcccctgcagctaatgctgaatccagtgagcaatccagtgacaaccaaaacaacaccctggtggtgagccagatgaagcttgccaacgttgagaagagagcaacaagagttcccagaccacctccccctcgatcaaccgctgcttcaggggctaccagtattgcaagtggagtacaaacgccacgggcaccaggtgcaccacctcctccaccaccacctccagggaaagttggtggcccaccgccaccaccgccacctccaggtgctctaccaaggaaccttggcgggggtgacaaggtacaccgtgcgccggagattgtagagttctatcaaagtctcatgaagcgtgaagcaaaaagggagacatctttagggtcaatatcatccaatgtatctgatgccagaagtaatatgattggagagattgagaacagatcaacattcctcttagctgtaagtattttctgctggcaccatcttgaacaaaaatcctgtgaaatttatgagttccactattaatgcataattaaaactagtaatcagatttcaataatgaaaagtgacaaatgttttataaaaacatggaatgtttcaggtaaaagctgatgtggagacacaaggagaatttgttgaatctctagcaaatgaggtccgagcagcaagcttcataaatattgatgacgttgttgcatttgtaaattggttggatgaggagttgtctttcttggtaagcagcccgaacatgcccttcatacaatacctctgtcatgaagtagcaattattgtacttatgacacatgttctagtactaaagaggatcaacaaaattttaggttgatgagagagcagtgctaaaacattttgattggccagagagcaaaacagatgcaataagagaagcagcttttgagtaccaggatctgataaagctacagaacagggtttcaacctttaccgatgatccacaacttgcgtgtgaagaagctctcaagaagatgtattctttgcttgaaaaagtggagcagagtgtctatgcactactccgtacaagagacatgaccgtctcacgctacaaggagtacgggatcccatttgactggctgtcagattctggagtagttggcaagatcaaagtggcatctgtccagcttgcaaacaagtatatgaagagggttgcctcagaacttgatgcattagaaggcactgagaaagagcccaatagagagtttttgcttctccagggtgtgaggttcgctttccgggttcatcagtttgctgggggctttgatgcagaaagcatgaaagcttttgaagagctaagaagcaagatgaccacacaggcatctgctccaccaatatctcaaggctgaagcataaattgagcacaggattcagcacacatctggtcttacttgctggagagtgatttttagttgtgtatattaagtgtacagactacagaagagagattcaaattccggtgttgtgtcaagcaagttgtatatgccaagataatacaagtcaggtttgttcatttgtataacagttttagctcaagcataacacttttcattttgaatgttgtaactgtaaacaggcagttccagaatcacagtagagatcagatgcatagttttgcaactgttttttttcagctgggcatgattttgctactacgactaataaaatgtcaaaaaacatccattctgctagtctggtacacatggagataattcctctacatgaaccttgctgtctttgttcaaaaaaaaaaaagtttccagcctgtccgcttggttttaatccgtaacagcttctacttctacagtatttttgtctctatggattacagctgcagcagtccaaacttgttgctttaatccgaagcaaacagttactaccaacatacatacagtgctagactagcagatctgacttgaagaatgacatatcaagaaaaaaaaaatccacctggacggagaaggtcgatgttgcggcgacgagctctacctgaacgtggaagtggaaccgaacacttcgagtggttggctgtggctgcctactagtcgccggggggccgggccccgcctctcggctggcttcagcgcctccgagcgcggtggcagtgtcgccgtcgcgtgggtggaagaactcgtcggttgggttccggctccgggcgcggccgcttgccggggaatccaaccgggagaccgtgaatcgtggttatattattacttgggccctatcaaggccaccacgtctatgactgtgagcttattgtttgggcttgggccgatattcctcttcatccattagatcagtttttaagccctctttattttttaaaaacggttcattgttgcactcttagccgtttttatagtggttttgccgatgtgaaacagaag

SEQ ID NO: 63840 - DNA, 4313 bp, Zea Mays
ggcctaccggcttccaagccacaagtctttcgctctgtacttcacggccgggccaaagcagcagccacgaagaggcgttctttcctccctgtaccatcagcatttagaaattttgtctgctaccagatagtacgacagtatactggacacagacatgaaagtgacttgcatgagttcgtttttgcaaccggataaacacataagaagcaatcgcagcgccgaaataggatgaataaaaccagccacatgttccggtggtgtgtgttcatcagcactcgcacgcaagcagctcctccaatccatctccatctctgggctaaaagatatgaagagagttttagcctgataggccactcgtacctgctgctctaactccgggtcaccattttttgatgagtagagggggctccccgtctcggccctcctgccggttgaggccagcagagtgatgagtgaacggagtcatgcttgtgagattaggctttgtcgttgtagcctccgtcgcagctttaactcttcagagagctaacagtggggccaggcacagcaaagactatgtccaagcaaggaaaaggaaggataaggctaacaattctgaacatggggagaaagaagaagagaaggaagaggttaaaacaatcagcggcataatcaactcagcccgctcgctaggcgatgacgacgatgatatgctttccgagatcgaaagcctcctatcaggagacattgacatccctataccaagcgatcgcttcgacgttaatggacggtcacggtacaacaacgcttacatggctaacgaggcctctgagatagagaagctgcgcagcctggtgagggaaatggaagagagagaggcgaagcttgagggcgagctgctagagtactatggaatgaaggaaatggagactgacatcgccgaactgcaaaagcagctcaagatcaagacagcggagatcaacatgctcaacgacaccataaactcactgcaggcggagcggaagaagctgcaagatgacgttgcatgtggagaggttgccaataaagagcttgaagcggctagaggcaagatcaaggagctgcagcggcagatacagctagaagcaggccagacaaagggtcagctgatgttgctgaaacaacaggtcatcggattgaaggccaaggaggaagaggcggggaaaaaggaagctgaggttcaacggaagctgaagaagctcagggagttggaagtggaggtacttgagctaaggaggaagaacaaggagttgttgtatgagaagagagatctcattgtgaagttggatgcagctgaagggaaaataactgagagtgatgtagttgccaatgcaagagaagagataaacaagctgaggcatacaaatgaggacctcacaaagcaagtggaaggcctacagatgaacaggttcagtgaagtagaggagttggtatacctgcgctgggtcaatgcctgtctgagattcgagctccgcaattatcagactccatcagggaaggtctctgcacgtgatcttaacaggacactgagccccaaatcacaggagagggccaaacaactgatgttggagtacgcaggatctgaacggggtcagggtgacacagaccttgagagtgttgtttcttcaatgccttcttcacctggaagcgaagactttgacaacatgtcaattgacagttcttccagcagatacagcttcctaagcaaaaggtctaatctgatgcaaaaattcaaaaggtggggaaggagcaaggatgacagcagtagtttagcctcctccatcagtggctctccaaggaggaaaccaaagggcccactggaagctctaatgctaaaaaacgctggagatggtacagccataacaacatacggaaagagggatcccaatgatgtcttggatgacgaaaatgtcgcgtcctcattccaattgatgtccaagacagttgaaggttttgctgatgagaagtatcctgcttacaaagataggcacaaacttgcaactgaacgggagaaggctataaaagagaaggctgggcaagcaagagcacaaaggtttggtggtggccacagttcagctctaatttcctctccaaaaggtgcactccctccaaaacttgctcaaattaaggagagatcccctgcagctaatgctgaatccagtgagcaatccagtgacaaccaaaacaacaccctggtggtgagccagatgaagcttgccaacgttgagaagagagcaacaagagttcccagaccacctccccctcgatcaaccgctgcttcaggggctaccagtattgcaagtggagtacaaacgccacgggcaccaggtgcaccacctcctccaccaccacctccagggaaagttggtggcccaccgccaccaccgccacctccaggtgctctaccaaggaaccttggcgggggtgacaaggtacaccgtgcgccggagattgtagagttctatcaaagtctcatgaagcgtgaagcaaaaagggagacatctttagggtcaatatcatccaatgtatctgatgccagaagtaatatgattggagagattgagaacagatcaacattcctcttagctgtaaaagctgatgtggagacacaaggagaatttgttgaatctctagcaaatgaggtccgagcagcaagcttcataaatattgatgacgttgttgcatttgtaaattggttggatgaggagttgtctttcttggttgatgagagagcagtgctaaaacattttgattggccagagagcaaaacagatgcaataagagaagcagcttttgagtaccaggatctgataaagctacagaacagggtttcaacctttaccgatgatccacaacttgcgtgtgaagaagctctcaagaagatgtattctttgcttgaaaaagtggagcagagtgtctatgcactactccgtacaagagacatgaccgtctcacgctacaaggagtacgggatcccatttgactggctgtcagattctggagtagttggcaagatcaaagtggcatctgtccagcttgcaaacaagtatatgaagagggttgcctcagaacttgatgcattagaaggcactgagaaagagcccaatagagagtttttgcttctccagggtgtgaggttcgctttccgggttcatcagtttgctgggggctttgatgcagaaagcatgaaagcttttgaagagctaagaagcaagatgaccacacaggcatctgctccaccaatatctcaaggctgaagcataaattgagcacaggattcagcacacatctggtcttacttgctggagagtgatttttagttgtgtatattaagtgtacagactacagaagagagattcaaattccggtgttgtgtcaagcaagttgtatatgccaagataatacaagtcaggtttgttcatttgtataacagttttagctcaagcataacacttttcattttgaatgttgtaactgtaaacaggcagttccagaatcacagtagagatcagatgcatagttttgcaactgttttttttcagctgggcatgattttgctactacgactaataaaatgtcaaaaaacatccattctgctagtctggtacacatggagataattcctctacatgaaccttgctgtctttgttcaaaaaaaaaaaagtttccagcctgtccgcttggttttaatccgtaacagcttctacttctacagtatttttgtctctatggattacagctgcagcagtccaaacttgttgctttaatccgaagcaaacagttactaccaacatacatacagtgctagactagcagatctgacttgaagaatgacatatcaagaaaaaaaaaatccacctggacggagaaggtcgatgttgcggcgacgagctctacctgaacgtggaagtggaaccgaacacttcgagtggttggctgtggctgcctactagtcgccggggggccgggccccgcctctcggctggcttcagcgcctccgagcgcggtggcagtgtcgccgtcgcgtgggtggaagaactcgtcggttgggttccggctccgggcgcggccgcttgccggggaatccaaccgggagaccgtgaatcgtggttatattattacttgggccctatcaaggccaccacgtctatgactgtgagcttattgtttgggcttgggccgatattcctcttcatccattagatcagtttttaagccctctttattttttaaaaacggttcattgttgcactcttagccgtttttatagtggttttgccgatgtgaaacagaag

SEQ ID NO: 63841 - DNA, 1296 bp, Zea Mays
acgcggaaaccctagcagctcaacaccctcgaggtacatccattcgcagtcggccgtgtcctcggagccgcgggagatggcgtaagttctcccaccgaaaccatttgctccttgtgctgtttttttttcagaggaggtaccgctggctgctgtgtgggggcggttggtgtcggctgctagccgatggtgatttaccgggatgtttggggttcaggtggatagtaggccggctgacagagctgcaaggtttggctgatctgagggttgcaggggcctagcccgtcttatcatcttccgcaatttttgcgctttattgtagataattattcatatagatgggcattgttgcacaacactggaaagcgatccaacatgatttgctgctaaaacacaggaaggctacctagacgagtttctttattatatattttataattataatcatggtctattagcgattcactgtattatgaattcgatcgtttgttgaccgctacatgcctacaacacaggaagctcatcagttcacgatgattttgtgctttggcagggatcaggagaccgtagctgtggttgaggcacctaccccggttcttggggaaccgatggacctgatgactgccctgcagctcgtcatgaagaagtcaggtgctcatgatggccttgtgaagggtcttcgtgaggctgccaaagccatcgagaagcatgccgctcagctctgcgtgcttgccgaggactgcgaccagcctgattatgtcaagctggtgaaggctctctgcgctgagcacaatgtccacctggttactgtgcctagcgccaaaactcttggagagtgggctgggctttgcaagatcgactctgagggcaaggcgaggaaggttgtaggctgctcctgtgttgttgtcaaggactacggcgaagaatctgaaggccttaacatagtgcaggagtacgtcaaatcgcactagatacagtctgtcagtatctggaagttgtgttcaacactacattttgcacctgagtttaaatatgtgtttggttcttgggctttgctaggagattagaacagttttcaagtgagcctaggatccatgtgaacgatttgaatatctcgcctcttgtcttgcaagtgttctcatctgctgttaatacaaaatcagcaagagctagtattttgttcttccttgtccttgccatagcatgtggtttcgtgctgctgcccattcgttcgatggtggtttttatatgctggggttgtggaaagcgcttgcggatgtagcccttcatgtttgggaa

SEQ ID NO: 63842 - DNA, 2188 bp, Zea Mays
atggctcgccccgcgccccggcatgcggcatccccctccatccaggctccacccaacgctgccgcctgccgcctgccgcctgccgccgagaccctcgcgctcgtcgatcgccgtggaaatgcatctcgacagcgaccaccccgccggcgttcgtcccacgatacgggccccagggcctgcgccgccgcaccggcccggtcacgctcaacttctcgagcccccgcagcggccacgcggggaccggaggcgatcttccgggaggacgtcggtcacgccgccgccgagacgtacctcgtaacgggactcgccttcacccggctcggatacctcgggtgatctgcgtttaccaatattactcgcgatagccttccatgtctcgcttcagttccttgatcggtggtggttgtgtttctctaacaccgtgaccgtgaaacctctccgatagattattatgcgacccatgtggtgggtggtgaagggctggttatcggtggatatgaggatatcacatcttattgcactccgtgtatatgctgttttactcatgcccggtttcatagaaggtcaggttattagaagtgtagtactgtagtctatggagaacaaccaagaaatgggtcagctaagtttaaagaaagtcacgtgctatatagcgtcctcgagcacttataacagtagatccagagaaattatgtgtgttggaattgtacatgcccagagataacagcaaatcaagtccgttgtggcatttgtaactggaggagcttggatcatcgggaatagagttaatccgtgaatttgctggcgtgggagggggcatcgctgggcagacgacactcacgacgaaagtcgtgctttaaaggtatagggacaaggcatggagtggtctccttggaaggcggtttgcagacaggatttatagtagcttggattgattacaggtgctgatgccttaaagaattttgtgttgtatacaccaccgcatacatttaattcaccattatttttttgacctgtagttttattattaattttgagtaatgactggttggtttctctttgcttgactgccaaaatttaaatatgactggcagaaatttccctcgaggaacaataagtgacgtggtcagtgatggttctgaggcaatatcattcatttgtaacaatgttgttagctttgtaggagatcctactaaaatttacttgatgggtcaatcagcaggagcacatattgtggcctgcgtgctcttagagcaagcacttaaagaatctaagggagagagcacctattgtaatgtggttcaaataaaagtatgtttttgtttatctggagggtaagaacttgaaagcatggggatctgttttattatgtctgtaattttatattcttaatcatatattttattattaaatagcactagaacataaaatgattttatctgataaggcattaaaaatgcttgcaccatgcttgtataatgaaatctgatttatgaaactaggcctagcccttcacatctagaaaaggctagatttcttggattttcaggagtctaaattttgcattttacaacaatagcaacaaaatccttttagtaccaagcaagttggagtaagatagagttgaaatcaaataaaaaccagaagttaagtttcaggcatatggatagttgttctccacgcactcctattcaaagacaaacctttggttatatttcatcctttcaaatctctttttattgtctgttcctatttcaaattcggcctttccctgcctctctctccattgctatcacgccttagaattacaatacacattggtgtctctgaaggtctccattggatctgtccaaacatctccaccactgttggacaagttttactccaagtggtgttatctctagcctatcatatatatcatcattctgaacttgatcccttcttttattgacataaatcaaatgcaacatacgcatttccataacacttgccaacgtgtcgcttttttataggccaacattatgtatcacataacatagcaggtctaatagtcgttctataaaacttgacttttagtttctgtagtatcctcttgtcacatagaatgtcagatgcttgaccacttcatccaccttcctttgattctatagctaacatcttcatcagcattcccgtctattttctaaac

SEQ ID NO: 63843 - DNA, 2004 bp, Zea Mays
atggctcgccccgcgccccggcatgcggcatccccctccatccaggctccacccaacgctgccgcctgccgcctgccgcctgccgccgagaccctcgcgctcgtcgatcgccgtggaaatgcatctcgacagcgaccaccccgccggcgttcgtcccacgatacgggccccagggcctgcgccgccgcaccggcccggtcacgctcaacttctcgagcccccgcagcggccacgcggggaccggaggcgatcttccgggaggacgtcggtcacgccgccgccgagacgtacctcggctggttatcggtggatatgaggatatcacatcttattgcactccgtgtatatgctgttttactcatgcccggtttcatagaaggtcaggttattagaagtgtagtactgtagtctatggagaacaaccaagaaatgggtcagctaagtttaaagaaagtcacgtgctatatagcgtcctcgagcacttataacagtagatccagagaaattatgtgtgttggaattgtacatgcccagagataacagcaaatcaagtccgttgtggcatttgtaactggaggagcttggatcatcgggaatagagttaatccgtgaatttgctggcgtgggagggggcatcgctgggcagacgacactcacgacgaaagtcgtgctttaaaggtatagggacaaggcatggagtggtctccttggaaggcggtttgcagacaggatttatagtagcttggattgattacaggtgctgatgccttaaagaattttgtgttgtatacaccaccgcatacatttaattcaccattatttttttgacctgtagttttattattaattttgagtaatgactggttggtttctctttgcttgactgccaaaatttaaatatgactggcagaaatttccctcgaggaacaataagtgacgtggtcagtgatggttctgaggcaatatcattcatttgtaacaatgttgttagctttgtaggagatcctactaaaatttacttgatgggtcaatcagcaggagcacatattgtggcctgcgtgctcttagagcaagcacttaaagaatctaagggagagagcacctattgtaatgtggttcaaataaaagtatgtttttgtttatctggagggtaagaacttgaaagcatggggatctgttttattatgtctgtaattttatattcttaatcatatattttattattaaatagcactagaacataaaatgattttatctgataaggcattaaaaatgcttgcaccatgcttgtataatgaaatctgatttatgaaactaggcctagcccttcacatctagaaaaggctagatttcttggattttcaggagtctaaattttgcattttacaacaatagcaacaaaatccttttagtaccaagcaagttggagtaagatagagttgaaatcaaataaaaaccagaagttaagtttcaggcatatggatagttgttctccacgcactcctattcaaagacaaacctttggttatatttcatcctttcaaatctctttttattgtctgttcctatttcaaattcggcctttccctgcctctctctccattgctatcacgccttagaattacaatacacattggtgtctctgaaggtctccattggatctgtccaaacatctccaccactgttggacaagttttactccaagtggtgttatctctagcctatcatatatatcatcattctgaacttgatcccttcttttattgacataaatcaaatgcaacatacgcatttccataacacttgccaacgtgtcgcttttttataggccaacattatgtatcacataacatagcaggtctaatagtcgttctataaaacttgacttttagtttctgtagtatcctcttgtcacatagaatgtcagatgcttgaccacttcatccaccttcctttgattctatagctaacatcttcatcagcattcccgtctattttctaaac

SEQ ID NO: 63844 - DNA, 2567 bp, Zea Mays
atggctcgccccgcgccccggcatgcggcatccccctccatccaggctccacccaacgctgccgcctgccgcctgccgcctgccgccgagaccctcgcgctcgtcgatcgccgtggaaatgcatctcgacagcgaccaccccgccggcgttcgtcccacgatacgggccccagggcctgcgccgccgcaccggcccggtcacgctcaacttctcgagcccccgcagcggccacgcggggaccggaggcgatcttccgggaggacgtcggtcacgccgccgccgagacgtacctcggctggttatcggtggatatgaggatatcacatcttattgcactccgtgtatatgctgttttactcatgcccggtttcatagaaggtgtgcgatatgggatttagcttttggttatcttgctaaacaattcgttttcttatatgcttgcgatagatgatgttgaaatatggtcagcataacatattctaacaactaatatttatacctttttttttgtttgtttccatttggctactactatttcttttcaggtcaggttattagaagtgtagtactgtagtctatggagaacaaccaagaaatgggtcagctaagtttaaagaaagtcacgtgctatatagcgtcctcgagcacttataacagtagatccagagaaattatgtgtgttggaattgtacatgcccagagataacagcaaatcaagtccgttgtggcatttgtaactggaggagcttggatcatcgggtaagtgacagtttcctcataaatcacactacattacagggtttgttcatggcgactttcctttattactaacgtggcttatatttattatatatatttagttactagtcatctgacggtacattgctacagtttatatatatatatatatatttattaaatataattatatatttatatataattatataaatataggtagaacttgattaaatgacatatttattaaaatataattatatttttattttcaaattattagtgtttgtacacacacaatatctatcttttacaaaacataaacgaacaagagctccactggttagatgaggggagcctgtattcaggcggctaaggttcgatccctcgctcgcttcattttttgggcatgcacaggaatagagttaatccgtgaatttgctggcgtgggagggggcatcgctgggcagacgacactcacgacgaaagtcgtgctttaaaggtatagggacaaggcatggagtggtctccttggaaggcggtttgcagacaggatttatagtagcttggattgattacaggtgctgatgccttaaagaattttgtgttgtatacaccaccgcatacatttaattcaccattatttttttgacctgtagttttattattaattttgagtaatgactggttggtttctctttgcttgactgccaaaatttaaatatgactggcagaaatttccctcgaggaacaataagtgacgtggtcagtgatggttctgaggcaatatcattcatttgtaacaatgttgttagctttgtaggagatcctactaaaatttacttgatgggtcaatcagcaggagcacatattgtggcctgcgtgctcttagagcaagcacttaaagaatctaagggagagagcacctattgtaatgtggttcaaataaaagtatgtttttgtttatctggagggtaagaacttgaaagcatggggatctgttttattatgtctgtaattttatattcttaatcatatattttattattaaatagcactagaacataaaatgattttatctgataaggcattaaaaatgcttgcaccatgcttgtataatgaaatctgatttatgaaactaggcctagcccttcacatctagaaaaggctagatttcttggattttcaggagtctaaattttgcattttacaacaatagcaacaaaatccttttagtaccaagcaagttggagtaagatagagttgaaatcaaataaaaaccagaagttaagtttcaggcatatggatagttgttctccacgcactcctattcaaagacaaacctttggttatatttcatcctttcaaatctctttttattgtctgttcctatttcaaattcggcctttccctgcctctctctccattgctatcacgccttagaattacaatacacattggtgtctctgaaggtctccattggatctgtccaaacatctccaccactgttggacaagttttactccaagtggtgttatctctagcctatcatatatatcatcattctgaacttgatcccttcttttattgacataaatcaaatgcaacatacgcatttccataacacttgccaacgtgtcgcttttttataggccaacattatgtatcacataacatagcaggtctaatagtcgttctataaaacttgacttttagtttctgtagtatcctcttgtcacatagaatgtcagatgcttgaccacttcatccaccttcctttgattctatagctaacatcttcatcagcattcccgtctattttctaaac

SEQ ID NO: 63845 - DNA, 1725 bp, Zea Mays
atggctcgccccgcgccccggcatgcggcatccccctccatccaggctccacccaacgctgccgcctgccgcctgccgcctgccgccgagaccctcgcgctcgtcgatcgccgtggaaatgcatctcgacagcgaccaccccgccggcgttcgtcccacgatacgggccccagggcctgcgccgccgcaccggcccggtcacgctcaacttctcgagcccccgcagcggccacgcggggaccggaggcgatcttccgggaggacgtcggtcacgccgccgccgagacgtacctcgtaacgggactcgccttcacccggctcggatacctcggggctggttatcggtggatatgaggatatcacatcttattgcactccgtgtatatgctgttttactcatgcccggtttcatagaaggtcaggttattagaagtgtagtactgtagtctatggagaacaaccaagaaatgggtcagctaagtttaaagaaagtcacgtgctatatagcgtcctcgagcacttataacagtagatccagagaaattatgtgtgttggaattgtacatgcccagagataacagcaaatcaagtccgttgtggcatttgtaactggaggagcttggatcatcggaaatttccctcgaggaacaataagtgacgtggtcagtgatggttctgaggcaatatcattcatttgtaacaatgttgttagctttgtaggagatcctactaaaatttacttgatgggtcaatcagcaggagcacatattgtggcctgcgtgctcttagagcaagcacttaaagaatctaagggagagagcacctattgtaatgtggttcaaataaaagtatgtttttgtttatctggagggtaagaacttgaaagcatggggatctgttttattatgtctgtaattttatattcttaatcatatattttattattaaatagcactagaacataaaatgattttatctgataaggcattaaaaatgcttgcaccatgcttgtataatgaaatctgatttatgaaactaggcctagcccttcacatctagaaaaggctagatttcttggattttcaggagtctaaattttgcattttacaacaatagcaacaaaatccttttagtaccaagcaagttggagtaagatagagttgaaatcaaataaaaaccagaagttaagtttcaggcatatggatagttgttctccacgcactcctattcaaagacaaacctttggttatatttcatcctttcaaatctctttttattgtctgttcctatttcaaattcggcctttccctgcctctctctccattgctatcacgccttagaattacaatacacattggtgtctctgaaggtctccattggatctgtccaaacatctccaccactgttggacaagttttactccaagtggtgttatctctagcctatcatatatatcatcattctgaacttgatcccttcttttattgacataaatcaaatgcaacatacgcatttccataacacttgccaacgtgtcgcttttttataggccaacattatgtatcacataacatagcaggtctaatagtcgttctataaaacttgacttttagtttctgtagtatcctcttgtcacatagaatgtcagatgcttgaccacttcatccaccttcctttgattctatagctaacatcttcatcagcattcccgtctattttctaaac

SEQ ID NO: 63846 - DNA, 2042 bp, Zea Mays
atggctcgccccgcgccccggcatgcggcatccccctccatccaggctccacccaacgctgccgcctgccgcctgccgcctgccgccgagaccctcgcgctcgtcgatcgccgtggaaatgcatctcgacagcgaccaccccgccggcgttcgtcccacgatacgggccccagggcctgcgccgccgcaccggcccggtcacgctcaacttctcgagcccccgcagcggccacgcggggaccggaggcgatcttccgggaggacgtcggtcacgccgccgccgagacgtacctcgtaacgggactcgccttcacccggctcggatacctcggggctggttatcggtggatatgaggatatcacatcttattgcactccgtgtatatgctgttttactcatgcccggtttcatagaaggtcaggttattagaagtgtagtactgtagtctatggagaacaaccaagaaatgggtcagctaagtttaaagaaagtcacgtgctatatagcgtcctcgagcacttataacagtagatccagagaaattatgtgtgttggaattgtacatgcccagagataacagcaaatcaagtccgttgtggcatttgtaactggaggagcttggatcatcgggaatagagttaatccgtgaatttgctggcgtgggagggggcatcgctgggcagacgacactcacgacgaaagtcgtgctttaaaggtatagggacaaggcatggagtggtctccttggaaggcggtttgcagacaggatttatagtagcttggattgattacaggtgctgatgccttaaagaattttgtgttgtatacaccaccgcatacatttaattcaccattatttttttgacctgtagttttattattaattttgagtaatgactggttggtttctctttgcttgactgccaaaatttaaatatgactggcagaaatttccctcgaggaacaataagtgacgtggtcagtgatggttctgaggcaatatcattcatttgtaacaatgttgttagctttgtaggagatcctactaaaatttacttgatgggtcaatcagcaggagcacatattgtggcctgcgtgctcttagagcaagcacttaaagaatctaagggagagagcacctattgtaatgtggttcaaataaaagtatgtttttgtttatctggagggtaagaacttgaaagcatggggatctgttttattatgtctgtaattttatattcttaatcatatattttattattaaatagcactagaacataaaatgattttatctgataaggcattaaaaatgcttgcaccatgcttgtataatgaaatctgatttatgaaactaggcctagcccttcacatctagaaaaggctagatttcttggattttcaggagtctaaattttgcattttacaacaatagcaacaaaatccttttagtaccaagcaagttggagtaagatagagttgaaatcaaataaaaaccagaagttaagtttcaggcatatggatagttgttctccacgcactcctattcaaagacaaacctttggttatatttcatcctttcaaatctctttttattgtctgttcctatttcaaattcggcctttccctgcctctctctccattgctatcacgccttagaattacaatacacattggtgtctctgaaggtctccattggatctgtccaaacatctccaccactgttggacaagttttactccaagtggtgttatctctagcctatcatatatatcatcattctgaacttgatcccttcttttattgacataaatcaaatgcaacatacgcatttccataacacttgccaacgtgtcgcttttttataggccaacattatgtatcacataacatagcaggtctaatagtcgttctataaaacttgacttttagtttctgtagtatcctcttgtcacatagaatgtcagatgcttgaccacttcatccaccttcctttgattctatagctaacatcttcatcagcattcccgtctattttctaaac

SEQ ID NO: 63847 - DNA, 1643 bp, Zea Mays
cgcacgtctcagcccacctcctcctaccaccctcgccgcggccgcgccacacaaaagcgtcacgccgtctgacagcggggaaaaaaaaggaggccatggaggagaacattcctcacccgagggaggcacaagggcccaccgtcgcccaaccggccccggcggtcgtcacgccccgcgacgacgctctagctcccgtagcccagctgctgtcgtcctcgggcgatgatgagtcgtccgacgacgagctggaggtcgacttcgagttcccgttcgtctgcagggactcccccgcgggcacggccgccccggccgacgagctcttcgcggacggccggatcagggccttctacccggtgttcggccgcggcacggccgggtgcgtcccccgtggcggcggcggcggcggcagcggcagctgctgcacggcgctgccggccgctccgccgcgggtgaggggccagctgggtcgcctgttccaggaggagacacgggagcgcagcacctccgccagctttacggcgtcgtccgggcccgccacggacgaggacggcggcctggatggcgcggcgccggggagctactgcgtgtggcgcccgggtccgtccgcgtccgcgtcgccctccccgccgccgccgccgccgcccaggaagagcgggtccacggggtccatggcgcggtggcgccgcatcagcgacctcgtcgtgggccgcagccacagcgacggcagggacaagttcgtcttcctcgccgccgcgcccaggagggggcccaaggacaaggagcctgccgccactgccccgcccgcggtcgccgcccaccagatggcggcggcgtacctcgccaggggcgtcccaccgcggcgcacgttcctgccgtaccgcgaggagctcgtgggcttcttcgccaacgtgaacggcatcagtcggagccaccaccgtccgccgttctgacgtcttgtcagtggcctattccatcggttaattaccctgattaattaattattcggtaacgtgattagcgcttttcttagcagtagtggataagtaggcggtctgtataggtaatgattttgggtggatcacgcgacgcgatgaatggagaggtgttttctgtcgaccaagtgtgaacgcctacgcggacgtggcacatatgagtggggatgctcggtgaccggtgctttacggaaacaacccgtgccgctttgcgactacgaccacgaccatgggcgcgatgccggtggacggggcgctgcaccagggtgccgtgcgtgcgccgccagcctgggcgacggcgacaccaggtggtctggtctggtctggtccgttgccgtccgtccgtctcggcccctcctcacgggtggaatatactctgtgcgtatttgggaggaacttgcgcccttcgatttggtcgtctgtctcatctcatggtaaatctggaaaggaagaaatgctgggattttgaatcgcgggagttagcctatactcagctgctgtacgaaataaagaacgaacgtggagcatggatcaaattttaaacatcttacgattttgacatgtatacggatgatgagagttttttttacactttctgttcagttttcggtacaatctactggcctatcttgtcacccttttttaatatac

SEQ ID NO: 63848 - DNA, 1483 bp, Zea Mays
ctcggatcgaagcaaggaagagcggggatcgatttgttgccgggcaggcatcctactcctcgtccaaccggatagtgtgacaacgaggccgccaggacatcttggatcttaggcttgagcattattatctgaattccgctcacaaatcacaacaattgaactacggtttggggcgtgagaaccgagaaagttactcgtttaaatcggatgaagagtttgagatgaggcacggaggaacagcaaacagctcctgatcctttcaacagtttcagcgctctcagcgtcatcctgggttattattaagacctgacagaagtgcagatgagaagacaaaacttaacagagactgatgggactgatcgatcattcagaagcaccatgatgggctaaagttcaacagctgtgcacaagtccaggggcactgagttccgtgcctgccagacaccaaaactgactgacctttgatagggagaaatcatcacctgcttctgcacatcaaatcgatgttaagcccaacaaatgagctgaatagttgaagaacacagtaaataacagatgcatctttatccaaatttccgagggcgaggggcccagcctattattatcagtaagaagacatatctctactttcttttccccacagcagtaacttttctatgccacaacttgttccctaatagtaccgccgcagtagggtatgttgtcgaagaaaaaaaaattccagtatcacatctggatgtaggaggtttagtggtactatgtgttctccatgtccttttcaactggtttggcaaaactgctgtccagatttggcgattagctttcgaataaaacaggacaaaaagaaaccagatttgcggactcgtgcgcgaaactggagcgaatggtaccagagaaccaaaatcctgtgatgccacgtttctcattatccgtttttttttcttcctctttcatggattgcaattttcttggagcgcagccgttacatccttatctgcctctcaaccgcctcatctcttgcagcatgggcctcctctcttgcagcatgggcctcacgatttgatgaaacgaaatccttgtaaaatcctttagcttctggaaggtagagtgatagaggcgagtaaagcatgcgacagcagccatgtgagtacgtgaccggccggccgcccgtctcggaccagactgacatggagctccaggcctccattaatggaatcaatcaggtctggaaaatgacactccctcctccatgcatggcagtaatgggatgcaactacagccaagtacagtctaaatcttaaggcactgcagcaggcaagtacacctccaattgaatggcaaacacacacgcacgcgcaaagacaaagcaacgagcatttgatgcaacctccgagtacgtctctctaatggcgtgcatgcaagcgttgttctccaatctccactgcattccatccagccttttctcctctagaatatcctagcc

SEQ ID NO: 63849 - DNA, 1501 bp, Zea Mays
cttggagacaccgtctcggatcgaagcaaggaagagcggggatcgatttgttgccgggcaggcatcctactcctcgtccaaccggtaggatagtgtgacaacgaggccgccaggacatcttggatcttaggcttgagcattattatctgaattccgctcacaaatcacaacaattgaactacggtttggggcgtgagaaccgagaaagttactcgtttaaatcggatgaagagtttgagatgaggcacggaggaacagcaaacagctcctgatcctttcaacagtttcagcgctctcagcgtcatcctgggttattattaagacctgacagaagtgcagatgagaagacaaaacttaacagagactgatgggactgatcgatcattcagaagcaccatgatgggctaaagttcaacagctgtgcacaagtccaggggcactgagttccgtgcctgccagacaccaaaactgactgacctttgatagggagaaatcatcacctgcttctgcacatcaaatcgatgttaagcccaacaaatgagctgaatagttgaagaacacagtaaataacagatgcatctttatccaaatttccgagggcgaggggcccagcctattattatcagtaagaagacatatctctactttcttttccccacagcagtaacttttctatgccacaacttgttccctaatagtaccgccgcagtagggtatgttgtcgaagaaaaaaaaattccagtatcacatctggatgtaggaggtttagtggtactatgtgttctccatgtccttttcaactggtttggcaaaactgctgtccagatttggcgattagctttcgaataaaacaggacaaaaagaaaccagatttgcggactcgtgcgcgaaactggagcgaatggtaccagagaaccaaaatcctgtgatgccacgtttctcattatccgtttttttttcttcctctttcatggattgcaattttcttggagcgcagccgttacatccttatctgcctctcaaccgcctcatctcttgcagcatgggcctcctctcttgcagcatgggcctcacgatttgatgaaacgaaatccttgtaaaatcctttagcttctggaaggtagagtgatagaggcgagtaaagcatgcgacagcagccatgtgagtacgtgaccggccggccgcccgtctcggaccagactgacatggagctccaggcctccattaatggaatcaatcaggtctggaaaatgacactccctcctccatgcatggcagtaatgggatgcaactacagccaagtacagtctaaatcttaaggcactgcagcaggcaagtacacctccaattgaatggcaaacacacacgcacgcgcaaagacaaagcaacgagcatttgatgcaacctccgagtacgtctctctaatggcgtgcatgcaagcgttgttctccaatctccactgcattccatccagccttttctcctctagaatatcctagcc

SEQ ID NO: 63850 - DNA, 937 bp, Zea Mays
ctcggatcgaagcaaggaagagcggggatcgatttgttgccgggcaggcatcctactcctcgtccaaccggtagtgtgacaacgaggccgccaggacatcttggatcttaggcttgagcattattatctgaattccgctcacaaatcacaacaattgaactacggtttggggcgtgagaaccgagaaagttactcgtttaaatcggatgaagagtttgagatgaggcaagtttccaaaccaggacgcttctctactaattatttccagaatcaagtgtgtcggttgcataatgcttcggccactcccgcatccccgctgactgcgacaaccacatgcaatgacccaccccagcccaaaatttaaaacgcctgcgcaaaaaaaaaaaacgacttgcctacttgtaggagctctcgcctggtagctcaatcctgcaacaactactcccatgctacagccaaagcctccacccggagggccctatgggacgccctgcttccatgctcccatgcatgccgtccagaaaacggtgcaacaacacaagctgcttgagaagaacaagaagcccatctccattatattgccgtcctccggaagctggtcaaagcagtcggcctgtgatgcaaggctgctttagatattggcatggtgccccctatcctagaatgattgtcatgcgttagagacaaccataaccccctccctggttttctctggtctaagcgtttagtctgtgtggttgctgtccttggccaccatgcgtggcgtgccagggcctgctatgaactttggcctacgtgccatgaacttcaaactgtcttttgtgctcttggtgcccaccctcgcctattgaataacccaaacctatgtttacctatcgtaacgtgcgtggtctaggcgattcggataagtgtaccgttgtgttctgaatcttcaaat

SEQ ID NO: 63851 - DNA, 958 bp, Zea Mays
gtcttggagacaccgtctcggatcgaagcaaggaagagcggggatcgatttgttgccgggcaggcatcctactcctcgtccaaccggtaggatagtgtgacaacgaggccgccaggacatcttggatcttaggcttgagcattattatctgaattccgctcacaaatcacaacaattgaactacggtttggggcgtgagaaccgagaaagttactcgtttaaatcggatgaagagtttgagatgaggcaagtttccaaaccaggacgcttctctactaattatttccagaatcaagtgtgtcggttgcataatgcttcggccactcccgcatccccgctgactgcgacaaccacatgcaatgacccaccccagcccaaaatttaaaacgcctgcgcaaaaaaaaaaaacgacttgcctacttgtaggagctctcgcctggtagctcaatcctgcaacaactactcccatgctacagccaaagcctccacccggagggccctatgggacgccctgcttccatgctcccatgcatgccgtccagaaaacggtgcaacaacacaagctgcttgagaagaacaagaagcccatctccattatattgccgtcctccggaagctggtcaaagcagtcggcctgtgatgcaaggctgctttagatattggcatggtgccccctatcctagaatgattgtcatgcgttagagacaaccataaccccctccctggttttctctggtctaagcgtttagtctgtgtggttgctgtccttggccaccatgcgtggcgtgccagggcctgctatgaactttggcctacgtgccatgaacttcaaactgtcttttgtgctcttggtgcccaccctcgcctattgaataacccaaacctatgtttacctatcgtaacgtgcgtggtctaggcgattcggataagtgtaccgttgtgttctgaatcttcaaat

SEQ ID NO: 63852 - DNA, 954 bp, Zea Mays
gtcttggagacaccgtctcggatcgaagcaaggaagagcggggatcgatttgttgccgggcaggcatcctactcctcgtccaaccggatagtgtgacaacgaggccgccaggacatcttggatcttaggcttgagcattattatctgaattccgctcacaaatcacaacaattgaactacggtttggggcgtgagaaccgagaaagttactcgtttaaatcggatgaagagtttgagatgaggcaagtttccaaaccaggacgcttctctactaattatttccagaatcaagtgtgtcggttgcataatgcttcggccactcccgcatccccgctgactgcgacaaccacatgcaatgacccaccccagcccaaaatttaaaacgcctgcgcaaaaaaaaaaaacgacttgcctacttgtaggagctctcgcctggtagctcaatcctgcaacaactactcccatgctacagccaaagcctccacccggagggccctatgggacgccctgcttccatgctcccatgcatgccgtccagaaaacggtgcaacaacacaagctgcttgagaagaacaagaagcccatctccattatattgccgtcctccggaagctggtcaaagcagtcggcctgtgatgcaaggctgctttagatattggcatggtgccccctatcctagaatgattgtcatgcgttagagacaaccataaccccctccctggttttctctggtctaagcgtttagtctgtgtggttgctgtccttggccaccatgcgtggcgtgccagggcctgctatgaactttggcctacgtgccatgaacttcaaactgtcttttgtgctcttggtgcccaccctcgcctattgaataacccaaacctatgtttacctatcgtaacgtgcgtggtctaggcgattcggataagtgtaccgttgtgttctgaatcttcaaat

SEQ ID NO: 63853 - DNA, 704 bp, Zea Mays
atcagctcagcatacacaacatcatcatcatcatcttctcgctagtcgagcgagcccttgtagttaattaagctagtcgatcgatccaagagaagaagaagcagcagacaggaatggcgtcgctctcgatgacgacgagcgcagcggcccgcgcgcagtggacgcctaggcagaacaagctgttcgagcaggcgctggcggtgtacgacaaggacacgcccgaccgctggcacaacatcgcctgcgccgtcggcggcgggaagtccgcggacgacgtcaggcgctactacgagctgctggaggaggacgtcggccacatcgagtccggcaaggctgaaacagctgaagatctaggaggtcaattgaacatataggacgaacgatcgatgatccagaagatgcaaacatgtgtgtatataggattaatgggacagtatcagtatgcatgcaatggtccatgctgcaagtgcatgcaagtggtgtgtgaaagcaagaatcagattagatgcatgcatatgcatgtgttaatttagtagtaataattgtagtatgggatgagtcctatgctagccagtcacgcgcgatcgaccgaccgacccatcgatctccaatgcttctgttccctctccctcctacttgtccacttgtgtgtatatataaatattatgtatttttattattatatatactctgcctgttctaaa

SEQ ID NO: 63854 - DNA, 5375 bp, Zea Mays
agaaaggtaggcatgcatggacttgcatatttgatatttttatataactttcagcttttcataggaggagacctcaatggtcatgtagtaaacaaatgcaggctatgagttggttcatgggggttttgggtatagtagtaggaatcaagagggagaagaaatcttagactttgttgtagcctacgacttgatgatagccaacactttcgttcggaagagagagtcccatttggtgaccttcagcagtggccatcacaggagtcagattgactttgttctcacaagaagagaggacaaacgggcatgcttggattgcaaggtgatacctggcgagtgtgttgtttctcaacacaagctggtggtggctgacttcagttatcggattcgttgccgtgtggataagcaaacaaaaattgcgaaaacaaagtggtggaaactcagaggagggcactcaaaggctttcaatgaaaggcttatcgcagaaggcacttggattgaagaagacgcgaacagtatgtgggtgaagatggcaacttgcattaggaagttggcgtcagaggtgtttggagtgaccaagggaagcagaagtgagcctaaagatacttggtggtggaatgaggaggtacaaaaggcaattaaggataagaaagagtgctacagacaatatcacccgatctgccttctgaatgtggattttaaaatttttaccaaagtgttgtctaatagactttcctctgtagccaaggtggtgatagggggcaatcaaactggttttatcaaggatagaaatatcctggaaggggtgctaattcttcacgaggtggttcatgagttgaaaaggaaaaacaaaaaggggttgatcttgaagattgattttgagaaagcatatgacagtcagatgggatttcttggaggaggttatgagagctaaaaggttcccgtataagtgggtggagatggtgatgaaaacagtggtgaaggggaaggtttgtgtgaatgtgaatggtgaaagaagcaattttttcagaaccttcagggggctgaggcagggtgaccctttatctccccttctgttcaatatagtggccgatgctctcagtattatgattgatactggagttaagaaaaatcatattacaggggttttatctgatattttaccaggggggatttcgcacatccagtacgctgatgatacgattattatgattgatgggtctgagaaatctattctcaacttgaagactatcttatactgctttgaatggttatctggtttgagaataaattttcacaagagtgaagtgtatgtctttgggtttgaaaaggatgaagaaaggagggccaacatgcttaattgtgcgctgggatcctttccaatgaaatatttgggtattcctgtctccgacagaagattgaaatcatcagatgtaggtttcatcttagagaaaatgggaaaaagactggatccgtggaaagggaaacacttatctaaagggggcagacttattttgactaattcatgtttgagtagtttgcctacatacactatgggattctatctgcttcctaaggatattcataagaaaatggaccgaatcagatctaacttcttctggcaaggagctgagaagaaaaatagtttccatatggctaaatgggacatggtgaccagaccaaaagatcaagggggtcttggggtggctgataccagtttgatgaatgaatgccttttggtcaaatggatttggaagatcacgcagggctctgatgatatttggtttaaacttatcaaggcaaagtatatgcctgagggcaacttctttatatccaaaaacagaggtgcttctcagttttggcaaggcttgcacaaagtgaaacatttattcaaatggggggcggttaatactgttaacaatggggaggggacctttttttggaaagatacttggctaggggaagttcctttagaaattaaatacccaaggttcttcgatatctgcaaggacaaggatgttcttgtaaatgagtgctatgatgaggaggactggagcatggagtttcagcgtcctctattagctgaggatcttaacatgtgggaagagttgcaagcggatctgcaagagcaggtcctgcggcctgagagggatgttgtgctctggagtttggatagctctaagaactttactgttaattcattatataagtttagaactgacggaggtgtaaggaataatgtgcttaaaaccatctggaagtgcgggttgcctttgaaaattaagattttcctttggcaattatacaataggaaagtacaggctgctactgtgttaaaagagaggggttggaaggggagtagccgatgtgttctctgtcaggataaggagtctattgatcacattttctttagatgtgttctgtcaaagtttctttggaaatgctggaaccagatttttaattgggatagtgttcctttttatgtggaggacttattttataagcatgaattcatggaatgtatgggtactcgtaaacaaagtttattcctgttagcggctatggtgtgggccatttggagaaatcggaataaaatggctatggaagtctttccccatctgtactacaaaaattttatatgacgtgattgcttacctgcagtattgggggacaaaggcaaaggcaaaggagaaagctgggctggacaagatggtggattcgatgaagcgatggttgcatgacttcaagccaaggcgggatgcagtgtcagacattggtgtcgtatgatatctgtctgtttgtgctgaccggtggaacggcggtaggttcttggggagtggcgttcatctttgagctgtgcgctggaactcctctgtatttttgtcaggccggcgtgagttgtctgcttagcttttgtgttgctcattcggtgcttccccagagatggatgtgtgtaagttgagatgatcggattctgtaggttggctgcgttttgctgctcattggatgccataaaatggtagctgaccagggagctgtctttttttcagaccttttttggttctggtgtgtgtggcgtgaatggtcacttgggtcaggttcaggtttttgtcctgactagtttttaggccttgtggttgctgtcttgcagtgcgtggaggcgtgctttgttcctgctgcttcagtagcttaatagaggtttgttttgctgtcagtgtaagctggtgtccccagtagtctgtcttgtgtgacattgtatcagctttcttaaaagcggagtaataaaatactcatttcaaaaaaagagtgttacagacgtttataccatgacaagaatgcagacaacgaacaaagatacaaggtggcaaagaaggtcgcgaagagagctgtgagtgaggcaaagggccgagcctatgagggtctttaccaaaaattgagtacaaaggaaggagagagagaaatctataagatggctaggttttgtgagaggaagacaagggacctcaatcaagttaaatgtattaaagacgagatggatcaactcttggtgaagggagaagacatcaagcataggtggcggggatactttgacaacctgtacaatggggggaatgagatggatatctagttggacgactcctttgatgacacaaatagacgctttgtgcgtaggattcatgaaactgaggttagagaagctttaaagaagatgaaagggggcaaagcgatgggcccgaatggtatcccaatagaggtgtggaaatgcctcgaggatatagctatagtttggctaaccaaactgttcaaccatatctttcgggagaacaagatggaagaagaatggaggaaaagcactttagtaccaatcttcaagaataaggttgatatccaaagttgtactaactaccgcgagtttaagctgatgagccacacgatgaagttatgggagagagttattgagcatcggttgagagggatgacgcatatcactgtgaaccaatttgggttcatgcccggaaggtcagccatagaagcaatcttcttacttagacaagtaatggagcggtacagggagcaaaagaagaatctgcacatggttttcatcgatctggagaaggcctatgataaaatacccaggaatcttttgtggtgggctttggacaagcataaagttccaacaaagtatgttgccctcatcaaggacatgtataacaaggttatggctagtgttcgaacaaatgatggcgatacagatgagtttcctattaagataggactacatcaaaggtcagcattgaacccttatcttttcgcccacgagagatatacaagatgatatcctttggtgtatgctttttgccgacaatgtagtgctagtggatgcaagtcgggagggagtcaataggaagctagagttgtggcgacgaaccctagagtcgaaaggctttagaattagtaggactaaaactgagtatatgaggtgtgattttggtactcctagacatgaggatggagatgtgagtttggaaggtcatgtagtacctaagatacttttctatacttgggatcgatgttacagagaaatggggatattgatgaagatgtcagccataggattaaagcgggatggatgaagtggtgccaggcatttggagttctatgtgacaagagggtaccacaaaaggttaaaggcaggttctataggacagcaattagacctgcaatgttatatggagcagggtgttggcctaataaaagacgacatgttcaacaattaagtgtagcggagatgcgtatgttgtgttggatctgtggacatacaaggttggaccgagtgaggaatgatgagattcgtgatcggttaggagtagctccaattgaagaaaaacttatccaacatcgattgagatggttcggacatatccagaggagacctttagatgcaccagtgcatagaggcatcgtaagacaagacaataatgtgaagaaaggcaggggctgaccaaagctatgggatgaggcaatcaaaagagagctgaaagaatgggatgttctagaagagttgtgtttggatagaagggcgtggaaagaggctatccatgtgccggaatcttgatttaggctctacccctaccctctctagttctccgcttgtttcctctagctggtgagtcttgttgggtttcaactctagcctaccccaacttgcttgggattaaaaggctttgttgttgttgttgtttgtaatcaaaatcattcatttaatgggtgcatctagtcaaagaaccctaaagttggatgtttggaagctccattagaaaagcatacttatagaagcttaaaattttgaactttgccacgcccatacttagactgat

SEQ ID NO: 63855 - DNA, 741 bp, Zea Mays
ctggcctcctgtgatctgtagcactcactactgactctatagtggtagtagtaattattaccactacactagtactaatcgctgctcctaagcacgtactagtacgagtaggcgctaaaccggcagcttgcttagctttgcctttcagcccccccttggccttggtgatcattgagtagtataattattagactagtgacagcgtcatgatactactgctaacctgtgtgcccttatgatttctggctgggctgtgtggatggagagacgagtaaccatctatgcagcatcattgctaccactccgctagcaggtcagccaacaaacaatttactacaagcgcacagatgtaaagagatggaatgtgctaatgctgtggtcgccaagagtgaatttccttttccatatgctggttggtggccagcctccctttgcggaaaacaatgactacgactcagacgctccggcatgctttcgctgtaaaaaaaaaaaggatcgtcaggcaggcagatagtcaccattctgctttgctccgactcagcctcagcaacgcaccagggttacgtcagttcggtaggctgaagaatgggcttctgcaatacaaatctcaaacatacaacttttttttcttctggattcatctcatggtatttataactgatgaaatagtgtgatccatgtattacagcgggtgctgcatagggggtactactatatattattctgttggaattgtttgca

SEQ ID NO: 63856 - DNA, 939 bp, Zea Mays
cccgttatacctgccatatatatatatatattacataactttacatcatgggtcctagaagtaagaaagacggggttaaaattacaaaatgctccttgcattgaacacaatatacttgttaagcctctgtctctgtgtgcgtatgggttgctgtaggaagtgttgttggcatagctggatgcttctacatggttcaggccagttctctgaaatcccaacagcaaccggggcagcttccttgggcggggcaagaagaaggcatgcaagcaggcggggggattgtgcggcgcatcgaatcataaatcaaatcaaacgagaacaaaatacagggcgaggcgaaaacgacacccaacgtgtaaaggcaccgcgccgccctcgcacccgcaacccaaattttacagcaccgatccgatcgaatcgaacccgccgggaatagctggggtttcgccgagacattccggactgccatgcactgcacgcgacacttgcataataacctaacgctctcttgcagcaatagtagtagtaataacgtcacgggtttttttaaagtgtgtgtgtgtgtctcgatggattgattcggcacgactggaagtggaagaagtcctcctgtgccctgcacagcacagtgtgagacatcgaaaaaggcgatgccctctgcatttgtctactcgcatctgattctggatttgtctgacgcgtcgcgtcatctgccactgccagtcacacggacggaccggccggacgcctcgccattcgattcgaccagccagcgagcatcatccagcatgcatgcaatttccgtccatttccatggctgccaaacggacgagagtaaagttcatcggccgctccgttggatccggatccacgccgcgcatccaacgctaaacccccgtttcgtagtcacagggttctctctctctctctctcctatgg

SEQ ID NO: 63857 - DNA, 1375 bp, Zea Mays
gcctgcctgcccggccaagtttcctgttattccccggcggccagacttgtgattccgtttgttcgtgtcactgaagaaagcattcgctttacacgcactcgttcctgaatcagcacagccccagcctaccggtgccggctgctgcttcgctgggagccagaggcccacccagagctcgcaagcttgtcatggctctgcctctgcggccagtccatggcttggcgtcccttcttcttctgctcctcgtcctcctgtcctgcaactgccactgccacgggggaggaagcgagcggggagcaggcgcgacaaagaggctggagcgcgacgtcacgtcgcccctggccacggtcccggtggtgaacccgacggcgacgatgccgttgcccaccgcgacgccggcggcgccttcgctgccgctggccaccggcgccggcggcgggagctggtgcgtggcgagccccagcgcgggcgcggcggtgctgcaggtggcgctgaactacgcgtgcggccagggcggcgcggactgctccgccgtccagcggggcgggagctgcttcagcccggacaccgtccccgaccacgcgtcctacgccttcaacacctactaccagaagaaccccgtgcagaccagctgcgacttcggcggcgccgcagtcctcaccaccaccaacccgagtacttcgacgtgccagtatccagcaacgagcaccggagcttcggtcctgaacacgtcgactccgctgacgccaggatacggatctgcccccggcgggtacgggagctctccaccggctggagacggcaggtcccctccgctgtacgggaacatgtcgccgccggactacggcgacaacaccagcgccgccgtgaccgtgagggcactgcccggccgcaagacggcggcggccgtcgtggcgctggccacgacgtcgacgtggctcctcatcgcactgacggtgagcggctgaacctgcacgccaggcccgcgcgccgcgttgcctccgcgcacgtgcagttcgttcagttgcagactcgcagctcaggtggcgcccgaagcacgagtctctacactgagcgaagaaggccagaaaatcatcggacgcaagcatggaatatcagaaaataactggcgagatcatcatggccatgatcgtgattttcttcttggtggatgacgttagttgcgtccacaccaagacaagatggcatgcagatgcaggaacactacgatggcaatcagtagtgttcggatgatggctgggatgaggcgatcggtggccagtaaatccaacttgagagatctccaaggtcagttgctaatttatttgttggattggactccgtcgtccaaaacaagatgacaatcagacaaagc

SEQ ID NO: 63858 - DNA, 2874 bp, Zea Mays
tgtacatgaatatccttttctgtaaatccaccaaaagaaaagattgacttgggcgccgtgttttcaaaagccactagtagtgttggatgtggaccacacaggagatgcagatcggacggtgggcaagcgcccagcaccacaccaccccaccccgcaccaggcccgggcccccatcatataacggccaacaagccacgagcgacacgaaagaaatctccctcccgttccctttcctcccccgctccgcctttccctttcctcccccttctcttcctctctcctctccttgggggcgcggcgagatcgggcggaggagccctaccgccccccctcgccgcagcggaggcgggtgctcagctccgcggaaggttagaggtgcggggctgcgtttggaaccggcggtgggcgcgggagatccggccagcggggatgcagcaggaccagcggaacaagacttctgcagaggtcgacttcttcacagagtacggggatgcgaaccggtacaagatccaagaggtcatcggcaagggaagctacggggtcgtctgctctgccatcgatctccacactcggcagagggtggcgatcaagaagatacatggcatcttcgagcacgtctccgatgccgcgaggatcctccgcgagatcaagcttctgaggctcctgaggcaccctgacattgtcgagatcaagcacattatgctgcctccctcgagaaaggacttcaaggacattttcgttgtttttgagctcatggagtccgacctccaccaagttataaaggccaacgatgacttgaccaaggagcattaccagttctttctctatcagttacttcgggccctcaaatacattcatactgctaatgtttaccaccgtgacctcaagcccaagaatattttagcaaactctaactgcaaattgaaaatatgtgactttggactagcccgagtcgcattcaatgataccccaacaacagtcttctggacggattatgttgcaacaaggtggtacagagctccggagctctgtggatccttcttcaccaagtatacaccagctattgacatttggagcattggatgcatatttgctgaggtgttgacagggaagcctttatttcctggtaaaaatgttgttcaccagctagatttgatgactgatcttctaggtacaccatcaacggacacaatttctcgggttcggaatgagaaagcaagaaggtacttgagcagcatgagaaagaaggaccctgttccattttcccagaagtttcccagtgcagatcctttggcacttaaactgttagaaaaactattagcgtttgatccaaaggaccgtctgacagcagaagaggcattgcgtgatccatacttcaaaggtcttgccagggctgaaagagaaccatcctgtcagccaatcagaaaagtggaatttgactttgagcacaaaagaatgtcaaaggaagagataagagagttgatattccgcgagatactggaatatcacccacaactgctgagtagctacattaatggcacagagaggacaacctttctctacccaaggttttagcttttctgtgtttgcacattgctgttgatcaatttaagaagcaattttctcatcttgaagagagtggtggtaacggtccatcagttccaacggacaggaaacatgcatcccttcccaggaccactgtggttcactcgaatccaattcctgccaaagaacaacctcttggtgcctcatcaagggttagaccagtctctgatgattcatgtaagaacccttgggagaaaggaagtggtcctggaaatgttcccaggacatctctgactccacaagggctgcaagcacaagcaggatcagtaagagttaatggcccagtgacggattcaaggtatcctcctcaccaacagatcccacaagcatacggttaccgccaaatgcctgcaaggttggacagtaccaacccatcgcaggccatgggaggttacacgctgcagtcgcagaaggcctatgcttgtgcaaacggcaaaggctcgcctgatgtggccgtgaacatgagagctccccccttccatctcccagctggaccaaagaagaacccattagataggatagcacctgacaccaccgacatatacacaagatccctgaacggcatcgtcgccgccgccgctgcatcagtgggcgctggcgctggtactcaccgaaacatcggcgttgtgccatctggcatgtcaaggatgtattagctgctgctgaaatgctggcaaatcctacctagccttgtggccacagcttctccgggactagccggcaaggctacaaggagtgggcatgtggtgcaaggagtgattcataagaggtggtcccgtggtcttggactcctggacatgttcttaggtcacgtgttgaggcggaaaaatggcgccattttgcgcacaactgaaggtttgatcgattcatttgattcaattgaagctaatgtatttgctaatagtaaaaggacgctgatccaagggaaaggctggagaaattctgacataaatgcaacataggccgttggccgttgcagtgggacctgagggcgtgtgtatacaatgtattattctcgttttatcgaccgtcacatctggtattatcatgctatcagccacctttaatctttatctaccacaacagttcaatacattgtctttactgttaacctacattcgccttagcgccttaaccacctttactttatactaactccatttgtttttatttaacgctggctaatataactttacactaaaacaagtcaaatattaaaaaccggaggcagtatattttttagttagaacaaaacacgaaataaaaata

SEQ ID NO: 63859 - DNA, 1724 bp, Zea Mays
aaaatttctcgtggattctatggccagcgtaggtacacaaagcccctttctcctccgcatgctcatatttaaatcccacagtgcgtgctgcccgaaagatttgggtatccctgcctccgtggtagaagtcctggcagctccagctccaagcgcattagctcgacctaattccttcttcaactgttgtgtacttgtgtgggtgtctctctccctctgcccgagatgttgtctctgagctgcagctgcccaggggtgtcgtccatgagcaagacggcgctcgattgggggcacctggtggcctcctgccgcagccgctggcacggcgcgcgggcgccgcccagacggcggcgcacgccatgtgtttgcttggttgccttaccgaccactacccagcctggccctgctgctgttgatgtgccctcacggacggttcctgctgtcacaacatcaagcgcccctgaacgcatttctgtttctgcgctgctcgaggttgtctcagacgacttgctcaacctcaacaacaatctcaaatcgaaaatccagttttagtttctgcagcagaacaaattttcagtgctggtggaaagaggttaagaccagcattagtttttctggtatcgagagcaactgctgaattagctgctttgccggagctaactacagaacatcggcgcttggctgagatcatagagatgattcatactgcaagtctaatacatgatgatgtcatagacgatagcgggatgcgaagagggaaagaaacaatccaccagctgtacggcacacgggtggctgtgctcgctggcgattttatgttcgcgcagtcttcttggttcctagcaaacctagaaaacattgaagtcatcaagctcatcagccaggtaattaaggatttcgcgagcggcgagataaagcaagcgtcgacgcttttcgactgcgacgtgaccctggacgactatctgctgaagagctactacaagacggcctccctgatcgcggcgagcacgaggtccgcggccatcttcagcggcgtgggcagcggcgtgtgcgagcagatgtacgagtacgggcggaacctgggtctggcgttccaggtggtggacgacatcctggacctgacgcagtcggcggagcagctcgggaagccggcggcggggagcgaccttgccaagggcaacctgacggcgcccgtgatcctggcgctgcgggaggagccccggctgcggggcatcatcgagtccgagttctgcgagcccgggtccctggcggccgcggtggagctcgtgcacaggggcggcgggatccggagcgcgcgggagctcgcggaggagaaaggcggcctggcgttgcgcagcctgcagtgcctcccgaggagcgagttccggagcgccctcgagcgggtggtgcactacaatctccagcgggttcggtagaggaaggtgctgtgcttccatgtggcagtggcatggcagtgcgtgttgtttagtgtaaccgacactgccgcgtgcccaccaacctcgtggagcatgcatctgtaaggttctccatttctttggggggtgagtgagggcactagtagcatggtgtgcagtggttgtgaggttctattgttgttgtaactacaagcaggtaaactgttctggacgacaccacgatgtatatgtacatatgaaatgcactgctgctgtgggatgtatgcaatgagccaatgagtaggtttatct

SEQ ID NO: 63860 - DNA, 1715 bp, Zea Mays
aaaatttctcgtggattctatggccagcgtaggtacacaaagcccctttctcctccgcatgctcatatttaaatcccacagtgcgtgctgcccgaaagatttgggtatccctgcctccgtggtagaagtcctggcagctccagctccaagcgcattagctcgacctaattccttcttcaactgttgtgtacttgtgtgggtgtctctctccctctgcccgagatgttgtctctgagctgcagctgcccaggggtgtcgtccatgagcaagacggcgctcgattgggggcacctggtggcctcctgccgcagccgctggcacggcgcgcgggcgccgcccagacggcggcgcacgccatgtgtttgcttggttgccttaccgaccactacccagcctggccctgctgctgttgatgtgccctcacggacggttcctgctgtcacaacatcaagcgcccctgaacgcatttctgtttctgcgctgctcgaggttgtctcagacgacttgctcaacctcaacaacaatctcaaatcgttttagtttctgcagcagaacaaattttcagtgctggtggaaagaggttaagaccagcattagtttttctggtatcgagagcaactgctgaattagctgctttgccggagctaactacagaacatcggcgcttggctgagatcatagagatgattcatactgcaagtctaatacatgatgatgtcatagacgatagcgggatgcgaagagggaaagaaacaatccaccagctgtacggcacacgggtggctgtgctcgctggcgattttatgttcgcgcagtcttcttggttcctagcaaacctagaaaacattgaagtcatcaagctcatcagccaggtaattaaggatttcgcgagcggcgagataaagcaagcgtcgacgcttttcgactgcgacgtgaccctggacgactatctgctgaagagctactacaagacggcctccctgatcgcggcgagcacgaggtccgcggccatcttcagcggcgtgggcagcggcgtgtgcgagcagatgtacgagtacgggcggaacctgggtctggcgttccaggtggtggacgacatcctggacctgacgcagtcggcggagcagctcgggaagccggcggcggggagcgaccttgccaagggcaacctgacggcgcccgtgatcctggcgctgcgggaggagccccggctgcggggcatcatcgagtccgagttctgcgagcccgggtccctggcggccgcggtggagctcgtgcacaggggcggcgggatccggagcgcgcgggagctcgcggaggagaaaggcggcctggcgttgcgcagcctgcagtgcctcccgaggagcgagttccggagcgccctcgagcgggtggtgcactacaatctccagcgggttcggtagaggaaggtgctgtgcttccatgtggcagtggcatggcagtgcgtgttgtttagtgtaaccgacactgccgcgtgcccaccaacctcgtggagcatgcatctgtaaggttctccatttctttggggggtgagtgagggcactagtagcatggtgtgcagtggttgtgaggttctattgttgttgtaactacaagcaggtaaactgttctggacgacaccacgatgtatatgtacatatgaaatgcactgctgctgtgggatgtatgcaatgagccaatgagtaggtttatct

SEQ ID NO: 63861 - DNA, 1871 bp, Zea Mays
aaaatttctcgtggattctatggccagcgtaggtacacaaagcccctttctcctccgcatgctcatatttaaatcccacagtgcgtgctgcccgaaagatttgggtatccctgcctccgtggtagaagtcctggcagctccagctccaagcgcattagctcgacctaattccttcttcaactgttgtgtacttgtgtgggtgtctctctccctctgcccgagatgttgtctctgagctgcagctgcccaggggtgtcgtccatgagcaagacggcgctcgattgggggcacctggtggcctcctgccgcagccgctggcacggcgcgcgggcgccgcccagacggcggcgcacgccatgtgtttgcttggttgccttaccgaccactacccagcctggccctgctgctgttgatgtgccctcacggacggttcctgctgtcacaacatcaagcgcccctgaacgcatttctgtttctgcgctgctcgaggttgtctcagacgacttgctcaacctcaacaacaatctcaaatcggtacacatgactgttgaaggttattttatcagttcgtgcttaatgagctctgatagtattatctcccacagtgatcactgatataacttcaacagcttgttggtgcagaaaatccagttttagtttctgcagcagaacaaattttcagtgctggtggaaagaggttaagaccagcattagtttttctggtatcgagagcaactgctgaattagctgctttgccggagctaactacagaacatcggcgcttggctgagatcatagagatgattcatactgcaagtctaatacatgatgatgtcatagacgatagcgggatgcgaagagttaccttgtcgcattcgtacgtgatgcaggaagcttcatggaaagaaacaatccaccagctgtacggcacacgggtggctgtgctcgctggcgattttatgttcgcgcagtcttcttggttcctagcaaacctagaaaacattgaagtcatcaagctcatcagccaggtaattaaggatttcgcgagcggcgagataaagcaagcgtcgacgcttttcgactgcgacgtgaccctggacgactatctgctgaagagctactacaagacggcctccctgatcgcggcgagcacgaggtccgcggccatcttcagcggcgtgggcagcggcgtgtgcgagcagatgtacgagtacgggcggaacctgggtctggcgttccaggtggtggacgacatcctggacctgacgcagtcggcggagcagctcgggaagccggcggcggggagcgaccttgccaagggcaacctgacggcgcccgtgatcctggcgctgcgggaggagccccggctgcggggcatcatcgagtccgagttctgcgagcccgggtccctggcggccgcggtggagctcgtgcacaggggcggcgggatccggagcgcgcgggagctcgcggaggagaaaggcggcctggcgttgcgcagcctgcagtgcctcccgaggagcgagttccggagcgccctcgagcgggtggtgcactacaatctccagcgggttcggtagaggaaggtgctgtgcttccatgtggcagtggcatggcagtgcgtgttgtttagtgtaaccgacactgccgcgtgcccaccaacctcgtggagcatgcatctgtaaggttctccatttctttggggggtgagtgagggcactagtagcatggtgtgcagtggttgtgaggttctattgttgttgtaactacaagcaggtaaactgttctggacgacaccacgatgtatatgtacatatgaaatgcactgctgctgtgggatgtatgcaatgagccaatgagtaggtttatct

SEQ ID NO: 63862 - DNA, 2417 bp, Zea Mays
aaaatttctcgtggattctatggccagcgtaggtacacaaagcccctttctcctccgcatgctcatatttaaatcccacagtgcgtgctgcccgaaagatttgggtatccctgcctccgtggtagaagtcctggcagctccagctccaagcgcattagctcgacctaattccttcttcaactgttgtgtacttgtgtgggtgtctctctccctctgcccgagatgttgtctctgagctgcagctgcccaggggtgtcgtccatgagcaagacggcgctcgattgggggcacctggtggcctcctgccgcagccgctggcacggcgcgcgggcgccgcccagacggcggcgcacgccatgtgtttgcttggttgccttaccgaccactacccagcctggccctgctgctgttgatgtgccctcacggacggttcctgctgtcacaacatcaagcgcccctgaacgcatttctgtttctgcgctgctcgaggttgtctcagacgacttgctcaacctcaacaacaatctcaaatcggtacacatgactgttgaaggttattttatcagttcgtgcttaatgagctctgatagtattatctcccacagtgatcactgatataacttcaacagcttgttggtgcagaaaatccagttttagtttctgcagcagaacaaattttcagtgctggtggaaagaggttaagaccagcattagtttttctggtatcgagagcaactgctgaattagctgctttgccggagctaactacagaacatcggcgcttggctgagatcatagagatgattcatactgcaagtctaatacatgatgatgtcatagacgatagcgggatgcgaagaggtatgtataaatgttgttttttcaggaacacgtcagccgtattgtcaaaagagaaccattgattgatcatgctctctttcccattttcattttagatctcatagtaacatttgtttaatgttttccgggcatgtctgtgcatggttgtaccttttttttttgcttttgaactctggagacatacattgcattacactggaagttccaaattcgttatgtaatttttacacctctctttgctggtgcttgttacattttagagcacgttcctttacacacagtggcattcacttcatcatattgtaatggtttcgtgagggtatcattaagttgaccggttagattggatcggaaaagggtagctgaccttactagtgatttcgtgtatagtgttaattaaaaaaggaacgttttttttttcatcatgttcatttctatttttatttaaaacctcttggaaacatttgtctggtattttctgggcacgtctgtccatggcatttctgaatccgtgtctcgtttttccctctgtttgctaaatgctagttaccttgtcgcattcgtacgtgatgcaggaagcttcatggaaagaaacaatccaccagctgtacggcacacgggtggctgtgctcgctggcgattttatgttcgcgcagtcttcttggttcctagcaaacctagaaaacattgaagtcatcaagctcatcagccaggtaattaaggatttcgcgagcggcgagataaagcaagcgtcgacgcttttcgactgcgacgtgaccctggacgactatctgctgaagagctactacaagacggcctccctgatcgcggcgagcacgaggtccgcggccatcttcagcggcgtgggcagcggcgtgtgcgagcagatgtacgagtacgggcggaacctgggtctggcgttccaggtggtggacgacatcctggacctgacgcagtcggcggagcagctcgggaagccggcggcggggagcgaccttgccaagggcaacctgacggcgcccgtgatcctggcgctgcgggaggagccccggctgcggggcatcatcgagtccgagttctgcgagcccgggtccctggcggccgcggtggagctcgtgcacaggggcggcgggatccggagcgcgcgggagctcgcggaggagaaaggcggcctggcgttgcgcagcctgcagtgcctcccgaggagcgagttccggagcgccctcgagcgggtggtgcactacaatctccagcgggttcggtagaggaaggtgctgtgcttccatgtggcagtggcatggcagtgcgtgttgtttagtgtaaccgacactgccgcgtgcccaccaacctcgtggagcatgcatctgtaaggttctccatttctttggggggtgagtgagggcactagtagcatggtgtgcagtggttgtgaggttctattgttgttgtaactacaagcaggtaaactgttctggacgacaccacgatgtatatgtacatatgaaatgcactgctgctgtgggatgtatgcaatgagccaatgagtaggtttatct

SEQ ID NO: 63863 - DNA, 1852 bp, Zea Mays
caccctttaggtttaacactaaaatttctcgtggattctatggccagcgtaggtacacaaagcccctttctcctccgcatgctcatatttaaatcccacagtgcgtgctgcccgaaagatttgggtatccctgcctccgtggtagaagtcctggcagctccagctccaagcgcattagctcgacctaattccttcttcaactgttgtgtacttgtgtgggtgtctctctccctctgcccgagatgttgtctctgagctgcagctgcccaggggtgtcgtccatgagcaagacggcgctcgattgggggcacctggtggcctcctgccgcagccgctggcacggcgcgcgggcgccgcccagacggcggcgcacgccatgtgtttgcttggttgccttaccgaccactacccagcctggccctgctgctgttgatgtgccctcacggacggttcctgctgtcacaacatcaagcgcccctgaacgcatttctgtttctgcgctgctcgaggttgtctcagacgacttgctcaacctcaacaacaatctcaaatcggtacacatgactgttgaaggttattttatcagttcgtgcttaatgagctctgatagtattatctcccacagtgatcactgatataacttcaacagcttgttggtgcagaaaatccagttttagtttctgcagcagaacaaattttcagtgctggtggaaagaggttaagaccagcattagtttttctggtatcgagagcaactgctgaattagctgctttgccggagctaactacagaacatcggcgcttggctgagatcatagagatgattcatactgcaagtctaatacatgatgatgtcatagacgatagcgggatgcgaagagggaaagaaacaatccaccagctgtacggcacacgggtggctgtgctcgctggcgattttatgttcgcgcagtcttcttggttcctagcaaacctagaaaacattgaagtcatcaagctcatcagccaggtaattaaggatttcgcgagcggcgagataaagcaagcgtcgacgcttttcgactgcgacgtgaccctggacgactatctgctgaagagctactacaagacggcctccctgatcgcggcgagcacgaggtccgcggccatcttcagcggcgtgggcagcggcgtgtgcgagcagatgtacgagtacgggcggaacctgggtctggcgttccaggtggtggacgacatcctggacctgacgcagtcggcggagcagctcgggaagccggcggcggggagcgaccttgccaagggcaacctgacggcgcccgtgatcctggcgctgcgggaggagccccggctgcggggcatcatcgagtccgagttctgcgagcccgggtccctggcggccgcggtggagctcgtgcacaggggcggcgggatccggagcgcgcgggagctcgcggaggagaaaggcggcctggcgttgcgcagcctgcagtgcctcccgaggagcgagttccggagcgccctcgagcgggtggtgcactacaatctccagcgggttcggtagaggaaggtgctgtgcttccatgtggcagtggcatggcagtgcgtgttgtttagtgtaaccgacactgccgcgtgcccaccaacctcgtggagcatgcatctgtaaggttctccatttctttggggggtgagtgagggcactagtagcatggtgtgcagtggttgtgaggttctattgttgttgtaactacaagcaggtaaactgttctggacgacaccacgatgtatatgtacatatgaaatgcactgctgctgtgggatgtatgcaatgagccaatgagtaggtttatct

SEQ ID NO: 63864 - DNA, 2832 bp, Zea Mays
aaaaatctcccaaaagccaaaccacacccggtctccgcctccgtctctgcctcctttcccctcgcttcctcgccggctgggatcttgcggcagctacgctcgctagctctcctccaacccgccgtcggctccctccgattccagtcccgtcctgtctcgccgcttcctggccccccgcttctcacgcggagaccggtcggatttcccacctcaaacatcgccggttttatccactcccgcagacctcttcctcagggacgggattggattggtggtggatcttctcctcaggggaggcacaagatccgttcatcatcctcgtcgcctaaacttggccgctcccgctcccacgctgctgctccaccctcgccgctactagaccagaccacggaggaggagacgaagcgccatgaggcggggagccaccaaggacgacgccgcgcccgacaaggtcatgggccctctcttcccccgcctccacgtcaacgacaccctaaagggcggacctcgcgcgccacccaggaacaagatggcgctctacgagcagttcagcgtcccctcccaccgctacagcgccgccgtaccgcccgcgccttccccagcgcctccatggggcgcgcaacgacccgcctccgcggtcccgtccacgtccgccagccaggttggcggcggcgatagacctatcttcccattatttcgtgtgccttcaactgaacctgttcgttcatcagatcagacgaatgccaactccaatggccagggtgccaatggtacaatagctgaatctgggaggcagaggcagtccacacatcttaagagcaaggatactaatgctgcaggaccacctgccgagggtaataattccgttgggaagaaattggctaatgatgatgattttacagttccctctgtcttgtattctggaatgcctccgcattccagccaagaaaagctcactctcttccctaccacaagcccatgtaagagtgtgcctgcaaaatattctagcactgacaagagacgcttagaaggaatggatgcttctgatgtgaaatcgaagggtccctcaggtatcaaggagaaagagccagtacaagtgaggatagacttggaagacaaagagacaactccgtcatttcaagtgctaaacgacaaaacatggagtccagacccaaagttatcttcgcacatggacaggctgaagaagcaacatgctgaagctgagagttatcagataaggaccaggaatgagaatgctgtcgagacccaaagccctccaaaaaatggagtgtcgttgttgtctaagccatatgttgataggagggaacagaatggtgattctgatctattggggcatggcctaagagagacaggtgtgaagaggaaaagatcacatcatgacgtggagcaaaacgatgatctgtctgattcctctgttgaatctttgcctggaatggagatttctccagatgatgttgtcagtgctattggtcccaagcatttttggaaagcgagaagagctattgtcaatcagcagagggtatttgctgttcaagtattcgagctgcataggttgatcaaaaagttgatcgctgcatctccacatgtacttattgagggggatccttgccttggcaaatccttggcggtgagcaagaaaaggctggctggagatgtggaaacacagcttgaatcagctaaaaacgatgatggcgtgcgaccaacgcagctagagcactcgaaagagaagactgaagcgaaccaaccttcaccatctcaagacgaacaggccgcaactaatggtgacgttgctgcctcgatgcataccccttccgacaacaaacagaagagctggtgcattcctgcacctccaagtcagtggctgattcctgttatgtccccgtctgaaggacttgtctacaaaccttataccgggcactgccctccggtgggaagtcttttggcgcccccattttttgccagctaccccacctcctcctcctccacagctgggggggatttcatgagttcggcatgtggagccaggctgatgagtgcccctgtgtacttcccgtctttcagcatgcctgcagtgtcagggtctgcagttgagcaagtgagccatgttgcagcgtcgcagcataaacggaactcgtgtagtgaagcggtgttggcatcaagggacagcgaggtgcaaggcagtagtgctagcagtccggcatcttctgaaacagcagctcaacccagggtcattagggttgttccccacacggcacgcacggcttcagagtcggcagcaaggattttccgctcaatacagatggagaggaaacaaaacgacccgtgactggcagataaaaatgaaagaacggagggagtagactaattttttgaccgataattataatgatcgccgtaaattggctggcccgcccgccttatgttttttgttcagtgtaaatatgctgtgtctgtcagaatgatatggcatctgtagctattttggttctgtcagaatcatgttgattggaattcgtcggtcggttgagtaggatgaaaattgggcacagcccatacgtctacagcaacgtcaaataaaggaagagaaagcaatacatcaccaacaccagaagcagatttttattttatttttattactgtgagtggagtggagtggctcaaccacatgatagatagatagatacatcagcaccatgctccttcctagtgacaggccacaacaagcatttcccaaagcaaatgcattggccacaaaaggcacccagctagggcattctcagcgcctcgttgatcctgctgaaaacgactcgg

SEQ ID NO: 63865 - DNA, 2786 bp, Zea Mays
aaaaatctcccaaaagccaaaccacacccggtctccgcctccgtctctgcctcctttcccctcgcttcctcgccggctgggatcttgcggcagctacgctcgctagctctcctccaacccgccgtcggctccctccgattccagtcccgtcctgtctcgccgcttcctggccccccgcttctcacgcggagaccggtcggatttcccacctcaaacatcgccggttttatccactcccgcagacctcttcctcagggacgggattggattggtggtggatcttctcctcaggggaggcacaagatccgttcatcatcctcgtcgcctaaacttggccgctcccgctcccacgctgctgctccaccctcgccgctactagaccagaccacggaggaggagacgaagcgccatgaggcggggagccaccaaggacgacgccgcgcccgacaaggtcatgggccctctcttcccccgcctccacgtcaacgacaccctaaagggcggacctcgcgcgccacccaggaacaagatggcgctctacgagcagttcagcgtcccctcccaccgctacagcgccgccgtaccgcccgcgccttccccagcgcctccatggggcgcgcaacgacccgcctccgcggtcccgtccacgtccgccagccaggttggcggcggcgatagacctatcttcccattatttcgtgtgccttcaactgaacctgttcgttcatcagatcagacgaatgccaactccaatggccagggtgccaatggtacaatagctgaatctgggaggcagaggcagtccacacatcttaagagcaaggatactaatgctgcaggaccacctgccgagggtaataattccgttgggaagaaattggctaatgatgatgattttacagttccctctgtcttgtattctggaatgcctccgcattccagccaagaaaagctcactctcttccctaccacaagcccatgtaagagtgtgcctgcaaaatattctagcactgacaagagacgcttagaaggaatggatgcttctgatgtgaaatcgaagggtccctcaggtatcaaggagaaagagccagtacaagtgaggatagacttggaagacaaagagacaactccgtcatttcaagtgctaaacgacaaaacatggagtccagacccaaagttatcttcgcacatggacaggctgaagaagcaacatgctgaagctgagagttatcagataaggaccaggaatgagaatgctgtcgagacccaaagccctccaaaaaatggagtgtcgttgttgtctaagccatatgttgataggagggaacagaatggtgattctgatctattggggcatggcctaagagagacaggtgtgaagaggaaaagatcacatcatgacgtggagcaaaacgatgatctgtctgattcctctgttgaatctttgcctggaatggagatttctccagatgatgttgtcagtgctattggtcccaagcatttttggaaagcgagaagagctattgtcaagtgcagaagttgatcgctgcatctccacatgtacttattgagggggatccttgccttggcaaatccttggcggtgagcaagaaaaggctggctggagatgtggaaacacagcttgaatcagctaaaaacgatgatggcgtgcgaccaacgcagctagagcactcgaaagagaagactgaagcgaaccaaccttcaccatctcaagacgaacaggccgcaactaatggtgacgttgctgcctcgatgcataccccttccgacaacaaacagaagagctggtgcattcctgcacctccaagtcagtggctgattcctgttatgtccccgtctgaaggacttgtctacaaaccttataccgggcactgccctccggtgggaagtcttttggcgcccccattttttgccagctaccccacctcctcctcctccacagctgggggggatttcatgagttcggcatgtggagccaggctgatgagtgcccctgtgtacttcccgtctttcagcatgcctgcagtgtcagggtctgcagttgagcaagtgagccatgttgcagcgtcgcagcataaacggaactcgtgtagtgaagcggtgttggcatcaagggacagcgaggtgcaaggcagtagtgctagcagtccggcatcttctgaaacagcagctcaacccagggtcattagggttgttccccacacggcacgcacggcttcagagtcggcagcaaggattttccgctcaatacagatggagaggaaacaaaacgacccgtgactggcagataaaaatgaaagaacggagggagtagactaattttttgaccgataattataatgatcgccgtaaattggctggcccgcccgccttatgttttttgttcagtgtaaatatgctgtgtctgtcagaatgatatggcatctgtagctattttggttctgtcagaatcatgttgattggaattcgtcggtcggttgagtaggatgaaaattgggcacagcccatacgtctacagcaacgtcaaataaaggaagagaaagcaatacatcaccaacaccagaagcagatttttattttatttttattactgtgagtggagtggagtggctcaaccacatgatagatagatagatacatcagcaccatgctccttcctagtgacaggccacaacaagcatttcccaaagcaaatgcattggccacaaaaggcacccagctagggcattctcagcgcctcgttgatcctgctgaaaacgactcgg

SEQ ID NO: 63866 - DNA, 2768 bp, Zea Mays
aaaaatctcccaaaagccaaaccacacccggtctccgcctccgtctctgcctcctttcccctcgcttcctcgccggctgggatcttgcggcagctacgctcgctagctctcctccaacccgccgtcggctccctccgattccagtcccgtcctgtctcgccgcttcctggccccccgcttctcacgcggagaccggtcggatttcccacctcaaacatcgccggttttatccactcccgcagacctcttcctcagggacgggattggattggtggtggatcttctcctcaggggaggcacaagatccgttcatcatcctcgtcgcctaaacttggccgctcccgctcccacgctgctgctccaccctcgccgctactagaccagaccacggaggaggagacgaagcgccatgaggcggggagccaccaaggacgacgccgcgcccgacaaggtcatgggccctctcttcccccgcctccacgtcaacgacaccctaaagggcggacctcgcgcgccacccaggaacaagatggcgctctacgagcagttcagcgtcccctcccaccgctacagcgccgccgtaccgcccgcgccttccccagcgcctccatggggcgcgcaacgacccgcctccgcggtcccgtccacgtccgccagccagatcagacgaatgccaactccaatggccagggtgccaatggtacaatagctgaatctgggaggcagaggcagtccacacatcttaagagcaaggatactaatgctgcaggaccacctgccgagggtaataattccgttgggaagaaattggctaatgatgatgattttacagttccctctgtcttgtattctggaatgcctccgcattccagccaagaaaagctcactctcttccctaccacaagcccatgtaagagtgtgcctgcaaaatattctagcactgacaagagacgcttagaaggaatggatgcttctgatgtgaaatcgaagggtccctcaggtatcaaggagaaagagccagtacaagtgaggatagacttggaagacaaagagacaactccgtcatttcaagtgctaaacgacaaaacatggagtccagacccaaagttatcttcgcacatggacaggctgaagaagcaacatgctgaagctgagagttatcagataaggaccaggaatgagaatgctgtcgagacccaaagccctccaaaaaatggagtgtcgttgttgtctaagccatatgttgataggagggaacagaatggtgattctgatctattggggcatggcctaagagagacaggtgtgaagaggaaaagatcacatcatgacgtggagcaaaacgatgatctgtctgattcctctgttgaatctttgcctggaatggagatttctccagatgatgttgtcagtgctattggtcccaagcatttttggaaagcgagaagagctattgtcaatcagcagagggtatttgctgttcaagtattcgagctgcataggttgatcaaagtgcagaagttgatcgctgcatctccacatgtacttattgagggggatccttgccttggcaaatccttggcggtgagcaagaaaaggctggctggagatgtggaaacacagcttgaatcagctaaaaacgatgatggcgtgcgaccaacgcagctagagcactcgaaagagaagactgaagcgaaccaaccttcaccatctcaagacgaacaggccgcaactaatggtgacgttgctgcctcgatgcataccccttccgacaacaaacagaagagctggtgcattcctgcacctccaagtcagtggctgattcctgttatgtccccgtctgaaggacttgtctacaaaccttataccgggcactgccctccggtgggaagtcttttggcgcccccattttttgccagctaccccacctcctcctcctccacagctgggggggatttcatgagttcggcatgtggagccaggctgatgagtgcccctgtgtacttcccgtctttcagcatgcctgcagtgtcagggtctgcagttgagcaagtgagccatgttgcagcgtcgcagcataaacggaactcgtgtagtgaagcggtgttggcatcaagggacagcgaggtgcaaggcagtagtgctagcagtccggcatcttctgaaacagcagctcaacccagggtcattagggttgttccccacacggcacgcacggcttcagagtcggcagcaaggattttccgctcaatacagatggagaggaaacaaaacgacccgtgactggcagataaaaatgaaagaacggagggagtagactaattttttgaccgataattataatgatcgccgtaaattggctggcccgcccgccttatgttttttgttcagtgtaaatatgctgtgtctgtcagaatgatatggcatctgtagctattttggttctgtcagaatcatgttgattggaattcgtcggtcggttgagtaggatgaaaattgggcacagcccatacgtctacagcaacgtcaaataaaggaagagaaagcaatacatcaccaacaccagaagcagatttttattttatttttattactgtgagtggagtggagtggctcaaccacatgatagatagatagatacatcagcaccatgctccttcctagtgacaggccacaacaagcatttcccaaagcaaatgcattggccacaaaaggcacccagctagggcattctcagcgcctcgttgatcctgctgaaaacgactcgg

SEQ ID NO: 63867 - DNA, 2837 bp, Zea Mays
aaaaatctcccaaaagccaaaccacacccggtctccgcctccgtctctgcctcctttcccctcgcttcctcgccggctgggatcttgcggcagctacgctcgctagctctcctccaacccgccgtcggctccctccgattccagtcccgtcctgtctcgccgcttcctggccccccgcttctcacgcggagaccggtcggatttcccacctcaaacatcgccggttttatccactcccgcagacctcttcctcagggacgggattggattggtggtggatcttctcctcaggggaggcacaagatccgttcatcatcctcgtcgcctaaacttggccgctcccgctcccacgctgctgctccaccctcgccgctactagaccagaccacggaggaggagacgaagcgccatgaggcggggagccaccaaggacgacgccgcgcccgacaaggtcatgggccctctcttcccccgcctccacgtcaacgacaccctaaagggcggacctcgcgcgccacccaggaacaagatggcgctctacgagcagttcagcgtcccctcccaccgctacagcgccgccgtaccgcccgcgccttccccagcgcctccatggggcgcgcaacgacccgcctccgcggtcccgtccacgtccgccagccaggttggcggcggcgatagacctatcttcccattatttcgtgtgccttcaactgaacctgttcgttcatcagatcagacgaatgccaactccaatggccagggtgccaatggtacaatagctgaatctgggaggcagaggcagtccacacatcttaagagcaaggatactaatgctgcaggaccacctgccgagggtaataattccgttgggaagaaattggctaatgatgatgattttacagttccctctgtcttgtattctggaatgcctccgcattccagccaagaaaagctcactctcttccctaccacaagcccatgtaagagtgtgcctgcaaaatattctagcactgacaagagacgcttagaaggaatggatgcttctgatgtgaaatcgaagggtccctcaggtatcaaggagaaagagccagtacaagtgaggatagacttggaagacaaagagacaactccgtcatttcaagtgctaaacgacaaaacatggagtccagacccaaagttatcttcgcacatggacaggctgaagaagcaacatgctgaagctgagagttatcagataaggaccaggaatgagaatgctgtcgagacccaaagccctccaaaaaatggagtgtcgttgttgtctaagccatatgttgataggagggaacagaatggtgattctgatctattggggcatggcctaagagagacaggtgtgaagaggaaaagatcacatcatgacgtggagcaaaacgatgatctgtctgattcctctgttgaatctttgcctggaatggagatttctccagatgatgttgtcagtgctattggtcccaagcatttttggaaagcgagaagagctattgtcaatcagcagagggtatttgctgttcaagtattcgagctgcataggttgatcaagtgcagaagttgatcgctgcatctccacatgtacttattgagggggatccttgccttggcaaatccttggcggtgagcaagaaaaggctggctggagatgtggaaacacagcttgaatcagctaaaaacgatgatggcgtgcgaccaacgcagctagagcactcgaaagagaagactgaagcgaaccaaccttcaccatctcaagacgaacaggccgcaactaatggtgacgttgctgcctcgatgcataccccttccgacaacaaacagaagagctggtgcattcctgcacctccaagtcagtggctgattcctgttatgtccccgtctgaaggacttgtctacaaaccttataccgggcactgccctccggtgggaagtcttttggcgcccccattttttgccagctaccccacctcctcctcctccacagctgggggggatttcatgagttcggcatgtggagccaggctgatgagtgcccctgtgtacttcccgtctttcagcatgcctgcagtgtcagggtctgcagttgagcaagtgagccatgttgcagcgtcgcagcataaacggaactcgtgtagtgaagcggtgttggcatcaagggacagcgaggtgcaaggcagtagtgctagcagtccggcatcttctgaaacagcagctcaacccagggtcattagggttgttccccacacggcacgcacggcttcagagtcggcagcaaggattttccgctcaatacagatggagaggaaacaaaacgacccgtgactggcagataaaaatgaaagaacggagggagtagactaattttttgaccgataattataatgatcgccgtaaattggctggcccgcccgccttatgttttttgttcagtgtaaatatgctgtgtctgtcagaatgatatggcatctgtagctattttggttctgtcagaatcatgttgattggaattcgtcggtcggttgagtaggatgaaaattgggcacagcccatacgtctacagcaacgtcaaataaaggaagagaaagcaatacatcaccaacaccagaagcagatttttattttatttttattactgtgagtggagtggagtggctcaaccacatgatagatagatagatacatcagcaccatgctccttcctagtgacaggccacaacaagcatttcccaaagcaaatgcattggccacaaaaggcacccagctagggcattctcagcgcctcgttgatcctgctgaaaacgactcgg

SEQ ID NO: 63868 - DNA, 2834 bp, Zea Mays
aaaaatctcccaaaagccaaaccacacccggtctccgcctccgtctctgcctcctttcccctcgcttcctcgccggctgggatcttgcggcagctacgctcgctagctctcctccaacccgccgtcggctccctccgattccagtcccgtcctgtctcgccgcttcctggccccccgcttctcacgcggagaccggtcggatttcccacctcaaacatcgccggttttatccactcccgcagacctcttcctcagggacgggattggattggtggtggatcttctcctcaggggaggcacaagatccgttcatcatcctcgtcgcctaaacttggccgctcccgctcccacgctgctgctccaccctcgccgctactagaccagaccacggaggaggagacgaagcgccatgaggcggggagccaccaaggacgacgccgcgcccgacaaggtcatgggccctctcttcccccgcctccacgtcaacgacaccctaaagggcggacctcgcgcgccacccaggaacaagatggcgctctacgagcagttcagcgtcccctcccaccgctacagcgccgccgtaccgcccgcgccttccccagcgcctccatggggcgcgcaacgacccgcctccgcggtcccgtccacgtccgccagccaggttggcggcggcgatagacctatcttcccattatttcgtgtgccttcaactgaacctgttcgttcatcagatcagacgaatgccaactccaatggccagggtgccaatggtacaatagctgaatctgggaggcagaggcagtccacacatcttaagagcaaggatactaatgctgcaggaccacctgccgagggtaataattccgttgggaagaaattggctaatgatgatgattttacagttccctctgtcttgtattctggaatgcctccgcattccagccaagaaaagctcactctcttccctaccacaagcccatgtaagagtgtgcctgcaaaatattctagcactgacaagagacgcttagaaggaatggatgcttctgatgtgaaatcgaagggtccctcaggtatcaaggagaaagagccagtacaagtgaggatagacttggaagacaaagagacaactccgtcatttcaagtgctaaacgacaaaacatggagtccagacccaaagttatcttcgcacatggacaggctgaagaagcaacatgctgaagctgagagttatcagataaggaccaggaatgagaatgctgtcgagacccaaagccctccaaaaaatggagtgtcgttgttgtctaagccatatgttgataggagggaacagaatggtgattctgatctattggggcatggcctaagagagacaggtgtgaagaggaaaagatcacatcatgacgtggagcaaaacgatgatctgtctgattcctctgttgaatctttgcctggaatggagatttctccagatgatgttgtcagtgctattggtcccaagcatttttggaaagcgagaagagctattgtcaacagagggtatttgctgttcaagtattcgagctgcataggttgatcaaagtgcagaagttgatcgctgcatctccacatgtacttattgagggggatccttgccttggcaaatccttggcggtgagcaagaaaaggctggctggagatgtggaaacacagcttgaatcagctaaaaacgatgatggcgtgcgaccaacgcagctagagcactcgaaagagaagactgaagcgaaccaaccttcaccatctcaagacgaacaggccgcaactaatggtgacgttgctgcctcgatgcataccccttccgacaacaaacagaagagctggtgcattcctgcacctccaagtcagtggctgattcctgttatgtccccgtctgaaggacttgtctacaaaccttataccgggcactgccctccggtgggaagtcttttggcgcccccattttttgccagctaccccacctcctcctcctccacagctgggggggatttcatgagttcggcatgtggagccaggctgatgagtgcccctgtgtacttcccgtctttcagcatgcctgcagtgtcagggtctgcagttgagcaagtgagccatgttgcagcgtcgcagcataaacggaactcgtgtagtgaagcggtgttggcatcaagggacagcgaggtgcaaggcagtagtgctagcagtccggcatcttctgaaacagcagctcaacccagggtcattagggttgttccccacacggcacgcacggcttcagagtcggcagcaaggattttccgctcaatacagatggagaggaaacaaaacgacccgtgactggcagataaaaatgaaagaacggagggagtagactaattttttgaccgataattataatgatcgccgtaaattggctggcccgcccgccttatgttttttgttcagtgtaaatatgctgtgtctgtcagaatgatatggcatctgtagctattttggttctgtcagaatcatgttgattggaattcgtcggtcggttgagtaggatgaaaattgggcacagcccatacgtctacagcaacgtcaaataaaggaagagaaagcaatacatcaccaacaccagaagcagatttttattttatttttattactgtgagtggagtggagtggctcaaccacatgatagatagatagatacatcagcaccatgctccttcctagtgacaggccacaacaagcatttcccaaagcaaatgcattggccacaaaaggcacccagctagggcattctcagcgcctcgttgatcctgctgaaaacgactcgg

SEQ ID NO: 63869 - DNA, 1368 bp, Zea Mays
ctaaaagacacgtcagccccacacagaagccgacatgtcctgctcctctgaattctgatccgtgcggtgcggccgtgcgggtgtccgtctcctccattgcgaagccgcgagctcctgcgtcaaccagatcacacgaaccaaaccagcgcctcctcccccgagtctcaccgccagcgcccatggcgacacgctactggatcgtgttcgtgtgggatgagggcaaataccccacaatgtctccgctcaaggagattgttggcagcatccagtcacaggttgccaagattgaggatgatatgaaggtgcgagcagcggaatataataatgtaaggagccagcttagtgcaatcaacagaaagcaaagtgggagcttagcggttcgtgatctttccaatctggtaaaaccggaggatatgatcacctcggaacatcttgtgacacttcttgcaatcgttcccaagtactcccaaaaagactggctgtcaagctatgagacacttgatacatttgtggtacctaggtcatctaaaaagctctatgaagacaacgaatatgctctctacactgtgacactatttgctaaggttgttgacaactttaaggtccgtgctcgcgagaagggttttcagatccgtgatttcgagtacagtcctgaagcacaggaaagccggatgcaggagatggagaagctactgcgagaccaagaagctatgaggaccactcttcttcagtggtgttatgccagctacagcgaggtattcagttcctggatgcacttttgtgctgtgcgtgtctttgtggagagcattcttagatatggtctgccgccatcattcctgtctgctgttcttgcaccatctacaaagagcgagaagaaagtaaggagcatcttagacgagctctctggcgatgcccatagcctgtattggaaatccgaagacgatgtaggcgttgctggtctgggaggcgaaaccgaggcgcacccttacgtctccttcaccataaattttgtctgagacaaagtatggttcctagaccgtctgtggcctaggcaatataatacttggaagcagctattggaacgcaagcgcggaacgagcatgtatattactctgttgatttatcggttcatgtggtcctgtagttcatatcacagagagatcagccgacggatgctgtaatttctgaggaacctatggaattcctgtagttcatgtggtcctgtaatttctgaggactacctacctatttccctgcagcactgcaccttgtaaaaagacttaacccgtgtctgtagcagctggctactggatttattacatctacaataaaagtcatttttaatggttgtttcataagagttttcag

SEQ ID NO: 63870 - DNA, 1457 bp, Zea Mays
ctaaaagacacgtcagccccacacagaagccgacatgtcctgctcctctgaattctgatccgtgcggtgcggccgtgcgggtgtccgtctcctccattgcgaagccgcgagctcctgcgtcaaccagatcacacgaaccaaaccagcgcctcctcccccgagtctcaccgccagcgcccatggcgacacgctactggatcgtgtctgctgcctaactgctatctgtccagcccaggctgcccagctgatcggacgcctaaaaccaaccttttgtgttggctccgcgttcaggttcgtgtgggatgagggcaaataccccacaatgtctccgctcaaggagattgttggcagcatccagtcacaggttgccaagattgaggatgatatgaaggtgcgagcagcggaatataataatgtaaggagccagcttagtgcaatcaacagaaagcaaagtgggagcttagcggttcgtgatctttccaatctggtaaaaccggaggatatgatcacctcggaacatcttgtgacacttcttgcaatcgttcccaagtactcccaaaaagactggctgtcaagctatgagacacttgatacatttgtggtacctaggtcatctaaaaagctctatgaagacaacgaatatgctctctacactgtgacactatttgctaaggttgttgacaactttaaggtccgtgctcgcgagaagggttttcagatccgtgatttcgagtacagtcctgaagcacaggaaagccggatgcaggagatggagaagctactgcgagaccaagaagctatgaggaccactcttcttcagtggtgttatgccagctacagcgaggtattcagttcctggatgcacttttgtgctgtgcgtgtctttgtggagagcattcttagatatggtctgccgccatcattcctgtctgctgttcttgcaccatctacaaagagcgagaagaaagtaaggagcatcttagacgagctctctggcgatgcccatagcctgtattggaaatccgaagacgatgtaggcgttgctggtctgggaggcgaaaccgaggcgcacccttacgtctccttcaccataaattttgtctgagacaaagtatggttcctagaccgtctgtggcctaggcaatataatacttggaagcagctattggaacgcaagcgcggaacgagcatgtatattactctgttgatttatcggttcatgtggtcctgtagttcatatcacagagagatcagccgacggatgctgtaatttctgaggaacctatggaattcctgtagttcatgtggtcctgtaatttctgaggactacctacctatttccctgcagcactgcaccttgtaaaaagacttaacccgtgtctgtagcagctggctactggatttattacatctacaataaaagtcatttttaatggttgtttcataagagttttcag

SEQ ID NO: 63871 - DNA, 1660 bp, Zea Mays
ctaaaagacacgtcagccccacacagaagccgacatgtcctgctcctctgaattctgatccgtgcggtgcggccgtgcgggtgtccgtctcctccattgcgaagccgcgagctcctgcgtcaaccagatcacacgaaccaaaccagcgcctcctcccccgagtctcaccgccagcgcccatggcgacacgctactggatcgtgtctctgcccgtgcagtcacctggcgccatcgcaagctccctgtggtctcgcctccaggactccatctcccgccactccttcgacactccgctctaccgcttcaacgtcccggatctccgcgtcggcaccctcgactcgcttctcgccctcagcgacgacctcgtcaagtccaatgttttcgtggagggcgtgtcacacaagatccggaggcagatcgaggacctcgagcgcgccggaggggtcgagagtgggaccctcaccgtcgatggcgttcctgtcgacacctacctcaccaggttcgtgtgggatgagggcaaataccccacaatgtctccgctcaaggagattgttggcagcatccagtcacaggttgccaagattgaggatgatatgaaggtgcgagcagcggaatataataatgtaaggagccagcttagtgcaatcaacagaaagcaaagtgggagcggttcgtgatctttccaatctggtaaaaccggaggatatgatcacctcggaacatcttgtgacacttcttgcaatcgttcccaagtactcccaaaaagactggctgtcaagctatgagacacttgatacatttgtggtacctaggtcatctaaaaagctctatgaagacaacgaatatgctctctacactgtgacactatttgctaaggttgttgacaactttaaggtccgtgctcgcgagaagggttttcagatccgtgatttcgagtacagtcctgaagcacaggaaagccggatgcaggagatggagaagctactgcgagaccaagaagctatgaggaccactcttcttcagtggtgttatgccagctacagcgaggtattcagttcctggatgcacttttgtgctgtgcgtgtctttgtggagagcattcttagatatggtctgccgccatcattcctgtctgctgttcttgcaccatctacaaagagcgagaagaaagtaaggagcatcttagacgagctctctggcgatgcccatagcctgtattggaaatccgaagacgatgtaggcgttgctggtctgggaggcgaaaccgaggcgcacccttacgtctccttcaccataaattttgtctgagacaaagtatggttcctagaccgtctgtggcctaggcaatataatacttggaagcagctattggaacgcaagcgcggaacgagcatgtatattactctgttgatttatcggttcatgtggtcctgtagttcatatcacagagagatcagccgacggatgctgtaatttctgaggaacctatggaattcctgtagttcatgtggtcctgtaatttctgaggactacctacctatttccctgcagcactgcaccttgtaaaaagacttaacccgtgtctgtagcagctggctactggatttattacatctacaataaaagtcatttttaatggttgtttcataagagttttcag

SEQ ID NO: 63872 - DNA, 1074 bp, Zea Mays
gctgggtccatgtgttgatcttgctgtatgtgtcacatatttgcggctggatggctctgttgatccagagaagagatttgaaatcgttaaagcattcaattcagacccaaccattgatgtacttctgctaacaacccatgtcggtgggcttggcttgaacttgacatctgccgacacattggtgttcgtggaacatgattggaacccaatgaaggaccttcaggctatggacagagcacatcgattgggtcaaaggaaagtggtgaatgttcaccgtctcatcatgcgtggcacccttgaggagaaggtgatgtctctccagaggttcaaggtgtcagtcgccaatgctgtcatcaatgctgagaactcgagcttgaagaccatgaacactgaccagctgcttgatctgttcacatcaacccctgcttcaagaaaagtaaggcagttcgtttgtttgttctttgctttcgtgggaaatgttttgtttttctgatccattctctggcccgtgtatcaggcaagcgacgagcagagtaagaggaaatctggtggcaaaggcttgaagtccattcttaatggtctggatgagctttgggatcagtcgcagtatgccgatgagtatgatctgaaccagttcctggcgaagctgaacggctgagccaccaccggctggctcgtgtacagtgtataaagcaatttggggcaggttaattttgttgttgctgttgtttgatagaggaaggaaaagattagatgctaacagatataggtggtggttggggttacgatctcaatttttttggtttccatcttcctcaatttttgttttgaggagttgtatatactctgctcacctataatcaaagctgcagctcttatcagaatttcccttgattggtcatggtgactgttccatgtactttgttctgccgcggccgtagctatatggactgctgcagctgcaattcatagaaacaaaatacttcatagaaacaaaatattgtagaagccgcatttggattaaagacgcggcaagtcgcagcgaacctggaaaggtgaatgctgatatgcttg

SEQ ID NO: 63873 - DNA, 6027 bp, Zea Mays
ttgattttctctgagactggaggactggatttatgtgagcagtttatggatgttaatgacgttatcaaagacgaggatcttcttgcccaaaaaaattattggggttcacatgtacagaataatggattccattcatttaattcaggtcataatattcagcagttggtttctaccatggtccccaggtatcccaagcattctaattttcgctctagacgattaagtgccagggagttaaatatgctgaagcgtaaagcaaagagtaatgcaaaagatcatacaaaggctgtatctgaggatgatgaggttacactgaaaggatctgtgccctccaatggagcttcttctgaacaaggtgtatttgatacagctgtcgaagaagacaatctggagtacaatgagaacggaagatggccttttcaacaatttgtggatcagcttattcatgatatgtttgatcctatttgggaagttcgccatggcaccattatggctttaagggaaattttgacacatcatggtgcttgtgctggagtatattttcctgatctgagcttgccttcctctgacttggatggtaaaaccaactttgactcccttaaaagggaacatggtatcgatctaaacgaagatgtccatttggaacaccttgaaccagcattaaagaagcataagaaagagccaaaatgtgctgaaagtatgatggattgtgataaggagttggttgacagtgattatctaaaaacggaaggagatctgagcaatgtgcctgatgtattaactgccgaaccaaattctactcatgtaaaagttgagcctgagttctgtgttgatgattcagctgacccctctaaaggcgtttcgacatgtaaatcacagaaaaaactcaactccatatcacatctgagttctcatattcttgctccagaaagttcaaaattcatgaaactgatgaaactagccaaatactcatatatgaagaattgggaatttcttcaggattgtgcaatccgcttcctttgtgtgctttcactggaccgctttggtgattatgtatccgatcaagttgtcgccccagttcgtgaaacttgtgctcaagctcttggtgctgtgctgaagtacatgcacccttctttagtatgtcatacattcaaaatcttgctgcagatgcagacaagagtgggaagttcgtcatgggagccttcttggcattaaatacttagttgctgttcgccaggaaatgcttaaagatttgcttgactatatcattcatgcttgtaaagctggtctggaggaccctgatgatgatgtccgagcagtggctgcagaagccctgattccagctgccgactctttagttaggctaaatgaccaaattttgcatccaattgtggtgttgctttgggatatactgcttgaccttgacgatttaagcccatctacaagcagtgtaatgaacttgttagcagaaatatattctcaaccagagatggtcccaaagatgcttggcacagcagcttcaggggaaaagggagaatttgatctaaacgaagcaactcagattgctgagcaagaagacgaactaacatctattgaaaacccttacggtctagctacactgacaccccggctgtggccctttatgagacatagtattacttctgttcggcgttccgccatacgaacactggagaagcttcttgaggttggcaacactaggagttctgctggaacaaccccatctaaactctggccaacatcaatattaggtgatgcactgcaggttgtatttcagaacctacttttggagtcaaatgatgatattcttcagtcttctgaaagggcttggaaacttctacttcagtgccctgagaaggaccttgaatatgctgcaaggttatattttagtaattgggtacaacttgctaccactccatttggctcagcattggattctacaaaaatgtttttaccagttgcccttccacgaggaaatcgttcgagagctgctgcaaagattagatctgctaggctagaacatgagtacacaacaatgatctcgtttggttctacaggggaaagtatttcacatgaaaagcattcggacgttccctctattttttcgaatataattgttggctctgatcctgacaaatctgttactcatacacgggttcttacgtcaatggcccttgggctttttgcctctaagttgcccgtaagctcatggcaagtggttttaagtccactagcaaatcacctcatgtctctctcaggagtccagagacaagtggcttcaatgatcatcgtttcttggttcaaagatctgagaggcagagatcctgtatcagtgggtacattgctagcttttctatcttccttgaaagagtggctggtggacttattgacttgctctgatccagcattacccacaaaaggttctgtgcttccatattctgaactttcaaggacatacacgaagatgcgcaatgaagccaataatttgctccacttaatcgattcatgtgctgctttcaaagattatagtagcagcttaaaccttaacactgacgtgctgactgttgatgatgctatcaactttgcatcaaagcttttgttaccatctgaatctgatattccttcagaaactgagaacattttcttgaataacatagaatcagcaaaacaaggcctattgtctacatcaggttacttgaaatgtgttcagaataatttgcatgtgacagtctgttctttggtggcttctgctgtagtttggatgtcatgtttgcccagcaagttgaaccctgttattttacctttaatggctgccattaaaagagaacaggaggaagtacttcaagataaagctgctgatgcacttgctgagcttatatttagctgcattggccgcaagcctggccccaatgacaagctaaccaagaatctctgcactctaacatgcactgatgctagtgagacacctcaagctgcaataatcaactcaatgcaggttattgaggaccagaatttgctatcgattggaaagcgttttagcagtcatagatccaggggccatacaacgtctggtggcgatgaaaggtcaaaaatggagggttttataagccggcgtggatcagagttggctttcaagcatctctgtgtgaaatttggaccttcattgtttgaaaaccttcccaagttatgggattgccttactgagtttcttagacctgtaaaaacagaagatggtattccggaagatgatgcaagtattgcacagctgggcagatcgtatgaggataaggacccacagtcactcattaataatatccaggtcgttcgttccatttcacctcacttggctgagcccttaaggcctcaactgctaaatctccttccctctattcttgggtgtgttcgtcatcctcatgtggctgttagactagctgctgcaagatgcatcacatctatggcaaagtcattgaccgatgatgtgatggtactggtgatagaaaatgtcatcccaatgttgtccgatttatcttctgtctgtgcaagacaaggagctgggattctgttaagccttcttgttcagggtttggctgtggagttggttccttatgctcctttccttgtcgttcctcttctgaagtgtatgagtgacccagatggttctgttaggcagactgtgactcacagttttgctgctcttgttcctttgctgccattatcaaggggtgcttctttaccatgtggactaagtgaacgcttatctagcagtgctgaagatgtgcaatttctggaacagctccttgacaatacccaaattgatgatttcaagcttaatattgatcttaatgttgaactacgaaggtatcagcaagaagggatcaactggcttgcattcctccgtcggtttaagttacatggaattttatgtgatgacatggggctcggtaagacgctccaagcatctgctattgtagcaagtgacattgcagaagcacgtgcacggaatgatgaaaaaattctgacatctttgattatctgcccttctacattagtggcccactgggaatatgaaatagagaagtacatagacagctctatcttgaaacctcttcagtacgttggttcttctcaggacagagtgacactccgtagtcagtttgataaggttaatgttatcataacatcatatgatattatacggaaggatattgattttcttggaaatatcacttggaactattgtgttctggatgaagggcatataataaaaaactcaaggtctaaaataacgtttgctgtgaaacagctgaaagcgcaacaccgtcttatcttgagtggcacacctattcagaataatgtgttggagttatggtctttatttgacttccttatgcctgggtttcttggaacagaaaaacaattccaagctgcatatggaaaacccttgctagctgccaaagattctaaatgttcagcaaaggatgctgaagctggtattcttgcaatggaggcactgcataagcaggtcatgccgtttctactgagaagaacaaaggatgaagttttatctgatcttccagagaagataatccaggatagatattgtgatctcagtctattgcagctcaaactttatgacaaattttccagctccaatgcaaaagacgagatttcaactatagtaaaagcaaatgaactggaggaatctgcacctcaaccaaaggcaactcggcatgtgtttcaggcattgcagtacctattaaaactatgcagccatcccttgcttgtaactggggagaaccccccaaatcatcttgtggatcttctgaatgaaataggtctgggatctggcagtgagcttcatgagcttcaccactcacctaagcttgttgctcttcaagaaatacttcaagaatgtggtatagggtcagaaatatctagtcctgatgcttctacagctgttgggcaacacagagttttgatttttgctcagcataaggcttttcttgacatcatagagaaggacctgtttcaatctcatatgagaagtgtcacatatttgcggctggatggctctgttgatccagagaagagatttgaaatcgttaaagcattcaattcagacccaaccattgatgtacttctgctaacaacccatgtcggtgggcttggcttgaacttgacatctgccgacacattggtgttcgtggaacatgattggaacccaatgaaggaccttcaggctatggacagagcacatcgattgggtcaaaggaaagtggtgaatgttcaccgtctcatcatgcgtggcacccttgaggagaaggtgatgtctctccagaggttcaaggtgtcagtcgccaatgctgtcatcaatgctgagaactcgagcttgaagaccatgaacactgaccagctgcttgatctgttcacatcaacccctgcttcaagaaaagcaagcgacgagcagagtaagaggaaatctggtggcaaaggcttgaagtccattcttaatggtctggatgagctttgggatcagtcgcagtatgccgatgagtatgatctgaaccagttcctggcgaagctgaacggctgagccaccaccggctggctcgtgtacagtgtataaagcaatttggggcaggttaattttgttgttgctgttgtttgatagaggaaggaaaagattagatgctaacagatataggtggtggttggggttacgatctcaatttttttggtttccatcttcctcaatttttgttttgaggagttgtatatactctgctcacctataatcaaagctgcagctcttatcagaatttcccttgattggtcatggtgactgttccatgtactttgttctgccgcggccgtagctatatggactgctgcagctgcaattcatagaaacaaaatacttcatagaaacaaaatattgtagaagccgcatttggattaaagacgcggcaagtcgcagcgaacctggaaaggtgaatgctgatatgcttg

SEQ ID NO: 63874 - DNA, 3793 bp, Zea Mays
tttcctatcttccactagcaaatcacctcatgtctctctcaggagtccagagacaagtggcttcaatgatcatcgtttcttggttcaaagatctgagaggcagagatcctgtatcagtgggtacattgctagcttttctatcttccttgaaagagtggctggtggacttattgacttgctctgatccagcattacccacaaaaggttctgtgcttccatattctgaactttcaaggacatacacgaagatgcgcaatgaagccaataatttgctccacttaatcgattcatgtgctgctttcaaagattatagtagcagcttaaaccttaacactgacgtgctgactgttgatgatgctatcaactttgcatcaaagcttttgttaccatctgaatctgatattccttcagaaactgagaacattttcttgaataacatagaatcagcaaaacaaggcctattgtctacatcaggttacttgaaatgtgttcagaataatttgcatgtgacagtctgttctttggtggcttctgctgtagtttggatgtcatgtttgcccagcaagttgaaccctgttattttacctttaatggctgccattaaaagagaacaggaggaagtacttcaagataaagctgctgatgcacttgctgagcttatatttagctgcattggccgcaagcctggccccaatgacaagctaaccaagaatctctgcactctaacatgcactgatgctagtgagacacctcaagctgcaataatcaactcaatgcaggttattgaggaccagaatttgctatcgattggaaagcgttttagcagtcatagatccaggggccatacaacgtctggtggcgatgaaaggtcaaaaatggagggttttataagccggcgtggatcagagttggctttcaagcatctctgtgtgaaatttggaccttcattgtttgaaaaccttcccaagttatgggattgccttactgagtttcttagacctgtaaaaacagaagatggtattccggaagatgatgcaagtattgcacagctgggcagatcgtatgaggataaggacccacagtcactcattaataatatccaggtcgttcgttccatttcacctcacttggctgagcccttaaggcctcaactgctaaatctccttccctctattcttgggtgtgttcgtcatcctcatgtggctgttagactagctgctgcaagatgcatcacatctatggcaaagtcattgaccgatgatgtgatggtactggtgatagaaaatgtcatcccaatgttgtccgatttatcttctgtctgtgcaagacaaggagctgggattctgttaagccttcttgttcagggtttggctgtggagttggttccttatgctcctttccttgtcgttcctcttctgaagtgtatgagtgacccagatggttctgttaggcagactgtgactcacagttttgctgctcttgttcctttgctgccattatcaaggggtgcttctttaccatgtggactaagtgaacgcttatctagcagtgctgaagatgtgcaatttctggaacagctccttgacaatacccaaattgatgatttcaagcttaatattgatcttaatgttgaactacgaaggtatcagcaagaagggatcaactggcttgcattcctccgtcggtttaagttacatggaattttatgtgatgacatggggctcggtaagacgctccaagcatctgctattgtagcaagtgacattgcagaagcacgtgcacggaatgatgaaaaaattctgacatctttgattatctgcccttctacattagtggcccactgggaatatgaaatagagaagtacatagacagctctatcttgaaacctcttcagtacgttggttcttctcaggacagagtgacactccgtagtcagtttgataaggttaatgttatcataacatcatatgatattatacggaaggatattgattttcttggaaatatcacttggaactattgtgttctggatgaagggcatataataaaaaactcaaggtctaaaataacgtttgctgtgaaacagctgaaagcgcaacaccgtcttatcttgagtggcacacctattcagaataatgtgttggagttatggtctttatttgacttccttatgcctgggtttcttggaacagaaaaacaattccaagctgcatatggaaaacccttgctagctgccaaagattctaaatgttcagcaaaggatgctgaagctggtattcttgcaatggaggcactgcataagcaggtcatgccgtttctactgagaagaacaaaggatgaagttttatctgatcttccagagaagataatccaggatagatattgtgatctcagtctattgcagctcaaactttatgacaaattttccagctccaatgcaaaagacgagatttcaactatagtaaaagcaaatgaactggaggaatctgcacctcaaccaaaggcaactcggcatgtgtttcaggcattgcagtacctattaaaactatgcagccatcccttgcttgtaactggggagaaccccccaaatcatcttgtggatcttctgaatgaaataggtctgggatctggcagtgagcttcatgagcttcaccactcacctaagcttgttgctcttcaagaaatacttcaagaatgtggtatagggtcagaaatatctagtcctgatgcttctacagctgttgggcaacacagagttttgatttttgctcagcataaggcttttcttgacatcatagagaaggacctgtttcaatctcatatgagaagtgtcacatatttgcggctggatggctctgttgatccagagaagagatttgaaatcgttaaagcattcaattcagacccaaccattgatgtacttctgctaacaacccatgtcggtgggcttggcttgaacttgacatctgccgacacattggtgttcgtggaacatgattggaacccaatgaaggaccttcaggctatggacagagcacatcgattgggtcaaaggaaagtggtgaatgttcaccgtctcatcatgcgtggcacccttgaggagaaggtgatgtctctccagaggttcaaggtgtcagtcgccaatgctgtcatcaatgctgagaactcgagcttgaagaccatgaacactgaccagctgcttgatctgttcacatcaacccctgcttcaagaaaagcaagcgacgagcagagtaagaggaaatctggtggcaaaggcttgaagtccattcttaatggtctggatgagctttgggatcagtcgcagtatgccgatgagtatgatctgaaccagttcctggcgaagctgaacggctgagccaccaccggctggctcgtgtacagtgtataaagcaatttggggcaggttaattttgttgttgctgttgtttgatagaggaaggaaaagattagatgctaacagatataggtggtggttggggttacgatctcaatttttttggtttccatcttcctcaatttttgttttgaggagttgtatatactctgctcacctataatcaaagctgcagctcttatcagaatttcccttgattggtcatggtgactgttccatgtactttgttctgccgcggccgtagctatatggactgctgcagctgcaattcatagaaacaaaatacttcatagaaacaaaatattgtagaagccgcatttggattaaagacgcggcaagtcgcagcgaacctggaaaggtgaatgctgatatgcttg

SEQ ID NO: 63875 - DNA, 6715 bp, Zea Mays
cggttccgtccgcttaccacctgttgacgggagggatttatccgtttcgttatcgcgcgccatgctacagctggtgtgcacttctattacattacatgcatgtggagtaatttacctacggcagattgctgactaaaggcgctgaagtaaaccttccctcagtatacttcctcggatgtcacgtctgcccctctgcgtcatttatggctcagaactcgtcccgtcttcaccgcctcctcacattactagacactggttcgacacaagcaacgaggtttgcggctgcacgccaaattggagaaatcgccaagtcccacccccaggagctgaattcgttgctaaaaaaggtttctcaatatattcgtagtaaaaattgggacacgagggttgcggcagcccatgcgattggtgccatagcagagaatgtcaaacacacatcattgaaggacttgtatgcttccgtgcaagcagaaaaacatgcttccggtttctctgatggaagtgatgatgctggctcagcattgccacggactgatagtgcagcaacatctgatcttgcttttggaagctttgacataggcagggtattggaatttggatctcctctattggcatcaggtggacaggaatacgacattgctgatagtggcaagaatccagcagagcgtctagctcgccaaaagaaaaatctccggcgtcgtttaggactggatttatgtgagcagtttatggatgttaatgacgttatcaaagacgaggatcttcttgcccaaaaaaattattggggttcacatgtacagaataatggattccattcatttaattcaggtcataatattcagcagttggtttctaccatggtccccaggtatcccaagcattctaattttcgctctagacgattaagtgccagggagttaaatatgctgaagcgtaaagcaaagagtaatgcaaaagatcatacaaaggctgtatctgaggatgatgaggttacactgaaaggatctgtgccctccaatggagcttcttctgaacaaggtgtatttgatacagctgtcgaagaagacaatctggagtacaatgagaacggaagatggccttttcaacaatttgtggatcagcttattcatgatatgtttgatcctatttgggaagttcgccatggcaccattatggctttaagggaaattttgacacatcatggtgcttgtgctggagtatattttcctgatctgagcttgccttcctctgacttggatggtaaaaccaactttgactcccttaaaagggaacatggtatcgatctaaacgaagatgtccatttggaacaccttgaaccagcattaaagaagcataagaaagagccaaaatgtgctgaaagtatgatggattgtgataaggagttggttgacagtgattatctaaaaacggaaggagatctgagcaatgtgcctgatgtattaactgccgaaccaaattctactcatgtaaaagttgagcctgagttctgtgttgatgattcagctgacccctctaaaggcgtttcgacatgtaaatcacagaaaaaactcaactccatatcacatctgagttctcatattcttgctccagaaagttcaaaattcatgaaactgatgaaactagccaaatactcatatatgaagaattgggaatttcttcaggattgtgcaatccgcttcctttgtgtgctttcactggaccgctttggtgattatgtatccgatcaagttgtcgccccagttcgtgaaacttgtgctcaagctcttggtgctgtgctgaagtacatgcacccttctttagtatgtcatacattcaaaatcttgctgcagatgcagcacagacaagagtgggaagttcgtcatgggagccttcttggcattaaatacttagttgctgttcgccaggaaatgcttaaagatttgcttgactatatcattcatgcttgtaaagctggtctggaggaccctgatgatgatgtccgagcagtggctgcagaagccctgattccagctgccgactctttagttaggctaaatgaccaaattttgcatccaattgtggtgttgctttgggatatactgcttgaccttgacgatttaagcccatctacaagcagtgtaatgaacttgttagcagaaatatattctcaaccagagatggtcccaaagatgcttggcacagcagcttcaggggaaaagggagaatttgatctaaacgaagcaactcagattgctgagcaagaagacgaactaacatctattgaaaacccttacggtctagctacactgacaccccggctgtggccctttatgagacatagtattacttctgttcggcgttccgccatacgaacactggagaagcttcttgaggttggcaacactaggagttctgctggaacaaccccatctaaactctggccaacatcaatattaggtgatgcactgcaggttgtatttcagaacctacttttggagtcaaatgatgatattcttcagtcttctgaaagggcttggaaacttctacttcagtgccctgagaaggaccttgaatatgctgcaaggttatattttagtaattgggtacaacttgctaccactccatttggctcagcattggattctacaaaaatgtttttaccagttgcccttccacgaggaaatcgttcgagagctgctgcaaagattagatctgctaggctagaacatgagtacacaacaatgatctcgtttggttctacaggggaaagtatttcacatgaaaagcattcggacgttccctctattttttcgaatataattgttggctctgatcctgacaaatctgttactcatacacgggttcttacgtcaatggcccttgggctttttgcctctaagttgcccgtaagctcatggcaagtggttttaagtccactagcaaatcacctcatgtctctctcaggagtccagagacaagtggcttcaatgatcatcgtttcttggttcaaagatctgagaggcagagatcctgtatcagtgggtacattgctagcttttctatcttccttgaaagagtggctggtggacttattgacttgctctgatccagcattacccacaaaaggttctgtgcttccatattctgaactttcaaggacatacacgaagatgcgcaatgaagccaataatttgctccacttaatcgattcatgtgctgctttcaaagattatagtagcagcttaaaccttaacactgacgtgctgactgttgatgatgctatcaactttgcatcaaagcttttgttaccatctgaatctgatattccttcagaaactgagaacattttcttgaataacatagaatcagcaaaacaaggcctattgtctacatcaggttacttgaaatgtgttcagaataatttgcatgtgacagtctgttctttggtggcttctgctgtagtttggatgtcatgtttgcccagcaagttgaaccctgttattttacctttaatggctgccattaaaagagaacaggaggaagtacttcaagataaagctgctgatgcacttgctgagcttatatttagctgcattggccgcaagcctggccccaatgacaagctaaccaagaatctctgcactctaacatgcactgatgctagtgagacacctcaagctgcaataatcaactcaatgcaggttattgaggaccagaatttgctatcgattggaaagcgttttagcagtcatagatccaggggccatacaacgtctggtggcgatgaaaggtcaaaaatggagggttttataagccggcgtggatcagagttggctttcaagcatctctgtgtgaaatttggaccttcattgtttgaaaaccttcccaagttatgggattgccttactgagtttcttagacctgtaaaaacagaagatggtattccggaagatgatgcaagtattgcacagctgggcagatcgtatgaggataaggacccacagtcactcattaataatatccaggtcgttcgttccatttcacctcacttggctgagcccttaaggcctcaactgctaaatctccttccctctattcttgggtgtgttcgtcatcctcatgtggctgttagactagctgctgcaagatgcatcacatctatggcaaagtcattgaccgatgatgtgatggtactggtgatagaaaatgtcatcccaatgttgtccgatttatcttctgtctgtgcaagacaaggagctgggattctgttaagccttcttgttcagggtttggctgtggagttggttccttatgctcctttccttgtcgttcctcttctgaagtgtatgagtgacccagatggttctgttaggcagactgtgactcacagttttgctgctcttgttcctttgctgccattatcaaggggtgcttctttaccatgtggactaagtgaacgcttatctagcagtgctgaagatgtgcaatttctggaacagctccttgacaatacccaaattgatgatttcaagcttaatattgatcttaatgttgaactacgaaggtatcagcaagaagggatcaactggcttgcattcctccgtcggtttaagttacatggaattttatgtgatgacatggggctcggtaagacgctccaagcatctgctattgtagcaagtgacattgcagaagcacgtgcacggaatgatgaaaaaattctgacatctttgattatctgcccttctacattagtggcccactgggaatatgaaatagagaagtacatagacagctctatcttgaaacctcttcagtacgttggttcttctcaggacagagtgacactccgtagtcagtttgataaggttaatgttatcataacatcatatgatattatacggaaggatattgattttcttggaaatatcacttggaactattgtgttctggatgaagggcatataataaaaaactcaaggtctaaaataacgtttgctgtgaaacagctgaaagcgcaacaccgtcttatcttgagtggcacacctattcagaataatgtgttggagttatggtctttatttgacttccttatgcctgggtttcttggaacagaaaaacaattccaagctgcatatggaaaacccttgctagctgccaaagattctaaatgttcagcaaaggatgctgaagctggtattcttgcaatggaggcactgcataagcaggtcatgccgtttctactgagaagaacaaaggatgaagttttatctgatcttccagagaagataatccaggatagatattgtgatctcagtctattgcagctcaaactttatgacaaattttccagctccaatgcaaaagacgagatttcaactatagtaaaagcaaatgaactggaggaatctgcacctcaaccaaaggcaactcggcatgtgtttcaggcattgcagtacctattaaaactatgcagccatcccttgcttgtaactggggagaaccccccaaatcatcttgtggatcttctgaatgaaataggtctgggatctggcagtgagcttcatgagcttcaccactcacctaagcttgttgctcttcaagaaatacttcaagaatgtggtatagggtcagaaatatctagtcctgatgcttctacagctgttgggcaacacagagttttgatttttgctcagcataaggcttttcttgacatcatagagaaggacctgtttcaatctcatatgagaagtgtcacatatttgcggctggatggctctgttgatccagagaagagatttgaaatcgttaaagcattcaattcagacccaaccattgatgtacttctgctaacaacccatgtcggtgggcttggcttgaacttgacatctgccgacacattggtgttcgtggaacatgattggaacccaatgaaggaccttcaggctatggacagagcacatcgattgggtcaaaggaaagtggtgaatgttcaccgtctcatcatgcgtggcacccttgaggagaaggtgatgtctctccagaggttcaaggtgtcagtcgccaatgctgtcatcaatgctgagaactcgagcttgaagaccatgaacactgaccagctgcttgatctgttcacatcaacccctgcttcaagaaaagcaagcgacgagcagagtaagaggaaatctggtggcaaaggcttgaagtccattcttaatggtctggatgagctttgggatcagtcgcagtatgccgatgagtatgatctgaaccagttcctggcgaagctgaacggctgagccaccaccggctggctcgtgtacagtgtataaagcaatttggggcaggttaattttgttgttgctgttgtttgatagaggaaggaaaagattagatgctaacagatataggtggtggttggggttacgatctcaatttttttggtttccatcttcctcaatttttgttttgaggagttgtatatactctgctcacctataatcaaagctgcagctcttatcagaatttcccttgattggtcatggtgactgttccatgtactttgttctgccgcggccgtagctatatggactgctgcagctgcaattcatagaaacaaaatacttcatagaaacaaaatattgtagaagccgcatttggattaaagacgcggcaagtcgcagcgaacctggaaaggtgaatgctgatatgcttg

SEQ ID NO: 63876 - DNA, 6670 bp, Zea Mays
cgtgcctcgagcctcgtggcgctagctggtgtgcacttctattacattacatgcatgtggagtaatttacctacggcagattgctgactaaaggcgctgaagtaaaccttccctcagtatacttcctcggatgtcacgtctgcccctctgcgtcatttatggctcagaactcgtcccgtcttcaccgcctcctcacattactagacactggttcgacacaagcaacgaggtttgcggctgcacgccaaattggagaaatcgccaagtcccacccccaggagctgaattcgttgctaaaaaaggtttctcaatatattcgtagtaaaaattgggacacgagggttgcggcagcccatgcgattggtgccatagcagagaatgtcaaacacacatcattgaaggacttgtatgcttccgtgcaagcagaaaaacatgcttccggtttctctgatggaagtgatgatgctggctcagcattgccacggactgatagtgcagcaacatctgatcttgcttttggaagctttgacataggcagggtattggaatttggatctcctctattggcatcaggtggacaggaatacgacattgctgatagtggcaagaatccagcagagcgtctagctcgccaaaagaaaaatctccggcgtcgtttaggactggatttatgtgagcagtttatggatgttaatgacgttatcaaagacgaggatcttcttgcccaaaaaaattattggggttcacatgtacagaataatggattccattcatttaattcaggtcataatattcagcagttggtttctaccatggtccccaggtatcccaagcattctaattttcgctctagacgattaagtgccagggagttaaatatgctgaagcgtaaagcaaagagtaatgcaaaagatcatacaaaggctgtatctgaggatgatgaggttacactgaaaggatctgtgccctccaatggagcttcttctgaacaaggtgtatttgatacagctgtcgaagaagacaatctggagtacaatgagaacggaagatggccttttcaacaatttgtggatcagcttattcatgatatgtttgatcctatttgggaagttcgccatggcaccattatggctttaagggaaattttgacacatcatggtgcttgtgctggagtatattttcctgatctgagcttgccttcctctgacttggatggtaaaaccaactttgactcccttaaaagggaacatggtatcgatctaaacgaagatgtccatttggaacaccttgaaccagcattaaagaagcataagaaagagccaaaatgtgctgaaagtatgatggattgtgataaggagttggttgacagtgattatctaaaaacggaaggagatctgagcaatgtgcctgatgtattaactgccgaaccaaattctactcatgtaaaagttgagcctgagttctgtgttgatgattcagctgacccctctaaaggcgtttcgacatgtaaatcacagaaaaaactcaactccatatcacatctgagttctcatattcttgctccagaaagttcaaaattcatgaaactgatgaaactagccaaatactcatatatgaagaattgggaatttcttcaggattgtgcaatccgcttcctttgtgtgctttcactggaccgctttggtgattatgtatccgatcaagttgtcgccccagttcgtgaaacttgtgctcaagctcttggtgctgtgctgaagtacatgcacccttctttagtatgtcatacattcaaaatcttgctgcagatgcagcacagacaagagtgggaagttcgtcatgggagccttcttggcattaaatacttagttgctgttcgccaggaaatgcttaaagatttgcttgactatatcattcatgcttgtaaagctggtctggaggaccctgatgatgatgtccgagcagtggctgcagaagccctgattccagctgccgactctttagttaggctaaatgaccaaattttgcatccaattgtggtgttgctttgggatatactgcttgaccttgacgatttaagcccatctacaagcagtgtaatgaacttgttagcagaaatatattctcaaccagagatggtcccaaagatgcttggcacagcagcttcaggggaaaagggagaatttgatctaaacgaagcaactcagattgctgagcaagaagacgaactaacatctattgaaaacccttacggtctagctacactgacaccccggctgtggccctttatgagacatagtattacttctgttcggcgttccgccatacgaacactggagaagcttcttgaggttggcaacactaggagttctgctggaacaaccccatctaaactctggccaacatcaatattaggtgatgcactgcaggttgtatttcagaacctacttttggagtcaaatgatgatattcttcagtcttctgaaagggcttggaaacttctacttcagtgccctgagaaggaccttgaatatgctgcaaggttatattttagtaattgggtacaacttgctaccactccatttggctcagcattggattctacaaaaatgtttttaccagttgcccttccacgaggaaatcgttcgagagctgctgcaaagattagatctgctaggctagaacatgagtacacaacaatgatctcgtttggttctacaggggaaagtatttcacatgaaaagcattcggacgttccctctattttttcgaatataattgttggctctgatcctgacaaatctgttactcatacacgggttcttacgtcaatggcccttgggctttttgcctctaagttgcccgtaagctcatggcaagtggttttaagtccactagcaaatcacctcatgtctctctcaggagtccagagacaagtggcttcaatgatcatcgtttcttggttcaaagatctgagaggcagagatcctgtatcagtgggtacattgctagcttttctatcttccttgaaagagtggctggtggacttattgacttgctctgatccagcattacccacaaaaggttctgtgcttccatattctgaactttcaaggacatacacgaagatgcgcaatgaagccaataatttgctccacttaatcgattcatgtgctgctttcaaagattatagtagcagcttaaaccttaacactgacgtgctgactgttgatgatgctatcaactttgcatcaaagcttttgttaccatctgaatctgatattccttcagaaactgagaacattttcttgaataacatagaatcagcaaaacaaggcctattgtctacatcaggttacttgaaatgtgttcagaataatttgcatgtgacagtctgttctttggtggcttctgctgtagtttggatgtcatgtttgcccagcaagttgaaccctgttattttacctttaatggctgccattaaaagagaacaggaggaagtacttcaagataaagctgctgatgcacttgctgagcttatatttagctgcattggccgcaagcctggccccaatgacaagctaaccaagaatctctgcactctaacatgcactgatgctagtgagacacctcaagctgcaataatcaactcaatgcaggttattgaggaccagaatttgctatcgattggaaagcgttttagcagtcatagatccaggggccatacaacgtctggtggcgatgaaaggtcaaaaatggagggttttataagccggcgtggatcagagttggctttcaagcatctctgtgtgaaatttggaccttcattgtttgaaaaccttcccaagttatgggattgccttactgagtttcttagacctgtaaaaacagaagatggtattccggaagatgatgcaagtattgcacagctgggcagatcgtatgaggataaggacccacagtcactcattaataatatccaggtcgttcgttccatttcacctcacttggctgagcccttaaggcctcaactgctaaatctccttccctctattcttgggtgtgttcgtcatcctcatgtggctgttagactagctgctgcaagatgcatcacatctatggcaaagtcattgaccgatgatgtgatggtactggtgatagaaaatgtcatcccaatgttgtccgatttatcttctgtctgtgcaagacaaggagctgggattctgttaagccttcttgttcagggtttggctgtggagttggttccttatgctcctttccttgtcgttcctcttctgaagtgtatgagtgacccagatggttctgttaggcagactgtgactcacagttttgctgctcttgttcctttgctgccattatcaaggggtgcttctttaccatgtggactaagtgaacgcttatctagcagtgctgaagatgtgcaatttctggaacagctccttgacaatacccaaattgatgatttcaagcttaatattgatcttaatgttgaactacgaaggtatcagcaagaagggatcaactggcttgcattcctccgtcggtttaagttacatggaattttatgtgatgacatggggctcggtaagacgctccaagcatctgctattgtagcaagtgacattgcagaagcacgtgcacggaatgatgaaaaaattctgacatctttgattatctgcccttctacattagtggcccactgggaatatgaaatagagaagtacatagacagctctatcttgaaacctcttcagtacgttggttcttctcaggacagagtgacactccgtagtcagtttgataaggttaatgttatcataacatcatatgatattatacggaaggatattgattttcttggaaatatcacttggaactattgtgttctggatgaagggcatataataaaaaactcaaggtctaaaataacgtttgctgtgaaacagctgaaagcgcaacaccgtcttatcttgagtggcacacctattcagaataatgtgttggagttatggtctttatttgacttccttatgcctgggtttcttggaacagaaaaacaattccaagctgcatatggaaaacccttgctagctgccaaagattctaaatgttcagcaaaggatgctgaagctggtattcttgcaatggaggcactgcataagcaggtcatgccgtttctactgagaagaacaaaggatgaagttttatctgatcttccagagaagataatccaggatagatattgtgatctcagtctattgcagctcaaactttatgacaaattttccagctccaatgcaaaagacgagatttcaactatagtaaaagcaaatgaactggaggaatctgcacctcaaccaaaggcaactcggcatgtgtttcaggcattgcagtacctattaaaactatgcagccatcccttgcttgtaactggggagaaccccccaaatcatcttgtggatcttctgaatgaaataggtctgggatctggcagtgagcttcatgagcttcaccactcacctaagcttgttgctcttcaagaaatacttcaagaatgtggtatagggtcagaaatatctagtcctgatgcttctacagctgttgggcaacacagagttttgatttttgctcagcataaggcttttcttgacatcatagagaaggacctgtttcaatctcatatgagaagtgtcacatatttgcggctggatggctctgttgatccagagaagagatttgaaatcgttaaagcattcaattcagacccaaccattgatgtacttctgctaacaacccatgtcggtgggcttggcttgaacttgacatctgccgacacattggtgttcgtggaacatgattggaacccaatgaaggaccttcaggctatggacagagcacatcgattgggtcaaaggaaagtggtgaatgttcaccgtctcatcatgcgtggcacccttgaggagaaggtgatgtctctccagaggttcaaggtgtcagtcgccaatgctgtcatcaatgctgagaactcgagcttgaagaccatgaacactgaccagctgcttgatctgttcacatcaacccctgcttcaagaaaagcaagcgacgagcagagtaagaggaaatctggtggcaaaggcttgaagtccattcttaatggtctggatgagctttgggatcagtcgcagtatgccgatgagtatgatctgaaccagttcctggcgaagctgaacggctgagccaccaccggctggctcgtgtacagtgtataaagcaatttggggcaggttaattttgttgttgctgttgtttgatagaggaaggaaaagattagatgctaacagatataggtggtggttggggttacgatctcaatttttttggtttccatcttcctcaatttttgttttgaggagttgtatatactctgctcacctataatcaaagctgcagctcttatcagaatttcccttgattggtcatggtgactgttccatgtactttgttctgccgcggccgtagctatatggactgctgcagctgcaattcatagaaacaaaatacttcatagaaacaaaatattgtagaagccgcatttggattaaagacgcggcaagtcgcagcgaacctggaaaggtgaatgctgatatgcttg

SEQ ID NO: 63877 - DNA, 6686 bp, Zea Mays
tcgattccgatgctccgaagacgtgcctcgagcctcgtggcgctagctggtgtgcacttctattacattacatgcatgtggagtaatttacctacggcagattgctgactaaaggcgctgaagtaaaccttccctcagtatacttcctcggatgtcacgtctgcccctctgcgtcatttatggctcagaactcgtcccgtcttcaccgcctcctcacattactagacactggttcgacacaagcaacgaggtttgcggctgcacgccaaattggagaaatcgccaagtcccacccccaggagctgaattcgttgctaaaaaaggtttctcaatatattcgtagtaaaaattgggacacgagggttgcggcagcccatgcgattggtgccatagcagagaatgtcaaacacacatcattgaaggacttgtatgcttccgtgcaagcagaaaaacatgcttccggtttctctgatggaagtgatgatgctggctcagcattgccacggactgatagtgcagcaacatctgatcttgcttttggaagctttgacataggcagggtattggaatttggatctcctctattggcatcaggtggacaggaatacgacattgctgatagtggcaagaatccagcagagcgtctagctcgccaaaagaaaaatctccggcgtcgtttaggactggatttatgtgagcagtttatggatgttaatgacgttatcaaagacgaggatcttcttgcccaaaaaaattattggggttcacatgtacagaataatggattccattcatttaattcaggtcataatattcagcagttggtttctaccatggtccccaggtatcccaagcattctaattttcgctctagacgattaagtgccagggagttaaatatgctgaagcgtaaagcaaagagtaatgcaaaagatcatacaaaggctgtatctgaggatgatgaggttacactgaaaggatctgtgccctccaatggagcttcttctgaacaaggtgtatttgatacagctgtcgaagaagacaatctggagtacaatgagaacggaagatggccttttcaacaatttgtggatcagcttattcatgatatgtttgatcctatttgggaagttcgccatggcaccattatggctttaagggaaattttgacacatcatggtgcttgtgctggagtatattttcctgatctgagcttgccttcctctgacttggatggtaaaaccaactttgactcccttaaaagggaacatggtatcgatctaaacgaagatgtccatttggaacaccttgaaccagcattaaagaagcataagaaagagccaaaatgtgctgaaagtatgatggattgtgataaggagttggttgacagtgattatctaaaaacggaaggagatctgagcaatgtgcctgatgtattaactgccgaaccaaattctactcatgtaaaagttgagcctgagttctgtgttgatgattcagctgacccctctaaaggcgtttcgacatgtaaatcacagaaaaaactcaactccatatcacatctgagttctcatattcttgctccagaaagttcaaaattcatgaaactgatgaaactagccaaatactcatatatgaagaattgggaatttcttcaggattgtgcaatccgcttcctttgtgtgctttcactggaccgctttggtgattatgtatccgatcaagttgtcgccccagttcgtgaaacttgtgctcaagctcttggtgctgtgctgaagtacatgcacccttctttagtatgtcatacattcaaaatcttgctgcagatgcagacaagagtgggaagttcgtcatgggagccttcttggcattaaatacttagttgctgttcgccaggaaatgcttaaagatttgcttgactatatcattcatgcttgtaaagctggtctggaggaccctgatgatgatgtccgagcagtggctgcagaagccctgattccagctgccgactctttagttaggctaaatgaccaaattttgcatccaattgtggtgttgctttgggatatactgcttgaccttgacgatttaagcccatctacaagcagtgtaatgaacttgttagcagaaatatattctcaaccagagatggtcccaaagatgcttggcacagcagcttcaggggaaaagggagaatttgatctaaacgaagcaactcagattgctgagcaagaagacgaactaacatctattgaaaacccttacggtctagctacactgacaccccggctgtggccctttatgagacatagtattacttctgttcggcgttccgccatacgaacactggagaagcttcttgaggttggcaacactaggagttctgctggaacaaccccatctaaactctggccaacatcaatattaggtgatgcactgcaggttgtatttcagaacctacttttggagtcaaatgatgatattcttcagtcttctgaaagggcttggaaacttctacttcagtgccctgagaaggaccttgaatatgctgcaaggttatattttagtaattgggtacaacttgctaccactccatttggctcagcattggattctacaaaaatgtttttaccagttgcccttccacgaggaaatcgttcgagagctgctgcaaagattagatctgctaggctagaacatgagtacacaacaatgatctcgtttggttctacaggggaaagtatttcacatgaaaagcattcggacgttccctctattttttcgaatataattgttggctctgatcctgacaaatctgttactcatacacgggttcttacgtcaatggcccttgggctttttgcctctaagttgcccgtaagctcatggcaagtggttttaagtccactagcaaatcacctcatgtctctctcaggagtccagagacaagtggcttcaatgatcatcgtttcttggttcaaagatctgagaggcagagatcctgtatcagtgggtacattgctagcttttctatcttccttgaaagagtggctggtggacttattgacttgctctgatccagcattacccacaaaaggttctgtgcttccatattctgaactttcaaggacatacacgaagatgcgcaatgaagccaataatttgctccacttaatcgattcatgtgctgctttcaaagattatagtagcagcttaaaccttaacactgacgtgctgactgttgatgatgctatcaactttgcatcaaagcttttgttaccatctgaatctgatattccttcagaaactgagaacattttcttgaataacatagaatcagcaaaacaaggcctattgtctacatcaggttacttgaaatgtgttcagaataatttgcatgtgacagtctgttctttggtggcttctgctgtagtttggatgtcatgtttgcccagcaagttgaaccctgttattttacctttaatggctgccattaaaagagaacaggaggaagtacttcaagataaagctgctgatgcacttgctgagcttatatttagctgcattggccgcaagcctggccccaatgacaagctaaccaagaatctctgcactctaacatgcactgatgctagtgagacacctcaagctgcaataatcaactcaatgcaggttattgaggaccagaatttgctatcgattggaaagcgttttagcagtcatagatccaggggccatacaacgtctggtggcgatgaaaggtcaaaaatggagggttttataagccggcgtggatcagagttggctttcaagcatctctgtgtgaaatttggaccttcattgtttgaaaaccttcccaagttatgggattgccttactgagtttcttagacctgtaaaaacagaagatggtattccggaagatgatgcaagtattgcacagctgggcagatcgtatgaggataaggacccacagtcactcattaataatatccaggtcgttcgttccatttcacctcacttggctgagcccttaaggcctcaactgctaaatctccttccctctattcttgggtgtgttcgtcatcctcatgtggctgttagactagctgctgcaagatgcatcacatctatggcaaagtcattgaccgatgatgtgatggtactggtgatagaaaatgtcatcccaatgttgtccgatttatcttctgtctgtgcaagacaaggagctgggattctgttaagccttcttgttcagggtttggctgtggagttggttccttatgctcctttccttgtcgttcctcttctgaagtgtatgagtgacccagatggttctgttaggcagactgtgactcacagttttgctgctcttgttcctttgctgccattatcaaggggtgcttctttaccatgtggactaagtgaacgcttatctagcagtgctgaagatgtgcaatttctggaacagctccttgacaatacccaaattgatgatttcaagcttaatattgatcttaatgttgaactacgaaggtatcagcaagaagggatcaactggcttgcattcctccgtcggtttaagttacatggaattttatgtgatgacatggggctcggtaagacgctccaagcatctgctattgtagcaagtgacattgcagaagcacgtgcacggaatgatgaaaaaattctgacatctttgattatctgcccttctacattagtggcccactgggaatatgaaatagagaagtacatagacagctctatcttgaaacctcttcagtacgttggttcttctcaggacagagtgacactccgtagtcagtttgataaggttaatgttatcataacatcatatgatattatacggaaggatattgattttcttggaaatatcacttggaactattgtgttctggatgaagggcatataataaaaaactcaaggtctaaaataacgtttgctgtgaaacagctgaaagcgcaacaccgtcttatcttgagtggcacacctattcagaataatgtgttggagttatggtctttatttgacttccttatgcctgggtttcttggaacagaaaaacaattccaagctgcatatggaaaacccttgctagctgccaaagattctaaatgttcagcaaaggatgctgaagctggtattcttgcaatggaggcactgcataagcaggtcatgccgtttctactgagaagaacaaaggatgaagttttatctgatcttccagagaagataatccaggatagatattgtgatctcagtctattgcagctcaaactttatgacaaattttccagctccaatgcaaaagacgagatttcaactatagtaaaagcaaatgaactggaggaatctgcacctcaaccaaaggcaactcggcatgtgtttcaggcattgcagtacctattaaaactatgcagccatcccttgcttgtaactggggagaaccccccaaatcatcttgtggatcttctgaatgaaataggtctgggatctggcagtgagcttcatgagcttcaccactcacctaagcttgttgctcttcaagaaatacttcaagaatgtggtatagggtcagaaatatctagtcctgatgcttctacagctgttgggcaacacagagttttgatttttgctcagcataaggcttttcttgacatcatagagaaggacctgtttcaatctcatatgagaagtgtcacatatttgcggctggatggctctgttgatccagagaagagatttgaaatcgttaaagcattcaattcagacccaaccattgatgtacttctgctaacaacccatgtcggtgggcttggcttgaacttgacatctgccgacacattggtgttcgtggaacatgattggaacccaatgaaggaccttcaggctatggacagagcacatcgattgggtcaaaggaaagtggtgaatgttcaccgtctcatcatgcgtggcacccttgaggagaaggtgatgtctctccagaggttcaaggtgtcagtcgccaatgctgtcatcaatgctgagaactcgagcttgaagaccatgaacactgaccagctgcttgatctgttcacatcaacccctgcttcaagaaaagcaagcgacgagcagagtaagaggaaatctggtggcaaaggcttgaagtccattcttaatggtctggatgagctttgggatcagtcgcagtatgccgatgagtatgatctgaaccagttcctggcgaagctgaacggctgagccaccaccggctggctcgtgtacagtgtataaagcaatttggggcaggttaattttgttgttgctgttgtttgatagaggaaggaaaagattagatgctaacagatataggtggtggttggggttacgatctcaatttttttggtttccatcttcctcaatttttgttttgaggagttgtatatactctgctcacctataatcaaagctgcagctcttatcagaatttcccttgattggtcatggtgactgttccatgtactttgttctgccgcggccgtagctatatggactgctgcagctgcaattcatagaaacaaaatacttcatagaaacaaaatattgtagaagccgcatttggattaaagacgcggcaagtcgcagcgaacctggaaaggtgaatgctgatatgcttg

SEQ ID NO: 63878 - DNA, 6934 bp, Zea Mays
cgcctcccgcgatccccttctcccgccgctcgtcgcccgcctctttcctccccgctccccgcagcggaccgtttcgatttcgattccgatgctccgaagacgtgcctcgagcctcgtggcgctgtaggatctcatgcccgaattattcagttaccttccagctctatacacctcctccgcctagcccgcctgccccgtgcatgtcggttccgtccgcttaccacctgttgacgggagggatttatccgtttcgttatcgcgcgccatgctacagctggtgtgcacttctattacattacatgcatgtggagtaatttacctacggcagattgctgactaaaggcgctgaagtaaaccttccctcagtatacttcctcggatgtcacgtctgcccctctgcgtcatttatggctcagaactcgtcccgtcttcaccgcctcctcacattactagacactggttcgacacaagcaacgaggtttgcggctgcacgccaaattggagaaatcgccaagtcccacccccaggagctgaattcgttgctaaaaaaggtttctcaatatattcgtagtaaaaattgggacacgagggttgcggcagcccatgcgattggtgccatagcagagaatgtcaaacacacatcattgaaggacttgtatgcttccgtgcaagcagaaaaacatgcttccggtttctctgatggaagtgatgatgctggctcagcattgccacggactgatagtgcagcaacatctgatcttgcttttggaagctttgacataggcagggtattggaatttggatctcctctattggcatcaggtggacaggaatacgacattgctgatagtggcaagaatccagcagagcgtctagctcgccaaaagaaaaatctccggcgtcgtttaggactggatttatgtgagcagtttatggatgttaatgacgttatcaaagacgaggatcttcttgcccaaaaaaattattggggttcacatgtacagaataatggattccattcatttaattcaggtcataatattcagcagttggtttctaccatggtccccaggtatcccaagcattctaattttcgctctagacgattaagtgccagggagttaaatatgctgaagcgtaaagcaaagagtaatgcaaaagatcatacaaaggctgtatctgaggatgatgaggttacactgaaaggatctgtgccctccaatggagcttcttctgaacaagctggtgcacaaaatggtgtatttgatacagctgtcgaagaagacaatctggagtacaatgagaacggaagatggccttttcaacaatttgtggatcagcttattcatgatatgtttgatcctatttgggaagttcgccatggcaccattatggctttaagggaaattttgacacatcatggtgcttgtgctggagtatattttcctgatctgagcttgccttcctctgacttggatggtaaaaccaactttgactcccttaaaagggaacatggtatcgatctaaacgaagatgtccatttggaacaccttgaaccagcattaaagaagcataagaaagagccaaaatgtgctgaaagtatgatggattgtgataaggagttggttgacagtgattatctaaaaacggaaggagatctgagcaatgtgcctgatgtattaactgccgaaccaaattctactcatgtaaaagttgagcctgagttctgtgttgatgattcagctgacccctctaaaggcgtttcgacatgtaaatcacagaaaaaactcaactccatatcacatctgagttctcatattcttgctccagaaagttcaaaattcatgaaactgatgaaactagccaaatactcatatatgaagaattgggaatttcttcaggattgtgcaatccgcttcctttgtgtgctttcactggaccgctttggtgattatgtatccgatcaagttgtcgccccagttcgtgaaacttgtgctcaagctcttggtgctgtgctgaagtacatgcacccttctttagtatgtcatacattcaaaatcttgctgcagatgcagcacagacaagagtgggaagttcgtcatgggagccttcttggcattaaatacttagttgctgttcgccaggaaatgcttaaagatttgcttgactatatcattcatgcttgtaaagctggtctggaggaccctgatgatgatgtccgagcagtggctgcagaagccctgattccagctgccgactctttagttaggctaaatgaccaaattttgcatccaattgtggtgttgctttgggatatactgcttgaccttgacgatttaagcccatctacaagcagtgtaatgaacttgttagcagaaatatattctcaaccagagatggtcccaaagatgcttggcacagcagcttcaggggaaaagggagaatttgatctaaacgaagcaactcagattgctgagcaagaagacgaactaacatctattgaaaacccttacggtctagctacactgacaccccggctgtggccctttatgagacatagtattacttctgttcggcgttccgccatacgaacactggagaagcttcttgaggttggcaacactaggagttctgctggaacaaccccatctaaactctggccaacatcaatattaggtgatgcactgcaggttgtatttcagaacctacttttggagtcaaatgatgatattcttcagtcttctgaaagggcttggaaacttctacttcagtgccctgagaaggaccttgaatatgctgcaaggttatattttagtaattgggtacaacttgctaccactccatttggctcagcattggattctacaaaaatgtttttaccagttgcccttccacgaggaaatcgttcgagagctgctgcaaagattagatctgctaggctagaacatgagtacacaacaatgatctcgtttggttctacaggggaaagtatttcacatgaaaagcattcggacgttccctctattttttcgaatataattgttggctctgatcctgacaaatctgttactcatacacgggttcttacgtcaatggcccttgggctttttgcctctaagttgcccgtaagctcatggcaagtggttttaagtccactagcaaatcacctcatgtctctctcaggagtccagagacaagtggcttcaatgatcatcgtttcttggttcaaagatctgagaggcagagatcctgtatcagtgggtacattgctagcttttctatcttccttgaaagagtggctggtggacttattgacttgctctgatccagcattacccacaaaaggttctgtgcttccatattctgaactttcaaggacatacacgaagatgcgcaatgaagccaataatttgctccacttaatcgattcatgtgctgctttcaaagattatagtagcagcttaaaccttaacactgacgtgctgactgttgatgatgctatcaactttgcatcaaagcttttgttaccatctgaatctgatattccttcagaaactgagaacattttcttgaataacatagaatcagcaaaacaaggcctattgtctacatcaggttacttgaaatgtgttcagaataatttgcatgtgacagtctgttctttggtggcttctgctgtagtttggatgtcatgtttgcccagcaagttgaaccctgttattttacctttaatggctgccattaaaagagaacaggaggaagtacttcaagataaagctgctgatgcacttgctgagcttatatttagctgcattggccgcaagcctggccccaatgacaagctaaccaagaatctctgcactctaacatgcactgatgctagtgagacacctcaagctgcaataatcaactcaatgcaggttattgaggaccagaatttgctatcgattggaaagcgttttagcagtcatagatccaggggccatacaacgtctggtggcgatgaaaggtcaaaaatggagggttttataagccggcgtggatcagagttggctttcaagcatctctgtgtgaaatttggaccttcattgtttgaaaaccttcccaagttatgggattgccttactgagtttcttagacctgtaaaaacagaagatggtattccggaagatgatgcaagtattgcacagctgggcagatcgtatgaggataaggacccacagtcactcattaataatatccaggtcgttcgttccatttcacctcacttggctgagcccttaaggcctcaactgctaaatctccttccctctattcttgggtgtgttcgtcatcctcatgtggctgttagactagctgctgcaagatgcatcacatctatggcaaagtcattgaccgatgatgtgatggtactggtgatagaaaatgtcatcccaatgttgtccgatttatcttctgtctgtgcaagacaaggagctgggattctgttaagccttcttgttcagggtttggctgtggagttggttccttatgctcctttccttgtcgttcctcttctgaagtgtatgagtgacccagatggttctgttaggcagactgtgactcacagttttgctgctcttgttcctttgctgccattatcaaggggtgcttctttaccatgtggactaagtgaacgcttatctagcagtgctgaagatgtgcaatttctggaacagctccttgacaatacccaaattgatgatttcaagcttaatattgatcttaatgttgaactacgaaggtatcagcaagaagggatcaactggcttgcattcctccgtcggtttaagttacatggaattttatgtgatgacatggggctcggtaagacgctccaagcatctgctattgtagcaagtgacattgcagaagcacgtgcacggaatgatgaaaaaattctgacatctttgattatctgcccttctacattagtggcccactgggaatatgaaatagagaagtacatagacagctctatcttgaaacctcttcagtacgttggttcttctcaggacagagtgacactccgtagtcagtttgataaggttaatgttatcataacatcatatgatattatacggaaggatattgattttcttggaaatatcacttggaactattgtgttctggatgaagggcatataataaaaaactcaaggtctaaaataacgtttgctgtgaaacagctgaaagcgcaacaccgtcttatcttgagtggcacacctattcagaataatgtgttggagttatggtctttatttgacttccttatgcctgggtttcttggaacagaaaaacaattccaagctgcatatggaaaacccttgctagctgccaaagattctaaatgttcagcaaaggatgctgaagctggtattcttgcaatggaggcactgcataagcaggtcatgccgtttctactgagaagaacaaaggatgaagttttatctgatcttccagagaagataatccaggatagatattgtgatctcagtctattgcagctcaaactttatgacaaattttccagctccaatgcaaaagacgagatttcaactatagtaaaagcaaatgaactggaggaatctgcacctcaaccaaaggcaactcggcatgtgtttcaggcattgcagtacctattaaaactatgcagccatcccttgcttgtaactggggagaaccccccaaatcatcttgtggatcttctgaatgaaataggtctgggatctggcagtgagcttcatgagcttcaccactcacctaagcttgttgctcttcaagaaatacttcaagaatgtggtatagggtcagaaatatctagtcctgatgcttctacagctgttgggcaacacagagttttgatttttgctcagcataaggcttttcttgacatcatagagaaggacctgtttcaatctcatatgagaagtgtcacatatttgcggctggatggctctgttgatccagagaagagatttgaaatcgttaaagcattcaattcagacccaaccattgatgtacttctgctaacaacccatgtcggtgggcttggcttgaacttgacatctgccgacacattggtgttcgtggaacatgattggaacccaatgaaggaccttcaggctatggacagagcacatcgattgggtcaaaggaaagtggtgaatgttcaccgtctcatcatgcgtggcacccttgaggagaaggtgatgtctctccagaggttcaaggtgtcagtcgccaatgctgtcatcaatgctgagaactcgagcttgaagaccatgaacactgaccagctgcttgatctgttcacatcaacccctgcttcaagaaaagcaagcgacgagcagagtaagaggaaatctggtggcaaaggcttgaagtccattcttaatggtctggatgagctttgggatcagtcgcagtatgccgatgagtatgatctgaaccagttcctggcgaagctgaacggctgagccaccaccggctggctcgtgtacagtgtataaagcaatttggggcaggttaattttgttgttgctgttgtttgatagaggaaggaaaagattagatgctaacagatataggtggtggttggggttacgatctcaatttttttggtttccatcttcctcaatttttgttttgaggagttgtatatactctgctcacctataatcaaagctgcagctcttatcagaatttcccttgattggtcatggtgactgttccatgtactttgttctgccgcggccgtagctatatggactgctgcagctgcaattcatagaaacaaaatacttcatagaaacaaaatattgtagaagccgcatttggattaaagacgcggcaagtcgcagcgaacctggaaaggtgaatgctgatatgcttg

SEQ ID NO: 63879 - DNA, 6724 bp, Zea Mays
ctccgcccccagtccgcctcccgcgatccccttctcccgccgctcgtcgcccgcctctttcctccccgctccccgcagagctggtgtgcacttctattacattacatgcatgtggagtaatttacctacggcagattgctgactaaaggcgctgaagtaaaccttccctcagtatacttcctcggatgtcacgtctgcccctctgcgtcatttatggctcagaactcgtcccgtcttcaccgcctcctcacattactagacactggttcgacacaagcaacgaggtttgcggctgcacgccaaattggagaaatcgccaagtcccacccccaggagctgaattcgttgctaaaaaaggtttctcaatatattcgtagtaaaaattgggacacgagggttgcggcagcccatgcgattggtgccatagcagagaatgtcaaacacacatcattgaaggacttgtatgcttccgtgcaagcagaaaaacatgcttccggtttctctgatggaagtgatgatgctggctcagcattgccacggactgatagtgcagcaacatctgatcttgcttttggaagctttgacataggcagggtattggaatttggatctcctctattggcatcaggtggacaggaatacgacattgctgatagtggcaagaatccagcagagcgtctagctcgccaaaagaaaaatctccggcgtcgtttaggactggatttatgtgagcagtttatggatgttaatgacgttatcaaagacgaggatcttcttgcccaaaaaaattattggggttcacatgtacagaataatggattccattcatttaattcaggtcataatattcagcagttggtttctaccatggtccccaggtatcccaagcattctaattttcgctctagacgattaagtgccagggagttaaatatgctgaagcgtaaagcaaagagtaatgcaaaagatcatacaaaggctgtatctgaggatgatgaggttacactgaaaggatctgtgccctccaatggagcttcttctgaacaagctggtgcacaaaatctgtcgaagaagacaatctggagtacaatgagaacggaagatggccttttcaacaatttgtggatcagcttattcatgatatgtttgatcctatttgggaagttcgccatggcaccattatggctttaagggaaattttgacacatcatggtgcttgtgctggagtatattttcctgatctgagcttgccttcctctgacttggatggtaaaaccaactttgactcccttaaaagggaacatggtatcgatctaaacgaagatgtccatttggaacaccttgaaccagcattaaagaagcataagaaagagccaaaatgtgctgaaagtatgatggattgtgataaggagttggttgacagtgattatctaaaaacggaaggagatctgagcaatgtgcctgatgtattaactgccgaaccaaattctactcatgtaaaagttgagcctgagttctgtgttgatgattcagctgacccctctaaaggcgtttcgacatgtaaatcacagaaaaaactcaactccatatcacatctgagttctcatattcttgctccagaaagttcaaaattcatgaaactgatgaaactagccaaatactcatatatgaagaattgggaatttcttcaggattgtgcaatccgcttcctttgtgtgctttcactggaccgctttggtgattatgtatccgatcaagttgtcgccccagttcgtgaaacttgtgctcaagctcttggtgctgtgctgaagtacatgcacccttctttagtatgtcatacattcaaaatcttgctgcagatgcagcacagacaagagtgggaagttcgtcatgggagccttcttggcattaaatacttagttgctgttcgccaggaaatgcttaaagatttgcttgactatatcattcatgcttgtaaagctggtctggaggaccctgatgatgatgtccgagcagtggctgcagaagccctgattccagctgccgactctttagttaggctaaatgaccaaattttgcatccaattgtggtgttgctttgggatatactgcttgaccttgacgatttaagcccatctacaagcagtgtaatgaacttgttagcagaaatatattctcaaccagagatggtcccaaagatgcttggcacagcagcttcaggggaaaagggagaatttgatctaaacgaagcaactcagattgctgagcaagaagacgaactaacatctattgaaaacccttacggtctagctacactgacaccccggctgtggccctttatgagacatagtattacttctgttcggcgttccgccatacgaacactggagaagcttcttgaggttggcaacactaggagttctgctggaacaaccccatctaaactctggccaacatcaatattaggtgatgcactgcaggttgtatttcagaacctacttttggagtcaaatgatgatattcttcagtcttctgaaagggcttggaaacttctacttcagtgccctgagaaggaccttgaatatgctgcaaggttatattttagtaattgggtacaacttgctaccactccatttggctcagcattggattctacaaaaatgtttttaccagttgcccttccacgaggaaatcgttcgagagctgctgcaaagattagatctgctaggctagaacatgagtacacaacaatgatctcgtttggttctacaggggaaagtatttcacatgaaaagcattcggacgttccctctattttttcgaatataattgttggctctgatcctgacaaatctgttactcatacacgggttcttacgtcaatggcccttgggctttttgcctctaagttgcccgtaagctcatggcaagtggttttaagtccactagcaaatcacctcatgtctctctcaggagtccagagacaagtggcttcaatgatcatcgtttcttggttcaaagatctgagaggcagagatcctgtatcagtgggtacattgctagcttttctatcttccttgaaagagtggctggtggacttattgacttgctctgatccagcattacccacaaaaggttctgtgcttccatattctgaactttcaaggacatacacgaagatgcgcaatgaagccaataatttgctccacttaatcgattcatgtgctgctttcaaagattatagtagcagcttaaaccttaacactgacgtgctgactgttgatgatgctatcaactttgcatcaaagcttttgttaccatctgaatctgatattccttcagaaactgagaacattttcttgaataacatagaatcagcaaaacaaggcctattgtctacatcaggttacttgaaatgtgttcagaataatttgcatgtgacagtctgttctttggtggcttctgctgtagtttggatgtcatgtttgcccagcaagttgaaccctgttattttacctttaatggctgccattaaaagagaacaggaggaagtacttcaagataaagctgctgatgcacttgctgagcttatatttagctgcattggccgcaagcctggccccaatgacaagctaaccaagaatctctgcactctaacatgcactgatgctagtgagacacctcaagctgcaataatcaactcaatgcaggttattgaggaccagaatttgctatcgattggaaagcgttttagcagtcatagatccaggggccatacaacgtctggtggcgatgaaaggtcaaaaatggagggttttataagccggcgtggatcagagttggctttcaagcatctctgtgtgaaatttggaccttcattgtttgaaaaccttcccaagttatgggattgccttactgagtttcttagacctgtaaaaacagaagatggtattccggaagatgatgcaagtattgcacagctgggcagatcgtatgaggataaggacccacagtcactcattaataatatccaggtcgttcgttccatttcacctcacttggctgagcccttaaggcctcaactgctaaatctccttccctctattcttgggtgtgttcgtcatcctcatgtggctgttagactagctgctgcaagatgcatcacatctatggcaaagtcattgaccgatgatgtgatggtactggtgatagaaaatgtcatcccaatgttgtccgatttatcttctgtctgtgcaagacaaggagctgggattctgttaagccttcttgttcagggtttggctgtggagttggttccttatgctcctttccttgtcgttcctcttctgaagtgtatgagtgacccagatggttctgttaggcagactgtgactcacagttttgctgctcttgttcctttgctgccattatcaaggggtgcttctttaccatgtggactaagtgaacgcttatctagcagtgctgaagatgtgcaatttctggaacagctccttgacaatacccaaattgatgatttcaagcttaatattgatcttaatgttgaactacgaaggtatcagcaagaagggatcaactggcttgcattcctccgtcggtttaagttacatggaattttatgtgatgacatggggctcggtaagacgctccaagcatctgctattgtagcaagtgacattgcagaagcacgtgcacggaatgatgaaaaaattctgacatctttgattatctgcccttctacattagtggcccactgggaatatgaaatagagaagtacatagacagctctatcttgaaacctcttcagtacgttggttcttctcaggacagagtgacactccgtagtcagtttgataaggttaatgttatcataacatcatatgatattatacggaaggatattgattttcttggaaatatcacttggaactattgtgttctggatgaagggcatataataaaaaactcaaggtctaaaataacgtttgctgtgaaacagctgaaagcgcaacaccgtcttatcttgagtggcacacctattcagaataatgtgttggagttatggtctttatttgacttccttatgcctgggtttcttggaacagaaaaacaattccaagctgcatatggaaaacccttgctagctgccaaagattctaaatgttcagcaaaggatgctgaagctggtattcttgcaatggaggcactgcataagcaggtcatgccgtttctactgagaagaacaaaggatgaagttttatctgatcttccagagaagataatccaggatagatattgtgatctcagtctattgcagctcaaactttatgacaaattttccagctccaatgcaaaagacgagatttcaactatagtaaaagcaaatgaactggaggaatctgcacctcaaccaaaggcaactcggcatgtgtttcaggcattgcagtacctattaaaactatgcagccatcccttgcttgtaactggggagaaccccccaaatcatcttgtggatcttctgaatgaaataggtctgggatctggcagtgagcttcatgagcttcaccactcacctaagcttgttgctcttcaagaaatacttcaagaatgtggtatagggtcagaaatatctagtcctgatgcttctacagctgttgggcaacacagagttttgatttttgctcagcataaggcttttcttgacatcatagagaaggacctgtttcaatctcatatgagaagtgtcacatatttgcggctggatggctctgttgatccagagaagagatttgaaatcgttaaagcattcaattcagacccaaccattgatgtacttctgctaacaacccatgtcggtgggcttggcttgaacttgacatctgccgacacattggtgttcgtggaacatgattggaacccaatgaaggaccttcaggctatggacagagcacatcgattgggtcaaaggaaagtggtgaatgttcaccgtctcatcatgcgtggcacccttgaggagaaggtgatgtctctccagaggttcaaggtgtcagtcgccaatgctgtcatcaatgctgagaactcgagcttgaagaccatgaacactgaccagctgcttgatctgttcacatcaacccctgcttcaagaaaagcaagcgacgagcagagtaagaggaaatctggtggcaaaggcttgaagtccattcttaatggtctggatgagctttgggatcagtcgcagtatgccgatgagtatgatctgaaccagttcctggcgaagctgaacggctgagccaccaccggctggctcgtgtacagtgtataaagcaatttggggcaggttaattttgttgttgctgttgtttgatagaggaaggaaaagattagatgctaacagatataggtggtggttggggttacgatctcaatttttttggtttccatcttcctcaatttttgttttgaggagttgtatatactctgctcacctataatcaaagctgcagctcttatcagaatttcccttgattggtcatggtgactgttccatgtactttgttctgccgcggccgtagctatatggactgctgcagctgcaattcatagaaacaaaatacttcatagaaacaaaatattgtagaagccgcatttggattaaagacgcggcaagtcgcagcgaacctggaaaggtgaatgctgatatgcttg

SEQ ID NO: 63880 - DNA, 6717 bp, Zea Mays
cgcgagggctcgcccctccgcccccagtccgcctcccgcgatccccttctcccgccgctcgtcgcccgcctctttcctccccgctccccgcagagctggtgtgcacttctattacattacatgcatgtggagtaatttacctacggcagattgctgactaaaggcgctgaagtaaaccttccctcagtatacttcctcggatgtcacgtctgcccctctgcgtcatttatggctcagaactcgtcccgtcttcaccgcctcctcacattactagacactggttcgacacaagcaacgaggtttgcggctgcacgccaaattggagaaatcgccaagtcccacccccaggagctgaattcgttgctaaaaaaggtttctcaatatattcgtagtaaaaattgggacacgagggttgcggcagcccatgcgattggtgccatagcagagaatgtcaaacacacatcattgaaggacttgtatgcttccgtgcaagcagaaaaacatgcttccggtttctctgatggaagtgatgatgctggctcagcattgccacggactgatagtgcagcaacatctgatcttgcttttggaagctttgacataggcagggtattggaatttggatctcctctattggcatcaggtggacaggaatacgacattgctgatagtggcaagaatccagcagagcgtctagctcgccaaaagaaaaatctccggcgtcgtttaggactggatttatgtgagcagtttatggatgttaatgacgttatcaaagacgaggatcttcttgcccaaaaaaattattggggttcacatgtacagaataatggattccattcatttaattcaggtcataatattcagcagttggtttctaccatggtccccaggtatcccaagcattctaattttcgctctagacgattaagtgccagggagttaaatatgctgaagcgtaaagcaaagagtaatgcaaaagatcatacaaaggctgtatctgaggatgatgaggttacactgaaaggatctgtgccctccaatggagcttcttctgaacaaggtgtatttgatacagctgtcgaagaagacaatctggagtacaatgagaacggaagatggccttttcaacaatttgtggatcagcttattcatgatatgtttgatcctatttgggaagttcgccatggcaccattatggctttaagggaaattttgacacatcatggtgcttgtgctggagtatattttcctgatctgagcttgccttcctctgacttggatggtaaaaccaactttgactcccttaaaagggaacatggtatcgatctaaacgaagatgtccatttggaacaccttgaaccagcattaaagaagcataagaaagagccaaaatgtgctgaaagtatgatggattgtgataaggagttggttgacagtgattatctaaaaacggaaggagatctgagcaatgtgcctgatgtattaactgccgaaccaaattctactcatgtaaaagttgagcctgagttctgtgttgatgattcagctgacccctctaaaggcgtttcgacatgtaaatcacagaaaaaactcaactccatatcacatctgagttctcatattcttgctccagaaagttcaaaattcatgaaactgatgaaactagccaaatactcatatatgaagaattgggaatttcttcaggattgtgcaatccgcttcctttgtgtgctttcactggaccgctttggtgattatgtatccgatcaagttgtcgccccagttcgtgaaacttgtgctcaagctcttggtgctgtgctgaagtacatgcacccttctttagtatgtcatacattcaaaatcttgctgcagatgcagcacagacaagagtgggaagttcgtcatgggagccttcttggcattaaatacttagttgctgttcgccaggaaatgcttaaagatttgcttgactatatcattcatgcttgtaaagctggtctggaggaccctgatgatgatgtccgagcagtggctgcagaagccctgattccagctgccgactctttagttaggctaaatgaccaaattttgcatccaattgtggtgttgctttgggatatactgcttgaccttgacgatttaagcccatctacaagcagtgtaatgaacttgttagcagaaatatattctcaaccagagatggtcccaaagatgcttggcacagcagcttcaggggaaaagggagaatttgatctaaacgaagcaactcagattgctgagcaagaagacgaactaacatctattgaaaacccttacggtctagctacactgacaccccggctgtggccctttatgagacatagtattacttctgttcggcgttccgccatacgaacactggagaagcttcttgaggttggcaacactaggagttctgctggaacaaccccatctaaactctggccaacatcaatattaggtgatgcactgcaggttgtatttcagaacctacttttggagtcaaatgatgatattcttcagtcttctgaaagggcttggaaacttctacttcagtgccctgagaaggaccttgaatatgctgcaaggttatattttagtaattgggtacaacttgctaccactccatttggctcagcattggattctacaaaaatgtttttaccagttgcccttccacgaggaaatcgttcgagagctgctgcaaagattagatctgctaggctagaacatgagtacacaacaatgatctcgtttggttctacaggggaaagtatttcacatgaaaagcattcggacgttccctctattttttcgaatataattgttggctctgatcctgacaaatctgttactcatacacgggttcttacgtcaatggcccttgggctttttgcctctaagttgcccgtaagctcatggcaagtggttttaagtccactagcaaatcacctcatgtctctctcaggagtccagagacaagtggcttcaatgatcatcgtttcttggttcaaagatctgagaggcagagatcctgtatcagtgggtacattgctagcttttctatcttccttgaaagagtggctggtggacttattgacttgctctgatccagcattacccacaaaaggttctgtgcttccatattctgaactttcaaggacatacacgaagatgcgcaatgaagccaataatttgctccacttaatcgattcatgtgctgctttcaaagattatagtagcagcttaaaccttaacactgacgtgctgactgttgatgatgctatcaactttgcatcaaagcttttgttaccatctgaatctgatattccttcagaaactgagaacattttcttgaataacatagaatcagcaaaacaaggcctattgtctacatcaggttacttgaaatgtgttcagaataatttgcatgtgacagtctgttctttggtggcttctgctgtagtttggatgtcatgtttgcccagcaagttgaaccctgttattttacctttaatggctgccattaaaagagaacaggaggaagtacttcaagataaagctgctgatgcacttgctgagcttatatttagctgcattggccgcaagcctggccccaatgacaagctaaccaagaatctctgcactctaacatgcactgatgctagtgagacacctcaagctgcaataatcaactcaatgcaggttattgaggaccagaatttgctatcgattggaaagcgttttagcagtcatagatccaggggccatacaacgtctggtggcgatgaaaggtcaaaaatggagggttttataagccggcgtggatcagagttggctttcaagcatctctgtgtgaaatttggaccttcattgtttgaaaaccttcccaagttatgggattgccttactgagtttcttagacctgtaaaaacagaagatggtattccggaagatgatgcaagtattgcacagctgggcagatcgtatgaggataaggacccacagtcactcattaataatatccaggtcgttcgttccatttcacctcacttggctgagcccttaaggcctcaactgctaaatctccttccctctattcttgggtgtgttcgtcatcctcatgtggctgttagactagctgctgcaagatgcatcacatctatggcaaagtcattgaccgatgatgtgatggtactggtgatagaaaatgtcatcccaatgttgtccgatttatcttctgtctgtgcaagacaaggagctgggattctgttaagccttcttgttcagggtttggctgtggagttggttccttatgctcctttccttgtcgttcctcttctgaagtgtatgagtgacccagatggttctgttaggcagactgtgactcacagttttgctgctcttgttcctttgctgccattatcaaggggtgcttctttaccatgtggactaagtgaacgcttatctagcagtgctgaagatgtgcaatttctggaacagctccttgacaatacccaaattgatgatttcaagcttaatattgatcttaatgttgaactacgaaggtatcagcaagaagggatcaactggcttgcattcctccgtcggtttaagttacatggaattttatgtgatgacatggggctcggtaagacgctccaagcatctgctattgtagcaagtgacattgcagaagcacgtgcacggaatgatgaaaaaattctgacatctttgattatctgcccttctacattagtggcccactgggaatatgaaatagagaagtacatagacagctctatcttgaaacctcttcagtacgttggttcttctcaggacagagtgacactccgtagtcagtttgataaggttaatgttatcataacatcatatgatattatacggaaggatattgattttcttggaaatatcacttggaactattgtgttctggatgaagggcatataataaaaaactcaaggtctaaaataacgtttgctgtgaaacagctgaaagcgcaacaccgtcttatcttgagtggcacacctattcagaataatgtgttggagttatggtctttatttgacttccttatgcctgggtttcttggaacagaaaaacaattccaagctgcatatggaaaacccttgctagctgccaaagattctaaatgttcagcaaaggatgctgaagctggtattcttgcaatggaggcactgcataagcagaacaaaggatgaagttttatctgatcttccagagaagataatccaggatagatattgtgatctcagtctattgcagctcaaactttatgacaaattttccagctccaatgcaaaagacgagatttcaactatagtaaaagcaaatgaactggaggaatctgcacctcaaccaaaggcaactcggcatgtgtttcaggcattgcagtacctattaaaactatgcagccatcccttgcttgtaactggggagaaccccccaaatcatcttgtggatcttctgaatgaaataggtctgggatctggcagtgagcttcatgagcttcaccactcacctaagcttgttgctcttcaagaaatacttcaagaatgtggtatagggtcagaaatatctagtcctgatgcttctacagctgttgggcaacacagagttttgatttttgctcagcataaggcttttcttgacatcatagagaaggacctgtttcaatctcatatgagaagtgtcacatatttgcggctggatggctctgttgatccagagaagagatttgaaatcgttaaagcattcaattcagacccaaccattgatgtacttctgctaacaacccatgtcggtgggcttggcttgaacttgacatctgccgacacattggtgttcgtggaacatgattggaacccaatgaaggaccttcaggctatggacagagcacatcgattgggtcaaaggaaagtggtgaatgttcaccgtctcatcatgcgtggcacccttgaggagaaggtgatgtctctccagaggttcaaggtgtcagtcgccaatgctgtcatcaatgctgagaactcgagcttgaagaccatgaacactgaccagctgcttgatctgttcacatcaacccctgcttcaagaaaagcaagcgacgagcagagtaagaggaaatctggtggcaaaggcttgaagtccattcttaatggtctggatgagctttgggatcagtcgcagtatgccgatgagtatgatctgaaccagttcctggcgaagctgaacggctgagccaccaccggctggctcgtgtacagtgtataaagcaatttggggcaggttaattttgttgttgctgttgtttgatagaggaaggaaaagattagatgctaacagatataggtggtggttggggttacgatctcaatttttttggtttccatcttcctcaatttttgttttgaggagttgtatatactctgctcacctataatcaaagctgcagctcttatcagaatttcccttgattggtcatggtgactgttccatgtactttgttctgccgcggccgtagctatatggactgctgcagctgcaattcatagaaacaaaatacttcatagaaacaaaatattgtagaagccgcatttggattaaagacgcggcaagtcgcagcgaacctggaaaggtgaatgctgatatgcttg

SEQ ID NO: 63881 - DNA, 6699 bp, Zea Mays
cacgcgcccctccccgcgagggctcgcccctccgcccccagtccgcctcccgcgatccccttctcccgccgctcgtcgcccgcctctttcctccccgctccccgcagagctggtgtgcacttctattacattacatgcatgtggagtaatttacctacggcagattgctgactaaaggcgctgaagtaaaccttccctcagtatacttcctcggatgtcacgtctgcccctctgcgtcatttatggctcagaactcgtcccgtcttcaccgcctcctcacattactagacactggttcgacacaagcaacgaggtttgcggctgcacgccaaattggagaaatcgccaagtcccacccccaggagctgaattcgttgctaaaaaaggtttctcaatatattcgtagtaaaaattgggacacgagggttgcggcagcccatgcgattggtgccatagcagagaatgtcaaacacacatcattgaaggacttgtatgcttccgtgcaagcagaaaaacatgcttccggtttctctgatggaagtgatgatgctggctcagcattgccacggactgatagtgcagcaacatctgatcttgcttttggaagctttgacataggcagggtattggaatttggatctcctctattggcatcaggtggacaggaatacgacattgctgatagtggcaagaatccagcagagcgtctagctcgccaaaagaaaaatctccggcgtcgtttaggactggatttatgtgagcagtttatggatgttaatgacgttatcaaagacgaggatcttcttgcccaaaaaaattattggggttcacatgtacagaataatggattccattcatttaattcagacgattaagtgccagggagttaaatatgctgaagcgtaaagcaaagagtaatgcaaaagatcatacaaaggctgtatctgaggatgatgaggttacactgaaaggatctgtgccctccaatggagcttcttctgaacaagctggtgcacaaaatggtgtatttgatacagctgtcgaagaagacaatctggagtacaatgagaacggaagatggccttttcaacaatttgtggatcagcttattcatgatatgtttgatcctatttgggaagttcgccatggcaccattatggctttaagggaaattttgacacatcatggtgcttgtgctggagtatattttcctgatctgagcttgccttcctctgacttggatggtaaaaccaactttgactcccttaaaagggaacatggtatcgatctaaacgaagatgtccatttggaacaccttgaaccagcattaaagaagcataagaaagagccaaaatgtgctgaaagtatgatggattgtgataaggagttggttgacagtgattatctaaaaacggaaggagatctgagcaatgtgcctgatgtattaactgccgaaccaaattctactcatgtaaaagttgagcctgagttctgtgttgatgattcagctgacccctctaaaggcgtttcgacatgtaaatcacagaaaaaactcaactccatatcacatctgagttctcatattcttgctccagaaagttcaaaattcatgaaactgatgaaactagccaaatactcatatatgaagaattgggaatttcttcaggattgtgcaatccgcttcctttgtgtgctttcactggaccgctttggtgattatgtatccgatcaagttgtcgccccagttcgtgaaacttgtgctcaagctcttggtgctgtgctgaagtacatgcacccttctttagtatgtcatacattcaaaatcttgctgcagatgcagcacagacaagagtgggaagttcgtcatgggagccttcttggcattaaatacttagttgctgttcgccaggaaatgcttaaagatttgcttgactatatcattcatgcttgtaaagctggtctggaggaccctgatgatgatgtccgagcagtggctgcagaagccctgattccagctgccgactctttagttaggctaaatgaccaaattttgcatccaattgtggtgttgctttgggatatactgcttgaccttgacgatttaagcccatctacaagcagtgtaatgaacttgttagcagaaatatattctcaaccagagatggtcccaaagatgcttggcacagcagcttcaggggaaaagggagaatttgatctaaacgaagcaactcagattgctgagcaagaagacgaactaacatctattgaaaacccttacggtctagctacactgacaccccggctgtggccctttatgagacatagtattacttctgttcggcgttccgccatacgaacactggagaagcttcttgaggttggcaacactaggagttctgctggaacaaccccatctaaactctggccaacatcaatattaggtgatgcactgcaggttgtatttcagaacctacttttggagtcaaatgatgatattcttcagtcttctgaaagggcttggaaacttctacttcagtgccctgagaaggaccttgaatatgctgcaaggttatattttagtaattgggtacaacttgctaccactccatttggctcagcattggattctacaaaaatgtttttaccagttgcccttccacgaggaaatcgttcgagagctgctgcaaagattagatctgctaggctagaacatgagtacacaacaatgatctcgtttggttctacaggggaaagtatttcacatgaaaagcattcggacgttccctctattttttcgaatataattgttggctctgatcctgacaaatctgttactcatacacgggttcttacgtcaatggcccttgggctttttgcctctaagttgcccgtaagctcatggcaagtggttttaagtccactagcaaatcacctcatgtctctctcaggagtccagagacaagtggcttcaatgatcatcgtttcttggttcaaagatctgagaggcagagatcctgtatcagtgggtacattgctagcttttctatcttccttgaaagagtggctggtggacttattgacttgctctgatccagcattacccacaaaaggttctgtgcttccatattctgaactttcaaggacatacacgaagatgcgcaatgaagccaataatttgctccacttaatcgattcatgtgctgctttcaaagattatagtagcagcttaaaccttaacactgacgtgctgactgttgatgatgctatcaactttgcatcaaagcttttgttaccatctgaatctgatattccttcagaaactgagaacattttcttgaataacatagaatcagcaaaacaaggcctattgtctacatcaggttacttgaaatgtgttcagaataatttgcatgtgacagtctgttctttggtggcttctgctgtagtttggatgtcatgtttgcccagcaagttgaaccctgttattttacctttaatggctgccattaaaagagaacaggaggaagtacttcaagataaagctgctgatgcacttgctgagcttatatttagctgcattggccgcaagcctggccccaatgacaagctaaccaagaatctctgcactctaacatgcactgatgctagtgagacacctcaagctgcaataatcaactcaatgcaggttattgaggaccagaatttgctatcgattggaaagcgttttagcagtcatagatccaggggccatacaacgtctggtggcgatgaaaggtcaaaaatggagggttttataagccggcgtggatcagagttggctttcaagcatctctgtgtgaaatttggaccttcattgtttgaaaaccttcccaagttatgggattgccttactgagtttcttagacctgtaaaaacagaagatggtattccggaagatgatgcaagtattgcacagctgggcagatcgtatgaggataaggacccacagtcactcattaataatatccaggtcgttcgttccatttcacctcacttggctgagcccttaaggcctcaactgctaaatctccttccctctattcttgggtgtgttcgtcatcctcatgtggctgttagactagctgctgcaagatgcatcacatctatggcaaagtcattgaccgatgatgtgatggtactggtgatagaaaatgtcatcccaatgttgtccgatttatcttctgtctgtgcaagacaaggagctgggattctgttaagccttcttgttcagggtttggctgtggagttggttccttatgctcctttccttgtcgttcctcttctgaagtgtatgagtgacccagatggttctgttaggcagactgtgactcacagttttgctgctcttgttcctttgctgccattatcaaggggtgcttctttaccatgtggactaagtgaacgcttatctagcagtgctgaagatgtgcaatttctggaacagctccttgacaatacccaaattgatgatttcaagcttaatattgatcttaatgttgaactacgaaggtatcagcaagaagggatcaactggcttgcattcctccgtcggtttaagttacatggaattttatgtgatgacatggggctcggtaagacgctccaagcatctgctattgtagcaagtgacattgcagaagcacgtgcacggaatgatgaaaaaattctgacatctttgattatctgcccttctacattagtggcccactgggaatatgaaatagagaagtacatagacagctctatcttgaaacctcttcagtacgttggttcttctcaggacagagtgacactccgtagtcagtttgataaggttaatgttatcataacatcatatgatattatacggaaggatattgattttcttggaaatatcacttggaactattgtgttctggatgaagggcatataataaaaaactcaaggtctaaaataacgtttgctgtgaaacagctgaaagcgcaacaccgtcttatcttgagtggcacacctattcagaataatgtgttggagttatggtctttatttgacttccttatgcctgggtttcttggaacagaaaaacaattccaagctgcatatggaaaacccttgctagctgccaaagattctaaatgttcagcaaaggatgctgaagctggtattcttgcaatggaggcactgcataagcaggtcatgccgtttctactgagaagaacaaaggatgaagttttatctgatcttccagagaagataatccaggatagatattgtgatctcagtctattgcagctcaaactttatgacaaattttccagctccaatgcaaaagacgagatttcaactatagtaaaagcaaatgaactggaggaatctgcacctcaaccaaaggcaactcggcatgtgtttcaggcattgcagtacctattaaaactatgcagccatcccttgcttgtaactggggagaaccccccaaatcatcttgtggatcttctgaatgaaataggtctgggatctggcagtgagcttcatgagcttcaccactcacctaagcttgttgctcttcaagaaatacttcaagaatgtggtatagggtcagaaatatctagtcctgatgcttctacagctgttgggcaacacagagttttgatttttgctcagcataaggcttttcttgacatcatagagaaggacctgtttcaatctcatatgagaagtgtcacatatttgcggctggatggctctgttgatccagagaagagatttgaaatcgttaaagcattcaattcagacccaaccattgatgtacttctgctaacaacccatgtcggtgggcttggcttgaacttgacatctgccgacacattggtgttcgtggaacatgattggaacccaatgaaggaccttcaggctatggacagagcacatcgattgggtcaaaggaaagtggtgaatgttcaccgtctcatcatgcgtggcacccttgaggagaaggtgatgtctctccagaggttcaaggtgtcagtcgccaatgctgtcatcaatgctgagaactcgagcttgaagaccatgaacactgaccagctgcttgatctgttcacatcaacccctgcttcaagaaaagcaagcgacgagcagagtaagaggaaatctggtggcaaaggcttgaagtccattcttaatggtctggatgagctttgggatcagtcgcagtatgccgatgagtatgatctgaaccagttcctggcgaagctgaacggctgagccaccaccggctggctcgtgtacagtgtataaagcaatttggggcaggttaattttgttgttgctgttgtttgatagaggaaggaaaagattagatgctaacagatataggtggtggttggggttacgatctcaatttttttggtttccatcttcctcaatttttgttttgaggagttgtatatactctgctcacctataatcaaagctgcagctcttatcagaatttcccttgattggtcatggtgactgttccatgtactttgttctgccgcggccgtagctatatggactgctgcagctgcaattcatagaaacaaaatacttcatagaaacaaaatattgtagaagccgcatttggattaaagacgcggcaagtcgcagcgaacctggaaaggtgaatgctgatatgcttg

SEQ ID NO: 63882 - DNA, 6913 bp, Zea Mays
cacgaccacaccagcagccaggtgcccggtgccgactcgacccgaccaccacccaggccagccagaagcccgtcccgacccggccgggcgcgcgcgtgcgtgcgttcgggcgcgcgcgttcctgcgcggattgggctcggcctccgctcgtcgccttccggccccacgcgcccctccccgcgagggctcgcccctccgcccccagtccgcctcccgcgatccccttctcccgccgctcgtcgcccgcctctttcctccccgctccccgcagagctggtgtgcacttctattacattacatgcatgtggagtaatttacctacggcagattgctgactaaaggcgctgaagtaaaccttccctcagtatacttcctcggatgtcacgtctgcccctctgcgtcatttatggctcagaactcgtcccgtcttcaccgcctcctcacattactagacactggttcgacacaagcaacgaggtttgcggctgcacgccaaattggagaaatcgccaagtcccacccccaggagctgaattcgttgctaaaaaaggtttctcaatatattcgtagtaaaaattgggacacgagggttgcggcagcccatgcgattggtgccatagcagagaatgtcaaacacacatcattgaaggacttgtatgcttccgtgcaagcagaaaaacatgcttccggtttctctgatggaagtgatgatgctggctcagcattgccacggactgatagtgcagcaacatctgatcttgcttttggaagctttgacataggcagggtattggaatttggatctcctctattggcatcaggtggacaggaatacgacattgctgatagtggcaagaatccagcagagcgtctagctcgccaaaagaaaaatctccggcgtcgtttaggactggatttatgtgagcagtttatggatgttaatgacgttatcaaagacgaggatcttcttgcccaaaaaaattattggggttcacatgtacagaataatggattccattcatttaattcaggtcataatattcagcagttggtttctaccatggtccccaggtatcccaagcattctaattttcgctctagacgattaagtgccagggagttaaatatgctgaagcgtaaagcaaagagtaatgcaaaagatcatacaaaggctgtatctgaggatgatgaggttacactgaaaggatctgtgccctccaatggagcttcttctgaacaaggtgtatttgatacagctgtcgaagaagacaatctggagtacaatgagaacggaagatggccttttcaacaatttgtggatcagcttattcatgatatgtttgatcctatttgggaagttcgccatggcaccattatggctttaagggaaattttgacacatcatggtgcttgtgctggagtatattttcctgatctgagcttgccttcctctgacttggatggtaaaaccaactttgactcccttaaaagggaacatggtatcgatctaaacgaagatgtccatttggaacaccttgaaccagcattaaagaagcataagaaagagccaaaatgtgctgaaagtatgatggattgtgataaggagttggttgacagtgattatctaaaaacggaaggagatctgagcaatgtgcctgatgtattaactgccgaaccaaattctactcatgtaaaagttgagcctgagttctgtgttgatgattcagctgacccctctaaaggcgtttcgacatgtaaatcacagaaaaaactcaactccatatcacatctgagttctcatattcttgctccagaaagttcaaaattcatgaaactgatgaaactagccaaatactcatatatgaagaattgggaatttcttcaggattgtgcaatccgcttcctttgtgtgctttcactggaccgctttggtgattatgtatccgatcaagttgtcgccccagttcgtgaaacttgtgctcaagctcttggtgctgtgctgaagtacatgcacccttctttagtatgtcatacattcaaaatcttgctgcagatgcagacaagagtgggaagttcgtcatgggagccttcttggcattaaatacttagttgctgttcgccaggaaatgcttaaagatttgcttgactatatcattcatgcttgtaaagctggtctggaggaccctgatgatgatgtccgagcagtggctgcagaagccctgattccagctgccgactctttagttaggctaaatgaccaaattttgcatccaattgtggtgttgctttgggatatactgcttgaccttgacgatttaagcccatctacaagcagtgtaatgaacttgttagcagaaatatattctcaaccagagatggtcccaaagatgcttggcacagcagcttcaggggaaaagggagaatttgatctaaacgaagcaactcagattgctgagcaagaagacgaactaacatctattgaaaacccttacggtctagctacactgacaccccggctgtggccctttatgagacatagtattacttctgttcggcgttccgccatacgaacactggagaagcttcttgaggttggcaacactaggagttctgctggaacaaccccatctaaactctggccaacatcaatattaggtgatgcactgcaggttgtatttcagaacctacttttggagtcaaatgatgatattcttcagtcttctgaaagggcttggaaacttctacttcagtgccctgagaaggaccttgaatatgctgcaaggttatattttagtaattgggtacaacttgctaccactccatttggctcagcattggattctacaaaaatgtttttaccagttgcccttccacgaggaaatcgttcgagagctgctgcaaagattagatctgctaggctagaacatgagtacacaacaatgatctcgtttggttctacaggggaaagtatttcacatgaaaagcattcggacgttccctctattttttcgaatataattgttggctctgatcctgacaaatctgttactcatacacgggttcttacgtcaatggcccttgggctttttgcctctaagttgcccgtaagctcatggcaagtggttttaagtccactagcaaatcacctcatgtctctctcaggagtccagagacaagtggcttcaatgatcatcgtttcttggttcaaagatctgagaggcagagatcctgtatcagtgggtacattgctagcttttctatcttccttgaaagagtggctggtggacttattgacttgctctgatccagcattacccacaaaaggttctgtgcttccatattctgaactttcaaggacatacacgaagatgcgcaatgaagccaataatttgctccacttaatcgattcatgtgctgctttcaaagattatagtagcagcttaaaccttaacactgacgtgctgactgttgatgatgctatcaactttgcatcaaagcttttgttaccatctgaatctgatattccttcagaaactgagaacattttcttgaataacatagaatcagcaaaacaaggcctattgtctacatcaggttacttgaaatgtgttcagaataatttgcatgtgacagtctgttctttggtggcttctgctgtagtttggatgtcatgtttgcccagcaagttgaaccctgttattttacctttaatggctgccattaaaagagaacaggaggaagtacttcaagataaagctgctgatgcacttgctgagcttatatttagctgcattggccgcaagcctggccccaatgacaagctaaccaagaatctctgcactctaacatgcactgatgctagtgagacacctcaagctgcaataatcaactcaatgcaggttattgaggaccagaatttgctatcgattggaaagcgttttagcagtcatagatccaggggccatacaacgtctggtggcgatgaaaggtcaaaaatggagggttttataagccggcgtggatcagagttggctttcaagcatctctgtgtgaaatttggaccttcattgtttgaaaaccttcccaagttatgggattgccttactgagtttcttagacctgtaaaaacagaagatggtattccggaagatgatgcaagtattgcacagctgggcagatcgtatgaggataaggacccacagtcactcattaataatatccaggtcgttcgttccatttcacctcacttggctgagcccttaaggcctcaactgctaaatctccttccctctattcttgggtgtgttcgtcatcctcatgtggctgttagactagctgctgcaagatgcatcacatctatggcaaagtcattgaccgatgatgtgatggtactggtgatagaaaatgtcatcccaatgttgtccgatttatcttctgtctgtgcaagacaaggagctgggattctgttaagccttcttgttcagggtttggctgtggagttggttccttatgctcctttccttgtcgttcctcttctgaagtgtatgagtgacccagatggttctgttaggcagactgtgactcacagttttgctgctcttgttcctttgctgccattatcaaggggtgcttctttaccatgtggactaagtgaacgcttatctagcagtgctgaagatgtgcaatttctggaacagctccttgacaatacccaaattgatgatttcaagcttaatattgatcttaatgttgaactacgaaggtatcagcaagaagggatcaactggcttgcattcctccgtcggtttaagttacatggaattttatgtgatgacatggggctcggtaagacgctccaagcatctgctattgtagcaagtgacattgcagaagcacgtgcacggaatgatgaaaaaattctgacatctttgattatctgcccttctacattagtggcccactgggaatatgaaatagagaagtacatagacagctctatcttgaaacctcttcagtacgttggttcttctcaggacagagtgacactccgtagtcagtttgataaggttaatgttatcataacatcatatgatattatacggaaggatattgattttcttggaaatatcacttggaactattgtgttctggatgaagggcatataataaaaaactcaaggtctaaaataacgtttgctgtgaaacagctgaaagcgcaacaccgtcttatcttgagtggcacacctattcagaataatgtgttggagttatggtctttatttgacttccttatgcctgggtttcttggaacagaaaaacaattccaagctgcatatggaaaacccttgctagctgccaaagattctaaatgttcagcaaaggatgctgaagctggtattcttgcaatggaggcactgcataagcaggtcatgccgtttctactgagaagaacaaaggatgaagttttatctgatcttccagagaagataatccaggatagatattgtgatctcagtctattgcagctcaaactttatgacaaattttccagctccaatgcaaaagacgagatttcaactatagtaaaagcaaatgaactggaggaatctgcacctcaaccaaaggcaactcggcatgtgtttcaggcattgcagtacctattaaaactatgcagccatcccttgcttgtaactggggagaaccccccaaatcatcttgtggatcttctgaatgaaataggtctgggatctggcagtgagcttcatgagcttcaccactcacctaagcttgttgctcttcaagaaatacttcaagaatgtggtatagggtcagaaatatctagtcctgatgcttctacagctgttgggcaacacagagttttgatttttgctcagcataaggcttttcttgacatcatagagaaggacctgtttcaatctcatatgagaagtgtcacatatttgcggctggatggctctgttgatccagagaagagatttgaaatcgttaaagcattcaattcagacccaaccattgatgtacttctgctaacaacccatgtcggtgggcttggcttgaacttgacatctgccgacacattggtgttcgtggaacatgattggaacccaatgaaggaccttcaggctatggacagagcacatcgattgggtcaaaggaaagtggtgaatgttcaccgtctcatcatgcgtggcacccttgaggagaaggtgatgtctctccagaggttcaaggtgtcagtcgccaatgctgtcatcaatgctgagaactcgagcttgaagaccatgaacactgaccagctgcttgatctgttcacatcaacccctgcttcaagaaaagcaagcgacgagcagagtaagaggaaatctggtggcaaaggcttgaagtccattcttaatggtctggatgagctttgggatcagtcgcagtatgccgatgagtatgatctgaaccagttcctggcgaagctgaacggctgagccaccaccggctggctcgtgtacagtgtataaagcaatttggggcaggttaattttgttgttgctgttgtttgatagaggaaggaaaagattagatgctaacagatataggtggtggttggggttacgatctcaatttttttggtttccatcttcctcaatttttgttttgaggagttgtatatactctgctcacctataatcaaagctgcagctcttatcagaatttcccttgattggtcatggtgactgttccatgtactttgttctgccgcggccgtagctatatggactgctgcagctgcaattcatagaaacaaaatacttcatagaaacaaaatattgtagaagccgcatttggattaaagacgcggcaagtcgcagcgaacctggaaaggtgaatgctgatatgcttg

SEQ ID NO: 63883 - DNA, 6898 bp, Zea Mays
cacgaccacaccagcagccaggtgcccggtgccgactcgacccgaccaccacccaggccagccagaagcccgtcccgacccggccgggcgcgcgcgtgcgtgcgttcgggcgcgcgcgttcctgcgcggattgggctcggcctccgctcgtcgccttccggccccacgcgcccctccccgcgagggctcgcccctccgcccccagtccgcctcccgcgatccccttctcccgccgctcgtcgcccgcctctttcctccccgctccccgcagagctggtgtgcacttctattacattacatgcatgtggagtaatttacctacggcagattgctgactaaaggcgctgaagtaaaccttccctcagtatacttcctcggatgtcacgtctgcccctctgcgtcatttatggctcagaactcgtcccgtcttcaccgcctcctcacattactagacactggttcgacacaagcaacgaggtttgcggctgcacgccaaattggagaaatcgccaagtcccacccccaggagctgaattcgttgctaaaaaagtaaaaattgggacacgagggttgcggcagcccatgcgattggtgccatagcagagaatgtcaaacacacatcattgaaggacttgtatgcttccgtgcaagcagaaaaacatgcttccggtttctctgatggaagtgatgatgctggctcagcattgccacggactgatagtgcagcaacatctgatcttgcttttggaagctttgacataggcagggtattggaatttggatctcctctattggcatcaggtggacaggaatacgacattgctgatagtggcaagaatccagcagagcgtctagctcgccaaaagaaaaatctccggcgtcgtttaggactggatttatgtgagcagtttatggatgttaatgacgttatcaaagacgaggatcttcttgcccaaaaaaattattggggttcacatgtacagaataatggattccattcatttaattcaggtcataatattcagcagttggtttctaccatggtccccaggtatcccaagcattctaattttcgctctagacgattaagtgccagggagttaaatatgctgaagcgtaaagcaaagagtaatgcaaaagatcatacaaaggctgtatctgaggatgatgaggttacactgaaaggatctgtgccctccaatggagcttcttctgaacaaggtgtatttgatacagctgtcgaagaagacaatctggagtacaatgagaacggaagatggccttttcaacaatttgtggatcagcttattcatgatatgtttgatcctatttgggaagttcgccatggcaccattatggctttaagggaaattttgacacatcatggtgcttgtgctggagtatattttcctgatctgagcttgccttcctctgacttggatggtaaaaccaactttgactcccttaaaagggaacatggtatcgatctaaacgaagatgtccatttggaacaccttgaaccagcattaaagaagcataagaaagagccaaaatgtgctgaaagtatgatggattgtgataaggagttggttgacagtgattatctaaaaacggaaggagatctgagcaatgtgcctgatgtattaactgccgaaccaaattctactcatgtaaaagttgagcctgagttctgtgttgatgattcagctgacccctctaaaggcgtttcgacatgtaaatcacagaaaaaactcaactccatatcacatctgagttctcatattcttgctccagaaagttcaaaattcatgaaactgatgaaactagccaaatactcatatatgaagaattgggaatttcttcaggattgtgcaatccgcttcctttgtgtgctttcactggaccgctttggtgattatgtatccgatcaagttgtcgccccagttcgtgaaacttgtgctcaagctcttggtgctgtgctgaagtacatgcacccttctttagtatgtcatacattcaaaatcttgctgcagatgcagcacagacaagagtgggaagttcgtcatgggagccttcttggcattaaatacttagttgctgttcgccaggaaatgcttaaagatttgcttgactatatcattcatgcttgtaaagctggtctggaggaccctgatgatgatgtccgagcagtggctgcagaagccctgattccagctgccgactctttagttaggctaaatgaccaaattttgcatccaattgtggtgttgctttgggatatactgcttgaccttgacgatttaagcccatctacaagcagtgtaatgaacttgttagcagaaatatattctcaaccagagatggtcccaaagatgcttggcacagcagcttcaggggaaaagggagaatttgatctaaacgaagcaactcagattgctgagcaagaagacgaactaacatctattgaaaacccttacggtctagctacactgacaccccggctgtggccctttatgagacatagtattacttctgttcggcgttccgccatacgaacactggagaagcttcttgaggttggcaacactaggagttctgctggaacaaccccatctaaactctggccaacatcaatattaggtgatgcactgcaggttgtatttcagaacctacttttggagtcaaatgatgatattcttcagtcttctgaaagggcttggaaacttctacttcagtgccctgagaaggaccttgaatatgctgcaaggttatattttagtaattgggtacaacttgctaccactccatttggctcagcattggattctacaaaaatgtttttaccagttgcccttccacgaggaaatcgttcgagagctgctgcaaagattagatctgctaggctagaacatgagtacacaacaatgatctcgtttggttctacaggggaaagtatttcacatgaaaagcattcggacgttccctctattttttcgaatataattgttggctctgatcctgacaaatctgttactcatacacgggttcttacgtcaatggcccttgggctttttgcctctaagttgcccgtaagctcatggcaagtggttttaagtccactagcaaatcacctcatgtctctctcaggagtccagagacaagtggcttcaatgatcatcgtttcttggttcaaagatctgagaggcagagatcctgtatcagtgggtacattgctagcttttctatcttccttgaaagagtggctggtggacttattgacttgctctgatccagcattacccacaaaaggttctgtgcttccatattctgaactttcaaggacatacacgaagatgcgcaatgaagccaataatttgctccacttaatcgattcatgtgctgctttcaaagattatagtagcagcttaaaccttaacactgacgtgctgactgttgatgatgctatcaactttgcatcaaagcttttgttaccatctgaatctgatattccttcagaaactgagaacattttcttgaataacatagaatcagcaaaacaaggcctattgtctacatcaggttacttgaaatgtgttcagaataatttgcatgtgacagtctgttctttggtggcttctgctgtagtttggatgtcatgtttgcccagcaagttgaaccctgttattttacctttaatggctgccattaaaagagaacaggaggaagtacttcaagataaagctgctgatgcacttgctgagcttatatttagctgcattggccgcaagcctggccccaatgacaagctaaccaagaatctctgcactctaacatgcactgatgctagtgagacacctcaagctgcaataatcaactcaatgcaggttattgaggaccagaatttgctatcgattggaaagcgttttagcagtcatagatccaggggccatacaacgtctggtggcgatgaaaggtcaaaaatggagggttttataagccggcgtggatcagagttggctttcaagcatctctgtgtgaaatttggaccttcattgtttgaaaaccttcccaagttatgggattgccttactgagtttcttagacctgtaaaaacagaagatggtattccggaagatgatgcaagtattgcacagctgggcagatcgtatgaggataaggacccacagtcactcattaataatatccaggtcgttcgttccatttcacctcacttggctgagcccttaaggcctcaactgctaaatctccttccctctattcttgggtgtgttcgtcatcctcatgtggctgttagactagctgctgcaagatgcatcacatctatggcaaagtcattgaccgatgatgtgatggtactggtgatagaaaatgtcatcccaatgttgtccgatttatcttctgtctgtgcaagacaaggagctgggattctgttaagccttcttgttcagggtttggctgtggagttggttccttatgctcctttccttgtcgttcctcttctgaagtgtatgagtgacccagatggttctgttaggcagactgtgactcacagttttgctgctcttgttcctttgctgccattatcaaggggtgcttctttaccatgtggactaagtgaacgcttatctagcagtgctgaagatgtgcaatttctggaacagctccttgacaatacccaaattgatgatttcaagcttaatattgatcttaatgttgaactacgaaggtatcagcaagaagggatcaactggcttgcattcctccgtcggtttaagttacatggaattttatgtgatgacatggggctcggtaagacgctccaagcatctgctattgtagcaagtgacattgcagaagcacgtgcacggaatgatgaaaaaattctgacatctttgattatctgcccttctacattagtggcccactgggaatatgaaatagagaagtacatagacagctctatcttgaaacctcttcagtacgttggttcttctcaggacagagtgacactccgtagtcagtttgataaggttaatgttatcataacatcatatgatattatacggaaggatattgattttcttggaaatatcacttggaactattgtgttctggatgaagggcatataataaaaaactcaaggtctaaaataacgtttgctgtgaaacagctgaaagcgcaacaccgtcttatcttgagtggcacacctattcagaataatgtgttggagttatggtctttatttgacttccttatgcctgggtttcttggaacagaaaaacaattccaagctgcatatggaaaacccttgctagctgccaaagattctaaatgttcagcaaaggatgctgaagctggtattcttgcaatggaggcactgcataagcaggtcatgccgtttctactgagaagaacaaaggatgaagttttatctgatcttccagagaagataatccaggatagatattgtgatctcagtctattgcagctcaaactttatgacaaattttccagctccaatgcaaaagacgagatttcaactatagtaaaagcaaatgaactggaggaatctgcacctcaaccaaaggcaactcggcatgtgtttcaggcattgcagtacctattaaaactatgcagccatcccttgcttgtaactggggagaaccccccaaatcatcttgtggatcttctgaatgaaataggtctgggatctggcagtgagcttcatgagcttcaccactcacctaagcttgttgctcttcaagaaatacttcaagaatgtggtatagggtcagaaatatctagtcctgatgcttctacagctgttgggcaacacagagttttgatttttgctcagcataaggcttttcttgacatcatagagaaggacctgtttcaatctcatatgagaagtgtcacatatttgcggctggatggctctgttgatccagagaagagatttgaaatcgttaaagcattcaattcagacccaaccattgatgtacttctgctaacaacccatgtcggtgggcttggcttgaacttgacatctgccgacacattggtgttcgtggaacatgattggaacccaatgaaggaccttcaggctatggacagagcacatcgattgggtcaaaggaaagtggtgaatgttcaccgtctcatcatgcgtggcacccttgaggagaaggtgatgtctctccagaggttcaaggtgtcagtcgccaatgctgtcatcaatgctgagaactcgagcttgaagaccatgaacactgaccagctgcttgatctgttcacatcaacccctgcttcaagaaaagcaagcgacgagcagagtaagaggaaatctggtggcaaaggcttgaagtccattcttaatggtctggatgagctttgggatcagtcgcagtatgccgatgagtatgatctgaaccagttcctggcgaagctgaacggctgagccaccaccggctggctcgtgtacagtgtataaagcaatttggggcaggttaattttgttgttgctgttgtttgatagaggaaggaaaagattagatgctaacagatataggtggtggttggggttacgatctcaatttttttggtttccatcttcctcaatttttgttttgaggagttgtatatactctgctcacctataatcaaagctgcagctcttatcagaatttcccttgattggtcatggtgactgttccatgtactttgttctgccgcggccgtagctatatggactgctgcagctgcaattcatagaaacaaaatacttcatagaaacaaaatattgtagaagccgcatttggattaaagacgcggcaagtcgcagcgaacctggaaaggtgaatgctgatatgcttg

SEQ ID NO: 63884 - DNA, 6920 bp, Zea Mays
gccacgaccacaccagcagccaggtgcccggtgccgactcgacccgaccaccacccaggccagccagaagcccgtcccgacccggccgggcgcgcgcgtgcgtgcgttcgggcgcgcgcgttcctgcgcggattgggctcggcctccgctcgtcgccttccggccccacgcgcccctccccgcgagggctcgcccctccgcccccagtccgcctcccgcgatccccttctcccgccgctcgtcgcccgcctctttcctccccgctccccgcagagctggtgtgcacttctattacattacatgcatgtggagtaatttacctacggcagattgctgactaaaggcgctgaagtaaaccttccctcagtatacttcctcggatgtcacgtctgcccctctgcgtcatttatggctcagaactcgtcccgtcttcaccgcctcctcacattactagacactggttcgacacaagcaacgaggtttgcggctgcacgccaaattggagaaatcgccaagtcccacccccaggagctgaattcgttgctaaaaaaggtttctcaatatattcgtagtaaaaattgggacacgagggttgcggcagcccatgcgattggtgccatagcagagaatgtcaaacacacatcattgaaggacttgtatgcttccgtgcaagcagaaaaacatgcttccggtttctctgatggaagtgatgatgctggctcagcattgccacggactgatagtgcagcaacatctgatcttgcttttggaagctttgacataggcagggtattggaatttggatctcctctattggcatcaggtggacaggaatacgacattgctgatagtggcaagaatccagcagagcgtctagctcgccaaaagaaaaatctccggcgtcgtttaggactggatttatgtgagcagtttatggatgttaatgacgttatcaaagacgaggatcttcttgcccaaaaaaattattggggttcacatgtacagaataatggattccattcatttaattcaggtcataatattcagcagttggtttctaccatggtccccaggtatcccaagcattctaattttcgctctagacgattaagtgccagggagttaaatatgctgaagcgtaaagcaaagagtaatgcaaaagatcatacaaaggctgtatctgaggatgatgaggttacactgaaaggatctgtgccctccaatggagcttcttctgaacaaggtgtatttgatacagctgtcgaagaagacaatctggagtacaatgagaacggaagatggccttttcaacaatttgtggatcagcttattcatgatatgtttgatcctatttgggaagttcgccatggcaccattatggctttaagggaaattttgacacatcatggtgcttgtgctggagtatattttcctgatctgagcttgccttcctctgacttggatggtaaaaccaactttgactcccttaaaagggaacatggtatcgatctaaacgaagatgtccatttggaacaccttgaaccagcattaaagaagcataagaaagagccaaaatgtgctgaaagtatgatggattgtgataaggagttggttgacagtgattatctaaaaacggaaggagatctgagcaatgtgcctgatgtattaactgccgaaccaaattctactcatgtaaaagttgagcctgagttctgtgttgatgattcagctgacccctctaaaggcgtttcgacatgtaaatcacagaaaaaactcaactccatatcacatctgagttctcatattcttgctccagaaagttcaaaattcatgaaactgatgaaactagccaaatactcatatatgaagaattgggaatttcttcaggattgtgcaatccgcttcctttgtgtgctttcactggaccgctttggtgattatgtatccgatcaagttgtcgccccagttcgtgaaacttgtgctcaagctcttggtgctgtgctgaagtacatgcacccttctttagtatgtcatacattcaaaatcttgctgcagatgcagcacagacaagagtgggaagttcgtcatgggagccttcttggcattaaatacttagttgctgttcgccaggaaatgcttaaagatttgcttgactatatcattcatgcttgtaaagctggtctggaggaccctgatgatgatgtccgagcagtggctgcagaagccctgattccagctgccgactctttagttaggctaaatgaccaaattttgcatccaattgtggtgttgctttgggatatactgcttgaccttgacgatttaagcccatctacaagcagtgtaatgaacttgttagcagaaatatattctcaaccagagatggtcccaaagatgcttggcacagcagcttcaggggaaaagggagaatttgatctaaacgaagcaactcagattgctgagcaagaagacgaactaacatctattgaaaacccttacggtctagctacactgacaccccggctgtggccctttatgagacatagtattacttctgttcggcgttccgccatacgaacactggagaagcttcttgaggttggcaacactaggagttctgctggaacaaccccatctaaactctggccaacatcaatattaggtgatgcactgcaggttgtatttcagaacctacttttggagtcaaatgatgatattcttcagtcttctgaaagggcttggaaacttctacttcagtgccctgagaaggaccttgaatatgctgcaaggttatattttagtaattgggtacaacttgctaccactccatttggctcagcattggattctacaaaaatgtttttaccagttgcccttccacgaggaaatcgttcgagagctgctgcaaagattagatctgctaggctagaacatgagtacacaacaatgatctcgtttggttctacaggggaaagtatttcacatgaaaagcattcggacgttccctctattttttcgaatataattgttggctctgatcctgacaaatctgttactcatacacgggttcttacgtcaatggcccttgggctttttgcctctaagttgcccgtaagctcatggcaagtggttttaagtccactagcaaatcacctcatgtctctctcaggagtccagagacaagtggcttcaatgatcatcgtttcttggttcaaagatctgagaggcagagatcctgtatcagtgggtacattgctagcttttctatcttccttgaaagagtggctggtggacttattgacttgctctgatccagcattacccacaaaaggttctgtgcttccatattctgaactttcaaggacatacacgaagatgcgcaatgaagccaataatttgctccacttaatcgattcatgtgctgctttcaaagattatagtagcagcttaaaccttaacactgacgtgctgactgttgatgatgctatcaactttgcatcaaagcttttgttaccatctgaatctgatattccttcagaaactgagaacattttcttgaataacatagaatcagcaaaacaaggcctattgtctacatcaggttacttgaaatgtgttcagaataatttgcatgtgacagtctgttctttggtggcttctgctgtagtttggatgtcatgtttgcccagcaagttgaaccctgttattttacctttaatggctgccattaaaagagaacaggaggaagtacttcaagataaagctgctgatgcacttgctgagcttatatttagctgcattggccgcaagcctggccccaatgacaagctaaccaagaatctctgcactctaacatgcactgatgctagtgagacacctcaagctgcaataatcaactcaatgcaggttattgaggaccagaatttgctatcgattggaaagcgttttagcagtcatagatccaggggccatacaacgtctggtggcgatgaaaggtcaaaaatggagggttttataagccggcgtggatcagagttggctttcaagcatctctgtgtgaaatttggaccttcattgtttgaaaaccttcccaagttatgggattgccttactgagtttcttagacctgtaaaaacagaagatggtattccggaagatgatgcaagtattgcacagctgggcagatcgtatgaggataaggacccacagtcactcattaataatatccaggtcgttcgttccatttcacctcacttggctgagcccttaaggcctcaactgctaaatctccttccctctattcttgggtgtgttcgtcatcctcatgtggctgttagactagctgctgcaagatgcatcacatctatggcaaagtcattgaccgatgatgtgatggtactggtgatagaaaatgtcatcccaatgttgtccgatttatcttctgtctgtgcaagacaaggagctgggattctgttaagccttcttgttcagggtttggctgtggagttggttccttatgctcctttccttgtcgttcctcttctgaagtgtatgagtgacccagatggttctgttaggcagactgtgactcacagttttgctgctcttgttcctttgctgccattatcaaggggtgcttctttaccatgtggactaagtgaacgcttatctagcagtgctgaagatgtgcaatttctggaacagctccttgacaatacccaaattgatgatttcaagcttaatattgatcttaatgttgaactacgaaggtatcagcaagaagggatcaactggcttgcattcctccgtcggtttaagttacatggaattttatgtgatgacatggggctcggtaagacgctccaagcatctgctattgtagcaagtgacattgcagaagcacgtgcacggaatgatgaaaaaattctgacatctttgattatctgcccttctacattagtggcccactgggaatatgaaatagagaagtacatagacagctctatcttgaaacctcttcagtacgttggttcttctcaggacagagtgacactccgtagtcagtttgataaggttaatgttatcataacatcatatgatattatacggaaggatattgattttcttggaaatatcacttggaactattgtgttctggatgaagggcatataataaaaaactcaaggtctaaaataacgtttgctgtgaaacagctgaaagcgcaacaccgtcttatcttgagtggcacacctattcagaataatgtgttggagttatggtctttatttgacttccttatgcctgggtttcttggaacagaaaaacaattccaagctgcatatggaaaacccttgctagctgccaaagattctaaatgttcagcaaaggatgctgaagctggtattcttgcaatggaggcactgcataagcaggtcatgccgtttctactgagaagaacaaaggatgaagttttatctgatcttccagagaagataatccaggatagatattgtgatctcagtctattgcagctcaaactttatgacaaattttccagctccaatgcaaaagacgagatttcaactatagtaaaagcaaatgaactggaggaatctgcacctcaaccaaaggcaactcggcatgtgtttcaggcattgcagtacctattaaaactatgcagccatcccttgcttgtaactggggagaaccccccaaatcatcttgtggatcttctgaatgaaataggtctgggatctggcagtgagcttcatgagcttcaccactcacctaagcttgttgctcttcaagaaatacttcaagaatgtggtatagggtcagaaatatctagtcctgatgcttctacagctgttgggcaacacagagttttgatttttgctcagcataaggcttttcttgacatcatagagaaggacctgtttcaatctcatatgagaagtgtcacatatttgcggctggatggctctgttgatccagagaagagatttgaaatcgttaaagcattcaattcagacccaaccattgatgtacttctgctaacaacccatgtcggtgggcttggcttgaacttgacatctgccgacacattggtgttcgtggaacatgattggaacccaatgaaggaccttcaggctatggacagagcacatcgattgggtcaaaggaaagtggtgaatgttcaccgtctcatcatgcgtggcacccttgaggagaaggtgatgtctctccagaggttcaaggtgtcagtcgccaatgctgtcatcaatgctgagaactcgagcttgaagaccatgaacactgaccagctgcttgatctgttcacatcaacccctgcttcaagaaaagcaagcgacgagcagagtaagaggaaatctggtggcaaaggcttgaagtccattcttaatggtctggatgagctttgggatcagtcgcagtatgccgatgagtatgatctgaaccagttcctggcgaagctgaacggctgagccaccaccggctggctcgtgtacagtgtataaagcaatttggggcaggttaattttgttgttgctgttgtttgatagaggaaggaaaagattagatgctaacagatataggtggtggttggggttacgatctcaatttttttggtttccatcttcctcaatttttgttttgaggagttgtatatactctgctcacctataatcaaagctgcagctcttatcagaatttcccttgattggtcatggtgactgttccatgtactttgttctgccgcggccgtagctatatggactgctgcagctgcaattcatagaaacaaaatacttcatagaaacaaaatattgtagaagccgcatttggattaaagacgcggcaagtcgcagcgaacctggaaaggtgaatgctgatatgcttg

SEQ ID NO: 63885 - DNA, 913 bp, Zea Mays
actgaagagggaaggagaagcgggtggtctgacatggatccaatgcgacgccaggctccaccaccagttataaatgcaggcagcctagccaagcagaagtcgcctgttcggcctgagacatcaacatcgaaagatgctttcgacttttttgggacgttcaagcggatcgtcaaggcggcctgctgtatctagtagccgagagctaagcactgaagcggagcaaacacgtagccgcacaactgacgcgagcccaggggcattccagaggtctggagctccacggtggagcccgcagatgcctgattcctcggacggcaggcgttcgtcttccagcaggcgccactcatctaaccccaagaactacgagtctaccattaggggcatgcagggcctaaactttgatggcgatgacagggtgcactattagcatctcatctgtctgggagggtgcatcgcctcccctccccatagatggatgtaccaaggacggccagataataagaggtttgggtgagtgagcccgagcagtccgggtgacgtctcgtaggaactgtgtatgctgcttagcctctgttgttgtacaggcttgtcatttgtttggtctgcgcttaccggtagggcgcgccttgtccggtgaacgatgatggtgtattatgagagggatttcttaaggggttcacgtttggtgtgcttgggttgctttgatagaaacatttgggagaggtttatcgcgcctgctctgctctctcatgtaactccagattgctgagctggcacctgctctgctctctcatgtaatgtaactccagattcctgagctgctatgtttttttttaatcttgtgtctctgagatgctgttgtgctgctggtgacaggtcctcagctcgttgctgttaacctgtcctagtgttg

SEQ ID NO: 63886 - DNA, 917 bp, Zea Mays
  misc_feature (1)..(1): n is a, c, g, or t
nactgaagagggaaggagaagcgggtggtctgacatggatccaatgcgacgccaggctccaccaccagttataaatgcaggcagcctagccaagcagaagtcgcctgttcggcctgagacatcaacatcgaaagatgctgtgttcgacttttttgggacgttcaagcggatcgtcaaggcggcctgctgtatctagtagccgagagctaagcactgaagcggagcaaacacgtagccgcacaactgacgcgagcccaggggcattccagaggtctggagctccacggtggagcccgcagatgcctgattcctcggacggcaggcgttcgtcttccagcaggcgccactcatctaaccccaagaactacgagtctaccattaggggcatgcagggcctaaactttgatggcgatgacagggtgcactattagcatctcatctgtctgggagggtgcatcgcctcccctccccatagatggatgtaccaaggacggccagataataagaggtttgggtgagtgagcccgagcagtccgggtgacgtctcgtaggaactgtgtatgctgcttagcctctgttgttgtacaggcttgtcatttgtttggtctgcgcttaccggtagggcgcgccttgtccggtgaacgatgatggtgtattatgagagggatttcttaaggggttcacgtttggtgtgcttgggttgctttgatagaaacatttgggagaggtttatcgcgcctgctctgctctctcatgtaactccagattgctgagctggcacctgctctgctctctcatgtaatgtaactccagattcctgagctgctatgtttttttttaatcttgtgtctctgagatgctgttgtgctgctggtgacaggtcctcagctcgttgctgttaacctgtcctagtgttg

SEQ ID NO: 63887 - DNA, 572 bp, Zea Mays
  misc_feature (571)..(572): n is a, c, g, or t
caattatgggcttacgtgggacaaatgcattgaaatttgtgaaaatgttaagacgaagcatcctcaattgctttatgagtcaaaattatacagaatacttcaaggaggaactgggattccaaatgttaagtggtttggcgttgagggtgattacaatgttttggttatggacttactgggaccgagtcttgaagatctttttagcttttgcaacaggaagttgtccctcaaaactgttttgatgcttgctgatcaaatgatcaatcgagttgagttttttcattccaagtcattcttgcatagagatatcaagcctgacaattttctcatgggtctcgggaaaagagcaaaccaggttgattagctatattccctcaatctatatttatttatgggtctattagtaggtacacacattaataactgattttaatctctgtataggtttatgttatcgattttggacttgcaaagaagtacagagatacatcaacacaccagcacattccatacaggtaagcatgctgtgtgtgtgaaatttgaatgaaattgctgtgcgacgtcttgtttnn

SEQ ID NO: 63888 - DNA, 932 bp, Zea Mays
  misc_feature (931)..(932): n is a, c, g, or t
ggagttgcaggaaaagttcccgagcagcagcttggtgaagcgacagaatagaccctaacctcggagggacacggattgcaaaacaagggcggtattccgttactgtccgacacggcgacacctcagccctcaggtagccccgtagccgcctagcagggccgtgctcgagaaaattaggagaccaacagcacgaagggggaaaaaaggagagcagaaatccccaatccctcctcacttcgacccttgctcggaatctccccgcagcgtccggctgaatccattcgattcactcatggtaggcttcgtcttcttctgctgattcgctggatcgtctccaccgacgcggctgcgcccacacctgccgtcacagccatggagccgcgcatcggcaacaggttccgcgtcggccgcaagctggggagcggctcctttggggagatctacctcggcaccaacgtgcagaccaacgaggaggtcgcaattaaactggaaaatgttaagacgaagcatcctcaattgctttatgagtcaaaattatacagaatacttcaaggaggaactgggattccaaatgttaagtggtttggcgttgagggtgattacaatgttttggttatggacttactgggaccgagtcttgaagatctttttagcttttgcaacaggaagttgtccctcaaaactgttttgatgcttgctgatcaaatgatcaatcgagttgagttttttcattccaagtcattcttgcatagagatatcaagcctgacaattttctcatgggtctcgggaaaagagcaaaccaggtttatgttatcgattttggacttgcaaagaagtacagagatacatcaacacaccagcacattccatacaggtaagcatgctgtgtgtgtgaaatttgaatgaaattgctgtgcgacgtcttgtttnn

SEQ ID NO: 63889 - DNA, 2009 bp, Zea Mays
ctgagtttgatggcctcaactgctgtccagattgcatacctctgcaattaggccaggctcagaagattgtagaattcatctctgttttgctaacaattggtagcgaaatagctgagaagaagctaataagccaatcagtgataaagcattgcattgatttattttttcagtacccttataataactttttgcatcatcatgttgagaacattattgtttcttgccttgaggttaaaagaaatcaattgattgaccatattcttaatgactgtggtcttgttggtaaagtccttgccgctgaaaaaagttcttctctggcagtggagtctaatgggccaacattaccatcagaagggaaagaacctccaagaattgggaatattgggcacataactcgaatagcgaataagctcattcaatttggaaatagtaacagcatgatccagagtcacttgcaggagaacagtgagtgggctgtatggcaaatagatgtcctgatcaaacgcaatgaggtggagaatgtttaccattgggcatgtggccgtccaacatctctacatgatcgtgggagggatagcgatgacgacgacttccgagacagagactacgatgtggcagcactcactaataatatgagccaggcatttcgatttgggatatacaggaatgatgacattgaagaggcacaaggatcccacgaacgagatgatgaggatgtctactttgatgacgagtcagctgaagtagtaatatcttcattgtgtttgggggatgatcaggacagcagttcactcttcacgaattcaaactggtttacgtttgatggtgatagaggaatcaatgaccgcctagctgcctctgttcctccatcatccccggattctgaagcgatttccttaaacactgagaatactgatgaagcgctaactggtgaaaccactggaggcactgagtcactgcgggaaagtgcatcccttgccaatgaactagcagaagtcgctaacgacaatgatgctgatgccacggacggtgagaaaattttgtgtacagaagaggacagtcaagcctccgaggggcctgtggatgctaaagaggacaagactggaggagcgtctaaagcagcgaatgaatctgtgcctgacaatgccttgcctgaatcccaccacactgattgtcggtgcgctgactcatctgaatcaggaacagaagaagatgtggagattgatgatgagaagaaatctgagactgctatgacaaatgaatgagcgttatgggcttggaatgataggatggcggatcagattcttttgctggtgagcaatgccactcaagcaggggcgccgtacaattttaacagcgctgctttgctattgaggagtctggttgttactgcatactcgggcacgcacgctcttttatcatctcacctcatcaccatcatcccacatggaccaatgtcgtctggcggctcctgattttggtctcttcgaactgtaatatctgcacatcgcttggaggagttggagaaggaaaaaaggcacatatcggcacatagaaactacatgtccttgatctcctgcctcgagagcctcgcaggtcggatctgggagctcaaaattgaatacttctgccgggggatctgtcaggccttcgtcgttgttacgtcccatatcgaaggcggaatcgaactggaggccctaagtgaaggttactgcgatgcctggagtgatacagagcttgccgaaatggtgaaagctgcggagccctttgctcggaaactgggagtcgccctgcttgattgcgctcccccacgaggggttaaggaaaatttgtgtctttgtaatggtttaagggatataactttttttgacatttcttcaattctatgaacatccgtgttggttggcactgggccgagcctaggttggcgttcgcccccttttcctgtgtccgaccccaagaatagttctgaaacatgttttattaataaccatcaaggaattacaaac

SEQ ID NO: 63890 - DNA, 4323 bp, Zea Mays
tctctctctctctctctctcgcacgggcccgcctgcctatcccactgcccggtccaccgccgcaaactctgcccgcccgcgcgcgccccaccccgccgatcgcggtgagcccggactccgccgccgccgcttcgctctaccctgaccagccctagatctgtgcgggatccgccgccatgttctggcgcatgaccggcctctccgcggcctcgcccggttatattctgtgatcaccgtcatgttcctgctgcacgcacacctacccagggaaggaattggataaagcttgagtgcagctagtttgagcaattccattgacaacgattccggttcattaataaacaggctttctctggctctctgcacattttctgttactgtctctgtgggaacatattttctgtttctgtcccattactatttatagggcttcctatacctgtgtcggaaactaatttcatgtcaagtatgcttactgtttatttatttcttattcccttataaagagtcgtaaaactttttctggcccatggggtagtttcatcatcatgttatcactagatgtattcttttggttcattgtactcattttatagtaataataactaactgtccagtggaccgaccatgtttattgtcatgtcttatttatttaggggctgtttggatcccaggagctaaaacaaaagtgactaaagtttagttacttagagcaactccagtagttctctaaatgactctctaaatcaagaatttagatagttagcacaaaaacctctctccaacagctctctaaattgacttcataaatttagtcacttctcatgtaaccctatttcctccctacatttgataatcatgtagcaagtcacgaaaaaaaactgacgccattttctcactcgtggcaatctttccctgttcctgctgcttcgtatgtcacacatgcctttgactcttcctgttttgtacggcagtcgtgttgcatggtatccaaatgacccaccaatttgatttttcaaacagattaactacctaaataatagcaactgttggagatccacaaattttttttgaacgcccaatagctgtttacaaacttgctaaatacaattttaaggagatatattttacataactactggagctgctcttaggagctaaagatccaaataggaagcactaaaactgattatagtggtgaaaaaagtatcaatttagtcacttttagctcttcctgtttggatatttagctcctaagtaactaaactctataatcatttttgctttagctcctggaatccaaacatgcccttagtataccttttttttttaccatctcaggtttcttgtgaaaatttagtagcatacactggggcatccccgtcccacatgcctaactttcttttcctgttggtcaggtggatacaattctggacaaggagaactttacattggaagagcttcttgatgaggatgaaatcattcaggagtgcaaagcgctgaatacccgactcataaatttcttgcgagataaggcccaagtgtcgcaattacttcgttacattgtggaagaagttcctgaggattcagagaagaaacaatctttcaagtttccttttatcgcttgtgagatttttgcttgtgaaattgacattattttgagaaccttggtagaggatgttgagttaatggatttgcttttttcatttataaaacctgaccatccgcatagcacactgttagctggttacttcagtaaggtggttatatgtttgatgcttcgaaagactgctcctcttatgaattatgttcaggagcatccagatattgttgtccagcttgtcgacctcattggtatcacatcaataatggaggtgttggtgagattgattggtgctgatgaaaccatatacttgaatttcgcggatacattgcattggttagagaatacatatgtactggaaatgattgtggataaatttagctcatcagactctcctgaagtgcatgcaaatgctgctgaaattctttctgcggtaactcgatgcgcccctcctgctcttgctgcaaaaatatgcagtccaagttttgttggcaggttgtttcatcatgctcttgacgagtcaagaccaaaatctgttctggttcattcattgtcagtgtgtatatctttattggaccccaaaagactagcatcagtctcataccaagcatttagaagcaacttaactcacgggacgctggttacagccagtccagaaacagttgatggtatactggagagtctaggtgacttgctgaagttactggacattacttcttctcaaaatgtttttcctacaacttatggatgtttgtgtccgcctcttggaaaacaccgtttgaagattgtagaattcatctctgttttgctaacaattggtagcgaaatagctgagaagaagctaataagccaatcagtgataaagcattgcattgatttattttttcagtacccttataataactttttgcatcatcatgttgagaacattattgtttcttgccttgaggttaaaagaaatcaattgattgaccatattcttaatgactgtggtcttgttggtaaagtccttgccgctgaaaaaagttcttctctggcagtggagtctaatgggccaacattaccatcagaagggaaagaacctccaagaattgggaatattgggcacataactcgaatagcgaataagctcattcaatttggaaatagtaacagcatgatccagagtcacttgcagtgagtgggctgtatggcaaatagatgtcctgatcaaacgcaatgaggtggagaatgtttaccattgggcatgtggccgtccaacatctctacatgatcgtgggagggatagcgatgacgacgacttccgagacagagactacgatgtggcagcactcactaataatatgagccaggcatttcgatttgggatatacaggaatgatgacattgaagaggcacaaggatcccacgaacgagatgatgaggatgtctactttgatgacgagtcagctgaagtagtaatatcttcattgtgtttgggggatgatcaggacagcagttcactcttcacgaattcaaactggtttacgtttgatggtgatagaggaatcaatgaccgcctagctgcctctgttcctccatcatccccggattctgaagcgatttccttaaacactgagaatactgatgaagcgctaactggtgaaaccactggaggcactgagtcactgcgggaaagtgcatcccttgccaatgaactagcagaagtcgctaacgacaatgatgctgatgccacggacggtgagaaaattttgtgtacagaagaggacagtcaagcctccgaggggcctgtggatgctaaagaggacaagactggaggagcgtctaaagcagcgaatgaatctgtgcctgacaatgccttgcctgaatcccaccacactgattgtcggtgcgctgactcatctgaatcaggaacagaagaagatgtggagattgatgatgagaagaaatctgagactgctatgacaaatgaatgagcgttatgggcttggaatgataggatggcggatcagattcttttgctggtgagcaatgccactcaagcaggggcgccgtacaattttaacagcgctgctttgctattgaggagtctggttgttactgcatactcgggcacgcacgctcttttatcatctcacctcatcaccatcatcccacatggaccaatgtcgtctggcggctcctgattttggtctcttcgaactgtaatatctgcacatcgcttggaggagttggagaaggaaaaaaggcacatatcggcacatagaaactacatgtccttgatctcctgcctcgagagcctcgcaggtcggatctgggagctcaaaattgaatacttctgccgggggatctgtcaggccttcgtcgttgttacgtcccatatcgaaggcggaatcgaactggaggccctaagtgaaggttactgcgatgcctggagtgatacagagcttgccgaaatggtgaaagctgcggagccctttgctcggaaactgggagtcgccctgcttgattgcgctcccccacgaggggttaaggaaaatttgtgtctttgtaatggtttaagggatataactttttttgacatttcttcaattctatgaacatccgtgttggttggcactgggccgagcctaggttggcgttcgcccccttttcctgtgtccgaccccaagaatagttctgaaacatgttttattaataaccatcaaggaattacaaac

SEQ ID NO: 63891 - DNA, 4102 bp, Zea Mays
tctctctctctctctctctcgcacgggcccgcctgcctatcccactgcccggtccaccgccgcaaactctgcccgcccgcgcgcgccccaccccgccgatcgcggtgagcccggactccgccgccgccgcttcgctctaccctgaccagccctagatctgtgcgggatccgccgccatgttctggcgcatgaccggcctctccgcggcctcgcccggttatattctgtgatcaccgtcatgttcctgctgcacgcacacctacccagggaaggaattggataaagcttgagtgcagctagtttgagcaattccattgacaacgattccggttcattaataaacaggctttctctggctctctgcacattttctgttactgtctctgtgggaacatattttctgtttctgtcccattactatttatagggcttcctatacctgtgtcggaaactaatttcatgtcaagtatgcttactgtttatttatttcttattcccttataaagagtcgtaaaactttttctggcccatggggtagtttcatcatcatgttatcactagatgtattcttttggttcattgtactcattttatagtaataataactaactgtccagtggaccgaccatgtttattgtcatgtcttatttatttaggggctgtttggatcccaggagctaaaacaaaagtgactaaagtttagttacttagagcaactccagtagttctctaaatgactctctaaatcaagaatttagatagttagcacaaaaacctctctccaacagctctctaaattgacttcataaatttagtcacttctcatgtaaccctatttcctccctacatttgataatcatgtagcaagtcacgaaaaaaaactgacgccattttctcactcgtggcaatctttccctgttcctgctgcttcgtatgtcacacatgcctttgactcttcctgttttgtacggcagtcgtgttgcatggtatccaaatgacccaccaatttgatttttcaaacagattaactacctaaataatagcaactgttggagatccacaaattttttttgaacgcccaatagctgtttacaaacttgctaaatacaattttaaggagatatattttacataactactggagctgctcttaggagctaaagatccaaataggaagcactaaaactgattatagtggtgaaaaaagtatcaatttagtcacttttagctcttcctgtttggatatttagctcctaagtaactaaactctataatcatttttgctttagctcctggaatccaaacatgcccttagtataccttttttttttaccatctcaggtttcttgtgaaaatttagtagcatacactggggcatccccgtcccacatgcctaactttcttttcctgttggtcaggtggatacaattctggacaaggagaactttacattggaagagcttcttgatgaggatgaaatcattcaggagtgcaaagcgctgaatacccgactcataaatttcttgcgagataaggcccaagtgtcgcaattacttcgttacattgtggaagaagttcctgaggattcagagaagaaacaatctttcaagtttccttttatcgcttgtgagatttttgcttgtgaaattgacattattttgagaaccttggtagaggatgttgagttaatggatttgcttttttcatttataaaacctgaccatccgcatagcacactgttagctggttacttcagtaaggtggttatatgtttgatgcttcgaaagactgctcctcttatgaattatgttcaggagcatccagatattgttgtccagcttgtcgacctcattggtatcacatcaataatggaggactctcctgaagtgcatgcaaatgctgctgaaattctttctgcggtaactcgatgcgcccctcctgctcttgctgcaaaaatatgcagtccaagttttgttggcaggttgtttcatcatgctcttgacgagtcaagaccaaaatctgttctggttcattcattgtcagtgtgtatatctttattggaccccaaaagactagcatcagtctcataccaagcatttagaagcaacttaactcacgggacgctggttacagccagtccagaaacagttgatggtatactggagagtctaggtgacttgctgaagttactggacattacttcttctcaaaatgtttttcctacaacttatggatgtttgtgtccgcctcttggaaaacaccgtttgaaggtacccttataataactttttgcatcatcatgttgagaacattattgtttcttgccttgaggttaaaagaaatcaattgattgaccatattcttaatgactgtggtcttgttggtaaagtccttgccgctgaaaaaagttcttctctggcagtggagtctaatgggccaacattaccatcagaagggaaagaacctccaagaattgggaatattgggcacataactcgaatagcgaataagctcattcaatttggaaatagtaacagcatgatccagagtcacttgcagtgagtgggctgtatggcaaatagatgtcctgatcaaacgcaatgaggtggagaatgtttaccattgggcatgtggccgtccaacatctctacatgatcgtgggagggatagcgatgacgacgacttccgagacagagactacgatgtggcagcactcactaataatatgagccaggcatttcgatttgggatatacaggaatgatgacattgaagaggcacaaggatcccacgaacgagatgatgaggatgtctactttgatgacgagtcagctgaagtagtaatatcttcattgtgtttgggggatgatcaggacagcagttcactcttcacgaattcaaactggtttacgtttgatggtgatagaggaatcaatgaccgcctagctgcctctgttcctccatcatccccggattctgaagcgatttccttaaacactgagaatactgatgaagcgctaactggtgaaaccactggaggcactgagtcactgcgggaaagtgcatcccttgccaatgaactagcagaagtcgctaacgacaatgatgctgatgccacggacggtgagaaaattttgtgtacagaagaggacagtcaagcctccgaggggcctgtggatgctaaagaggacaagactggaggagcgtctaaagcagcgaatgaatctgtgcctgacaatgccttgcctgaatcccaccacactgattgtcggtgcgctgactcatctgaatcaggaacagaagaagatgtggagattgatgatgagaagaaatctgagactgctatgacaaatgaatgagcgttatgggcttggaatgataggatggcggatcagattcttttgctggtgagcaatgccactcaagcaggggcgccgtacaattttaacagcgctgctttgctattgaggagtctggttgttactgcatactcgggcacgcacgctcttttatcatctcacctcatcaccatcatcccacatggaccaatgtcgtctggcggctcctgattttggtctcttcgaactgtaatatctgcacatcgcttggaggagttggagaaggaaaaaaggcacatatcggcacatagaaactacatgtccttgatctcctgcctcgagagcctcgcaggtcggatctgggagctcaaaattgaatacttctgccgggggatctgtcaggccttcgtcgttgttacgtcccatatcgaaggcggaatcgaactggaggccctaagtgaaggttactgcgatgcctggagtgatacagagcttgccgaaatggtgaaagctgcggagccctttgctcggaaactgggagtcgccctgcttgattgcgctcccccacgaggggttaaggaaaatttgtgtctttgtaatggtttaagggatataactttttttgacatttcttcaattctatgaacatccgtgttggttggcactgggccgagcctaggttggcgttcgcccccttttcctgtgtccgaccccaagaatagttctgaaacatgttttattaataaccatcaaggaattacaaac

SEQ ID NO: 63892 - DNA, 4331 bp, Zea Mays
tctctctctctctctctctcgcacgggcccgcctgcctatcccactgcccggtccaccgccgcaaactctgcccgcccgcgcgcgccccaccccgccgatcgcggtgagcccggactccgccgccgccgcttcgctctaccctgaccagccctagatctgtgcgggatccgccgccatgttctggcgcatgaccggcctctccgcggcctcgcccggttatattctgtgatcaccgtcatgttcctgctgcacgcacacctacccagggaaggaattggataaagcttgagtgcagctagtttgagcaattccattgacaacgattccggttcattaataaacaggctttctctggctctctgcacattttctgttactgtctctgtgggaacatattttctgtttctgtcccattactatttatagggcttcctatacctgtgtcggaaactaatttcatgtcaagtatgcttactgtttatttatttcttattcccttataaagagtcgtaaaactttttctggcccatggggtagtttcatcatcatgttatcactagatgtattcttttggttcattgtactcattttatagtaataataactaactgtccagtggaccgaccatgtttattgtcatgtcttatttatttaggggctgtttggatcccaggagctaaaacaaaagtgactaaagtttagttacttagagcaactccagtagttctctaaatgactctctaaatcaagaatttagatagttagcacaaaaacctctctccaacagctctctaaattgacttcataaatttagtcacttctcatgtaaccctatttcctccctacatttgataatcatgtagcaagtcacgaaaaaaaactgacgccattttctcactcgtggcaatctttccctgttcctgctgcttcgtatgtcacacatgcctttgactcttcctgttttgtacggcagtcgtgttgcatggtatccaaatgacccaccaatttgatttttcaaacagattaactacctaaataatagcaactgttggagatccacaaattttttttgaacgcccaatagctgtttacaaacttgctaaatacaattttaaggagatatattttacataactactggagctgctcttaggagctaaagatccaaataggaagcactaaaactgattatagtggtgaaaaaagtatcaatttagtcacttttagctcttcctgtttggatatttagctcctaagtaactaaactctataatcatttttgctttagctcctggaatccaaacatgcccttagtataccttttttttttaccatctcaggtttcttgtgaaaatttagtagcatacactggggcatccccgtcccacatgcctaactttcttttcctgttggtcaggtggatacaattctggacaaggagaactttacattggaagagcttcttgatgaggatgaaatcattcaggagtgcaaagcgctgaatacccgactcataaatttcttgcgagataaggcccaagtgtcgcaattacttcgttacattgtggaagaagttcctgaggattcagagaagaaacaatctttcaagtttccttttatcgcttgtgagatttttgcttgtgaaattgacattattttgagaaccttggtagaggatgttgagttaatggatttgcttttttcatttataaaacctgaccatccgcatagcacactgttagctggttacttcagtaaggtggttatatgtttgatgcttcgaaagactgctcctcttatgaattatgttcaggagcatccagatattgttgtccagcttgtcgacctcattggtatcacatcaataatggaggtgttggtgagattgattggtgctgatgaaaccatatacttgaatttcgcggatacattgcattggttagagaatacatatgtactggaaatgattgtggataaatttagctcatcagactctcctgaagtgcatgcaaatgctgctgaaattctttctgcggtaactcgatgcgcccctcctgctcttgctgcaaaaatatgcagtccaagttttgttggcaggttgtttcatcatgctcttgacgagtcaagaccaaaatctgttctggttcattcattgtcagtgtgtatatctttattggaccccaaaagactagcatcagtctcataccaagcatttagaagcaacttaactcacgggacgctggttacagccagtccagaaacagttgatggtatactggagagtctaggtgacttgctgaagttactggacattacttcttctcaaaatgtttttcctacaacttatggatgtttgtgtccgcctcttggaaaacaccgtttgaagattgtagaattcatctctgttttgctaacaattggtagcgaaatagctgagaagaagctaataagccaatcagtgataaagcattgcattgatttattttttcagtacccttataataactttttgcatcatcatgttgagaacattattgtttcttgccttgaggttaaaagaaatcaattgattgaccatattcttaatgactgtggtcttgttggtaaagtccttgccgctgaaaaaagttcttctctggcagtggagtctaatgggccaacattaccatcagaagggaaagaacctccaagaattgggaatattgggcacataactcgaatagcgaataagctcattcaatttggaaatagtaacagcatgatccagagtcacttgcaggagaacagtgagtgggctgtatggcaaatagatgtcctgatcaaacgcaatgaggtggagaatgtttaccattgggcatgtggccgtccaacatctctacatgatcgtgggagggatagcgatgacgacgacttccgagacagagactacgatgtggcagcactcactaataatatgagccaggcatttcgatttgggatatacaggaatgatgacattgaagaggcacaaggatcccacgaacgagatgatgaggatgtctactttgatgacgagtcagctgaagtagtaatatcttcattgtgtttgggggatgatcaggacagcagttcactcttcacgaattcaaactggtttacgtttgatggtgatagaggaatcaatgaccgcctagctgcctctgttcctccatcatccccggattctgaagcgatttccttaaacactgagaatactgatgaagcgctaactggtgaaaccactggaggcactgagtcactgcgggaaagtgcatcccttgccaatgaactagcagaagtcgctaacgacaatgatgctgatgccacggacggtgagaaaattttgtgtacagaagaggacagtcaagcctccgaggggcctgtggatgctaaagaggacaagactggaggagcgtctaaagcagcgaatgaatctgtgcctgacaatgccttgcctgaatcccaccacactgattgtcggtgcgctgactcatctgaatcaggaacagaagaagatgtggagattgatgatgagaagaaatctgagactgctatgacaaatgaatgagcgttatgggcttggaatgataggatggcggatcagattcttttgctggtgagcaatgccactcaagcaggggcgccgtacaattttaacagcgctgctttgctattgaggagtctggttgttactgcatactcgggcacgcacgctcttttatcatctcacctcatcaccatcatcccacatggaccaatgtcgtctggcggctcctgattttggtctcttcgaactgtaatatctgcacatcgcttggaggagttggagaaggaaaaaaggcacatatcggcacatagaaactacatgtccttgatctcctgcctcgagagcctcgcaggtcggatctgggagctcaaaattgaatacttctgccgggggatctgtcaggccttcgtcgttgttacgtcccatatcgaaggcggaatcgaactggaggccctaagtgaaggttactgcgatgcctggagtgatacagagcttgccgaaatggtgaaagctgcggagccctttgctcggaaactgggagtcgccctgcttgattgcgctcccccacgaggggttaaggaaaatttgtgtctttgtaatggtttaagggatataactttttttgacatttcttcaattctatgaacatccgtgttggttggcactgggccgagcctaggttggcgttcgcccccttttcctgtgtccgaccccaagaatagttctgaaacatgttttattaataaccatcaaggaattacaaac

SEQ ID NO: 63893 - DNA, 4349 bp, Zea Mays
tctctctctctctctctctcgcacgggcccgcctgcctatcccactgcccggtccaccgccgcaaactctgcccgcccgcgcgcgccccaccccgccgatcgcggtgagcccggactccgccgccgccgcttcgctctaccctgaccagccctagatctgtgcgggatccgccgccatgttctggcgcatgaccggcctctccgcggcctcgccccttccactccacgttcagggttatattctgtgatcaccgtcatgttcctgctgcacgcacacctacccagggaaggaattggataaagcttgagtgcagctagtttgagcaattccattgacaacgattccggttcattaataaacaggctttctctggctctctgcacattttctgttactgtctctgtgggaacatattttctgtttctgtcccattactatttatagggcttcctatacctgtgtcggaaactaatttcatgtcaagtatgcttactgtttatttatttcttattcccttataaagagtcgtaaaactttttctggcccatggggtagtttcatcatcatgttatcactagatgtattcttttggttcattgtactcattttatagtaataataactaactgtccagtggaccgaccatgtttattgtcatgtcttatttatttaggggctgtttggatcccaggagctaaaacaaaagtgactaaagtttagttacttagagcaactccagtagttctctaaatgactctctaaatcaagaatttagatagttagcacaaaaacctctctccaacagctctctaaattgacttcataaatttagtcacttctcatgtaaccctatttcctccctacatttgataatcatgtagcaagtcacgaaaaaaaactgacgccattttctcactcgtggcaatctttccctgttcctgctgcttcgtatgtcacacatgcctttgactcttcctgttttgtacggcagtcgtgttgcatggtatccaaatgacccaccaatttgatttttcaaacagattaactacctaaataatagcaactgttggagatccacaaattttttttgaacgcccaatagctgtttacaaacttgctaaatacaattttaaggagatatattttacataactactggagctgctcttaggagctaaagatccaaataggaagcactaaaactgattatagtggtgaaaaaagtatcaatttagtcacttttagctcttcctgtttggatatttagctcctaagtaactaaactctataatcatttttgctttagctcctggaatccaaacatgcccttagtataccttttttttttaccatctcaggtttcttgtgaaaatttagtagcatacactggggcatccccgtcccacatgcctaactttcttttcctgttggtcaggtggatacaattctggacaaggagaactttacattggaagagcttcttgatgaggatgaaatcattcaggagtgcaaagcgctgaatacccgactcataaatttcttgcgagataaggcccaagtgtcgcaattacttcgttacattgtggaagaagttcctgaggattcagagaagaaacaatctttcaagtttccttttatcgcttgtgagatttttgcttgtgaaattgacattattttgagaaccttggtagaggatgttgagttaatggatttgcttttttcatttataaaacctgaccatccgcatagcacactgttagctggttacttcagtaaggtggttatatgtttgatgcttcgaaagactgctcctcttatgaattatgttcaggagcatccagatattgttgtccagcttgtcgacctcattggtatcacatcaataatggaggtgttggtgagattgattggtgctgatgaaaccatatacttgaatttcgcggatacattgcattggttagagaatacatatgtactggaaatgattgtggataaatttagctcatcagactctcctgaagtgcatgcaaatgctgctgaaattctttctgcggtaactcgatgcgcccctcctgctcttgctgcaaaaatatgcagtccaagttttgttggcaggttgtttcatcatgctcttgacgagtcaagaccaaaatctgttctggttcattcattgtcagtgtgtatatctttattggaccccaaaagactagcatcagtctcataccaagcatttagaagcaacttaactcacgggacgctggttacagccagtccagaaacagttgatggtatactggagagtctaggtgacttgctgaagttactggacattacttcttctcaaaatgtttttcctacaacttatggatgtttgtgtccgcctcttggaaaacaccgtttgaagattgtagaattcatctctgttttgctaacaattggtagcgaaatagctgagaagaagctaataagccaatcagtgataaagcattgcattgatttattttttcagtacccttataataactttttgcatcatcatgttgagaacattattgtttcttgccttgaggttaaaagaaatcaattgattgaccatattcttaatgactgtggtcttgttggtaaagtccttgccgctgaaaaaagttcttctctggcagtggagtctaatgggccaacattaccatcagaagggaaagaacctccaagaattgggaatattgggcacataactcgaatagcgaataagctcattcaatttggaaatagtaacagcatgatccagagtcacttgcaggagaacagtgagtgggctgtatggcaaatagatgtcctgatcaaacgcaatgaggtggagaatgtttaccattgggcatgtggccgtccaacatctctacatgatcgtgggagggatagcgatgacgacgacttccgagacagagactacgatgtggcagcactcactaataatatgagccaggcatttcgatttgggatatacaggaatgatgacattgaagaggcacaaggatcccacgaacgagatgatgaggatgtctactttgatgacgagtcagctgaagtagtaatatcttcattgtgtttgggggatgatcaggacagcagttcactcttcacgaattcaaactggtttacgtttgatggtgatagaggaatcaatgaccgcctagctgcctctgttcctccatcatccccggattctgaagcgatttccttaaacactgagaatactgatgaagcgctaactggtgaaaccactggaggcactgagtcactgcgggaaagtgcatcccttgccaatgaactagcagaagtcgctaacgacaatgatgctgatgccacggacggtgagaaaattttgtgtacagaagaggacagtcaagcctccgaggggcctgtggatgctaaagaggacaagactggaggagcgtctaaagcagcgaatgaatctgtgcctgacaatgccttgcctgaatcccaccacactgattgtcggtgcgctgactcatctgaatcaggaacagaagaagatgtggagattgatgatgagaagaaatctgagactgctatgacaaatgaatgagcgttatgggcttggaatgataggatggcggatcagattcttttgctggtgagcaatgccactcaagcaggggcgccgtacaattttaacagcgctgctttgctattgaggagtctggttgttactgcatactcgggcacgcacgctcttttatcatctcacctcatcaccatcatcccacatggaccaatgtcgtctggcggctcctgattttggtctcttcgaactgtaatatctgcacatcgcttggaggagttggagaaggaaaaaaggcacatatcggcacatagaaactacatgtccttgatctcctgcctcgagagcctcgcaggtcggatctgggagctcaaaattgaatacttctgccgggggatctgtcaggccttcgtcgttgttacgtcccatatcgaaggcggaatcgaactggaggccctaagtgaaggttactgcgatgcctggagtgatacagagcttgccgaaatggtgaaagctgcggagccctttgctcggaaactgggagtcgccctgcttgattgcgctcccccacgaggggttaaggaaaatttgtgtctttgtaatggtttaagggatataactttttttgacatttcttcaattctatgaacatccgtgttggttggcactgggccgagcctaggttggcgttcgcccccttttcctgtgtccgaccccaagaatagttctgaaacatgttttattaataaccatcaaggaattacaaac

SEQ ID NO: 63894 - DNA, 3065 bp, Zea Mays
ctctctctgtctgagccgagggctttggcgctcccccccccccccccccccccctctctctctctctctctctcgcacgggcccgcctgcctatcccactgcccggtccaccgccgcaaactctgcccgcccgcgcgcgccccaccccgccgatcgcggtgagcccggactccgccgccgccgcttcgctctaccctgaccagccctagatctgtgcgggatccgccgccatgttctggcgcatgaccggcctctccgcggcctcgcccgtggatacaattctggacaaggagaactttacattggaagagcttcttgatgaggatgaaatcattcaggagtgcaaagcgctgaatacccgactcataaatttcttgcgagataaggcccaagtgtcgcaattacttcgttacattgtggaagaagttcctgaggattcagagaagaaacaatctttcaagtttccttttatcgcttgtgagatttttgcttgtgaaattgacattattttgagaaccttggtagaggatgttgagttaatggatttgcttttttcatttataaaacctgaccatccgcatagcacactgttagctggttacttcagtaaggtggttatatgtttgatgcttcgaaagactgctcctcttatgaattatgttcaggagcatccagatattgttgtccagcttgtcgacctcattggtatcacatcaataatggaggactctcctgaagtgcatgcaaatgctgctgaaattctttctgcggtaactcgatgcgcccctcctgctcttgctgcaaaaatatgcagtccaagttttgttggcaggttgtttcatcatgctcttgacgagtcaagaccaaaatctgttctggttcattcattgtcagtgtgtatatctttattggaccccaaaagactagcatcagtctcataccaagcatttagaagcaacttaactcacgggacgctggttacagccagtccagaaacagttgatggtatactggagagtctaggtgacttgctgaagttactggacattacttcttctcaaaatgtttttcctacaacttatggatgtttgtgtccgcctcttggaaaacaccgtttgaagattgtagaattcatctctgttttgctaacaattggtagcgaaatagctgagaagaagctaataagccaatcagtgataaagcattgcattgatttattttttcagtacccttataataactttttgcatcatcatgttgagaacattattgtttcttgccttgaggttaaaagaaatcaattgattgaccatattcttaatgactgtggtcttgttggtaaagtccttgccgctgaaaaaagttcttctctggcagtggagtctaatgggccaacattaccatcagaagggaaagaacctccaagaattgggaatattgggcacataactcgaatagcgaataagctcattcaatttggaaatagtaacagcatgatccagagtcacttgcaggagaacagtgagtgggctgtatggcaaatagatgtcctgatcaaacgcaatgaggtggagaatgtttaccattgggcatgtggccgtccaacatctctacatgatcgtgggagggatagcgatgacgacgacttccgagacagagactacgatgtggcagcactcactaataatatgagccaggcatttcgatttgggatatacaggaatgatgacattgaagaggcacaaggatcccacgaacgagatgatgaggatgtctactttgatgacgagtcagctgaagtagtaatatcttcattgtgtttgggggatgatcaggacagcagttcactcttcacgaattcaaactggtttacgtttgatggtgatagaggaatcaatgaccgcctagctgcctctgttcctccatcatccccggattctgaagcgatttccttaaacactgagaatactgatgaagcgctaactggtgaaaccactggaggcactgagtcactgcgggaaagtgcatcccttgccaatgaactagcagaagtcgctaacgacaatgatgctgatgccacggacggtgagaaaattttgtgtacagaagaggacagtcaagcctccgaggggcctgtggatgctaaagaggacaagactggaggagcgtctaaagcagcgaatgaatctgtgcctgacaatgccttgcctgaatcccaccacactgattgtcggtgcgctgactcatctgaatcaggaacagaagaagatgtggagattgatgatgagaagaaatctgagactgctatgacaaatgaatgagcgttatgggcttggaatgataggatggcggatcagattcttttgctggtgagcaatgccactcaagcaggggcgccgtacaattttaacagcgctgctttgctattgaggagtctggttgttactgcatactcgggcacgcacgctcttttatcatctcacctcatcaccatcatcccacatggaccaatgtcgtctggcggctcctgattttggtctcttcgaactgtaatatctgcacatcgcttggaggagttggagaaggaaaaaaggcacatatcggcacatagaaactacatgtccttgatctcctgcctcgagagcctcgcaggtcggatctgggagctcaaaattgaatacttctgccgggggatctgtcaggccttcgtcgttgttacgtcccatatcgaaggcggaatcgaactggaggccctaagtgaaggttactgcgatgcctggagtgatacagagcttgccgaaatggtgaaagctgcggagccctttgctcggaaactgggagtcgccctgcttgattgcgctcccccacgaggggttaaggaaaatttgtgtctttgtaatggtttaagggatataactttttttgacatttcttcaattctatgaacatccgtgttggttggcactgggccgagcctaggttggcgttcgcccccttttcctgtgtccgaccccaagaatagttctgaaacatgttttattaataaccatcaaggaattacaaac

SEQ ID NO: 63895 - DNA, 3331 bp, Zea Mays
ctctctctgtctgagccgagggctttggcgctcccccccccccccccccccccctctctctctctctctctctcgcacgggcccgcctgcctatcccactgcccggtccaccgccgcaaactctgcccgcccgcgcgcgccccaccccgccgatcgcggtgagcccggactccgccgccgccgcttcgctctaccctgaccagccctagatctgtgcgggatccgccgccatgttctggcgcatgaccggcctctccgcggcctcgcccgtggatacaattctggacaaggagaactttacattggaagagcttcttgatgaggatgaaatcattcaggagtgcaaagcgctgaatacccgactcataaatttcttgcgagataaggcccaagtgtcgcaattacttcgttacattgtggaagaagttcctgaggattcagagaagaaacaatctttcaagtttccttttatcgcttgtgagatttttgcttgtgaaattgacattattttgagaaccttggtagaggatgttgagttaatggatttgcttttttcatttataaaacctgaccatccgcatagcacactgttagctggttacttcagtaaggtggttatatgtttgatgcttcgaaagactgctcctcttatgaattatgttcaggagcatccagatattgttgtccagcttgtcgacctcattggtatcacatcaataatggaggtgttggtgagattgattggtgctgatgaaaccatatacttgaatttcgcggatacattgcattggttagagaatacatatgtactggaaatgattgtggataaatttagctcatcagactctcctgaagtgcatgcaaatgctgctgaaattctttctgcggtaactcgatgcgcccctcctgctcttgctgcaaaaatatgcagtccaagttttgttggcaggttgtttcatcatgctcttgacgagtcaagaccaaaatctgttctggttcattcattgtcagtgtgtatatctttattggaccccaaaagactagcatcagtctcataccaagcatttagaagcaacttaactcacgggacgctggttacagccagtccagaaacagttgatggtatactggagagtctaggtgacttgctgaagttactggacattacttcttctcaaaatgtttttcctacaacttatggatgtttgtgtccgcctcttggaaaacaccgtttgaagattgtagaattcatctctgttttgctaacaattggtagcgaaatagctgagaagaagctaataagccaatcagtgataaagcattgcattgatttattttttcagtacccttataataactttttgcatcatcatgttgagaacattattgtttcttgccttgaggttaaaagaaatcaattgattgaccatattcttaatgactgtggtcttgttggtaaagtccttgccgctgaaaaaagttcttctctggcagtggagtctaatgggccaacattaccatcagaagggaaagaacctccaagaattgggaatattgggcacataactcgaatagcgaataagctcattcaatttggaaatagtaacagcatgatccagagtcacttgcaggagaacagtgagtgggctgtatggcaaatagatgtcctgatcaaacgcaatgaggtggagaatgtttaccattgggcatgtggccgtccaacatctctacatgatcgtgggagggatagcgatgacgacgacttccgagacagagactacgatgtggcagcactcactaataatatgagccaggcatttcgatttgggatatacaggaatgatgacattgaagaggtgaactgcgcatcattatattaagaagatagaagggtccaaaatacaccaatacaagataaagaaaccaccttacggtgggcaaaaaagaaaatacaaaaagccacccaacatcatgttctttgtagtgtgctataattttgtaacaggcacaaggatcccacgaacgagatgatgaggatgtctactttgatgacgagtcagctgaagtagtaatatcttcattgtgtttgggggatgatcaggacagcagttcactcttcacgaattcaaactggtttacgtttgatggtgatagaggaatcaatgaccgcctagctgcctctgttcctccatcatccccggattctgaagcgatttccttaaacactgagaatactgatgaagcgctaactggtgaaaccactggaggcactgagtcactgcgggaaagtgcatcccttgccaatgaactagcagaagtcgctaacgacaatgatgctgatgccacggacggtgagaaaattttgtgtacagaagaggacagtcaagcctccgaggggcctgtggatgctaaagaggacaagactggaggagcgtctaaagcagcgaatgaatctgtgcctgacaatgccttgcctgaatcccaccacactgattgtcggtgcgctgactcatctgaatcaggaacagaagaagatgtggagattgatgatgagaagaaatctgagactgctatgacaaatgaatgagcgttatgggcttggaatgataggatggcggatcagattcttttgctggtgagcaatgccactcaagcaggggcgccgtacaattttaacagcgctgctttgctattgaggagtctggttgttactgcatactcgggcacgcacgctcttttatcatctcacctcatcaccatcatcccacatggaccaatgtcgtctggcggctcctgattttggtctcttcgaactgtaatatctgcacatcgcttggaggagttggagaaggaaaaaaggcacatatcggcacatagaaactacatgtccttgatctcctgcctcgagagcctcgcaggtcggatctgggagctcaaaattgaatacttctgccgggggatctgtcaggccttcgtcgttgttacgtcccatatcgaaggcggaatcgaactggaggccctaagtgaaggttactgcgatgcctggagtgatacagagcttgccgaaatggtgaaagctgcggagccctttgctcggaaactgggagtcgccctgcttgattgcgctcccccacgaggggttaaggaaaatttgtgtctttgtaatggtttaagggatataactttttttgacatttcttcaattctatgaacatccgtgttggttggcactgggccgagcctaggttggcgttcgcccccttttcctgtgtccgaccccaagaatagttctgaaacatgttttattaataaccatcaaggaattacaaac

SEQ ID NO: 63896 - DNA, 3204 bp, Zea Mays
gcaggctcttcctccctctcctctctctctgtctgagccgagggctttggcgctcccccccccccccccccccccctctctctctctctctctctcgcacgggcccgcctgcctatcccactgcccggtccaccgccgcaaactctgcccgcccgcgcgcgccccaccccgccgatcgcggtgagcccggactccgccgccgccgcttcgctctaccctgaccagccctagatctgtgcgggatccgccgccatgttctggcgcatgaccggcctctccgcggcctcgcccgtggatacaattctggacaaggagaactttacattggaagagcttcttgatgaggatgaaatcattcaggagtgcaaagcgctgaatacccgactcataaatttcttgcgagataaggcccaagtgtcgcaattacttcgttacattgtggaagaagttcctgaggattcagagaagaaacaatctttcaagtttccttttatcgcttgtgagatttttgcttgtgaaattgacattattttgagaaccttggtagaggatgttgagttaatggatttgcttttttcatttataaaacctgaccatccgcatagcacactgttagctggttacttcagtaaggtggttatatgtttgatgcttcgaaagactgctcctcttatgaattatgttcaggagcatccagatattgttgtccagcttgtcgacctcattggtatcacatcaataatggaggtgttggtgagattgattggtgctgatgaaaccatatacttgaatttcgcggatacattgcattggttagagaatacatatgtactggaaatgattgtggataaatttagctcatcagactctcctgaagtgcatgcaaatgctgctgaaattctttctgcggtaactcgatgcgcccctcctgctcttgctgcaaaaatatgcagtccaagttttgttggcaggttgtttcatcatgctcttgacgagtcaagaccaaaatctgttctggttcattcattgtcagtgtgtatatctttattggaccccaaaagactagcatcagtctcataccaagcatttagaagcaacttaactcacgggacgctggttacagccagtccagaaacagttgatggtatactggagagtctaggtgacttgctgaagttactggacattacttcttctcaaaatgtttttcctacaacttatggatgtttgtgtccgcctcttggaaaacaccgtttgaagattgtagaattcatctctgttttgctaacaattggtagcgaaatagctgagaagaagctaataagccaatcagtgataaagcattgcattgatttattttttcagtacccttataataactttttgcatcatcatgttgagaacattattgtttcttgccttgaggttaaaagaaatcaattgattgaccatattcttaatgactgtggtcttgttggtaaagtccttgccgctgaaaaaagttcttctctggcagtggagtctaatgggccaacattaccatcagaagggaaagaacctccaagaattgggaatattgggcacataactcgaatagcgaataagctcattcaatttggaaatagtaacagcatgatccagagtcacttgcaggagaacagtgagtgggctgtatggcaaatagatgtcctgatcaaacgcaatgaggtggagaatgtttaccattgggcatgtggccgtccaacatctctacatgatcgtgggagggatagcgatgacgacgacttccgagacagagactacgatgtggcagcactcactaataatatgagccaggcatttcgatttgggatatacaggaatgatgacattgaagaggcacaaggatcccacgaacgagatgatgaggatgtctactttgatgacgagtcagctgaagtagtaatatcttcattgtgtttgggggatgatcaggacagcagttcactcttcacgaattcaaactggtttacgtttgatggtgatagaggaatcaatgaccgcctagctgcctctgttcctccatcatccccggattctgaagcgatttccttaaacactgagaatactgatgaagcgctaactggtgaaaccactggaggcactgagtcactgcgggaaagtgcatcccttgccaatgaactagcagaagtcgctaacgacaatgatgctgatgccacggacggtgagaaaattttgtgtacagaagaggacagtcaagcctccgaggggcctgtggatgctaaagaggacaagactggaggagcgtctaaagcagcgaatgaatctgtgcctgacaatgccttgcctgaatcccaccacactgattgtcggtgcgctgactcatctgaatcaggaacagaagaagatgtggagattgatgatgagaagaaatctgagactgctatgacaaatgaatgagcgttatgggcttggaatgataggatggcggatcagattcttttgctggtgagcaatgccactcaagcaggggcgccgtacaattttaacagcgctgctttgctattgaggagtctggttgttactgcatactcgggcacgcacgctcttttatcatctcacctcatcaccatcatcccacatggaccaatgtcgtctggcggctcctgattttggtctcttcgaactgtaatatctgcacatcgcttggaggagttggagaaggaaaaaaggcacatatcggcacatagaaactacatgtccttgatctcctgcctcgagagcctcgcaggtcggatctgggagctcaaaattgaatacttctgccgggggatctgtcaggccttcgtcgttgttacgtcccatatcgaaggcggaatcgaactggaggccctaagtgaaggttactgcgatgcctggagtgatacagagcttgccgaaatggtgaaagctgcggagccctttgctcggaaactgggagtcgccctgcttgattgcgctcccccacgaggggttaaggaaaatttgtgtctttgtaatggtttaagggatataactttttttgacatttcttcaattctatgaacatccgtgttggttggcactgggccgagcctaggttggcgttcgcccccttttcctgtgtccgaccccaagaatagttctgaaacatgttttattaataaccatcaaggaattacaaac

SEQ ID NO: 63897 - DNA, 6288 bp, Zea Mays
gtccatccgtcacggcgccaccacctctacctccttccctcaccttccagagcccactgctcctcggcggcggcggagatgagcgtgtggaactacgtcgtcacggcgcacaagcccaccagcgtcagccactcctgcgtaggcaactttaccagccccaaccagctcaaccttattatcgcgaaatgtacccggatcgaaatccatttgcttacccctcagggcctccagccgatgcttgatgtgcctatatatggaagaattgcaacgattgagctcttccggcctcataatgagactcaggactttcttttcattgctacggagaggtacaaattctgtgttctgcaatgggatgcagaaaagtcagagctaatcaccagagccatgggtgatgtttctgatcgcattggccgccctactgacaatggacagattggaatcattgaccctgactgtagactcattggtcttcatctctatgatggcttatttaaggttataccatttgacaacaaagggcagctgaaggaagctttcaatatcagacttgaagaacttcaagtactggacatcaaatttctacatggttgtgctaaacctactattgttgtcctctaccaggataataaagatgtgaggcatgttaagacttatgaagttgcactgaaggacaaagattttgttgagggtccttggtcccagaataatgtagataatggtgctggtttattaataccagtaccagctccacttggcggtgtgataataattggcgaggaacaaatagtttactgcaatgccaattccacatttaaagcgataccaataaaacaatccatcatcagagcttatggacgggttgacccagatggttctcgatatttactcggtgataatactggaattttgcatttacttgtccttacccatgaacgagaaagggttactggtttgaaaattgaatacctgggagagacttcgattgcatcatctatttcgtatcttgataatggtgttgtttacgtcggttcacggtttggcgattcacagctggtgaagctgaacctccaagctgatgcaagcggttcatttgttgaaattcttgaacggtatgttaatcttggaccgattgtggacttctgcgtggttgaccttgataggcagggtcaaggtcaggtggtcacttgttctggggcgtttaaagatggttcccttcgggtggttcgtaatggtatagggattaatgagcaggcttcagtagaactccaaggcataaagggattatggtcattgaaatcttcgatcaatgatccatttgacatgtaccttgtcgtgagctttataagtgagacacgattcttggcaatgaacatggaagatgaactagaagagactgagatagaggggtttgatgcacaaactcaaactctgttttgtcagaatgcgatcaatgatcttcttatacaggttactgctaattctgttcggttagtcagttgcacctcccgggagttagtgaatcaatggaatgcaccagcaggattctcagtcaatgttgcttcagctaatgccagccaggttctgttggcaaccggtggtggccatcttgtttacctggaaattagggatgctaaacttgttgaagtgaagcatgctcagctagaacatgagatttcttgtcttgatttgaacccaattggggagaatccacaatatagttccctagctgctgttgggatgtggacagatataagtgttagaatattttcgcttccagatcttgaattgataaggaaggaaaatttgggtggagaaattgttcctcggtctgttctgctgtgcaccttggagggggtttcgtatttgctttgtgctcttggggatggtaatttgttcagttttctactgaatgcaagtacaggtgaactgactgatagaaagaaggttaccctcgggacccaacccatcagccttcgtaccttctcatcaaagggtaccacccacgtgttcgcttcgtcagataggccaactgtcatctatagcagcaataagaagcttctctacagcaatgtcaatttgaaagaggttaatcatatgtgccctttcaatacagccgcttttccagacagtcttgcaattgctaaagagggtgaactttcaattggaactatcgatgatatacagaagcttcatatccgcacaatcccccttaatgaacaagcacgtcgcatttgtcaccaggagcaatcaaggacactagcattttgcagtttcaagtacaaccagagtgtggaggaaagtgagactcatttaatacgtctgctagatcatcagacgtttgagtccctgtgtgtatatcctctagatcaatatgaatgtggctgctccatcattagctgttcgtttgcggatgatagtaatgtttattactgtgtgggaactgcatatgttatacctgaagaaaatgaaccgacgaagggccggattcttgtatttgcagttgaagatggaagcttgcaattgatcgtggagaaagaaaccaaaggagcagtttattcgctgaatgcattcaatgggaaattgttggctgctatcaaccagaagattcaattgtataagtggatgtcacgcgaggatggttcacatgagctgcagtctgagtgtggccaccatgggcacatacttgccttgtatactcaaacacgtggtgacttcattgtggttggcgatctgatgaaatcaatatccttgctggtgtataagcatgaggaaagcgcgattgaagagcgtgctagggattacaatgcaaactggatgactgcagttgagatgcttgatgatgaagtctacgttggggcggagaatagctataacctattcacggtgcgcaagaacagcgatgcggcgacagatgacgaaagggccaggcttgaggtggtgggagagtaccaccttggggagtttgtgaacagattccgccacggttcactggtgatgcgccttccagactcggatatagggcagatccctacggtcatctttggcacaataaacggggtgattggcattattgcctccctcccgcacgaccaatacatcttcctggagaagctccagtcgacccttgtgaagtacataaagggcgtcggaaacctgagccacgagcaatggcggtccttccataacgacaagaagacggcggaggctcggaacttcctcgacggtgacctgatcgagtctttccttgaccttagccggagcaagatggaggaggtgtccaaggcgatgggcgtccccgtggaggagctgtccaagagggtggaagagctgacgaggcttcactagtgtagatggaacatggaagcgttgcttgtggatacaattctggacaaggagaactttacattggaagagcttcttgatgaggatgaaatcattcaggagtgcaaagcgctgaatacccgactcataaatttcttgcgagataaggcccaagtgtcgcaattacttcgttacattgtggaagaagttcctgaggattcagagaagaaacaatctttcaagtttccttttatcgcttgtgagatttttgcttgtgaaattgacattattttgagaaccttggtagaggatgttgagttaatggatttgcttttttcatttataaaacctgaccatccgcatagcacactgttagctggttacttcagtaaggtggttatatgtttgatgcttcgaaagactgctcctcttatgaattatgttcaggagcatccagatattgttgtccagcttgtcgacctcattggtatcacatcaataatggaggtgttggtgagattgattggtgctgatgaaaccatatacttgaatttcgcggatacattgcattggttagagaatacatatgtactggaaatgattgtggataaatttagctcatcagactctcctgaagtgcatgcaaatgctgctgaaattctttctgcggtaactcgatgcgcccctcctgctcttgctgcaaaaatatgcagtccaagttttgttggcaggttgtttcatcatgctcttgacgagtcaagaccaaaatctgttctggttcattcattgtcagtgtgtatatctttattggaccccaaaagactagcatcagtctcataccaagcatttagaagcaacttaactcacgggacgctggttacagccagtccagaaacagttgatggtatactggagagtctaggtgacttgctgaagttactggacattacttcttctcaaaatgtttttcctacaacttatggatgtttgtgtccgcctcttggaaaacaccgtttgaagattgtagaattcatctctgttttgctaacaattggtagcgaaatagctgagaagaagctaataagccaatcagtgataaagcattgcattgatttattttttcagtacccttataataactttttgcatcatcatgttgagaacattattgtttcttgccttgaggttaaaagaaatcaattgattgaccatattcttaatgactgtggtcttgttggtaaagtccttgccgctgaaaaaagttcttctctggcagtggagtctaatgggccaacattaccatcagaagggaaagaacctccaagaattgggaatattgggcacataactcgaatagcgaataagctcattcaatttggaaatagtaacagcatgatccagagtcacttgcaggagaacagtgagtgggctgtatggcaaatagatgtcctgatcaaacgcaatgaggtggagaatgtttaccattgggcatgtggccgtccaacatctctacatgatcgtgggagggatagcgatgacgacgacttccgagacagagactacgatgtggcagcactcactaataatatgagccaggcatttcgatttgggatatacaggaatgatgacattgaagaggcacaaggatcccacgaacgagatgatgaggatgtctactttgatgacgagtcagctgaagtagtaatatcttcattgtgtttgggggatgatcaggacagcagttcactcttcacgaattcaaactggtttacgtttgatggtgatagaggaatcaatgaccgcctagctgcctctgttcctccatcatccccggattctgaagcgatttccttaaacactgagaatactgatgaagcgctaactggtgaaaccactggaggcactgagtcactgcgggaaagtgcatcccttgccaatgaactagcagaagtcgctaacgacaatgatgctgatgccacggacggtgagaaaattttgtgtacagaagaggacagtcaagcctccgaggggcctgtggatgctaaagaggacaagactggaggagcgtctaaagcagcgaatgaatctgtgcctgacaatgccttgcctgaatcccaccacactgattgtcggtgcgctgactcatctgaatcaggaacagaagaagatgtggagattgatgatgagaagaaatctgagactgctatgacaaatgaatgagcgttatgggcttggaatgataggatggcggatcagattcttttgctggtgagcaatgccactcaagcaggggcgccgtacaattttaacagcgctgctttgctattgaggagtctggttgttactgcatactcgggcacgcacgctcttttatcatctcacctcatcaccatcatcccacatggaccaatgtcgtctggcggctcctgattttggtctcttcgaactgtaatatctgcacatcgcttggaggagttggagaaggaaaaaaggcacatatcggcacatagaaactacatgtccttgatctcctgcctcgagagcctcgcaggtcggatctgggagctcaaaattgaatacttctgccgggggatctgtcaggccttcgtcgttgttacgtcccatatcgaaggcggaatcgaactggaggccctaagtgaaggttactgcgatgcctggagtgatacagagcttgccgaaatggtgaaagctgcggagccctttgctcggaaactgggagtcgccctgcttgattgcgctcccccacgaggggttaaggaaaatttgtgtctttgtaatggtttaagggatataactttttttgacatttcttcaattctatgaacatccgtgttggttggcactgggccgagcctaggttggcgttcgcccccttttcctgtgtccgaccccaagaatagttctgaaacatgttttattaataaccatcaaggaattacaaac

SEQ ID NO: 63898 - DNA, 3945 bp, Zea Mays
tctctctctctctctctctcgcacgggcccgcctgcctatcccactgcccggtccaccgccgcaaactctgcccgcccgcgcgcgccccaccccgccgatcgcggtgagcccggactccgccgccgccgcttcgctctaccctgaccagccctagatctgtgcgggatccgccgccatgttctggcgcatgaccggcctctccgcggcctcgcccggttatattctgtgatcaccgtcatgttcctgctgcacgcacacctacccagggaaggaattggataaagcttgagtgcagctagtttgagcaattccattgacaacgattccggttcattaataaacaggctttctctggctctctgcacattttctgttactgtctctgtgggaacatattttctgtttctgtcccattactatttatagggcttcctatacctgtgtcggaaactaatttcatgtcaagtatgcttactgtttatttatttcttattcccttataaagagtcgtaaaactttttctggcccatggggtagtttcatcatcatgttatcactagatgtattcttttggttcattgtactcattttatagtaataataactaactgtccagtggaccgaccatgtttattgtcatgtcttatttatttaggggctgtttggatcccaggagctaaaacaaaagtgactaaagtttagttacttagagcaactccagtagttctctaaatgactctctaaatcaagaatttagatagttagcacaaaaacctctctccaacagctctctaaattgacttcataaatttagtcacttctcatgtaaccctatttcctccctacatttgataatcatgtagcaagtcacgaaaaaaaactgacgccattttctcactcgtggcaatctttccctgttcctgctgcttcgtatgtcacacatgcctttgactcttcctgttttgtacggcagtcgtgttgcatggtatccaaatgacccaccaatttgatttttcaaacagattaactacctaaataatagcaactgttggagatccacaaattttttttgaacgcccaatagctgtttacaaacttgctaaatacaattttaaggagatatattttacataactactggagctgctcttaggagctaaagatccaaataggaagcactaaaactgattatagtggtgaaaaaagtatcaatttagtcacttttagctcttcctgtttggatatttagctcctaagtaactaaactctataatcatttttgctttagctcctggaatccaaacatgcccttagtataccttttttttttaccatctcaggtttcttgtgaaaatttagtagcatacactggggcatccccgtcccacatgcctaactttcttttcctgttggtcaggtggatacaattctggacaaggagaactttacattggaagagcttcttgatgaggatgaaatcattcaggagtgcaaagcgctgaatacccgactcataaatttcttgcgagataaggcccaagtgtcgcaattacttcgttacattgtggaagaagttcctgaggattcagagaagaaacaatctttcaagtttccttttatcgcttgtgagatttttgcttgtgaaattgacattattttgagaaccttggtagaggatgttgagttaatggatttgcttttttcatttataaaacctgaccatccgcatagcacactgttagctggttacttcagtaaggtggttatatgtttgatgcttcgaaagactgctcctcttatgaattatgttcaggagcatccagatattgttgtccagcttgtcgacctcattggtatcacatcaataatggaggtgttggtgagattgattggtgctgatgaaaccatatacttgaatttcgcggatacattgcattggttagagaatacatatgtactggaaatgattgtggataaatttagctcatcagactctcctgaagtgcatgcaaatgctgctgaaattctttctgcggtaactcgatgcgcccctcctgctcttgctgcaaaaatatgcagtccaagttttgttggcaggttgtttcatcatgctcttgacgagtcaagaccaaaatctgttctggttcattcattgtcagtgtgtatatctttattggaccccaaaagactagcatcagtctcataccaagcatttagaagcaacttaactcacgggacgctggttacagccagtccagaaacagttgatggtatactggagagtctaggtgacttgctgaagttactggacattacttcttctcaaaatgtttttcctacaacttatggatgtttgtgtccgcctcttggaaaacaccgtttgaagattgtagaattcatctctgttttgctaacaattggtagcgaaatagctgagaagaagctaataagccaatcagtgataaagcattgcattgatttattttttcagtacccttataataactttttgcatcatcatgttgagaacattattgtttcttgccttgaggttaaaagaaatcaattgattgaccatattcttaatgactgtggtcttgttggtaaagtccttgccgctgaaaaaagttcttctctggcagtggagtctaatgggccaacattaccatcagaagggaaagaacctccaagaattgggaatattgggcacataactcgaatagcgaataagctcattcaatttggaaatagtaacagcatgatccagagtcacttgcaggagaacagtgagtgggctgtatggcaaatagatgtcctgatcaaacgcaatgaggtggagaatgtttaccattgggcatccgtccaacatctctacatgatcgtgggagggatagcgatgacgacgacttccgagacagagactacgatgtggcagcactcactaataatatgagccaggcatttcgatttgggatatacaggaatgatgacattgaagaggcacaaggatcccacgaacgagatgatgaggatgtctactttgatgacgagtcagctgaagtagtaatatcttcattgtgtttgggggatgatcaggacagcagttcactcttcacgaattcaaactggtttacgtttgatggtgatagaggaatcaatgaccgcctagctgcctctgttcctccatcatccccggattctgaagcgatttccttaaacactgagaatactgatgaagcgctaactggtgaaaccactggaggcactgagtcactgcgggaaagtgcatcccttgccaatgaactagcagaagtcgctaacgacaatgatgctgatgccacggacggtgagaaaattttgtgtacagaagaggacagtcaagcctccgaggggcctgtggatgctaaagaggacaagactggaggagcgtctaaagcagcgaatgaatctgtgcctgacaatgccttgcctgaatcccaccacactgattgtcggtgcgctgactcatctgaatcaggaacagaagaagatgtggagattgatgatgagaagaaatctgagactgctatgacaaatgaatgagcgttatgggcttggaatgataggatggcggatcagattcttttgctggtgagcaatgccactcaagcaggggcgccgtacaattttaacagcgctgctttgctattgaggagtctggttgttactgcatactcgggcacgcacgctcttttatcatctcacctcatcaccatcatcccacatggaccaatgtcgtctggcggctcctgattttggtctcttcgaactgtaatatctgcagtgagttttttccatcagtttttatttttttttccgggtttctgcatctgtaatagctatttcttcaagcgcaaaacatgtcttctctttgttgctataaaaagcatatagtttcaccaaaa

SEQ ID NO: 63899 - DNA, 4150 bp, Zea Mays
ggcatagtccatcccctgtccatttcatagtagcacctccagcaggcagcagcctgcagcccagcccctagtttgatcgatttgaacctgccgctgcgagtccacagcgctgcgcaggcggcactgcggcaggctcttcctccctctcctctctctctgtctgagccgagggctttggcgctcccccccccccccccccccccctctctctctctctctctctcgcacgggcccgcctgcctatcccactgcccggtccaccgccgcaaactctgcccgcccgcgcgcgccccaccccgccgatcgcggtgagcccggactccgccgccgccgcttcgctctaccctgaccagccctagatctgtgcgggatccgccgccatgttctggcgcatgaccggcctctccgcggcctcgcccggttatattctgtgatcaccgtcatgttcctgctgcacgcacacctacccagggaaggaattggataaagcttgagtgcagctagtttgagcaattccattgacaacgattccggttcattaataaacaggctttctctggctctctgcacattttctgttactgtctctgtgggaacatattttctgtttctgtcccattactatttatagggcttcctatacctgtgtcggaaactaatttcatgtcaagtatgcttactgtttatttatttcttattcccttataaagagtcgtaaaactttttctggcccatggggtagtttcatcatcatgttatcactagatgtattcttttggttcattgtactcattttatagtaataataactaactgtccagtggaccgaccatgtttattgtcatgtcttatttatttaggggctgtttggatcccaggagctaaaacaaaagtgactaaagtttagttacttagagcaactccagtagttctctaaatgactctctaaatcaagaatttagatagttagcacaaaaacctctctccaacagctctctaaattgacttcataaatttagtcacttctcatgtaaccctatttcctccctacatttgataatcatgtagcaagtcacgaaaaaaaactgacgccattttctcactcgtggcaatctttccctgttcctgctgcttcgtatgtcacacatgcctttgactcttcctgttttgtacggcagtcgtgttgcatggtatccaaatgacccaccaatttgatttttcaaacagattaactacctaaataatagcaactgttggagatccacaaattttttttgaacgcccaatagctgtttacaaacttgctaaatacaattttaaggagatatattttacataactactggagctgctcttaggagctaaagatccaaataggaagcactaaaactgattatagtggtgaaaaaagtatcaatttagtcacttttagctcttcctgtttggatatttagctcctaagtaactaaactctataatcatttttgctttagctcctggaatccaaacatgcccttagtataccttttttttttaccatctcaggtttcttgtgaaaatttagtagcatacactggggcatccccgtcccacatgcctaactttcttttcctgttggtcaggtggatacaattctggacaaggagaactttacattggaagagcttcttgatgaggatgaaatcattcaggagtgcaaagcgctgaatacccgactcataaatttcttgcgagataaggcccaagtgtcgcaattacttcgttacattgtggaagaagttcctgaggattcagagaagaaacaatctttcaagtttccttttatcgcttgtgagatttttgcttgtgaaattgacattattttgagaaccttggtagaggatgttgagttaatggatttgcttttttcatttataaaacctgaccatccgcatagcacactgttagctggttacttcagtaaggtggttatatgtttgatgcttcgaaagactgctcctcttatgaattatgttcaggagcatccagatattgttgtccagcttgtcgacctcattggtatcacatcaataatggaggtgttggtgagattgattggtgctgatgaaaccatatacttgaatttcgcggatacattgcattggttagagaatacatatgtactggaaatgattgtggataaatttagctcatcagactctcctgaagtgcatgcaaatgctgctgaaattctttctgcggtaactcgatgcgcccctcctgctcttgctgcaaaaatatgcagtccaagttttgttggcaggttgtttcatcatgctcttgacgagtcaagaccaaaatctgttctggttcattcattgtcagtgtgtatatctttattggaccccaaaagactagcatcagtctcataccaagcatttagaagcaacttaactcacgggacgctggttacagccagtccagaaacagttgatggtatactggagagtctaggtgacttgctgaagttactggacattacttcttctcaaaatgtttttcctacaacttatggatgtttgtgtccgcctcttggaaaacaccgtttgaagattgtagaattcatctctgttttgctaacaattggtagcgaaatagctgagaagaagctaataagccaatcagtgataaagcattgcattgatttattttttcagtacccttataataactttttgcatcatcatgttgagaacattattgtttcttgccttgaggttaaaagaaatcaattgattgaccatattcttaatgactgtggtcttgttggtaaagtccttgccgctgaaaaaagttcttctctggcagtggagtctaatgggccaacattaccatcagaagggaaagaacctccaagaattgggaatattgggcacataactcgaatagcgaataagctcattcaatttggaaatagtaacagcatgatccagagtcacttgcaggagaacagtgagtgggctgtatggcaaatagatgtcctgatcaaacgcaatgaggtggagaatgtttaccattgggcatgtggccgtccaacatctctacatgatcgtgggagggatagcgatgacgacgacttccgagacagagactacgatgtggcagcactcactaataatatgagccaggcatttcgatttgggatatacaggaatgatgacattgaagaggcacaaggatcccacgaacgagatgatgaggatgtctactttgatgacgagtcagctgaagtagtaatatcttcattgtgtttgggggatgatcaggacagttcactcttcacgaattcaaactggtttacgtttgatggtgatagaggaatcaatgaccgcctagctgcctctgttcctccatcatccccggattctgaagcgatttccttaaacactgagaatactgatgaagcgctaactggtgaaaccactggaggcactgagtcactgcgggaaagtgcatcccttgccaatgaactagcagaagtcgctaacgacaatgatgctgatgccacggacggtgagaaaattttgtgtacagaagaggacagtcaagcctccgaggggcctgtggatgctaaagaggacaagactggaggagcgtctaaagcagcgaatgaatctgtgcctgacaatgccttgcctgaatcccaccacactgattgtcggtgcgctgactcatctgaatcaggaacagaagaagatgtggagattgatgatgagaagaaatctgagactgctatgacaaatgaatgagcgttatgggcttggaatgataggatggcggatcagattcttttgctggtgagcaatgccactcaagcaggggcgccgtacaattttaacagcgctgctttgctattgaggagtctggttgttactgcatactcgggcacgcacgctcttttatcatctcacctcatcaccatcatcccacatggaccaatgtcgtctggcggctcctgattttggtctcttcgaactgtaatatctgcagtgagttttttccatcagtttttatttttttttccgggtttctgcatctgtaatagctatttcttcaagcgcaaaacatgtcttctctttgttgctataaaaagcatatagtttcaccaaaa

SEQ ID NO: 63900 - DNA, 1778 bp, Zea Mays
ctctctctgtctgagccgagggctttggcgctcccccccccccccccccccccctctctctctctctctctctcgcacgggcccgcctgcctatcccactgcccggtccaccgccgcaaactctgcccgcccgcgcgcgccccaccccgccgatcgcggtgagcccggactccgccgccgccgcttcgctctaccctgaccagccctagatctgtgcgggatccgccgccatgttctggcgcatgaccggcctctccgcggcctcgcccgtggatacaattctggacaaggagaactttacattggaagagcttcttgatgaggatgaaatcattcaggagtgcaaagcgctgaatacccgactcataaatttcttgcgagataaggcccaagtgtcgcaattacttcgttacattgtggaagaagttcctgaggattcagagaagaaacaatctttcaagtttccttttatcgcttgtgagatttttgcttgtgaaattgacattattttgagaaccttggtagaggatgttgagttaatggatttgcttttttcatttataaaacctgaccatccgcatagcacactgttagctggttacttcagtaaggtggttatatgtttgatgcttcgaaagactgctcctcttatgaattatgttcaggagcatccagatattgttgtccagcttgtcgacctcattggtatcacatcaataatggaggactctcctgaagtgcatgcaaatgctgctgaaattctttctgcggtaactcgatgcgcccctcctgctcttgctgcaaaaatatgcagtccaagttttgttggcaggttgtttcatcatgctcttgacgagtcaagaccaaaatctgttctggttcattcattgtcagtgtgtatatctttattggaccccaaaagactagcatcagtctcataccaagcatttagaagcaacttaactcacgggacgctggttacagccagtccagaaacagttgatggtatactggagagtctaggtgacttgctgaagttactggacattacttcttctcaaaatgtttttcctacaacttatggatgtttgtgtccgcctcttggaaaacaccgtttgaagattgtagaattcatctctgttttgctaacaattggtagcgaaatagctgagaagaagctaataagccaatcagtgataaagcattgcattgatttattttttcagtacccttataataactttttgcatcatcatgttgagaacattattgtttcttgccttgaggttaaaagaaatcaattgattgaccatattcttaatgactgtggtcttgttggtaaagtccttgccgctgaaaaaagttcttctctggcagtggagtctaatgggccaacattaccatcagaagggaaagaacctccaagaattgggaatattgggcacataactcgaatagcgaataagctcattcaatttggaaatagtaacagcatgatccagagtcacttgcaggagaacagtgagtgggctgtatggcaaatagatgtcctgatcaaacgcaatgaggtggagaatgtttaccattgggcatgtggccgtccaacatctctacatgatcgtgggagggatagcgatgacgacgacttccgagacagagactacgatgtggcagcactcactaataatatgagccaggcatttcgatttgggatatacaggaatgatgacattgaagaggtgaactgcgcatcattatattaagaagatagaagggtc

SEQ ID NO: 63901 - DNA, 1891 bp, Zea Mays
ctctctctgtctgagccgagggctttggcgctcccccccccccccccccccccctctctctctctctctctctcgcacgggcccgcctgcctatcccactgcccggtccaccgccgcaaactctgcccgcccgcgcgcgccccaccccgccgatcgcggtgagcccggactccgccgccgccgcttcgctctaccctgaccagccctagatctgtgcgggatccgccgccatgttctggcgcatgaccggcctctccgcggcctcgcccgtggatacaattctggacaaggagaactttacattggaagagcttcttgatgaggatgaaatcattcaggagtgcaaagcgctgaatacccgactcataaatttcttgcgagataaggcccaagtgtcgcaattacttcgttacattgtggaagaagttcctgaggattcagagaagaaacaatctttcaagtttccttttatcgcttgtgagatttttgcttgtgaaattgacattattttgagaaccttggtagaggatgttgagttaatggatttgcttttttcatttataaaacctgaccatccgcatagcacactgttagctggttacttcagtaaggtggttatatgtttgatgcttcgaaagactgctcctcttatgaattatgttcaggagcatccagatattgttgtccagcttgtcgacctcattggtatcacatcaataatggaggtgttggtgagattgattggtgctgatgaaaccatatacttgaatttcgcggatacattgcattggttagagaatacatatgtactggaaatgattgtggataaatttagctcatcagactctcctgaagtgcatgcaaatgctgctgaaattctttctgcggtaactcgatgcgcccctcctgctcttgctgcaaaaatatgcagtccaagttttgttggcaggttgtttcatcatgctcttgacgagtcaagaccaaaatctgttctggttcattcattgtcagtgtgtatatctttattggaccccaaaagactagcatcagtctcataccaagcatttagaagcaacttaactcacgggacgctggttacagccagtccagaaacagttgatggtatactggagagtctaggtgacttgctgaagttactggacattacttcttctcaaaatgtttttcctacaacttatggatgtttgtgtccgcctcttggaaaacaccgtttgaagattgtagaattcatctctgttttgctaacaattggtagcgaaatagctgagaagaagctaataagccaatcagtgataaagcattgcattgatttattttttcagtacccttataataactttttgcatcatcatgttgagaacattattgtttcttgccttgaggttaaaagaaatcaattgattgaccatattcttaatgactgtggtcttgttggtaaagtccttgccgctgaaaaaagttcttctctggcagtggagtctaatgggccaacattaccatcagaagggaaagaacctccaagaattgggaatattgggcacataactcgaatagcgaataagctcattcaatttggaaatagtaacagcatgatccagagtcacttgcaggagaacagtgagtgggctgtatggcaaatagatgtcctgatcaaacgcaatgaggtggagaatgtttaccattgggcatccgtccaacatctctacatgatcgtgggagggatagcgatgacgacgacttccgagacagagactacgatgtggcagcactcactaataatatgagccaggcatttcgatttgggatatacaggaatgatgacattgaagaggtgaactgcgcatcattatattaagaagatagaagggtc

SEQ ID NO: 63902 - DNA, 2189 bp, Zea Mays
tctctctctctctctctctcgcacgggcccgcctgcctatcccactgcccggtccaccgccgcaaactctgcccgcccgcgcgcgccccaccccgccgatcgcggtgagcccggactccgccgccgccgcttcgctctaccctgaccagccctagatctgtgcgggatccgccgccatgttctggcgcatgaccggcctctccgcggcctcgcccggttatattctgtgatcaccgtcatgttcctgctgcacgcacacctacccagggaaggaattggataaagcttgagtgcagctagtttgagcaattccattgacaacgattccggttcattaataaacaggctttctctggctctctgcacattttctgttactgtctctgtgggaacatattttctgtttctgtcccattactatttatagggcttcctatacctgtgtcggaaactaatttcatgtcaagtatgcttactgtttatttatttcttattcccttataaagagtcgtaaaactttttctggcccatggggtagtttcatcatcatgttatcactagatgtattcttttggttcattgtactcattttatagtaataataactaactgtccagtggaccgaccatgtttattgtcatgtcttatttatttaggggctgtttggatcccaggagctaaaacaaaagtgactaaagtttagttacttagagcaactccagtagttctctaaatgactctctaaatcaagaatttagatagttagcacaaaaacctctctccaacagctctctaaattgacttcataaatttagtcacttctcatgtaaccctatttcctccctacatttgataatcatgtagcaagtcacgaaaaaaaactgacgccattttctcactcgtggcaatctttccctgttcctgctgcttcgtatgtcacacatgcctttgactcttcctgttttgtacggcagtcgtgttgcatggtatccaaatgacccaccaatttgatttttcaaacagattaactacctaaataatagcaactgttggagatccacaaattttttttgaacgcccaatagctgtttacaaacttgctaaatacaattttaaggagatatattttacataactactggagctgctcttaggagctaaagatccaaataggaagcactaaaactgattatagtggtgaaaaaagtatcaatttagtcacttttagctcttcctgtttggatatttagctcctaagtaactaaactctataatcatttttgctttagctcctggaatccaaacatgcccttagtataccttttttttttaccatctcaggtttcttgtgaaaatttagtagcatacactggggcatccccgtcccacatgcctaactttcttttcctgttggtcaggtggatacaattctggacaaggagaactttacattggaagagcttcttgatgaggatgaaatcattcaggagtgcaaagcgctgaatacccgactcataaatttcttgcgagataaggcccaagtgtcgcaattacttcgttacattgtggaagaagttcctgaggattcagagaagaaacaatctttcaagtttccttttatcgcttgtgagatttttgcttgtgaaattgacattattttgagaaccttggtagaggatgttgagttaatggatttgcttttttcatttataaaacctgaccatccgcatagcacactgttagctggttacttcagtaaggtggttatatgtttgatgcttcgaaagactgctcctcttatgaattatgttcaggagcatccagatattgttgtccagcttgtcgacctcattggtatcacatcaataatggaggtgttggtgagattgattggtgctgatgaaaccatatacttgaatttcgcggatacattgcattggttagagaatacatatgtactggaaatgattgtggataaatttagctcatcagactctcctgaagtgcatgcaaatgctgctgaaattctttctgcggtaactcgatgcgcccctcctgctcttgctgcaaaaatatgcagtccaaggtgtgaggagatcttgggcaaaaggaaacccataggcaagatctcctcaaagatggaaacccccaatcaggatcctatactaagggcccgtttggcagcatga

SEQ ID NO: 63903 - DNA, 4146 bp, Zea Mays
gtccatccgtcacggcgccaccacctctacctccttccctcaccttccagagcccactgctcctcggcggcggcggagatgagcgtgtggaactacgtcgtcacggcgcacaagcccaccagcgtcagccactcctgcgtaggcaactttaccagccccaaccagctcaaccttattatcgcgaaatgtacccggatcgaaatccatttgcttacccctcagggcctccagccgatgcttgatgtgcctatatatggaagaattgcaacgattgagctcttccggcctcataatgagactcaggactttcttttcattgctacggagaggtacaaattctgtgttctgcaatgggatgcagaaaagtcagagctaatcaccagagccatgggtgatgtttctgatcgcattggccgccctactgacaatggacagattggaatcattgaccctgactgtagactcattggtcttcatctctatgatggcttatttaaggttataccatttgacaacaaagggcagctgaaggaagctttcaatatcagacttgaagaacttcaagtactggacatcaaatttctacatggttgtgctaaacctactattgttgtcctctaccaggataataaagatgtgaggcatgttaagacttatgaagttgcactgaaggacaaagattttgttgagggtccttggtcccagaataatgtagataatggtgctggtttattaataccagtaccagctccacttggcggtgtgataataattggcgaggaacaaatagtttactgcaatgccaattccacatttaaagcgataccaataaaacaatccatcatcagagcttatggacgggttgacccagatggttctcgatatttactcggtgataatactggaattttgcatttacttgtccttacccatgaacgagaaagggttactggtttgaaaattgaatacctgggagagacttcgattgcatcatctatttcgtatcttgataatggtgttgtttacgtcggttcacggtttggcgattcacagctggtgaagctgaacctccaagctgatgcaagcggttcatttgttgaaattcttgaacggtatgttaatcttggaccgattgtggacttctgcgtggttgaccttgataggcagggtcaaggtcaggtggtcacttgttctggggcgtttaaagatggttcccttcgggtggttcgtaatggtatagggattaatgagcaggcttcagtagaactccaaggcataaagggattatggtcattgaaatcttcgatcaatgatccatttgacatgtaccttgtcgtgagctttataagtgagacacgattcttggcaatgaacatggaagatgaactagaagagactgagatagaggggtttgatgcacaaactcaaactctgttttgtcagaatgcgatcaatgatcttcttatacaggttactgctaattctgttcggttagtcagttgcacctcccgggagttagtgaatcaatggaatgcaccagcaggattctcagtcaatgttgcttcagctaatgccagccaggttctgttggcaaccggtggtggccatcttgtttacctggaaattagggatgctaaacttgttgaagtgaagcatgctcagctagaacatgagatttcttgtcttgatttgaacccaattggggagaatccacaatatagttccctagctgctgttgggatgtggacagatataagtgttagaatattttcgcttccagatcttgaattgataaggaaggaaaatttgggtggagaaattgttcctcggtctgttctgctgtgcaccttggagggggtttcgtatttgctttgtgctcttggggatggtaatttgttcagttttctactgaatgcaagtacaggtgaactgactgatagaaagaaggttaccctcgggacccaacccatcagccttcgtaccttctcatcaaagggtaccacccacgtgttcgcttcgtcagataggccaactgtcatctatagcagcaataagaagcttctctacagcaatgtcaatttgaaagaggttaatcatatgtgccctttcaatacagccgcttttccagacagtcttgcaattgctaaagagggtgaactttcaattggaactatcgatgatatacagaagcttcatatccgcacaatcccccttaatgaacaagcacgtcgcatttgtcaccaggagcaatcaaggacactagcattttgcagtttcaagtacaaccagagtgtggaggaaagtgagactcatttaatacgtctgctagatcatcagacgtttgagtccctgtgtgtatatcctctagatcaatatgaatgtggctgctccatcattagctgttcgtttgcggatgatagtaatgtttattactgtgtgggaactgcatatgttatacctgaagaaaatgaaccgacgaagggccggattcttgtatttgcagttgaagatggaagcttgcaattgatcgtggagaaagaaaccaaaggagcagtttattcgctgaatgcattcaatgggaaattgttggctgctatcaaccagaagattcaattgtataagtggatgtcacgcgaggatggttcacatgagctgcagtctgagtgtggccaccatgggcacatacttgccttgtatactcaaacacgtggtgacttcattgtggttggcgatctgatgaaatcaatatccttgctggtgtataagcatgaggaaagcgcgattgaagagcgtgctagggattacaatgcaaactggatgactgcagttgagatgcttgatgatgaagtctacgttggggcggagaatagctataacctattcacggtgcgcaagaacagcgatgcggcgacagatgacgaaagggccaggcttgaggtggtgggagagtaccaccttggggagtttgtgaacagattccgccacggttcactggtgatgcgccttccagactcggatatagggcagatccctacggtcatctttggcacaataaacggggtgattggcattattgcctccctcccgcacgaccaatacatcttcctggagaagctccagtcgacccttgtgaagtacataaagggcgtcggaaacctgagccacgagcaatggcggtccttccataacgacaagaagacggcggaggctcggaacttcctcgacggtgacctgatcgagtctttccttgaccttagccggagcaagatggaggaggtgtccaaggcgatgggcgtccccgtggaggagctgtccaagagggtggaagagctgacgaggcttcactagtgtagatggaacatggaagcgttgcttgtggatacaattctggacaaggagaactttacattggaagagcttcttgatgaggatgaaatcattcaggagtgcaaagcgctgaatacccgactcataaatttcttgcgagataaggcccaagtgtcgcaattacttcgttacattgtggaagaagttcctgaggattcagagaagaaacaatctttcaagtttccttttatcgcttgtgagatttttgcttgtgaaattgacattattttgagaaccttggtagaggatgttgagttaatggatttgcttttttcatttataaaacctgaccatccgcatagcacactgttagctggttacttcagtaaggtggttatatgtttgatgcttcgaaagactgctcctcttatgaattatgttcaggagcatccagatattgttgtccagcttgtcgacctcattggtatcacatcaataatggaggtgttggtgagattgattggtgctgatgaaaccatatacttgaatttcgcggatacattgcattggttagagaatacatatgtactggaaatgattgtggataaatttagctcatcagactctcctgaagtgcatgcaaatgctgctgaaattctttctgcggtaactcgatgcgcccctcctgctcttgctgcaaaaatatgcagtccaaggtgtgaggagatcttgggcaaaaggaaacccataggcaagatctcctcaaagatggaaacccccaatcaggatcctatactaagggcccgtttggcagcatga

SEQ ID NO: 63904 - DNA, 1257 bp, Zea Mays
ggaccacactccgatccgtgtatcctgaatctgccattcatcagtcatggtcgtcagatgagctgaagcctcgtgacgtcagggttgccccaagcatgtccgtcttcaagcatgccgatcctacaagcccccctccagttacctatttgcacttctacggttcctccgagttttcgtttggtatcttctgtttaccgaaatcggcaattattcccctccacaaccatcctgggatgacagtgtttagcaagatactgtttggttccatgcacctcaagtcctatgattgggctaaaagtctgccggcgggtagcaacgataatgcacttgagaactctgatggagcaggagctcgtctggccaaggtgaacacagatgccgtttttgacgcttcatctgagaccgtagttctgtaccctgaaaatggagggaacttgcactgctttacggcgctgaccccttgtgccgtgctggatgtgatgggccctccctacaaccgtgctcaaggaagggattgcgcgtattacagcgaatcgccctactcgtgtgctggagatgcacaatattcttggctcaaagaggttcacagcacatttgagatggaaggcataaagatggagcccaacttcatcgtctaataattaagcaggcatggcatggcatgtcatcgtaatgctgctagtttcatgtagataatctctagctgcgggggtgtagtacaactggaagacggccagatgctcttttgacattcgtttgccttaatttcatatgcctccctttatgtatgttaacaattcgaatcttgggtcatggtcactttttttctgttttccctgtagacagcaggtgctactttttgaagtgatcatggaccaaattctgtgggtcgtttggttggtttttgttgagcagcagaacagtcttcaactttctgcctgccatcgtgtttcagtttcagggcccatgccttgtgttttctctttgaatgaacaaagaactgtctctagcatagttataaatggatatggtccaggcttccaaatcaggagctgtgaggtgatggggacggacgtagttgtgtagtacgggggtcaggtcaggtccggccggacgatgttcttcgttgcagcgtactctctgttggctgcaccgcattagcgcaatgattcggtctgatttgtcatactttttaacctacaaatgttatgcattagcaatggttttagataaaaaaatattaacaaataaaaaaaa

SEQ ID NO: 63905 - DNA, 1547 bp, Zea Mays
cggaaccggaggcagtatgggatttggtgcccacaggaagtggagggagagcggtctccggtctcgcctccttcctcccgttcccgtcgccgccccgctcccgcccctggtcggaggcagcaaggtggcggacccgaggccggccagggtggtggacctatcgcccgtaggcgacaggtcccgcgcctcctccaagaagaaccgccgccgccacaagaaggccgacgccgcctcttccatctcgcccatgcagaggctcttcgacaccagcagggaggtcttcgccaactcctacccgggcttcgtcccgccgccggacgccgtcgcccgcctctcgggcctcctcaatgagctgaagcctcgtgacgtcagggttgccccaagcatgtccgtcttcaagcatgccgatcctacaagcccccctccagttacctatttgcacttctacggttcctccgagttttcgtttggtatcttctgtttaccgaaatcggcaattattcccctccacaaccatcctgggatgacagtgtttagcaagatactgtttggttccatgcacctcaagtcctatgattgggctaaaagtctgccggcgggtagcaacgataatgcacttgagaactctgatggagcaggagctcgtctggccaaggtgaacacagatgccgtttttgacgcttcatctgagaccgtagttctgtaccctgaaaatggagggaacttgcactgctttacggcgctgaccccttgtgccgtgctggatgtgatgggccctccctacaaccgtgctcaaggaagggattgcgcgtattacagcgaatcgccctactcgtgtgctggagatgcacaatattcttggctcaaagaggttcacagcacatttgagatggaaggcataaagatggagcccaacttcatcgtctaataattaagcaggcatggcatggcatgtcatcgtaatgctgctagtttcatgtagataatctctagctgcgggggtgtagtacaactggaagacggccagatgctcttttgacattcgtttgccttaatttcatatgcctccctttatgtatgttaacaattcgaatcttgggtcatggtcactttttttctgttttccctgtagacagcaggtgctactttttgaagtgatcatggaccaaattctgtgggtcgtttggttggtttttgttgagcagcagaacagtcttcaactttctgcctgccatcgtgtttcagtttcagggcccatgccttgtgttttctctttgaatgaacaaagaactgtctctagcatagttataaatggatatggtccaggcttccaaatcaggagctgtgaggtgatggggacggacgtagttgtgtagtacgggggtcaggtcaggtccggccggacgatgttcttcgttgcagcgtactctctgttggctgcaccgcattagcgcaatgattcggtctgatttgtcatactttttaacctacaaatgttatgcattagcaatggttttagataaaaaaatattaacaaataaaaaaaa

SEQ ID NO: 63906 - DNA, 1838 bp, Zea Mays
cggaaccggaggcagtatgggatttggtgcccacaggaagtggagggagagcggtctccggtctcgcctccttcctcccgttcccgtcgccgccccgctcccgcccctggttttgccttgcctagccttcgtccgtctactacttgtatggatgcaaataccaatctccacctgcactctcccgactcaggatttatacccacccccgtcggtcgatcccctccctccctcccgccgccgccgccgccgcccgtagccaagaccaagatcccgtctcgcccggcgtcgcacctgacctaaccctgagccctgtgatatgccggttcaggtcggaggcagcaaggtggcggacccgaggccggccagggtggtggacctatcgcccgtaggcgacaggtcccgcgcctcctccaagaagaaccgccgccgccacaagaaggccgacgccgcctcttccatctcgcccatgcagaggctcttcgacaccagcagggaggtcttcgccaactcctacccgggcttcgtcccgccgccggacgccgtcgcccgcctctcgggcctcctcagatgtggagacagcgatattatccaaggtttttactgttgcgttgcgtgatgaggacgaggttccgtttttgatgagctgaagcctcgtgacgtcagggttgccccaagcatgtccgtcttcaagcatgccgatcctacaagcccccctccagttacctatttgcacttctacggttcctccgagttttcgtttggtatcttctgtttaccgaaatcggcaattattcccctccacaaccatcctgggatgacagtgtttagcaagatactgtttggttccatgcacctcaagtcctatgattgggctaaaagtctgccggcgggtagcaacgataatgcacttgagaactctgatggagcaggagctcgtctggccaaggtgaacacagatgccgtttttgacgcttcatctgagaccgtagttctgtaccctgaaaatggagggaacttgcactgctttacggcgctgaccccttgtgccgtgctggatgtgatgggccctccctacaaccgtgctcaaggaagggattgcgcgtattacagcgaatcgccctactcgtgtgctggagatgcacaatattcttggctcaaagaggttcacagcacatttgagatggaaggcataaagatggagcccaacttcatcgtctaataattaagcaggcatggcatggcatgtcatcgtaatgctgctagtttcatgtagataatctctagctgcgggggtgtagtacaactggaagacggccagatgctcttttgacattcgtttgccttaatttcatatgcctccctttatgtatgttaacaattcgaatcttgggtcatggtcactttttttctgttttccctgtagacagcaggtgctactttttgaagtgatcatggaccaaattctgtgggtcgtttggttggtttttgttgagcagcagaacagtcttcaactttctgcctgccatcgtgtttcagtttcagggcccatgccttgtgttttctctttgaatgaacaaagaactgtctctagcatagttataaatggatatggtccaggcttccaaatcaggagctgtgaggtgatggggacggacgtagttgtgtagtacgggggtcaggtcaggtccggccggacgatgttcttcgttgcagcgtactctctgttggctgcaccgcattagcgcaatgattcggtctgatttgtcatactttttaacctacaaatgttatgcattagcaatggttttagataaaaaaatattaacaaataaaaaaaa

SEQ ID NO: 63907 - DNA, 1583 bp, Zea Mays
cggaaccggaggcagtatgggatttggtgcccacaggaagtggagggagagcggtctccggtctcgcctccttcctcccgttcccgtcgccgccccgctcccgcccctggttttgccttgcctagccttcgtccgtctactacttgtcggaggcagcaaggtggcggacccgaggccggccagggtggtggacctatcgcccgtaggcgacaggtcccgcgcctcctccaagaagaaccgccgccgccacaagaaggccgacgccgcctcttccatctcgcccatgcagaggctcttcgacaccagcagggaggtcttcgccaactcctacccgggcttcgtcccgccgccggacgccgtcgcccgcctctcgggcctcctcaatgagctgaagcctcgtgacgtcagggttgccccaagcatgtccgtcttcaagcatgccgatcctacaagcccccctccagttacctatttgcacttctacggttcctccgagttttcgtttggtatcttctgtttaccgaaatcggcaattattcccctccacaaccatcctgggatgacagtgtttagcaagatactgtttggttccatgcacctcaagtcctatgattgggctaaaagtctgccggcgggtagcaacgataatgcacttgagaactctgatggagcaggagctcgtctggccaaggtgaacacagatgccgtttttgacgcttcatctgagaccgtagttctgtaccctgaaaatggagggaacttgcactgctttacggcgctgaccccttgtgccgtgctggatgtgatgggccctccctacaaccgtgctcaaggaagggattgcgcgtattacagcgaatcgccctactcgtgtgctggagatgcacaatattcttggctcaaagaggttcacagcacatttgagatggaaggcataaagatggagcccaacttcatcgtctaataattaagcaggcatggcatggcatgtcatcgtaatgctgctagtttcatgtagataatctctagctgcgggggtgtagtacaactggaagacggccagatgctcttttgacattcgtttgccttaatttcatatgcctccctttatgtatgttaacaattcgaatcttgggtcatggtcactttttttctgttttccctgtagacagcaggtgctactttttgaagtgatcatggaccaaattctgtgggtcgtttggttggtttttgttgagcagcagaacagtcttcaactttctgcctgccatcgtgtttcagtttcagggcccatgccttgtgttttctctttgaatgaacaaagaactgtctctagcatagttataaatggatatggtccaggcttccaaatcaggagctgtgaggtgatggggacggacgtagttgtgtagtacgggggtcaggtcaggtccggccggacgatgttcttcgttgcagcgtactctctgttggctgcaccgcattagcgcaatgattcggtctgatttgtcatactttttaacctacaaatgttatgcattagcaatggttttagataaaaaaatattaacaaataaaaaaaa

SEQ ID NO: 63908 - DNA, 1432 bp, Zea Mays
gcgtgccggtgcctctgcctcctcccaccccttctcacgacctccctccgggcaggacaccataacaacgaccgcccggccgcagccactgctctctctctgtctctgtctctgtctcaacaacccgccgctaccgccacccgcacgttcaactaccaactgatcgagggggcgcgccggttgatcgggagcagatcgctcgctactgggacatagctagctagcttgtagtcgctcgctgcgcgtcccgccgccatgaccccagccacggcggttgccgtcgcgtccgaggcgtgcgtcctctcggactccacggtggcgtcgtcgtcgtccacggccgagaccgccgcggcgcgcgcggaggttccggcggccggcagcaccgatgagacgggcagcggcggcggtggggcggcggagcgccggtcccgcttccgtcggatctgcgtctactgcggcagcgccaaggggaagaaggccagctaccaggatgccgccatcgacctcgggaaccagctggtggagcggggcatagacctggtctacggcgggggctccatcggtctcatgggattggtctcccacgcagttcacgccggaggtcgccatgtcatggggatcattccaaaatcactgatgcccatagaggtaaccggagagcctgttggggaggttagagccgtctctggcatgcatgagaggaaggctgagatggcccggtttgctgatgcttttgttgcattgccaggtggctatggaactctggaggagttgcttgagatcattacttgggcacaactggggatccacaagaagccggttgggcttttgaacgttgatggattctacgacccgcttctgtctttcatcgacttggctgtcagagaaggactacgtcccggagtatgacgtcggcttggtctgggaggagcagaagcccaacagcttggtcccagctgctgggatcacctcatcctgatgatctctcaccttccagcctgcaccgcatcatatatacacatataactaagtaactaaccgatcgaagcctgccacaaattttttgttcatctgccaaagtcctaaccaaagggtaattcctcaaggcgtggtctattctcttctattctatgtgctggccggcgtagatcttttttgtttgtttttgctagaattagtacttgcaagcagtagtgactgacgaggatgcatctccatgctgtttgggtgtgttgctgaattttgtattgcacgtggttttagttatgctgcgtctgcgtgccctgtgaggttaaggaattgggcctgtttttgctttcatcgcgtctggcccagaaagatggcacgctgcgagttgacgacgaccacagatccacaatcttctaaagcgtttaattctctctgtcaaatacagtaaaataaaaatgagcag

SEQ ID NO: 63909 - DNA, 2685 bp, Zea Mays
atgtccttaaacagtctccaccgggggcgctccgcctccatcccgagttcgcgacccgtcgcctccctcctcctcattttcaagtttttgcttggttttcaccacttcgcgtcctgtctcctgtatgtgagtcctagcgccgccaaggaggccaggccaccaccgctcctgaactgcactgcgctctcctctccgctccaccagcggctgccgggcatccaagtccagtcgacacacagagaggataagccaagagcagccggtgggtgcggggtgaaccgtctgcctggaccgaggtttacgagtgagatgacggacgccggcgctggttccggcctgcagacgccggaccaggtccccaggggagcgggagctggtgcggtcgttgtggtggcccttcgcgccgccgccagggagatctccaagacggccgccgtctgggcgctgacgcacgtcgtccagcacggcgacagcatcctgctgctcgtgctcatcccgccgccgagctcaggcaggaagttctggggcttcccgttcttcgcggggagctgcgcaagtggacacaaggcagtgctgaatcagaggtcggatgtggctgagctgtgctctcagatggtgcggaagcttcgcgatgtgtatgatcccaacaacaagatagacgtgaaggttaagatcctgtccgggtcacctcccggcgccgtggccaaggaatccaagcgggtgcaagcagcctgggttgtgctggacaaggagctgaagcacgaggagaagcgctgcatggaggagctgcagtgcaacatcgtggctatgaagcgctcccaacccaaagttcttcggctgaacctggtgggatcgcattcgcatgagagggaagagtcgtccagaccacctcctcctccggcgccatcgccaccgccacctgagccgagcacgagtccgagtccgagccgagtgccatcgtcagcgacacctagcagcagcccagagtcagaagaagcgcccttcgacactagtaccaccgacgtcggagcgtcctgcgtctcgagctccgattcggacacgaacagcttttcgacgaataaagggacgacgacgacgacaacgacagcggcggccaaggacagcgtccagcgctcggacgccgactctgagagtgaggcttcgtcgctggagccatggatggctaccattttattacagacgcctgcagataggctagtcggaaaccggcccaggcccaggaggacgcccaccgcagactctctgctcgagaagatcgccaagctggacctcctgactgagatcagcgcgatccggagcaggtccgacctgaacttcagagggaacgtgagggacgccgtcgcgttggacaggagcgcgccgccggggcctccgcctttgtgctccatctgccagcacaaggcccccgtgttcgggaagccgccgcggtggttcagctacgcggagctggaggtcgcgaccggcggcttctcccgcgccaacttcttggccgaaggcgggttcgggtccgtccacagaggcgtccttccagacggccgggccgtcgccgtgaagcagcacaggctcgctagctcacagggcgacgtggagttctgctccgaggtggaggtcctgagctgcgcgcagcaccgcaatgtcgtcatgctgattggcttctgcgtcgagaataagaggcggttgcttgtgtacgagtacatctgcaatggatcgctggacacacacctttatggttggagatttcggcttggctaggtggcaacctgatggcgacatgggtgttgagacaagagtcattggcacattcggctatctggcgcccgagtatgctcagagtgggcaaataacggagaaggcagatgtctactcgttcggggttgtactagtggaacttgtaactggacggaaggctgtggacatcaacaggcccaagggccagcaattcctaaccgaatgggctcggcctctgctggaagagtgcgccatggacgagctgctggaccctcgcctgggagggcgcttctgcgagaacgaggtctactgcatggtgcacgcggcaaacctgtgcatacggcgtgaccctcatctcaggccgcgcatgtcccatgttctgcgcatactggagggcgggggcggcgacatggtggtggactcagctggcagcaggagctggcggatgcagcagcaccagcgttggcaggagcagagcagcccagcagctcaacgtgattcatcacagcgtgggcaggagactgcgggaagcccgtggagtcgagaacgaaggcagaacttgtgccatagatactagctagctagctagtatccctttcacttctccgggggatctgtgttgctgctgttcttgttcttgatgatttttttggctactagatggatgaactagtgtgtgtatagtggtggagattgtagtggtaggctcacattacgttacatatttttcacatattgttgtcatgaggcgtgcatggtttgtgcatcaccacgtgtccataaaaggacctcctgaactatgtatgggtgttcttgcttgcaggccttgtactgcatgcatcgagggagaaatgatgcgcgtatcccattcaagtaacatccgttaacttacaagcacagaggcatctacctaggccgtgacatcgatgccaccat

SEQ ID NO: 63910 - DNA, 2812 bp, Zea Mays
atgtccttaaacagtctccaccgggggcgctccgcctccatcccgagttcgcgacccgtcgcctccctcctcctcattttcaagtttttgcttggttttcaccacttcgcgtcctgtctcctgtatgtgagtcctagcgccgccaaggaggccaggccaccaccgctcctgaactgcactgcgctctcctctccgctccaccagcggctgccgggcatccaagtccagtcgacacacagagaggataagccaagagcagccggtgggtgcggggtgaaccgtctgcctggaccgaggtttacgagtgagatgacggacgccggcgctggttccggcctgcagacgccggaccaggtccccaggggagcgggagctggtgcggtcgttgtggtggcccttcgcgccgccgccagggagatctccaagacggccgccgtctgggcgctgacgcacgtcgtccagcacggcgacagcatcctgctgctcgtgctcatcccgccgccgagctcaggcaggaagttctggggcttcccgttcttcgcggggagctgcgcaagtggacacaaggcagtgctgaatcagaggtcggatgtggctgagctgtgctctcagatggtgcggaagcttcgcgatgtgtatgatcccaacaacaagatagacgtgaaggttaagatcctgtccgggtcacctcccggcgccgtggccaaggaatccaagcgggtgcaagcagcctgggttgtgctggacaaggagctgaagcacgaggagaagcgctgcatggaggagctgcagtgcaacatcgtggctatgaagcgctcccaacccaaagttcttcggctgaacctggtgggatcgcattcgcatgagagggaagagtcgtccagaccacctcctcctccggcgccatcgccaccgccacctgagccgagcacgagtccgagtccgagccgagtgccatcgtcagcgacacctagcagcagcccagagtcagaagaagcgcccttcgacactagtaccaccgacgtcggagcgtcctgcgtctcgagctccgattcggacacgaacagcttttcgacgaataaagggacgacgacgacgacaacgacagcggcggccaaggacagcgtccagcgctcggacgccgactctgagagtgaggcttcgtcgctggagccatggatggctaccattttattacagacgcctgcagataggctagtcggaaaccggcccaggcccaggaggacgcccaccgcagactctctgctcgagaagatcgccaagctggacctcctgactgagatcagcgcgatccggagcaggtccgacctgaacttcagagggaacgtgagggacgccgtcgcgttggacaggagcgcgccgccggggcctccgcctttgtgctccatctgccagcacaaggcccccgtgttcgggaagccgccgcggtggttcagctacgcggagctggaggtcgcgaccggcggcttctcccgcgccaacttcttggccgaaggcgggttcgggtccgtccacagaggcgtccttccagacggccgggccgtcgccgtgaagcagcacaggctcgctagctcacagggcgacgtggagttctgctccgaggtggaggtcctgagctgcgcgcagcaccgcaatgtcgtcatgctgattggcttctgcgtcgagaataagaggcggttgcttgtgtacgagtacatctgcaatggatcgctggacacacacctttatgacacaagattgcagtaggagccgccagaggcctgcgctacctccacgaagagtgtagggtgggctgtataatacaccgtgacatgagaccgaacaacatccttgtcacacacgatttcgaaccactggttggagatttcggcttggctaggtggcaacctgatggcgacatgggtgttgagacaagagtcattggcacattcggctatctggcgcccgagtatgctcagagtgggcaaataacggagaaggcagatgtctactcgttcggggttgtactagtggaacttgtaactggacggaaggctgtggacatcaacaggcccaagggccagcaattcctaaccgaatgggctcggcctctgctggaagagtgcgccatggacgagctgctggaccctcgcctgggagggcgcttctgcgagaacgaggtctactgcatggtgcacgcggcaaacctgtgcatacggcgtgaccctcatctcaggccgcgcatgtcccatgttctgcgcatactggagggcgggggcggcgacatggtggtggactcagctggcagcaggagctggcggatgcagcagcaccagcgttggcaggagcagagcagcccagcagctcaacgtgattcatcacagcgtgggcaggagactgcgggaagcccgtggagtcgagaacgaaggcagaacttgtgccatagatactagctagctagctagtatccctttcacttctccgggggatctgtgttgctgctgttcttgttcttgatgatttttttggctactagatggatgaactagtgtgtgtatagtggtggagattgtagtggtaggctcacattacgttacatatttttcacatattgttgtcatgaggcgtgcatggtttgtgcatcaccacgtgtccataaaaggacctcctgaactatgtatgggtgttcttgcttgcaggccttgtactgcatgcatcgagggagaaatgatgcgcgtatcccattcaagtaacatccgttaacttacaagcacagaggcatctacctaggccgtgacatcgatgccaccat

SEQ ID NO: 63911 - DNA, 2842 bp, Zea Mays
atgtccttaaacagtctccaccgggggcgctccgcctccatcccgagttcgcgacccgtcgcctccctcctcctcattttcaagtttttgcttggttttcaccacttcgcgtcctgtctcctgtatgtgagtcctagcgccgccaaggaggccaggccaccaccgctcctgaactgcactgcgctctcctctccgctccaccagcggctgccgggcatccaagtccagtcgacacacagagaggataagccaagagcagccggtgggtgcggggtgaaccgtctgcctggaccgaggtttacgagtgagatgacggacgccggcgctggttccggcctgcagacgccggaccaggtccccaggggagcgggagctggtgcggtcgttgtggtggcccttcgcgccgccgccagggagatctccaagacggccgccgtctgggcgctgacgcacgtcgtccagcacggcgacagcatcctgctgctcgtgctcatcccgccgccgagctcaggaagttctggggcttcccgttcttcgcggggagctgcgcaagtggacacaaggcagtgctgaatcagaggtcggatgtggctgagctgtgctctcagatggtgcggaagcttcgcgatgtgtatgatcccaacaacaagatagacgtgaaggttaagatcctgtccgggtcacctcccggcgccgtggccaaggaatccaagcgggtgcaagcagcctgggttgtgctggacaaggagctgaagcacgaggagaagcgctgcatggaggagctgcagtgcaacatcgtggctatgaagcgctcccaacccaaagttcttcggctgaacctggtgggatcgcattcgcatgagagggaagagtcgtccagaccacctcctcctccggcgccatcgccaccgccacctgagccgagcacgagtccgagtccgagccgagtgccatcgtcagcgacacctagcagcagcccagagtcagaagaagcgcccttcgacactagtaccaccgacgtcggagcgtcctgcgtctcgagctccgattcggacacgaacagcttttcgacgaataaagggacgacgacgacgacaacgacagcggcggccaaggacagcgtccagcgctcggacgccgactctgagagtgaggcttcgtcgctggagccatggatggctaccattttattacagacgcctgcagataggctagtcggaaaccggcccaggcccaggaggacgcccaccgcagactctctgctcgagaagatcgccaagctggacctcctgactgagatcagcgcgatccggagcaggtccgacctgaacttcagagggaacgtgagggacgccgtcgcgttggacaggagcgcgccgccggggcctccgcctttgtgctccatctgccagcacaaggcccccgtgttcgggaagccgccgcggtggttcagctacgcggagctggaggtcgcgaccggcggcttctcccgcgccaacttcttggccgaaggcgggttcgggtccgtccacagaggcgtccttccagacggccgggccgtcgccgtgaagcagcacaggctcgctagctcacagggcgacgtggagttctgctccgaggtggaggtcctgagctgcgcgcagcaccgcaatgtcgtcatgctgattggcttctgcgtcgagaataagaggcggttgcttgtgtacgagtacatctgcaatggatcgctggacacacacctttatgaccgtaacaaagaaacgctggagtgggctgccagacacaagattgcagtaggagccgccagaggcctgcgctacctccacgaagagtgtagggtgggctgtataatacaccgtgacatgagaccgaacaacatccttgtcacacacgatttcgaaccactggttggagatttcggcttggctaggtggcaacctgatggcgacatgggtgttgagacaagagtcattggcacattcggctatctggcgcccgagtatgctcagagtgggcaaataacggagaaggcagatgtctactcgttcggggttgtactagtggaacttgtaactggacggaaggctgtggacatcaacaggcccaagggccagcaattcctaaccgaatgggctcggcctctgctggaagagtgcgccatggacgagctgctggaccctcgcctgggagggcgcttctgcgagaacgaggtctactgcatggtgcacgcggcaaacctgtgcatacggcgtgaccctcatctcaggccgcgcatgtcccatgttctgcgcatactggagggcgggggcggcgacatggtggtggactcagctggcagcaggagctggcggatgcagcagcaccagcgttggcaggagcagagcagcccagcagctcaacgtgattcatcacagcgtgggcaggagactgcgggaagcccgtggagtcgagaacgaaggcagaacttgtgccatagatactagctagctagctagtatccctttcacttctccgggggatctgtgttgctgctgttcttgttcttgatgatttttttggctactagatggatgaactagtgtgtgtatagtggtggagattgtagtggtaggctcacattacgttacatatttttcacatattgttgtcatgaggcgtgcatggtttgtgcatcaccacgtgtccataaaaggacctcctgaactatgtatgggtgttcttgcttgcaggccttgtactgcatgcatcgagggagaaatgatgcgcgtatcccattcaagtaacatccgttaacttacaagcacagaggcatctacctaggccgtgacatcgatgccaccat

SEQ ID NO: 63912 - DNA, 2566 bp, Zea Mays
gtcaaggagttgtagtgacgcaacaggagatgatagagtgctgtcggatggatggagtgaaactgcctgctgccgaggtggccgacggagagcatgctgagttgaaaaggggtgttggccacgctccacgataagcgacgcggcacggcacgtgtgaagccatgatggatggatggatggtgtaggagagcagtacgcagacagacgcgcctccgcctccctccatggactggaccgccgcggggcgggattgtactccatggacgacgacacgctcatggcatactacgctacctgcaccgtgctccgagcccagcccaaccgatcttcttcctcctgcctgtgcctgcggatctccatgaccacccaccgaccgcgaggtaaaaagatgtgtcagggaagacgaaccggactggagcaccggccccacctactctatgcacctatttaaatcgctcaggttggttgaattgtcctcctcctccctgctcactgcactgtgtcaccactcgctgctccacctcacttcactcgaaggccttccgtccatctcccaaggcgcccccgcttgtcctcttccttccgtgtcggccgaggccacgcacatggcgctgcctctgccacccctcctcctcctcctccttggaatgctcgcctcccgcgcgccggcccagacggccacgctgcacgagcgcgacgcggcggcgctgcgcgacctccgggccagcctgcgcgacctgccgggctcccgcttcttcgacacctgggacgacgcccggagcccctgcgcgtacgccggcgtcgtctgcgcgcccgacgaggacagcacccccacccccacctccgtcacgctacgcgtgtccgtgctcaccctgggcacggggctcgccgactccccgggtctagcggggacgctcccggactcgctggccacactcgcggcgctcacggacctggtcctctaccccggccgcgtgtccggccccatacccgcgggcctaggcgcgggcctccgccgcctccgcctgctgtcgctggcgggcaaccagctgacgggccccgtgccggcctccctcgcggggctgcccgacctccacacgctcgacctcggcgggaaccgcctcgacggcgccgtcccgccggacctgctcctgccggcctcgcccagcctcaaggtgctcatcctcgccaacaacggcggggtctccggtgagatccccgccggcttcgcttcctccgggctgttccacgtcgaccttgcgcggaacgcgctcgccggcgcgctcccgccgctgccgcccacgctacggtacctgtccgtcgctggcaacaccatggagggcacgctggagggggccttctgctctggcgacggcggctctgccagcccgcccctacccgccgacctggcgttcctcgacctgtccatgaacaacttctcgggccaaatcccggcggcgctgttcgcgctgccgggcctctcgtcactgctcctgtcgcggaacaacttcacgggtgcgctggccgtgccgtcccagcagcagcagtgggccgtggtggacgtgagccacaacggcatctcgggcgaggtcccggaggcgctggcggcggcggccagcctgtacgtcaacaacaaccggctgtccggggaggtgccggcggcggtggcacgcagcgtgctggacgggcggatgaccacgctgtacgcgcagcacaacttcctgacggccttccccgtgccgcctgccgcgccgctgccggactccgccgcgctctgcctgtcctacaactgcatggacctgccgatggcgtccgcggccgacggatgccccaccatcggcgggcccctcgaggccaggcccgccgagcagtgccggagcaccaccggcgacggctgacgggcggactgagatgtgatgtgacacgggcgggtggacacgcacgctcgcggcacgtcacccggcacgggtgggctggggacggacacccaggctggctcgctggctgggggcgctttgtccgcttgttttagctggagctcttgttgttttgggtcgtgtgatttcagttcaaaagcgcgacagaattaggagctgcccaggccagttgtttatacaggccgtcgtcctgttccagacgcgtttctgtctgtgggctcttatttcttgggccgtcgtctagtgcgccctggtcttcaatggtttgtttgtttcctggactgagggggtttgctcggtttccctttcttttctgtttgaggcccatggaagccgatttgccacatgggcgttctcttttttttcttcttccccttgtaccctagaagatttaattgccacacggcccatgacatccagttaggctctccaaagatcttttacttgtcctacttcttatttaaaactttaatttagctttatttgtttggtattataatctgtcgagattatagtataactaatccaccaggtaacaaacacctagattatatgtccatattatataatctgaagagtagtttattttagattatttttgacaaaagatccactacccatggttatgg

SEQ ID NO: 63913 - DNA, 2584 bp, Zea Mays
taatgatcgatgtcaaggagttgtagtgacgcaacaggagatgatagagtgctgtcggatggatggagtgaaactgcctgctgccgaggtggccgacggagagcatgctgagttgaaaaggggtgttggccacgctccacgataatctgcaggcgacgcggcacggcacgtgtgaagccatgatggatggatggatggtgtaggagagcagtacgcagacagacgcgcctccgcctccctccatggactggaccgccgcggggcgggattgtactccatggacgacgacacgctcatggcatactacgctacctgcaccgtgctccgagcccagcccaaccgatcttcttcctcctgcctgtgcctgcggatctccatgaccacccaccgaccgcgaggtaaaaagatgtgtcagggaagacgaaccggactggagcaccggccccacctactctatgcacctatttaaatcgctcaggttggttgaattgtcctcctcctccctgctcactgcactgtgtcaccactcgctgctccacctcacttcactcgaaggccttccgtccatctcccaaggcgcccccgcttgtcctcttccttccgtgtcggccgaggccacgcacatggcgctgcctctgccacccctcctcctcctcctccttggaatgctcgcctcccgcgcgccggcccagacggccacgctgcacgagcgcgacgcggcggcgctgcgcgacctccgggccagcctgcgcgacctgccgggctcccgcttcttcgacacctgggacgacgcccggagcccctgcgcgtacgccggcgtcgtctgcgcgcccgacgaggacagcacccccacccccacctccgtcacgctacgcgtgtccgtgctcaccctgggcacggggctcgccgactccccgggtctagcggggacgctcccggactcgctggccacactcgcggcgctcacggacctggtcctctaccccggccgcgtgtccggccccatacccgcgggcctaggcgcgggcctccgccgcctccgcctgctgtcgctggcgggcaaccagctgacgggccccgtgccggcctccctcgcggggctgcccgacctccacacgctcgacctcggcgggaaccgcctcgacggcgccgtcccgccggacctgctcctgccggcctcgcccagcctcaaggtgctcatcctcgccaacaacggcggggtctccggtgagatccccgccggcttcgcttcctccgggctgttccacgtcgaccttgcgcggaacgcgctcgccggcgcgctcccgccgctgccgcccacgctacggtacctgtccgtcgctggcaacaccatggagggcacgctggagggggccttctgctctggcgacggcggctctgccagcccgcccctacccgccgacctggcgttcctcgacctgtccatgaacaacttctcgggccaaatcccggcggcgctgttcgcgctgccgggcctctcgtcactgctcctgtcgcggaacaacttcacgggtgcgctggccgtgccgtcccagcagcagcagtgggccgtggtggacgtgagccacaacggcatctcgggcgaggtcccggaggcgctggcggcggcggccagcctgtacgtcaacaacaaccggctgtccggggaggtgccggcggcggtggcacgcagcgtgctggacgggcggatgaccacgctgtacgcgcagcacaacttcctgacggccttccccgtgccgcctgccgcgccgctgccggactccgccgcgctctgcctgtcctacaactgcatggacctgccgatggcgtccgcggccgacggatgccccaccatcggcgggcccctcgaggccaggcccgccgagcagtgccggagcaccaccggcgacggctgacgggcggactgagatgtgatgtgacacgggcgggtggacacgcacgctcgcggcacgtcacccggcacgggtgggctggggacggacacccaggctggctcgctggctgggggcgctttgtccgcttgttttagctggagctcttgttgttttgggtcgtgtgatttcagttcaaaagcgcgacagaattaggagctgcccaggccagttgtttatacaggccgtcgtcctgttccagacgcgtttctgtctgtgggctcttatttcttgggccgtcgtctagtgcgccctggtcttcaatggtttgtttgtttcctggactgagggggtttgctcggtttccctttcttttctgtttgaggcccatggaagccgatttgccacatgggcgttctcttttttttcttcttccccttgtaccctagaagatttaattgccacacggcccatgacatccagttaggctctccaaagatcttttacttgtcctacttcttatttaaaactttaatttagctttatttgtttggtattataatctgtcgagattatagtataactaatccaccaggtaacaaacacctagattatatgtccatattatataatctgaagagtagtttattttagattatttttgacaaaagatccactacccatggttatgg

SEQ ID NO: 63914 - DNA, 1881 bp, Zea Mays
catcttgtacttttcggtacatgcaggtatacgagtgaatggtctctttacttcagcggattattttgctgctagcttttgtttatcacacagatgcagttaatgcttaatcctcagagctgcatataaccaagtggtgcttacctggatttgaggacctctgatgcttgttttatctcaagagtgatggtcggttcctgttggtggttatcagatattcagatagtgtatgtgacacctgttttgcttccggtagaagctacggcagacccacttttacagagttttgataaacttgagaggaaaagggtcatagtttattcaacaaagttacctggtccgatttctctattccatggatgcagaatgatgggtgcatacgagacactgatgatcctaaaaaaggggacagcctgtgtatgtattctgaaggcagggacgaaccacatggtgaggtgaggtggtgttggtagggagtaggattgtgagcatcatcatttaatggaatgttatcagtgggaatcaatagttctttttttatggaatattacaggagatgttagagcagatcactgatagtagcctttaccaacacatgggatccacatgtcagaatggaggatgtgtgagagagaaaaaaggtgacagttgctgtggtcccctttatttgaggagagatgggaggttttttggtgacaaaaaagaaaaaaagagcaatctgggaactgctggagcgtctccaccaatatataacagttttatgagcatgagggatgatattgccgagctgctggtgatgctttaatgatcgatgtcaaggagttgtagtgacgcaacaggagatgatagagtgctgtcggatggatggagtgaaactgcctgctgccgaggtggccgacggagagcatgctgagttgaaaaggggtgttggccacgctccacgataagtatgttatgttgcccccctgtcattatttatttatttgtttatttcaatttaaatttgcatgcagttaggctggtaacgtgaacagtctctaatcacatgattgctgttccctgtggaaggaatgcatgggtcaccacattgtgttatgctgccttggggcacgtagtttatcaacaacatatcttatgtttttttttttgtagaaaaaatcattcccgtatgcccttgactaggaaaacatatgtcggcccatcatctcagaaaattctcatcctggaagtgatgtccttaggattgagattcagattctcatcctgtcggagcatcgccaaatgtagcggtggcctgggcatcgcaaattctgtaggtactactagaatggtgaatggaggcgccgcaccacacgggtgggccggtttttttttggtttttaacctttttcgaacaaaacttacaaacttacatttagatccctagatgatttatttcagttgctataggctatgacgccgagttaacacagaacggcggcgacgcggcgggaagaggataacggcggtgtggcatgagaagatctatggtgccgagctaggggtcacgtcggcttgcacgtcaaccctagccgccgtcgtcacgtaagagctcggcgtcataggccatgacgccgagctaggggtctaaaaactgaagtaagttatccagggatcttagtgtaagttttgttcaaaaaaaaggttaaaaaacaaaaaaaaatcggcacaggtgggctctgccattggtggtcgtattagatcagagccggactttgtcaggacgtgagcagaaaatgcttaaattgtcattattgcccacagctcagctcagctcagacaaccatcggctccgtccgtcctgtactagcaagaaacaattcaaaccgaccgtttctatcc

SEQ ID NO: 63915 - DNA, 1265 bp, Zea Mays
atgggtgatagacatgattggatgtatgaaggtttcaagaagggtgggtgtcacacaagtgaatggtttgccaagacgcagatgtttctggaccatgcagctgctttgtcacaaatagataatattaggatgcttgtgtacgagtatgtgaataatgggaacttagaacagtggcttcatggtgcaatgcgtcagcacggtgttcttacttgggaggcccggatgaaagtcgttcttggaattgccaaggcgcttgcttatttacatgaagccatagaaccaaaagttgtacaccgtgatatcaaatcgagcaatatcttaattgatgaagaattcaatggcaagctttctgattttggactggccaagctcttgggtgctgggaagagccatatcacaacgcgagttatgggcacattcgggtatgtggctcccgagtatgccaatacaggtctgttaaatgagaagagcgatgtctacagttttggggtgctactactggaagcagtgactgggagggatccagttgactatggtcggcctgctaatgaggttcatctggtggagtggctgaaaatgatggttggcactagaagagccgaggaggtggtggatcctgacatggagttgaaaccagcgattcgtgctctgaagcgtgctcttctagtggcactgcgatgtgtagacccagatgctgagaaaaggcccactatgggtcaggttgttcggatgctcgaggcagaagacgtgccttcacgggaggaccgccggagccggagaggccacagcagccacgcagacaacgagtccaagaacccggtttcagttcagtacgccgggttatcccttaccttgcctgctcgatcatggactcaggccgttcgaaatatttgggaatccttgcggggtggggctttattggatggttggtactgatagagataggggaaggcttgcatcttgtgctggagtaggtattttactcccatttccttggtggtgggcggagtcggatcgattccgtgggaggggaggttgagacttgtggatgtggatcctattcgtgttctgtttgcccagcagcatgtacagaaactttattattattccctggttcttggtttaggactcatcggcgagtagaaaagatgactggctatttcctcatgtcatgagtctctccaaggtcgaagcaatctatgccgttcatttactgtagacatcgctccaaggtcgaagcaatctatgccgtcatcctttccgta

SEQ ID NO: 63916 - DNA, 452 bp, Zea Mays
atgggtgatagacatgattggatgtatgaaggtttcaagaagggtgggtgtcacacaagtgaatggtttgccaagacgcagatgtttctggaccatgcagctgctttgtcacaaatagataatattaggatgcttgtgtacgagtatgtgaataatgggaacttagaacagtggcttcatggtgcaatgcgtcagcacggtgttcttacttgggaggcccggatgaaagtcgttcttggaattgccaaggcgcttgcttatttacatgaagccatagaaccaaaagttgtacaccgtgatatcaaatcgagcaatatcttaattgatgaagaattcaatggcaagctttctgattttggactggccaagctcttgggtgctgggaagagccatatcacaacgcgagttatgggcacattcgggggaagcaaccattcatctttttatttcac

SEQ ID NO: 63917 - DNA, 630 bp, Zea Mays
acaaccagtcgcctacccactgcctcgcatcggcatcggcgtgccggtgctgccaagctaaaattccccaactcgcgtcgcgtcgtcagtgtgcgtgccagtcctccggcccaaaccccccgcacccaacccccagccccggcaaccgatggcggggtccgcggccgacgcggagcaggagcaaaagcgggcagcggcggcggcgtacgactacgagggcgacgcgcgctgggccgagtactggtccaacgtactcgtcccgccgaacctcgcctcccgccccgacgtcgtcgaccacttgaagcgcaagttctaccagcgctacatcgaacgtgccttgtagcgtcgggttgtagttgcagcgagtggctgagcgtagatccggtcgtgtgacgctgctttgcttcgctggtgacggtctgcttgcttacttgtagactgcacctgaacacggcatgctcgatcgagattccatgtgttgattgcttccaaccctgggtgcttgtgctactcattcaagctcgtgatttcattatggggaattcaacatgctcgttcgtagttagtaagtttagtatccatacaatccgtctataagctgggtcaggaccagggtgtacaatttcgttt

SEQ ID NO: 63918 - DNA, 3027 bp, Zea Mays
caatctatttgtttccgccgccgtgtctgtctcggcccaggcaagccaccgcatgcaccgccgtcgctcacaccgttccagcgcctcgtaccctcactgacgtagtgcgcgctgctccgccaacgcccccagcgacccaaacagactccgacccgcgccgtccgttccgtgtccggcctcgccgccgattctctcggagctcctgccctgccgtgcgggagcacttcttcgaacagatggaggctcgccgcgcgaggccgagcaaccagacgcactccagctgttggacgaatccctcctcctccacgccaggccctgcgtcgcctgaattcctcactacggtccgcggagcagcattttgcggccgtggcttcgcctccgccacagcaaggttgtcgtcatactcctttttatgtgtgaagaaggagaggaggtgcttatcgtagtcagtgacagtggtggatccagcagctcttgtggaaagcggcggaggggagttgacagtaacaacagcaacaaccgcggaagggggtgtgatgcttgcttgcagatgttgctgttatcgccttgggggtgattattctgtcctgtgctctaatgatgctcggaatgatgatggaactccccgtcagtgcgcctggttaatcacaatgaacggaggaagggcaatctcctctgaatccctcgcggcactggcatggcatttcctgctaaggcgtcgcagcagggacggtgccacagctctcgcatcttcatccggggtgcttcaaatcgcagaggacaaatcatctgcggccaacttgacaaagcacaagaaaggaagctcctcaacgacgctcttgacagaactggtgtgcgatatgagactgagagctggatggatgaagagacatcgtcctggatggacagggatctcacggacagcgatttgcggtaccgcttgctaatgcagaacctcgaggaactggagaccagcttggttggtaaagacctggagatggacatccttgagcagcttggggctctgggatcgttcaacgcttctgtggccaggggtgtctcggcgttacatggtcgaccagatggctctctgcttgatgatccggagccggagacgactcctctggatgcggggcaagaagacagccaagtggtcgtcgtccggagtggcaagagccaggagaggaagctgagaaggatgagagcatcatcagatgagaaaggatccaggacctcggtgaaggtgaacccaccacgaagacccaagaaatcccgtaaggcgagtagcagccagtttatatccgagtggaaaagtcacccaggccaaaggaggatcattgtgcgtgagcaatcagcactgctgtccaccatcaaggaatgtgcaggtcttgagaagataagggagaagatggtgaaggaagggcaggaggtgagctaccacaggtgggcggaggcagctggggtggacgaggcagagctggtgagcaggctgcaggcaggttactgctgccgggacaggctactggtgaccaccgagtggctggtcaggtgcatcgcgagaacatacaccggcatggggacggccttggacgatctgcttcaggctgggaagatgggcgttcttgacggcgccgagaagttcgacagccggaaggggtgcaggttctccacgtacgtcaagtactggatcaggaaagggatgctcgctctgctggctgaaaactcaggagtcaccctgctgcctgtacgccgatcgacatatatatatatgcatgtgtttttccgatcgacacatcatgcatgattaatttacaagtgcaggcaagaatggagagcatcatgcgcaaggtgaaggaggcgcggcgtgggatccggtacaggcagggcaggaacccgtcggactcagaggttgccgccgccgtgggcgtgtcggtagccaacgtgaggctggcgcgcaagtgctctcgcagggccgtctcgctctactcggaggtcgcgatcggacaggacgtcaagttcgcggaggtgatcccggacgagtcggcgtctccggacgaggcggcgctgttccggggccagctgagggagcggctgctgctggtgctgggcaggctgcccgcgcgggaaggacgcgtgctgcggctgcggcacgggctggaggacgggcggtgcaggtcgctggaggagatcggcggcatctacggcgtctccaaggagtggatcaggaagatcgagaagtcggccatggccaggctccgggacgacgacgccgtgcgccgcgacctccacgacttcgtctagtctgtctgcagtgcactagaacaatttgttagctggtagggaacgatgtcatgtacgtagtaccatactatctatcagcagactgaaattgaagctgctattcacacgaaatatacaatgatagagatttgtgattcatgacggttataatgtcatgcttgctttcatgtttcaccccccatggagtgccactagctctaaaaatttctgaacacttgttgtaagtggcacgcacgcatgctgggttccgatggacatgccaggctccaggttcagcggcgagcagtggtatcgtcgtcgtcctgctcctgatgcccaccgtcgatgccttccagccagtacgcgccgccgttcggagacggagagctcgctgaagggccggcggaaacccgacggcgcgacaggcagagaggccagccgccctgcaggctcaggtagcagttccacgctgttgctcctgtgctagctaatccagccgtcatttccgttcttttctaatcacctgattatgctagctaattcgccagtcttctcttctctaactacgtactggatctctctttgatgcactgcaagatttggagctcaagtgcttctcagtccatgatggagacaggcatttatgtgcatggccaagttcactgtccatggtttatttctgatacatgtgtgtatgcaccattgtggcagagcgtcttgtttaggtccatgcatgggccctgctga

SEQ ID NO: 63919 - DNA, 3436 bp, Zea Mays
caatctatttgtttccgccgccgtgtctgtctcggcccaggcaagccaccgcatgcaccgccgtcgctcacaccgttccagcgcctcgtaccctcactgacgtagtgcgcgctgctccgccaacgcccccagcgacccaaacagactccgacccgcgccgtccgttccgtgtccggcctcgccgccgattctctcggagctcctgccctgccgtgcgggagcacttcttcgaacagatggaggctcgccgcgcgaggccgagcaaccagacgcactccagctgttggacgaatccctcctcctccacgccaggccctgcgtcgcctgaattcctcactacggtccgcggagcagcattttgcggccgtggcttcgcctccgccacagcaagtggtggatccagcagctcttgtggaaagcggcggaggggagttgacagtaacaacagcaacaaccgcggaagggggtgtgatgcttgcttgcagatgttgctgttatcgccttgggggtgattattctgtcctgtgctctaatgatgctcggaatgatgatggaactccccgtcagtgcgcctggttaatcacaagtaaattcatctcttttaatttgttctctctcttctccgattccctttgcacttttcttttctgcggagagagacgaggaggaatctgaatgtgtgggcgagtgttgaaagaggacgaaaataaatatctgacgagcagaggaatgctcgtatatatatgatgcttgtagaaaaagatcccggtgcagcaactcgctttcggccccgatcgtcttttcccctgctgccaaggtccaaccaaacacgatcggaggatagggctcccctcccggcttttctatccctccctctcctctgctcctgtgctatcctccgttcatcactcccccaggatcccctgcagctaccattgctacaacacgggtacagtacaggtgaggagggagaaaacaaacgaacgaaataaagagagtacgcatgggtttgcagatgatccatggcaggccctgcgccttgtgctgcccgtcctcctcctcctcgtcctccgccttgtggatgaggatgcaggcccagctgcccccaaagcagtctcaccatccattgaacggaggaagggcaatctcctctgaatccctcgcggcactggcatggcatttcctgctaaggcgtcgcagcagggacggtgccacagctctcgcatcttcatccggggtgcttcaaatcgcagaggacaaatcatctgcggccaacttgacaaagcacaaggtgagtgcagaaaggaagctcctcaacgacgctcttgacagaactggtgtgcgatatgagactgagagctggatggatgaagagacatcgtcctggatggacagggatctcacggacagcgatttgcggtaccgcttgctaatgcagaacctcgaggaactggagaccagcttggttggtaaagacctggagatggacatccttgagcagcttggggctctgggatcgttcaacgcttctgtggccaggggtgtctcggcgttacatggtcgaccagatggctctctgcttgatgatccggagccggagacgactcctctggatgcggggcaagaagacagccaagtggtcgtcgtccggagtggcaagagccaggagaggaagctgagaaggatgagagcatcatcagatgagaaaggatccaggacctcggtgaaggtgaacccaccacgaagacccaagaaatcccgtaaggcgagtagcagccagtttatatccgagtggaaaagtcacccaggccaaaggaggatcattgtgcgtgagcaatcagcactgctgtccaccatcaaggaatgtgcaggtcttgagaagataagggagaagatggtgaaggaagggcaggaggtgagctaccacaggtgggcggaggcagctggggtggacgaggcagagctggtgagcaggctgcaggcaggttactgctgccgggacaggctactggtgaccaccgagtggctggtcaggtgcatcgcgagaacatacaccggcatggggacggccttggacgatctgcttcaggctgggaagatgggcgttcttgacggcgccgagaagttcgacagccggaaggggtgcaggttctccacgtacgtcaagtactggatcaggaaagggatgctcgctctgctggctgaaaactcaggagtcaccctgctgcctgcaagaatggagagcatcatgcgcaaggtgaaggaggcgcggcgtgggatccggtacaggcagggcaggaacccgtcggactcagaggttgccgccgccgtgggcgtgtcggtagccaacgtgaggctggcgcgcaagtgctctcgcagggccgtctcgctctactcggaggtcgcgatcggacaggacgtcaagttcgcggaggtgatcccggacgagtcggcgtctccggacgaggcggcgctgttccggggccagctgagggagcggctgctgctggtgctgggcaggctgcccgcgcgggaaggacgcgtgctgcggctgcggcacgggctggaggacgggcggtgcaggtcgctggaggagatcggcggcatctacggcgtctccaaggagtggatcaggaagatcgagaagtcggccatggccaggctccgggacgacgacgccgtgcgccgcgacctccacgacttcgtctagtctgtctgcagtgcactagaacaatttgttagctggtagggaacgatgtcatgtacgtagtaccatactatctatcagcagactgaaattgaagctgctattcacacgaaatatacaatgatagagatttgtgattcatgacggttataatgtcatgcttgctttcatgtttcaccccccatggagtgccactagctctaaaaatttctgaacacttgttgtaagtggcacgcacgcatgctgggttccgatggacatgccaggctccaggttcagcggcgagcagtggtatcgtcgtcgtcctgctcctgatgcccaccgtcgatgccttccagccagtacgcgccgccgttcggagacggagagctcgctgaagggccggcggaaacccgacggcgcgacaggcagagaggccagccgccctgcaggctcaggtagcagttccacgctgttgctcctgtgctagctaatccagccgtcatttccgttcttttctaatcacctgattatgctagctaattcgccagtcttctcttctctaactacgtactggatctctctttgatgcactgcaagatttggagctcaagtgcttctcagtccatgatggagacaggcatttatgtgcatggccaagttcactgtccatggtttatttctgatacatgtgtgtatgcaccattgtggcagagcgtcttgtttaggtccatgcatgggccctgctga

SEQ ID NO: 63920 - DNA, 3722 bp, Zea Mays
aaaaaacccaatctatttgtttccgccgccgtgtctgtctcggcccaggcaagccaccgcatgcaccgccgtcgctcacaccgttccagcgcctcgtaccctcactgacgtagtgcgcgctgctccgccaacgcccccagcgacccaaacagactccgacccgcgccgtccgttccgtgtccggcctcgccgccgattctctcggagctcctgccctgccgtgcgggagcacttcttcgaacagatggaggctcgccgcgcgaggccgagcaaccagacgcactccagctgttggacgaatccctcctcctccacgccaggccctgcgtcgcctgaattcctcactacggtccgcggagcagcattttgcggccgtggcttcgcctccgccacagcaaggttgtcgtcatactcctttttatgtgtgaagaaggagaggaggtgcttatcgtagtcagtgacagtggtggatccagcagctcttgtggaaagcggcggaggggagttgacagtaacaacagcaacaaccgcggaagggggtgtgatgcttgcttgcagatgttgctgttatcgccttgggggtgattattctgtcctgtgctctaatgatgctcggaatgatgatggaactccccgtcagtgcgcctggttaatcacaagtaaattcatctcttttaatttgttctctctcttctccgattccctttgcacttttcttttctgcggagagagacgaggaggaatctgaatgtgtgggcgagtgttgaaagaggacgaaaataaatatctgacgagcagaggaatgctcgtatatatatgatgcttgtagaaaaagatcccggtgcagcaactcgctttcggccccgatcgtcttttcccctgctgccaaggtccaaccaaacacgatcggaggatagggctcccctcccggcttttctatccctccctctcctctgctcctgtgctatcctccgttcatcactcccccaggatcccctgcagctaccattgctacaacacgggtacagtacaggtgaggagggagaaaacaaacgaacgaaataaagagagtacgcatgggtttgcagatgatccatggcaggccctgcgccttgtgctgcccgtcctcctcctcctcgtcctccgccttgtggatgaggatgcaggcccagctgcccccaaagcagtctcaccatccatgtcagtgctctctctctctctctctctctctctctctgctcgtcaacgctagttccacgtgcattttcctgtcgtcctgtgtgctgcatggaattctctattggttgatggcgtacaagattactattgccgcggactgacggcacggcaggtaggctaggcagcagcaacacagacacacaccaaggatgacatgctcttgccatttcttcgttgtctgcagtgaacggaggaagggcaatctcctctgaatccctcgcggcactggcatggcatttcctgctaaggcgtcgcagcagggacggtgccacagctctcgcatcttcatccggggtgcttcaaatcgcagaggacaaatcatctgcggccaacttgacaaagcacaagaaaggaagctcctcaacgacgctcttgacagaactggtgtgcgatatgagactgagagctggatggatgaagagacatcgtcctggatggacagggatctcacggacagcgatttgcggtaccgcttgctaatgcagaacctcgaggaactggagaccagcttggttggtaaagacctggagatggacatccttgagcagcttggggctctgggatcgttcaacgcttctgtggccaggggtgtctcggcgttacatggtcgaccagatggctctctgcttgatgatccggagccggagacgactcctctggatgcggggcaagaagacagccaagtggtcgtcgtccggagtggcaagagccaggagaggaagctgagaaggatgagagcatcatcagatgagaaaggatccaggacctcggtgaaggtgaacccaccacgaagacccaagaaatcccgtaaggcgagtagcagccagtttatatccgagtggaaaagtcacccaggccaaaggaggatcattgtgcgtgagcaatcagcactgctgtccaccatcaaggaatgtgcaggtcttgagaagataagggagaagatggtgaaggaagggcaggaggtgagctaccacaggtgggcggaggcagctggggtggacgaggcagagctggtgagcaggctgcaggcaggttactgctgccgggacaggctactggtgaccaccgagtggctggtcaggtgcatcgcgagaacatacaccggcatggggacggccttggacgatctgcttcaggctgggaagatgggcgttcttgacggcgccgagaagttcgacagccggaaggggtgcaggttctccacgtacgtcaagtactggatcaggaaagggatgctcgctctgctggctgaaaactcaggagtcaccctgctgcctgcaagaatggagagcatcatgcgcaaggtgaaggaggcgcggcgtgggatccggtacaggcagggcaggaacccgtcggactcagaggttgccgccgccgtgggcgtgtcggtagccaacgtgaggctggcgcgcaagtgctctcgcagggccgtctcgctctactcggaggtcgcgatcggacaggacgtcaagttcgcggaggtgatcccggacgagtcggcgtctccggacgaggcggcgctgttccggggccagctgagggagcggctgctgctggtgctgggcaggctgcccgcgcgggaaggacgcgtgctgcggctgcggcacgggctggaggacgggcggtgcaggtcgctggaggagatcggcggcatctacggcgtctccaaggagtggatcaggaagatcgagaagtcggccatggccaggctccgggacgacgacgccgtgcgccgcgacctccacgacttcgtctagtctgtctgcagtgcactagaacaatttgttagctggtagggaacgatgtcatgtacgtagtaccatactatctatcagcagactgaaattgaagctgctattcacacgaaatatacaatgatagagatttgtgattcatgacggttataatgtcatgcttgctttcatgtttcaccccccatggagtgccactagctctaaaaatttctgaacacttgttgtaagtggcacgcacgcatgctgggttccgatggacatgccaggctccaggttcagcggcgagcagtggtatcgtcgtcgtcctgctcctgatgcccaccgtcgatgccttccagccagtacgcgccgccgttcggagacggagagctcgctgaagggccggcggaaacccgacggcgcgacaggcagagaggccagccgccctgcaggctcaggtagcagttccacgctgttgctcctgtgctagctaatccagccgtcatttccgttcttttctaatcacctgattatgctagctaattcgccagtcttctcttctctaactacgtactggatctctctttgatgcactgcaagatttggagctcaagtgcttctcagtccatgatggagacaggcatttatgtgcatggccaagttcactgtccatggtttatttctgatacatgtgtgtatgcaccattgtggcagagcgtcttgtttaggtccatgcatgggccctgctga

SEQ ID NO: 63921 - DNA, 3429 bp, Zea Mays
aaaccctaaaaaacccaatctatttgtttccgccgccgtgtctgtctcggcccaggcaagccaccgcatgcaccgccgtcgctcacaccgttccagcgcctcgtaccctcactgacgtagtgcgcgctgctccgccaacgcccccagcgacccaaacagactccgacccgcgccgtccgttccgtgtccggcctcgccgccgattctctcggagctcctgccctgccgtgcgggagcacttcttcgaacagatggaggctcgccgcgcgaggccgagcaaccagacgcactccagctgttggacgaatccctcctcctccacgccaggccctgcgtcgcctgaattcctcactacggtccgcggagcagcattttgcggccgtggcttcgcctccgccacagcaagcagctcttgtggaaagcggcggaggggagttgacagtaacaacagcaacaaccgcggaagggggtgtgatgcttgcttgcagatgttgctgttatcgccttgggggtgattattctgtcctgtgctctaatgatgctcggaatgatgatggaactccccgtcagtgcgcctggttaatcacaagtaaattcatctcttttaatttgttctctctcttctccgattccctttgcacttttcttttctgcggagagagacgaggaggaatctgaatgtgtgggcgagtgttgaaagaggacgaaaataaatatctgacgagcagaggaatgctcgtatatatatgatgcttgtagaaaaagatcccggtgcagcaactcgctttcggccccgatcgtcttttcccctgctgccaaggtccaaccaaacacgatcggaggatagggctcccctcccggcttttctatccctccctctcctctgctcctgtgctatcctccgttcatcactcccccaggatcccctgcagctaccattgctacaacacgggtacagtacaggtgaggagggagaaaacaaacgaacgaaataaagagagtacgcatgggtttgcagatgatccatggcaggccctgcgccttgtgctgcccgtcctcctcctcctcgtcctccgccttgtggatgaggatgcaggcccagctgcccccaaagcagtctcaccatccattgaacggaggaagggcaatctcctctgaatccctcgcggcactggcatggcatttcctgctaaggcgtcgcagcagggacggtgccacagctctcgcatcttcatccggggtgcttcaaatcgcagaggacaaatcatctgcggccaacttgacaaagcacaagaaaggaagctcctcaacgacgctcttgacagaactggtgtgcgatatgagactgagagctggatggatgaagagacatcgtcctggatggacagggatctcacggacagcgatttgcggtaccgcttgctaatgcagaacctcgaggaactggagaccagcttggttggtaaagacctggagatggacatccttgagcagcttggggctctgggatcgttcaacgcttctgtggccaggggtgtctcggcgttacatggtcgaccagatggctctctgcttgatgatccggagccggagacgactcctctggatgcggggcaagaagacagccaagtggtcgtcgtccggagtggcaagagccaggagaggaagctgagaaggatgagagcatcatcagatgagaaaggatccaggacctcggtgaaggtgaacccaccacgaagacccaagaaatcccgtaaggcgagtagcagccagtttatatccgagtggaaaagtcacccaggccaaaggaggatcattgtgcgtgagcaatcagcactgctgtccaccatcaaggaatgtgcaggtcttgagaagataagggagaagatggtgaaggaagggcaggaggtgagctaccacaggtgggcggaggcagctggggtggacgaggcagagctggtgagcaggctgcaggcaggttactgctgccgggacaggctactggtgaccaccgagtggctggtcaggtgcatcgcgagaacatacaccggcatggggacggccttggacgatctgcttcaggctgggaagatgggcgttcttgacggcgccgagaagttcgacagccggaaggggtgcaggttctccacgtacgtcaagtactggatcaggaaagggatgctcgctctgctggctgaaaactcaggagtcaccctgctgcctgcaagaatggagagcatcatgcgcaaggtgaaggaggcgcggcgtgggatccggtacaggcagggcaggaacccgtcggactcagaggttgccgccgccgtgggcgtgtcggtagccaacgtgaggctggcgcgcaagtgctctcgcagggccgtctcgctctactcggaggtcgcgatcggacaggacgtcaagttcgcggaggtgatcccggacgagtcggcgtctccggacgaggcggcgctgttccggggccagctgagggagcggctgctgctggtgctgggcaggctgcccgcgcgggaaggacgcgtgctgcggctgcggcacgggctggaggacgggcggtgcaggtcgctggaggagatcggcggcatctacggcgtctccaaggagtggatcaggaagatcgagaagtcggccatggccaggctccgggacgacgacgccgtgcgccgcgacctccacgacttcgtctagtctgtctgcagtgcactagaacaatttgttagctggtagggaacgatgtcatgtacgtagtaccatactatctatcagcagactgaaattgaagctgctattcacacgaaatatacaatgatagagatttgtgattcatgacggttataatgtcatgcttgctttcatgtttcaccccccatggagtgccactagctctaaaaatttctgaacacttgttgtaagtggcacgcacgcatgctgggttccgatggacatgccaggctccaggttcagcggcgagcagtggtatcgtcgtcgtcctgctcctgatgcccaccgtcgatgccttccagccagtacgcgccgccgttcggagacggagagctcgctgaagggccggcggaaacccgacggcgcgacaggcagagaggccagccgccctgcaggctcaggtagcagttccacgctgttgctcctgtgctagctaatccagccgtcatttccgttcttttctaatcacctgattatgctagctaattcgccagtcttctcttctctaactacgtactggatctctctttgatgcactgcaagatttggagctcaagtgcttctcagtccatgatggagacaggcatttatgtgcatggccaagttcactgtccatggtttatttctgatacatgtgtgtatgcaccattgtggcagagcgtcttgtttaggtccatgcatgggccctgctga

SEQ ID NO: 63922 - DNA, 2966 bp, Zea Mays
gatttctaaaaaagataaaaataaaaaaccgtctcttctccggcccgcctcctctgaaaccctaaaaaacccaatctatttgtttccgccgccgtgtctgtctcggcccaggcaagccaccgcatgcaccgccgtcgctcacaccgttccagcgcctcgtaccctcactgacgtagtgcgcgctgctccgccaacgcccccagcgacccaaacagactccgacccgcgccgtccgttccgtgtccggcctcgccgccgattctctcggagctcctgccctgccgtgcgggagcacttcttcgaacagatggaggctcgccgcgcgaggccgagcaaccagacgcactccagctgttggacgaatccctcctcctccacgccaggccctgcgtcgcctgaattcctcactacggtccgcggagcagcattttgcggccgtggcttcgcctccgccacagcaagtggtggatccagcagctcttgtggaaagcggcggaggggagttgacagtaacaacagcaacaaccgcggaagggggtgtgatgcttgcttgcagatgttgctgttatcgccttgggggtgattattctgtcctgtgctctaatgatgctcggaatgatgatggaactccccgtcagtgcgcctggttaatcacaatgaacggaggaagggcaatctcctctgaatccctcgcggcactggcatggcatttcctgctaaggcgtcgcagcagggacggtgccacagctctcgcatcttcatccggggtgcttcaaatcgcagaggacaaatcatctgcggccaacttgacaaagcacaaggtgagtgcagaaaggaagctcctcaacgacgctcttgacagaactggtgtgcgatatgagactgagagctggatggatgaagagacatcgtcctggatggacagggatctcacggacagcgatttgcggtaccgcttgctaatgcagaacctcgaggaactggagaccagcttggttggtaaagacctggagatggacatccttgagcagcttggggctctgggatcgttcaacgcttctgtggccaggggtgtctcggcgttacatggtcgaccagatggctctctgcttgatgatccggagccggagacgactcctctggatgcggggcaagaagacagccaagtggtcgtcgtccggagtggcaagagccaggagaggaagctgagaaggatgagagcatcatcagatgagaaaggatccaggacctcggtgaaggtgaacccaccacgaagacccaagaaatcccgtaaggcgagtagcagccagtttatatccgagtggaaaagtcacccaggccaaaggaggatcattgtgcgtgagcaatcagcactgctgtccaccatcaaggaatgtgcaggtcttgagaagataagggagaagatggtgaaggaagggcaggaggtgagctaccacaggtgggcggaggcagctggggtggacgaggcagagctggtgagcaggctgcaggcaggttactgctgccgggacaggctactggtgaccaccgagtggctggtcaggtgcatcgcgagaacatacaccggcatggggacggccttggacgatctgcttcaggctgggaagatgggcgttcttgacggcgccgagaagttcgacagccggaaggggtgcaggttctccacgtacgtcaagtactggatcaggaaagggatgctcgctctgctggctgaaaactcaggagtcaccctgctgcctgcaagaatggagagcatcatgcgcaaggtgaaggaggcgcggcgtgggatccggtacaggcagggcaggaacccgtcggactcagaggttgccgccgccgtgggcgtgtcggtagccaacgtgaggctggcgcgcaagtgctctcgcagggccgtctcgctctactcggaggtcgcgatcggacaggacgtcaagttcgcggaggtgatcccggacgagtcggcgtctccggacgaggcggcgctgttccggggccagctgagggagcggctgctgctggtgctgggcaggctgcccgcgcgggaaggacgcgtgctgcggctgcggcacgggctggaggacgggcggtgcaggtcgctggaggagatcggcggcatctacggcgtctccaaggagtggatcaggaagatcgagaagtcggccatggccaggctccgggacgacgacgccgtgcgccgcgacctccacgacttcgtctagtctgtctgcagtgcactagaacaatttgttagctggtagggaacgatgtcatgtacgtagtaccatactatctatcagcagactgaaattgaagctgctattcacacgaaatatacaatgatagagatttgtgattcatgacggttataatgtcatgcttgctttcatgtttcaccccccatggagtgccactagctctaaaaatttctgaacacttgttgtaagtggcacgcacgcatgctgggttccgatggacatgccaggctccaggttcagcggcgagcagtggtatcgtcgtcgtcctgctcctgatgcccaccgtcgatgccttccagccagtacgcgccgccgttcggagacggagagctcgctgaagggccggcggaaacccgacggcgcgacaggcagagaggccagccgccctgcaggctcaggtagcagttccacgctgttgctcctgtgctagctaatccagccgtcatttccgttcttttctaatcacctgattatgctagctaattcgccagtcttctcttctctaactacgtactggatctctctttgatgcactgcaagatttggagctcaagtgcttctcagtccatgatggagacaggcatttatgtgcatggccaagttcactgtccatggtttatttctgatacatgtgtgtatgcaccattgtggcagagcgtcttgtttaggtccatgcatgggccctgctga

SEQ ID NO: 63923 - DNA, 3840 bp, Zea Mays
ctagtattggttatgtccaactaaccaacttcataaaaaagtgtggatttctaaaaaagataaaaataaaaaaccgtctcttctccggcccgcctcctctgaaaccctaaaaaacccaatctatttgtttccgccgccgtgtctgtctcggcccaggcaagccaccgcatgcaccgccgtcgctcacaccgttccagcgcctcgtaccctcactgacgtagtgcgcgctgctccgccaacgcccccagcgacccaaacagactccgacccgcgccgtccgttccgtgtccggcctcgccgccgattctctcggagctcctgccctgccgtgcgggagcacttcttcgaacagatggaggctcgccgcgcgaggccgagcaaccagacgcactccagctgttggacgaatccctcctcctccacgccaggccctgcgtcgcctgaattcctcactacggtccgcggagcagcattttgcggccgtggcttcgcctccgccacagcaaggttgtcgtcatactcctttttatgtgtgaagaaggagaggaggtgcttatcgtagtcagtgacagtggtggatccagcagctcttgtggaaagcggcggaggggagttgacagtaacaacagcaacaaccgcggaagggggtgtgatgcttgcttgcagatgttgctgttatcgccttgggggtgattattctgtcctgtgctctaatgatgctcggaatgatgatggaactccccgtcagtgcgcctggttaatcacaagtaaattcatctcttttaatttgttctctctcttctccgattccctttgcacttttcttttctgcggagagagacgaggaggaatctgaatgtgtgggcgagtgttgaaagaggacgaaaataaatatctgacgagcagaggaatgctcgtatatatatgatgcttgtagaaaaagatcccggtgcagcaactcgctttcggccccgatcgtcttttcccctgctgccaaggtccaaccaaacacgatcggaggatagggctcccctcccggcttttctatccctccctctcctctgctcctgtgctatcctccgttcatcactcccccaggatcccctgcagctaccattgctacaacacgggtacagtacaggtgaggagggagaaaacaaacgaacgaaataaagagagtacgcatgggtttgcagatgatccatggcaggccctgcgccttgtgctgcccgtcctcctcctcctcgtcctccgccttgtggatgaggatgcaggcccagctgcccccaaagcagtctcaccatccatgtcagtgctctctctctctctctctctctctctctctgctcgtcaacgctagttccacgtgcattttcctgtcgtcctgtgtgctgcatggaattctctattggttgatggcgtacaagattactattgccgcggactgacggcacggcaggtaggctaggcagcagcaacacagacacacaccaaggatgacatgctcttgccatttcttcgttgtctgcagtgaacggaggaagggcaatctcctctgaatccctcgcggcactggcatggcatttcctgctaaggcgtcgcagcagggacggtgccacagctctcgcatcttcatccggggtgcttcaaatcgcagaggacaaatcatctgcggccaacttgacaaagcacaaggtgagtgcagaaaggaagctcctcaacgacgctcttgacagaactggtgtgcgatatgagactgagagctggatggatgaagagacatcgtcctggatggacagggatctcacggacagcgatttgcggtaccgcttgctaatgcagaacctcgaggaactggagaccagcttggttggtaaagacctggagatggacatccttgagcagcttggggctctgggatcgttcaacgcttctgtggccaggggtgtctcggcgttacatggtcgaccagatggctctctgcttgatgatccggagccggagacgactcctctggatgcggggcaagaagacagccaagtggtcgtcgtccggagtggcaagagccaggagaggaagctgagaaggatgagagcatcatcagatgagaaaggatccaggacctcggtgaaggtgaacccaccacgaagacccaagaaatcccgtaaggcgagtagcagccagtttatatccgagtggaaaagtcacccaggccaaaggaggatcattgtgcgtgagcaatcagcactgctgtccaccatcaaggaatgtgcaggtcttgagaagataagggagaagatggtgaaggaagggcaggaggtgagctaccacaggtgggcggaggcagctggggtggacgaggcagagctggtgagcaggctgcaggcaggttactgctgccgggacaggctactggtgaccaccgagtggctggtcaggtgcatcgcgagaacatacaccggcatggggacggccttggacgatctgcttcaggctgggaagatgggcgttcttgacggcgccgagaagttcgacagccggaaggggtgcaggttctccacgtacgtcaagtactggatcaggaaagggatgctcgctctgctggctgaaaactcaggagtcaccctgctgcctgcaagaatggagagcatcatgcgcaaggtgaaggaggcgcggcgtgggatccggtacaggcagggcaggaacccgtcggactcagaggttgccgccgccgtgggcgtgtcggtagccaacgtgaggctggcgcgcaagtgctctcgcagggccgtctcgctctactcggaggtcgcgatcggacaggacgtcaagttcgcggaggtgatcccggacgagtcggcgtctccggacgaggcggcgctgttccggggccagctgagggagcggctgctgctggtgctgggcaggctgcccgcgcgggaaggacgcgtgctgcggctgcggcacgggctggaggacgggcggtgcaggtcgctggaggagatcggcggcatctacggcgtctccaaggagtggatcaggaagatcgagaagtcggccatggccaggctccgggacgacgacgccgtgcgccgcgacctccacgacttcgtctagtctgtctgcagtgcactagaacaatttgttagctggtagggaacgatgtcatgtacgtagtaccatactatctatcagcagactgaaattgaagctgctattcacacgaaatatacaatgatagagatttgtgattcatgacggttataatgtcatgcttgctttcatgtttcaccccccatggagtgccactagctctaaaaatttctgaacacttgttgtaagtggcacgcacgcatgctgggttccgatggacatgccaggctccaggttcagcggcgagcagtggtatcgtcgtcgtcctgctcctgatgcccaccgtcgatgccttccagccagtacgcgccgccgttcggagacggagagctcgctgaagggccggcggaaacccgacggcgcgacaggcagagaggccagccgccctgcaggctcaggtagcagttccacgctgttgctcctgtgctagctaatccagccgtcatttccgttcttttctaatcacctgattatgctagctaattcgccagtcttctcttctctaactacgtactggatctctctttgatgcactgcaagatttggagctcaagtgcttctcagtccatgatggagacaggcatttatgtgcatggccaagttcactgtccatggtttatttctgatacatgtgtgtatgcaccattgtggcagagcgtcttgtttaggtccatgcatgggccctgctga

SEQ ID NO: 63924 - DNA, 360 bp, Zea Mays
  misc_feature (1)..(1): n is a, c, g, or t
nttctgatcatatcactgttctcgtggcgccgtagcatagttcagacattcatgtactggcaggtgttgaagctgatgtaccatgctcccgtgacatccagctatcaccagagtacctgggcgaaaatcggccggattgtgaacccgtacatccaccgctacgctccgttcctccagacgcccatttctgcgatccaaagatggtggttcagaattctggagggccattatcataacaagaaggtttttagctgcagggccaccaacgccgaattgcaaaactcagcaaaaatgttccgtgttttttttttgttgggcaccgatgcctgccttcgtagatttgcttgcaatctttgcttc

SEQ ID NO: 63925 - DNA, 1507 bp, Zea Mays
atacaaactacccatacctttcgacttattgcctttccttctttgggaattttcctgggattgtattgtcttcattatcttatcatcctgctgattttttgcatccttgtggccttttgcggttaaattagcgtatttcgttttcacttctggtgatctacaagatcatggagcacaacaaccggcgttgctgttccttatcaggacctcaccaacctatgcagaggtcaccatgtccatcacctctttggtcacctcctgaatctctggatgtggcaaggaaaaaattgtggacgtcgtgtgaaatgcatgacatccgccggaaatgactataagtactactttacactttccaaggttgccatttgcatgcaatggcatgtttgcagtttcatgaaatcgacaagatcatggagcacaacatcagtgtcatcgttcctcatcagaacctcagcaacctctgcgggcgtaaccgtcacctccttgatcagtttctcaatctctggatacgtgtcatggtactcgatggagtggtagttgttggcaaggatttggaaagactctggggtgcaataccccatgtggatgtgcatgtccatccttccaggccgcagcagtgccgggtcaagccgctccttgtaattggttgtgaagacgatgatcctttcttccccacttgttgaccacagcccatcaacaaagttgagcagtccagacagcgttacctgttcagaaaatccaaattatttgtcaagataactgaggaagtggtggaatcgagaagatagtactcaccttgccttcccccttgttttgttctgtagaatctgactcatcatgtccctcggcctcctgccgttgtttgagttcgatggtgcagtcaatatcttcaatgactagaatggatcggttgtccatgttaacaagaagcctcctgaggtctgagttggatgtgaccgcagttagctcgagatcatatatgtcaaacctgagatggttggccatggctgcgattaggcttgacttcccagtcccaggtggaccatacagaaggtcatcgatgatggactgcttcagcttcttgtccatggcaagcgtgtcgaatgtagatgggtggtggagttcaatcggggaccaattgccgtactcagtcatgtgtatcatgagggttctctcctgggctttaatggccttggctgtggccaaaatgaacgggaggtacgatctgagggctttgtccttgtgcttcttgttgaaggtcagctcgaagaagtgggactcgttctggctgctgttgagggagtcatttgagttgtctttgcagacaaggcaccacttgaactccgtgccttgataaacatcgagcatctcgtcgccctcatccatgctgaccatcatcttgtcgtcctcgtccatgctgctgacgcgcaggcgctgctggatgtcggtgttcatgcgcgtggcgaggtagccgaagccggagaggaccagatcgcgcactcgggcg

SEQ ID NO: 63926 - DNA, 1430 bp, Zea Mays
cgcagcgggtatcgtcgtcggctcgtcgccggcggtgccaaattcccctttccccctcggcgtcgacgggccgaacccccgcgggtgctgtctgctgtctgagcaggagcagaagcaggctgcgggcggggcactgccccgtcgtcctcgtcccgccgcgacgtgtatgcgacgcccgagatctgtcccacgatttcgagaattctatactcgatgttgagactcgagacagcacctataaattattttccgtggatgcacaatgttaagtatcggcgtgatgcttttagtaatcaaacaagcacacatttgtcagcggaaatcgacaagatcatggagcacaacatcagtgtcatcgttcctcatcagaacctcagcaacctctgcgggcgtaaccgtcacctccttgatcagtttctcaatctctggatacgtgtcatggtactcgatggagtggtagttgttggcaaggatttggaaagactctggggtgcaataccccatgtggatgtgcatgtccatccttccaggccgcagcagtgccgggtcaagccgctccttgtaattggttgtgaagacgatgatcctttcttccccacttgttgaccacagcccatcaacaaagttgagcagtccagacagcgttacctgttcagaaaatccaaattatttgtcaagataactgaggaagtggtggaatcgagaagatagtactcaccttgccttcccccttgttttgttctgtagaatctgactcatcatgtccctcggcctcctgccgttgtttgagttcgatggtgcagtcaatatcttcaatgactagaatggatcggttgtccatgttaacaagaagcctcctgaggtctgagttggatgtgaccgcagttagctcgagatcatatatgtcaaacctgagatggttggccatggctgcgattaggcttgacttcccagtcccaggtggaccatacagaaggtcatcgatgatggactgcttcagcttcttgtccatggcaagcgtgtcgaatgtagatgggtggtggagttcaatcggggaccaattgccgtactcagtcatgtgtatcatgagggttctctcctgggctttaatggccttggctgtggccaaaatgaacgggaggtacgatctgagggctttgtccttgtgcttcttgttgaaggtcagctcgaagaagtgggactcgttctggctgctgttgagggagtcatttgagttgtctttgcagacaaggcaccacttgaactccgtgccttgataaacatcgagcatctcgtcgccctcatccatgctgaccatcatcttgtcgtcctcgtccatgctgctgacgcgcaggcgctgctggatgtcggtgttcatgcgcgtggcgaggtagccgaagccggagaggaccagatcgcgcactcgggcg

SEQ ID NO: 63927 - DNA, 1099 bp, Zea Mays
cgcagcgggtatcgtcgtcggctcgtcgccggcggtgccaaattcccctttccccctcggcgtcgacgggccgaacccccgcgggtgctgtctgctgtctgagcaggagcagaagcaggctgcgggcggggcactgccccgtcgtcctcgtcccgccgcgacgtgtatgcgacgcccgagatctgtcccacgatttcgaggaaatcgacaagatcatggagcacaacatcagtgtcatcgttcctcatcagaacctcagcaacctctgcgggcgtaaccgtcacctccttgatcagtttctcaatctctggatacgtgtcatggtactcgatggagtggtagttgttggcaaggatttggaaagactctggggtgcaataccccatgtggatgtgcatgtccatccttccaggccgcagcagtgccgggtcaagccgctccttgtaattggttgtgaagacgatgatcctttcttccccacttgttgaccacagcccatcaacaaagttgagcagtccagacagcgttacctgttcagaaaatccaaattatttgtcaagataactgaggaagtggtggaatcgagaagatagtactcaccttgccttcccccttgttttgttctgtagaatctgactcatcatgtccctcggcctcctgccgttgtttgagttcgatggtgcagtcaatatcttcaatgactagaatggatcggttgtccatgttaacaagaagcctcctgaggtctgagttggatgtgaccgcagttagctcgagatcatatatgtcaaacctgagatggttggccatggctgcgattaggcttgacttcccagtcccaggtggaccatacagaaggtcatcgatgatggactgcttcagcttcttgtccatggcaagcgtgtcgaatgtagatgggtggtggagttcaatcggggaccaattgccgtactcagtcatgtgtatcatgagggttctctcctgggctttaatggccttggctgtggccaaaatgaacgggaggcgctgctggatgtcggtgttcatgcgcgtggcgaggtagccgaagccggagaggaccagatcgcgcactcgggcg

SEQ ID NO: 63928 - DNA, 1233 bp, Zea Mays
gcggagcacagctcgcagcccgtagcccgcagcgggtatcgtcgtcggctcgtcgccggcggtgccaaattcccctttccccctcggcgtcgacgggccgaacccccgcgggtgctgtctgctgtctgagcaggagcagaagcaggctgcgggcggggcactgccccgtcgtcctcgtcccgccgcgacgtgtatgcgacgcccgagatctgtcccacgatttcgaggaaatcgacaagatcatggagcacaacatcagtgtcatcgttcctcatcagaacctcagcaacctctgcgggcgtaaccgtcacctccttgatcagtttctcaatctctggatacgtgtcatggtactcgatggagtggtagttgttggcaaggatttggaaagactctggggtgcaataccccatgtggatgtgcatgtccatccttccaggccgcagcagtgccgggtcaagccgctccttgtaattggttgtgaagacgatgatcctttcttccccacttgttgaccacagcccatcaacaaagttgagcagtccagacagcgttacctgttcagaaaatccaaattatttgtcaagataactgaggaagtggtggaatcgagaagatagtactcaccttgccttcccccttgttttgttctgtagaatctgactcatcatgtccctcggcctcctgccgttgtttgagttcgatggtgcagtcaatatcttcaatgactagaatggatcggttgtccatgttaacaagaagcctcctgaggtctgagttggatgtgaccgcagttagctcgagatcatatatgtcaaacctgagatggttggccatggctgcgattaggcttgacttcccagtcccaggtggaccatacagaaggtcatcgatgatggactgcttcagcttcttgtccatggcaagcgtgtcgaatgtagatgggtggtggagttcaatcggggaccaattgccgtactcagtcatgtgtatcatgagggttctctcctgggctttaatggccttggctgtggccaaaatgaacgggagacaaggcaccacttgaactccgtgccttgataaacatcgagcatctcgtcgccctcatccatgctgaccatcatcttgtcgtcctcgtccatgctgctgacgcgcaggcgctgctggatgtcggtgttcatgcgcgtggcgaggtagccgaagccggagaggaccagatcgcgcactcgggcg

SEQ ID NO: 63929 - DNA, 2444 bp, Zea Mays
ttcgtctcccgttcgcccccgcgtgctctcttgtcgccactgccgcggccgtcgctctaccgcctctacgccaggtgcctagtcctgtcctcgccggtcccttcgccgagttttcatcgggtccttcgccaggtctccatcggtccggtcgcctgcgacgagcatccaccagctactgggtgaacatgggcacaccaatgtcgccgtggaaggggcggctgcgctctcaccacgcgaccgttcaaagtttgtccaagaggaggctcccttctcggaccaagaacccggaggagaaagagaagctccgaacatcgacgaagaaggctgccccgaagaagacggcgagaggtcgccccgctggagctgctcaacagcagccgatggctcgcttaggactgtcgtcgcggcatgctggaagagactctgagcatccagttgtgatagacgatgatgtaaacggggtccccacgactacacgtggaagataagagtttgggcaagtcaccattgccaccaaatcgccgggagacctctgctaacagaaagactaaaaatgctcataggaaatacaaaaatcaagagagcctgaaaaggaatagcgcaagtgctgcattatcacctaggaaagatatttcagatgtgtctaacaaaaagagtgacaaacatgagttaaagcccaaccgttgtgaagtgctaacaggaaagaggaagagaggaacagaaaggaggctgtcatcgaagaagcaacgttgccaggatcccaaactattgcctgcggtttgccaagagattgcaccttgcaatgaacccagaaaatctacacacagaaggattgaaaaggacccctctattgaggaatttgaggtgaagcttaaagttgctaatgagagattgacaaacattgatgaaaacatcaacaagctaagtgggaccgagagagaagaaatgggaaatttctgtggttctgattggacaaaagagcaggacatggcattgcgcaaagcttacttcagtgcccgaccatccccacatttctggaagagagtttcaaaaatggtgccagggagatctgctgaagactgcttcaacagaatttataatgacctctcaacaccgactccaattgcaccacgtcccagaacaagtaaaacaacattttctcctataggaaatctcacattatctgatccaaagcttccaaatatcttggaacctacagtcggaaggcaaaagaccgctaaccaaaagagtctagtagcacagaagacagttaggcatttgttgcagaagcattgccgcattgaccaagctcaagaggccgaccacttctcaatttttgaaagctcaccaagtgccttacaattgaacttatcttttgaagattctcctggtactcctgacagttatatgaattcagattctctaggcaagcacagtggaagttcttcagcacggaagaaaccattttcaaggttaagaactaagccatctgaaccgagcccagcagttctaaagcctataaagaatgctatcttacatgagaagtacattgatcaattggcacgtagagaaggcacaaaaaggcctcgcagaaggactccagcaggctctaaaactgctgattctgggaagtctctttctgagcagcaagctggtagtctgaaggctgctaaaaatgctctcatctcagaagcaacggacttcataagcagttttaaggcgctgcaagccaattcccttgcacatgttgtggagaatagcgaagacgagattgaatgtgatgccagtgattgtagctatgctgataaagaatgaggaggtgcttacagtcttgatgcccagcggcacttagcaatcatttcctttatgtcaactgactttagtcatcacttatcagtgcctgttgctgcaataaggctaggcagttgtcagggctgtctattctgcctgatgctgtatttagttttgaacctcttagtgccctcagagatgttagttagttgtgaaagtgctaccttcatcgtgccttatgaagactgaaatcactggagattacaatggtcgaacctgattctcttgtttgcataaagtagaaagcttcatcaaacatagtttgttccactttttttcttgaacacacaagagaactgcatatcattttcattaaagaagaaaaaaatatgacagatccagtgccagaggcccccacatcaatggggtatggggaaggcataaactgagttaaacctccccgcaaaaacagaaatgaatggtctgttcaattgataaggaggtttcagccatgttacattagtgcggcgctaattaaaaatactctccatgtaagatccacatagttttaccttttctttccagtgaccttatgaacccaggtaagatgtatctcagaattagtctcctaaagcctctgaattttatgcgtc

SEQ ID NO: 63930 - DNA, 1387 bp, Zea Mays
taaatacaaaagcaccacaattatatattcacaaaagcatcacaattataatatcattcacaactagatcatttacagatatctagctagatcattcacaaaagctccagagatgatcagtcacaaaagcaccacaacgacatcactccagggcgaggcaaaactgtatctcgttttagcacacaagctacaataacttcacaatattgtcttccaaggatttgacctccaactgtggtgcttggtttagttgaaaccacttgtcatttatttctctcacttctcagactctgcagtgcacctttcccacatcctcaacagaatagctgccatgggaagtctattcgtcactcaggaaatccccggttccaacgggacagacaccagaaagcaaaatcctcgtgcagagcaaactgcatttggcatctaacgacaccactggtgataagaccgatcaccacggctgccacaagctcaaggcctgcttggtgtcgacggccggctgccacaagtgaataaaatatgaaaaaagtgaaaaaaaatgagttaccaatagcacattgaaataaaaaattttgaacaagtgaaataaaaatatactaacacaagtaagttatcaatggcacattgaaacaagtgaaaaatgagttaccaccggagactatagagtttggacctttgggaccttttgcactgcctttatcctcattgaagtcaaatggaactactaacacacaagctacaagtaaggtgtttacatatgcctctccatttgtgttacagaggtccagggccgccacaactaaaatcagaccaccaggactttgcaaagtgggagacgaggactaatttcaacctcttagagctgggatccggtgagaacatacatgtaggtcttacatacagatataattgatcatagagttagcaaaaggagctgaccagttgagctttgtgcagagttttcttgggcgccgcatagagatgaggattggcgtaccagggtgggcagcgcgaccgtgctggcggcctggcgggtggcggctggctcggaggcagctcagcggctgctcgcgcgcagcggccagcggcggctcggtcagcccttagggcctggccgcctgggctcgctcgctcggacgaaggcaggcagcggcactgcctctgcgggctgcaggtgctcacggcctcgtgccgtcgcgctcgggcgctggagtggaggcttcctggcggcggctgccagggagagtggcgcgcgctaggtttaggtggcggccggttagggttagggaagtgaggctgggtcttaatggaccgatttggttaggttttgtttttttctttttttattttattttctaaatttgaaatacattttttaataacc

SEQ ID NO: 63931 - DNA, 1724 bp, Zea Mays
tgcaggacaatgacgcgcatagagaatggcatacgttcctttgagctctggcgcttactcaaggaaaaaaccaacttgccacaagtattgtgcatcggtggagcttacttggaaaccatgccgactagttggatatcgggattttcgactgaaagagctagcttgccaacaattggcccatggagtggatgaacaatatcctgtgaaaagtagcactgtggagcaagctcaggaccgccagccctgtctgccacaaggtgatgcttacttcgctggcctgtcgaagaaagaaatcgagagaaggcggaagattggcgctgccaacaaggggaaggttccctggacaaaaggcaggaaatggagtgaagagcacaagaaggtcatcaggcaacggactgctgaagctctgagagatcccaaggaagaaaatgttagggcaccgtcagctacatagacaaacaagcaaagacaagataagtgcggcgctgaggacggtctgggagaggcggatcgtttctgtccgatccagacagaaggttctgcagatctggtccaacagtatagctgaagcagcaaagaacggtggtcacggccaagatatgcttggctgggacagctacgagaggatcaagtcagagatggtatctacgttcctgtggatcaaggagaggggacgtatggtgaagaagcttgaaagggccgtggcaaaaatagctgccaagaggcttcaagtggtacggagaagggaagaacaggccacaaggatgaagaagctgaaacctgactgtcagacgttgctgcaaaacgcggaccgtcaaccagcaagagtggtagtatctgcaaggccaaagcttaaggagaggctagctaagtggcacggtcgaaagaaagagctcgagacagtgataagttcacgggcaaggaaaagaggattgcgaaatccaccacgaaggcaaatggcagcagaaagcctcgaggctctgtcaacttcggctgcaggagcaccataggaaggatgggcatgtaccctagctactgagcagctgggagctcgtagtcgccttatagagaagcagaagcccatgcctaatgaccaattcattaggcaggcacggggttttttgtttgcgttgctgaaactacgtgtagtaatttttgttttatagccttattaggctttctgtcaaaggaacatgtttatgctccctccaatgaaactacgtgtaacatgatttatgggtacaaaaaataaatgtactagaaaaatacagttaaaaaacatttgaataccactactcgtacacttacacttacgttaattgtcgaaatgaactgattactgccattttgggctgggcgtgccatacaacaatcatggggcaacatgtaacgtacgtctagtctaatcagcgcttcccaaacttaattaaagctggtaccaaaccaaggtggtagctgctacattcacaacgttgatgcgccaaacaagctggtccaatagctacctaactgcatcacacatatacacagctacaacaataggccagaatatccataacacaacaagaactatcctgtctgcgttagcatctgcctgcactgcacaagaggaaaaggaggaacagtgtaagcatcaaccaacatgtgctggactggaggatgctagagtagaaagtcacgtacgatcaatcaatacacagcagcagcagcagcagcagcagcct

SEQ ID NO: 63932 - DNA, 1838 bp, Zea Mays
caaatcttaggcccggcaaagtcgacacgagcgaactccaggataaggtctggccaggctgctcgtcccgtcctcctctcgtggtcttccagaagccatggccgccgccgccgtccactgttccagggcatacgttcctttgagctctggcgcttactcaaggaaaaaaccaacttgccacaagtattgtgcatcggtggagcttacttggaaaccatgccgactagttggatatcgggattttcgactgaaagagctagcttgccaacaattggcccatggagtggatgaacaatatcctgtgaaaagtagcactgtggagcaagctcaggaccgccagccctgtctgccacaaggtgatgcttacttcgctggcctgtcgaagaaagaaatcgagagaaggcggaagattggcgctgccaacaaggggaaggttccctggacaaaaggcaggaaatggagtgaagagcacaagaaggtcatcaggcaacggactgctgaagctctgagagatcccaaggtgatgtcatatcaggaagaaaatgttagggcaccgtcagctacatagacaaacaagcaaagacaagataagtgcggcgctgaggacggtctgggagaggcggatcgtttctgtccgatccagacagaaggttctgcagatctggtccaacagtatagctgaagcagcaaagaacggtggtcacggccaagatatgcttggctgggacagctacgagaggatcaagtcagagatggtatctacgttcctgtggatcaaggagaggggacgtatggtgaagaagcttgaaagggccgtggcaaaaatagctgccaagaggcttcaagtggtacggagaagggaagaacaggccacaaggatgaagaagctgaaacctgactgtcagacgttgctgcaaaacgcggaccgtcaaccagcaagagtggtagtatctgcaaggccaaagcttaaggagaggctagctaagtggcacggtcgaaagaaagagctcgagacagtgataagttcacgggcaaggaaaagaggattgcgaaatccaccacgaaggcaaatggcagcagaaagcctcgaggctctgtcaacttcggctgcaggagcaccataggaaggatgggcatgtaccctagctactgagcagctgggagctcgtagtcgccttatagagaagcagaagcccatgcctaatgaccaattcattaggcaggcacggggttttttgtttgcgttgctgaaactacgtgtagtaatttttgttttatagccttattaggctttctgtcaaaggaacatgtttatgctccctccaatgaaactacgtgtaacatgatttatgggtacaaaaaataaatgtactagaaaaatacagttaaaaaacatttgaataccactactcgtacacttacacttacgttaattgtcgaaatgaactgattactgccattttgggctgggcgtgccatacaacaatcatggggcaacatgtaacgtacgtctagtctaatcagcgcttcccaaacttaattaaagctggtaccaaaccaaggtggtagctgctacattcacaacgttgatgcgccaaacaagctggtccaatagctacctaactgcatcacacatatacacagctacaacaataggccagaatatccataacacaacaagaactatcctgtctgcgttagcatctgcctgcactgcacaagaggaaaaggaggaacagtgtaagcatcaaccaacatgtgctggactggaggatgctagagtagaaagtcacgtacgatcaatcaatacacagcagcagcagcagcagcagcagcct

SEQ ID NO: 63933 - DNA, 4479 bp, Zea Mays
gtcgattgtaatcttttgtgctccgtacagagtatttgaggccgccgactcgtaagtgtcggcccaagcccactttcaatcagcagctttgctttctcagatccccttatcctcacttcttgcgcagcaaatcaaatcctcttgcttttttttccatttcccctccaatgaccgcgcaagctatctccctctcgctgccgacgccgcccacccaccaccaccatcatgccaaacctccacccccgcctcggctcctgctcaaagccagctcgctcccggaagcgctgcgaggcgtggagacattccgcgacgggcggctcctggtctccctcctgcggcagtgtgcagatgtcccccacggggacgaagacaccgagcgcctctccgcggcgcgtcacctcgctccacagctgcactcgctggccgtccgtgcgggccgcgcccgggacccgcgcgtcgcgtgcgcgctcgccgacctcctcgcgcgcctgggccgctgggcctcggcccggcgcttgctccaggaagcgacggcagcagaggaggaggggaaggaagagggagacgaggaagtggatacgatgctgtggaacaagcgcgtggccatgctcgctgaggcggaggagtggggcgacgcgatcgccgcgttcgcggagatgcgggcgcgcggggtggctcccgacgggtacgcgtgcgcgcgggcgctccacgcgtgcggccgcgcgggggcgccccgcgaggggcaggccgtgcacgcgcacgccgccaaggcgggccatgtcgccgcacacccgctcgtgccgggcttccttgccggcatgtacgccgagagcgcggacgtgggcgcggccaggcgggtgctcgagacggaggacgcgccgcccgtcgcgtggaacgtcgtcgttgcctgctgcgcgcgcctcgggctcgttgacgacgcgctggacctcgcggagcgcatggcgaggtcggggccggtggaggccagccccagcctcgcgacgtggaacgccgtgctgtcgggctgcgcgcggcacgggcgcgaccgggaggcgttcggcgtggttcggagcatgctggagcgagggataccaccggactccagctccatgtcgagcctgctcaagtctgtggccagcttggggctgcttgcgcatggcatggaagcccattgcttcttcctcaggcaccggctcgagccggacgtgtacactgggacggcgttcgttgacatgtacgccaagtgtggccgcctggaatacgcccagaaggtgttcgacacgctggagcttaggaatatcaccacatggaactcgctggttgctgggtactcgaacgcgggtcagttcgaccatgcactggaccttgtggaggagatgaaaaggaacaggcttgaccctgatataaccacttggaacgggctgatcagtggctattcgatgaacggtcggagctcgcaggctgtgctgctgctccggcagatgaaggcgattggattgacacccaatgtggtttcttggacctcgctgatctccggaagctgccataatggagactacgaagattcgttctacttcttcaatgagatgcagaaggaccacgtccagcctagcgtggttaccatgtctgtgttgctgcgggcttgcgcagggctggctttgctggcgaaagggaaggagctgcattgcttcgcactgcgaagaagagcgtatgaccgtgacatggttgttgcaacagccctaatcgacatgtactccaagtcaggaaacctggcaagtgcgacgcggatattcgaaaggattcaggaggagaagaatctggtgtcctggaatgcgatgctcaccgggctggcagcacatgggcagggccgtgaggcaatagcgctgttcgacgacatgtgtagtgctagtgcaggagcaggagcaggattgaagccagacagtataaccttcacagcgctgctcactgcttgcagatcaatggagttgatcactgaagggtgggactatttcgatgccatggagagcagatacggcgtgacaccgaccgttgagaactacgcgtgcatggttgatcttttggcaaggtgcgggtacctggatgaagcgacggacttcatcaacaggtcaccattcaagtcagcggcgagcctatggggagcccttctaaccggttgcgtggtacatggaaaccttgctcttgccgaggcagctgcaaggaaactgttcaagctagagccgtacaattcagccaactacctgcagatggtgagcttgtacgagcgtgaacagatgttcgatgaagccgagagcctcaagtatgcaatgaaagcgagagcgctgaacactcgacctgggtggagctggatacagatcgagcaaagcatccatgtgttccaagtcgaggggaagccaccacacccagacaccgcggagatataccaacaactggttcgtctggttcttcagataaggaaggcagggtatgtggcggacactagctgcatagcgtataacgtccccgaagaagacaaggagaagctgctgctcagccacaccgagaagctagctatcacttatgggctgatccactcagatgcgagcgggacgcccatcagggtgatcaagaacaccaggatgtgcagtgactgccatgaggtggccaagcacatatctgctctatgcggacgccaaatcattcttcgagacgccgatcggtttcaccattttacggatgggaaatgctcttgcaatgatcgctggtaaatggcagatcatctttattgcttgcttgctataggaggggagggtttctatgtctaagcggaacggagtgtagcaagatggaatcagatcctctacagtcggcctgtgtctgtgtgagctggcatcggccggcccctaaaccctaaccctgattaaggtagagactatatacacacatatatagaaacagtacacccattacattagaaaaacacagtaatgtgacacggtaatctctcactgattcttctgacgaatatcatcacctctacgagattatgcactgcacatcttacggatctagctggactgaagatcggtccagtgacatctcaaaatgaacacctcacagaattaactctctctctcactgatacaacagcaaactacaagtctacgacaatgccgacgatgtgcatgccaatgggcagcactgccaccggagaagcaaaattagggaggggggcatatatagacaagacaggcaatgaacatgaaccgactccttttctcaagtatcagcctcgggggccagcaaaatccggctcaaggtaaaaaggaccccgacaacacgtataaccaaaaacaaatggaatcaactcctgtcgcctagagacgaggcgaggaaggggaatcgccaccgccactgcgcggcttgtcatgctggaacttcaccacgatgcacgtgatgttatcgccgctcccgcgagagaacgcggtctctgtcagcttccgagctgcagcctctggttcctcctccattttcacaagtgtaacagcgtcctgtgaaaacaagatgagtcggtcagtcgagcatcataggaagattcagtgcaccattagcaagaaagaagcgcccctaaggaaagctctgtagattttgtgcccgacaatgaggaacctgaatttcatttacagcaaggattgccactgcagtacattcaaacaatactgacgcactgcaataccaacaactctgaccaccaaggtgaggcaacaccgccaaaccaccaaaaaggccacatgcttaaaccagctcgacatacaacacactagaatatcaatgccagcagttgaaaataaactcaaatcccattgttctgaaaacacgccaagatacctacaattttgtttctgcaatgtgcaaacggttacagcccagccaaaaaataagtccactcaaacagacgggggctcatcaattaaatgtgatacagagcctgtagaaaatgtctaaatggtacagcaaatatatgcaactcaagcagaaaattcaacagctaaatataatataggtgaaactacatcttaggtaaaggagatgaaaccatttgccatctgtctgacatgcaaagaggtccactaaagtcaataatgtaagaaaaatatctctgcacatggaagcgcccaatctaatggacatcatatattaacgcaagcagttgaaataaatctctcaaggccacaacagcagcaacaacaacaaagcctttaatgccacttgggatacgtcagagttgaaacccaacagaatccatagttattacagcggtaaggcgacataaggcaagccacccctttttactttttaagcggtaaagcttaaggcgaggcggcaccttaattatatagataaatatataaattagatcaaatattagttatatatcactaactagaagctaataagcaagtagcacaactgtagaacctc

SEQ ID NO: 63934 - DNA, 1873 bp, Zea Mays
cgccattgcgtcgcactgcctccacacgacgactccacgaacacgagcggccacaagacgagatccaggcggctgtgtagctacgctgccatgacgtctaccgtgacgacgcccagccggccgctcgccgccgggagccgtccgcggcggtccggacccgccgtgctctcgctcagcaagggcggcggcggtcagcggcggcagcggcggctggcgccgtccacgagctgcgccgtgctcgcgtcgcccgacaagcagagcacggccaacaagctcccgctgtcgtcgaggaagcaggaggaggaggtggagaaggccacggactacaacgaggtcgcggcagcgctggagaccatctacaagctcagccccgccgtggaggtcgaggagaagaagcgccagggcggcaatgaagacgacggcggtggcgaggccaagaagaaaaggaagcgcagagtggcgggtaggagcacggtggtcgtgaggagccggcgtcggcgtggcgggaggaggatggacctcgggaagcgggtggagatgaagggcgcggccgccgctagcagagagcagcagcaggggggagaggagcaaggagagcgcgagttcgaggagatgctgctgcgggagcactcggtgtcgacggacatgggcagcctggactggaagcgcatgaagatcccgccggtgctcacctcatcgcagagcgcgcggctcttcaagaccatgcagcccatgaaggcgatcttcgaagcgcaggagagcttgcgagaggagctgcagagggaccccaccgacgcggaggtcgccgaggccaccggcatgaccgtccaccagctccgccgccgcctcgatgtcggccgggccgccaggaacaagctcattaagcacaacctccggctggtgccgtacgccctcaacaagtactaccctgacatgggcggcgacgagaggttcgacgagctgtgccaggcgggcgccaacgggctgatcaccgccatcgatcggttcgagccgaagcgcggcttccgcatctccacgtacgcgctcttctggatccggcactccatcgtgcgcgccatgacgctgtccagcttcacccgcttcccgttcgccatggagtcggagcggcaggagatcggcagggcgcgggaggagctggcgttcgagctcggccggccgcccacggacgaggaggtgcgggcgagggtgggcctctccccgcagaggtaccgcgacgtgctgcggatggccaggcccacatactcgctgcacgcccggaaccgcgtcacgcaggaggagctcatcggcgaggtcaccgacgccgaagccgtcggggtcgacgccggcggcaagcacgacgcgctgctccgcctcgccatcgatgacctcgagagcctggtgatcaggcagcggttcggcctggacggcagggggaggcgcacgctaagcgaggtcgccggcaacctcagcatctcgcgggagatggtgcgcaagtacgagctcaaggcgctcatgaagctcaagcaccccacaagggtggaatacctgcgcaggtacatgtgatcgggctgagctgagctgagcttcttctgctgctatggaatgcattgtaatccgaattcttctattattattgtataataatacaagactatagcagatatatagacgaaatgtacgtgtacaggaagacaggaatgaatggtgtgtgcgtttggggatccagatgagtgacttcatcttttaatttgcatgtaattaattcttaacgtacatacatacgaccgtcgtttatgtccattatctagataaagttcaagaatacggaactttattttgctttctgcatttatctagtcaaggtagctttttt

SEQ ID NO: 63935 - DNA, 2078 bp, Zea Mays
ctctgtctctctctcctctggtggcagtggcacccgccgcgccagccatatatgtcgcggaggcgcgcgcgttcctgcctggctcgagattccgtccacgccattgcgtcgcactgcctccacacgacgactccacgaacacgagcggccacaagacgagatccaggcggctgtgtagctacgctgccatgacgtctaccgtgacgacgcccagccggccgctcgccgccgggagccgtccgcggcggtccggacccgccgtgctctcgctcagcaagggcggcggcggtcagcggcggcagcggcggctggcgccgtccacgagctgcgccgtgctcgcgtcgcccgacaagcagagcacggccaacaagctcccgctgtcgtcgaggaagcaggaggaggaggtggagaaggccacggactacaacgaggtcgcggcagcgctggagaccatctacaagctcagccccgccgtggaggtcgaggagaagaagcgccagggcggcaatgaagacgacggcggtggcgaggccaagaagaaaaggaagcgcagagtggtgagttgttccgtcagtcctgtcctgtcgacttgatgagctaagctagtagtcgtaggacatcgtcgttgcggtgcggttatcatgggcatgtgcatgcgcaggcgggtaggagcacggtggtcgtgaggagccggcgtcggcgtggcgggaggaggatggacctcgggaagcgggtggagatgaagggcgcggccgccgctagcagagagcagcagcaggggggagaggagcaaggagagcgcgagttcgaggagatgctgctgcgggagcactcggtgtcgacggacatgggcagcctggactggaagcgcatgaagatcccgccggtgctcacctcatcgcagagcgcgcggctcttcaagaccatgcagcccatgaaggagagcttgcgagaggagctgcagagggaccccaccgacgcggaggtcgccgaggccaccggcatgaccgtccaccagctccgccgccgcctcgatgtcggccgggccgccaggaacaagctcattaagcacaacctccggctggtgccgtacgccctcaacaagtactaccctgacatgggcggcgacgagaggttcgacgagctgtgccaggcgggcgccaacgggctgatcaccgccatcgatcggttcgagccgaagcgcggcttccgcatctccacgtacgcgctcttctggatccggcactccatcgtgcgcgccatgacgctgtccagcttcacccgcttcccgttcgccatggagtcggagcggcaggagatcggcagggcgcgggaggagctggcgttcgagctcggccggccgcccacggacgaggaggtgcgggcgagggtgggcctctccccgcagaggtaccgcgacgtgctgcggatggccaggcccacatactcgctgcacgcccggaaccgcgtcacgcaggaggagctcatcggcgaggtcaccgacgccgaagccgtcggggtcgacgccggcggcaagcacgacgcgctgctccgcctcgccatcgatgacctcctggactctctgaaacccaaggagagcctggtgatcaggcagcggttcggcctggacggcagggggaggcgcacgctaagcgaggtcgccggcaacctcagcatctcgcgggagatggtgcgcaagtacgagctcaaggcgctcatgaagctcaagcaccccacaagggtggaatacctgcgcaggtacatgtgatcgggctgagctgagctgagcttcttctgctgctatggaatgcattgtaatccgaattcttctattattattgtataataatacaagactatagcagatatatagacgaaatgtacgtgtacaggaagacaggaatgaatggtgtgtgcgtttggggatccagatgagtgacttcatcttttaatttgcatgtaattaattcttaacgtacatacatacgaccgtcgtttatgtccattatctagataaagttcaagaatacggaactttattttgctttctgcatttatctagtcaaggtagctttttt

SEQ ID NO: 63936 - DNA, 1519 bp, Zea Mays
ttaaaaaaaatggtttatgaagcccttgcagcatgggaagctaaccatctgcatccaaaaggttggcaaggagccacttctgtttcagagattcgatctatggtgcaaaatgcttttcccgagaccagttgtcattgtttaaaaaacaggggtgtaatccagttagcactagctgctgaaaatgactctacgggagcctcaaagttctcgctgggacgcctttacaagtgccgagagaatattaagtgtgacatctgcagagacacctcaaagtcttgccagtgagcttcgtgatttcatcaacactagcactttagttgaatcacacacacaaactacttcaatggagtcttcacagggcctacttagtttccaggacgtactgcttctaacgattatagggtatatcttagctggtgaaaatttccctacatctatggctggtggtccattttcttgggaagatgagcggtctcttaaagatgttatagtggactctatccttgaacgaccatcatctgtgaagttgcgcttccttgatggcctggatagtgaacttgaagctaaagctagatctaaagatggcgagaggaataaaaactctagcgaggtagcacccagtactgatgatgattttgatgatgaatggggtacctgggatgacagtgataatactgatcaccaaaaggaggaagcttatggggacatgcaacttaagttggaagtgcgagatagagttgatcagcttttcaaattctttcacaaattatccagtatgaggttaagaaatcaagcccttggtgaaggtatagcagcattaagtagattcgagactgacggttactcgaggaaatgcttgctttataagttactattagctctcttgtcgaggtacgatgtacctggcctcgagtatcattcatcaactgttggtcgtctattcaaaagtggactaggtagattcgggcttggacagccttcggtgatcaatctgttcttatcatttttgttcttggaggtattaatactcttgaggtccgggaagtcatgacagcgatatcggagagcagcagaccagatgtggagcttattctgggtgggacaacccttcttaccccagacgacatgtttgagttgatgttgggatcgtcaagctttgcttaggctcaaccttcactcttgagtcatgtgcgggacttggaaagaaatcggagcatatttttttcttattctccagaatagttacttgtctgatgtagcagaagcattcagactcggaagaggatactaccagaagaaagcagtccattcagagtcaaaatagtttgcaagatgaacctacgagtattgctggaaggtgtaagaaacagtgtgtctagttatcagtggctgactcttgttgtaaaacatgtagcagagatatatcaagcaaaagatgcgtaagaactcaagtaatttgttttgtcactaacatgagcagatgccgtttggctccatgatgaattgtttgtcggcagta

SEQ ID NO: 63937 - DNA, 2224 bp, Zea Mays
aatgtagtttgctagataattgaaaaatattttgtttttttcatccgactgttttggagatggtagctgttattacacatgacaagaagaatgattcacggcatacttgtgtgttccttgaatcaaagaacaaataaataaaatgtagtaaagggcattgccttctccattttcttgtagattttcatctcaggatgggtaatacctcttctaggtttccttttgcattttcttctggattttcatcacagaatgtccctaatccccctctggattccttttttcttctaggttttcatcacaggatgggtctaatcagtcatatggcacagcaaacccaggtttggctagaatcgctatacattctgaacttatctttaggcatttaggcaatggtagctagtggaggctaagtgtggttttgaatgtttgaaaccagatgtttgatcaatattattatgacaacaactttgacgaactgcaagttaattttgcttctagcaattgaattgttgtctacctgccaaaattatagctcgacctctatttcttaggtacatttaatgtgtggcctttatttttgtcttttttaattaccaatgactactttatgacaaaagactgaaattctggtgttgttgtttgtgttctgtagcaacccagcttattttttttctttcaatattttccacaggacaacttggataatggacaaccaaagattttccactaaaataaagtatggttctgggtcttcatatccaagtaaacaaaaatggatcggcaacccaagtaaagagtgcccaaagtgcaatcatgccattgataattatatttccacttttcattatatgccatttccgtttctctgtaatcaagcatggttaggaataaataaaaaaaacgatatatgagcaattgccaaagattaacagtttgcatatcttaaggagttcgtcaacatttttataaaattggaataaatgtctaaggttataattatatttgtcactttacctgccttacttttgagccagctcatggccaacttatatgttagtacacctattgtatttctaaaatgctttgatttttgcagatacagtatgggcctttagctatgaatattccttttaaaggttctattaaagtgtggtcagctgcaaagtctgttgttcaccagtggcccgatttgcttaaaggtgtaaaatttgatccttctaaccaagaattaatctggcacttattggcaaaacatggaaaatctggcaaaaaaccccccatccgttcattgacgagttcattccaacagttgaagaagatgaaggcatctggtacactcatcgacagaaacttccaggtctctatggatgacattgccccgatgataagatgaatgaccgctatgaaaacatggggtgcacaacatcgaatgatttcatttgtagtttgccatgtgttttgacagattagtccatgcggcggaggctagacaacatgcacaagaggttgaggctgttggagcaacaaatggagacgctggaggcccaaattggcaaaaccaccgacaatgtgctgatttttatctattacttttctttaaaacatgtatacaaaatgtcccatccctgtttactgcgcaaacatgttcaacggaatgcaacataatcaatgcttttataattaagtttttaatctaaattctaaaatatttggttctgtattggtggttggcaaagaatatgtattgttcgtttttatgtaatcattgtgcactaacatttcattgaatatttgtgtgtcgtcgcaatgcacatgcattgtactatatacattatatgtgagttttcttacacttgagattctgaaattattagttatgacaaatccaatattgttgttccatgaaatttgttgggagagagatggaaattatggtcatcaacagctctagcacacagagtgtgcattgaactaaggattagttcctatataatggcacattggcactaacatttttatgcattttaatgcacccgtagcaacgcacgggcatagacctagtagatcaatagaagagtaaagaaaggatcaaaggaaatgcttctaaccaagctcaggataaaacagtaatcatgcaatgcaaccgagaaaatgtctgcaaactataaacagtaggcaagtggtagcagaacaggacaacttaagagtaattgcaaaaaag

SEQ ID NO: 63938 - DNA, 3608 bp, Zea Mays
cccgccatcgccaccgttccccaccactacccccgcacgcacgccgccggctccgcttgcaaccccgctcccccgttccccaccactacgcggtgctggatctcagcctcccacgttgccgtgccctcgttccccaccactccgtagtttataaagcttgatgctaacgttagtttattggtttgcttcttcacaaaaaagaattattagtttgcttgctgtttaaatacatgaacattattgaggagtaacttcaaatttcatctgtattaaaatgatccttggttagaaatattggatcatggctctatactatctttgtttacattctccttcaatgtgttgctgctaagattaataagcaattaataagcatgaggtgtttctcctgagatgcatagattatatgagcagatgcaagtgacaacccattggaaggtaacgagtttgtgctatatagaatcatttagtataggtctataaatttctatgtgcaatttttccttttatatattattacctttatagaatttattctcaccacgtttcatggatatagatttcagtatgttgctgccaagattaataaacgtgaggatttctgatgcatagggttatatacgagagcagatacaggtgatacccatttttaaaggtaacatgtctatggagaaaaaatatatagactcattttctatatgtgattttccatttttatattgttatattcaatggaatttgttctcaccacatttcctttatatagatcaaaatattctatggcaatgcctacaacaaaagtgttagctcatcaatgtaaaattattcaagcacttggcattctaaacagtgtcctcattttttagtttagttggatgatatgtacatttatgctgcattattgaagctgcctacgattttagatctaccatttgccactgccgtgctgttcatgcttcataccatgcttcaattgtgatgtactttaaatagattgttgcatgctagatgccaagaaatgcagcaagaaagttattctgaaaaattgctacatttttttgccagtttcatgtcccgtgagtgcataaacataatgcagaacatgcaacattaatagaggtagtgttgctacctcgccaatctaatgctcaccatcccctgtagtgctaatttgggataccttgcccaaacgagcatatgagttcatggtattctaatgtctcccaactaagtacttgaggtcatgggtattctaacgcttcactcagaaatgcatgacaaacccatttcctgctctatcattggataaagacatctttgttttcttcttagaaatcatatattccactatctttttttactttgctcgctcgatgaaggataggtctggcacagtggtgacaagccttctcattgagcgaagaccgtcctgggttcgatgtagcctttctgcaaaatgcaggggtaaggctttcctttgaaggataggtctggcacagtggtgacaagccttctcattgagcgaagaccgtcttgggttcgatgtagcctttctgcaaactgcaggggtaaggctttccttggttattctttctctagactcatgcaggagccgcaatcatttggtttatccttttgctcaccctatgattcacataatgctattgccataagaaaatgtgcttcatgccatagtagtatgtcatatatataatttatttattttcttaaaagataatatatctctactcctttaaagcacaactttcatgcaggtgtgggtgagaaactggttttctccgtcacgcacgtacgcttaggggtggtaatgagctctagattttacactacaaactttaaggatcaaatcggtttaggatcgggccctattcctattcatttctaaactaaaattatttaagggtcctaaatttttgttaagggacatttggatcgtggtccattaccacccctacgtacgctttcataataagccgtctgtgtcgcatgtccacaacaacccagacgtgtcctcctgtctctcgtgtctcgcgtcaccgacaccgcagtgagagtagaagcaacaaccccgcagtgagaggaaaacattcttatttggctggtaaatatttatttgttttcaatgtagtttgctagataattgaaaaatattttgtttttttcatccgactgttttggagatggtagctgttattacacatgacaagaagaatgattcacggcatacttgtgtgttccttgaatcaaagaacaaataaataaaatgtagtaaagggcattgccttctccattttcttgtagattttcatctcaggatgggtaatacctcttctaggtttccttttgcattttcttctggattttcatcacagaatgtccctaatccccctctggattccttttttcttctaggttttcatcacaggatgggtctaatcagtcatatggcacagcaaacccagatacagtatgggcctttagctatgaatattccttttaaaggttctattaaagtgtggtcagctgcaaagtctgttgttcaccagtggcccgatttgcttaaaggtgtaaaatttgatccttctaaccaagaattaatctggcacttattggcaaaacatggaaaatctggcaaaaaaccccccatccgttcattgacgagttcattccaacagttgaagaagatgaaggcatctggtacactcatcgacagaaacttccaggtctctatggatgacattgccccgatgataagatgaatgaccgctatgaaaacatggggtgcacaacatcgaatgatttcatttgtagtttgccatgtgttttgacagattagtccatgcggcggaggctagacaacatgcacaagaggttgaggctgttggagcaacaaatggagacgctggaggcccaaattggcaaaaccaccgacaatgtgctgatttttatctattacttttctttaaaacatgtatacaaaatgtcccatccctgtttactgcgcaaacatgttcaacggaatgcaacataatcaatgcttttataattaagtttttaatctaaattctaaaatatttggttctgtattggtggttggcaaagaatatgtattgttcgtttttatgtaatcattgtgcactaacatttcattgaatatttgtgtgtcgtcgcaatgcacatgcattgtactatatacattatatgtgagttttcttacacttgagattctgaaattattagttatgacaaatccaatattgttgttccatgaaatttgttgggagagagatggaaattatggtcatcaacagctctagcacacagagtgtgcattgaactaaggattagttcctatataatggcacattggcactaacatttttatgcattttaatgcacccgtagcaacgcacgggcatagacctagtagatcaatagaagagtaaagaaaggatcaaaggaaatgcttctaaccaagctcaggataaaacagtaatcatgcaatgcaaccgagaaaatgtctgcaaactataaacagtaggcaagtggtagcagaacaggacaacttaagagtaattgcaaaaaag

SEQ ID NO: 63939 - DNA, 2639 bp, Zea Mays
cccgccatcgccaccgttccccaccactacccccgcacgcacgccgccggctccgcttgcaaccccgctcccccgttccccaccactacgcggtgctggatctcagcctcccacgttgccgtgccctcgttccccaccactccgtagtttataaagcttgatgctaacgttagtttattggtttgcttcttcacaaaaaagaattattagtttgcttgctgtttaaatacatgaacattattgaggagtaacttcaaatttcatctgtattaaaatgatccttggttagaaatattggatcatggctctatactatctttgtttacattctccttcaatgtgttgctgctaagattaataagcaattaataagcatgaggtgtttctcctgagatgcatagattatatgagcagatgcaagtgacaacccattggaaggtaacgagtttgtgctatatagaatcatttagtataggtctataaatttctatgtgcaatttttccttttatatattattacctttatagaatttattctcaccacgtttcatggatatagatttcagtatgttgctgccaagattaataaacgtgaggatttctgatgcatagggttatatacgagagcagatacaggtgatacccatttttaaaggtaacatgtctatggagaaaaaatatatagactcattttctatatgtgattttccatttttatattgttatattcaatggaatttgttctcaccacatttcctttatatagatcaaaatattctatggcaatgcctacaacaaaagtgttagctcatcaatgtaaaattattcaagcacttggcattctaaacagtgtcctcattttttagtttagttggatgatatgtacatttatgctgcattattgaagctgcctacgattttagatctaccatttgccactgccgtgctgttcatgcttcataccatgcttcaattgtgatgtactttaaatagattgttgcatgctagatgccaagaaatgcagcaagaaagttattctgaaaaattgctacatttttttgccagtttcatgtcccgtgagtgcataaacataatgcagaacatgcaacattaatagaggtagtgttgctacctcgccaatctaatgctcaccatcccctgtagtgctaatttgggataccttgcccaaacgagcatatgagttcatggtattctaatgtctcccaactaagtacttgaggtcatgggtattctaacgcttcactcagaaatgcatgacaaacccatttcctgctctatcattggataaagacatctttgttttcttcttagaaatcatatattccactatctttttttactttgctcgctcgatgaaggataggtctggcacagtggtgacaagccttctcattgagcgaagaccgtcctgggttcgatgtagcctttctgcaaaatgcaggggttttcatcacaggatgggtctaatcagtcatatggcacagcaaacccagatacagtatgggcctttagctatgaatattccttttaaaggttctattaaagtgtggtcagctgcaaagtctgttgttcaccagtggcccgatttgcttaaaggtgtaaaatttgatccttctaaccaagaattaatctggcacttattggcaaaacatggaaaatctggcaaaaaaccccccatccgttcattgacgagttcattccaacagttgaagaagatgaaggcatctggtacactcatcgacagaaacttccaggtctctatggatgacattgccccgatgataagatgaatgaccgctatgaaaacatggggtgcacaacatcgaatgatttcatttgtagtttgccatgtgttttgacagattagtccatgcggcggaggctagacaacatgcacaagaggttgaggctgttggagcaacaaatggagacgctggaggcccaaattggcaaaaccaccgacaatgtgctgatttttatctattacttttctttaaaacatgtatacaaaatgtcccatccctgtttactgcgcaaacatgttcaacggaatgcaacataatcaatgcttttataattaagtttttaatctaaattctaaaatatttggttctgtattggtggttggcaaagaatatgtattgttcgtttttatgtaatcattgtgcactaacatttcattgaatatttgtgtgtcgtcgcaatgcacatgcattgtactatatacattatatgtgagttttcttacacttgagattctgaaattattagttatgacaaatccaatattgttgttccatgaaatttgttgggagagagatggaaattatggtcatcaacagctctagcacacagagtgtgcattgaactaaggattagttcctatataatggcacattggcactaacatttttatgcattttaatgcacccgtagcaacgcacgggcatagacctagtagatcaatagaagagtaaagaaaggatcaaaggaaatgcttctaaccaagctcaggataaaacagtaatcatgcaatgcaaccgagaaaatgtctgcaaactataaacagtaggcaagtggtagcagaacaggacaacttaagagtaattgcaaaaaag

SEQ ID NO: 63940 - DNA, 3261 bp, Zea Mays
cccgccatcgccaccgttccccaccactacccccgcacgcacgccgccggctccgcttgcaaccccgctcccccgttccccaccactacgcggtgctggatctcagcctcccacgttgccgtgccctcgttccccaccactccgtagtttataaagcttgatgctaacgttagtttattggtttgcttcttcacaaaaaagaattattagtttgcttgctgtttaaatacatgaacattattgaggagtaacttcaaatttcatctgtattaaaatgatccttggttagaaatattggatcatggctctatactatctttgtttacattctccttcaatgtgttgctgctaagattaataagcaattaataagcatgaggtgtttctcctgagatgcatagattatatgagcagatgcaagtgacaacccattggaaggtaacgagtttgtgctatatagaatcatttagtataggtctataaatttctatgtgcaatttttccttttatatattattacctttatagaatttattctcaccacgtttcatggatatagatttcagtatgttgctgccaagattaataaacgtgaggatttctgatgcatagggttatatacgagagcagatacaggtgatacccatttttaaaggtaacatgtctatggagaaaaaatatatagactcattttctatatgtgattttccatttttatattgttatattcaatggaatttgttctcaccacatttcctttatatagatcaaaatattctatggcaatgcctacaacaaaagtgttagctcatcaatgtaaaattattcaagcacttggcattctaaacagtgtcctcattttttagtttagttggatgatatgtacatttatgctgcattattgaagctgcctacgattttagatctaccatttgccactgccgtgctgttcatgcttcataccatgcttcaattgtgatgtactttaaatagattgttgcatgctagatgccaagaaatgcagcaagaaagttattctgaaaaattgctacatttttttgccagtttcatgtcccgtgagtgcataaacataatgcagaacatgcaacattaatagaggtagtgttgctacctcgccaatctaatgctcaccatcccctgtagtgctaatttgggataccttgcccaaacgagcatatgagttcatggtattctaatgtctcccaactaagtacttgaggtcatgggtattctaacgcttcactcagaaatgcatgacaaacccatttcctgctctatcattggataaagacatctttgttttcttcttagaaatcatatattccactatctttttttactttgctcgctcgatgaaggataggtctggcacagtggtgacaagccttctcattgagcgaagaccgtcctgggttcgatgtagcctttctgcaaaatgcaggggttttcatcacaggatgggtctaatcagtcatatggcacagcaaacccagatacagtatgggcctttagctatgaatattccttttaaaggttctattaaagtgtggtcagctgcaaagtctgttgttcaccagtggcccgatttgcttaaaggtgtaaaatttgatccttctaaccaagaattaatctggcacttattggcaaaacatggaaaatctggcaaaaaaccccccatccgttcattgacgagttcattccaacagttgaagaagatgaaggcatctggtacactcatcgacagaaacttccaggtacttctatcttctttctgaaagattgtgggattttcaggattaaggttcgtagctataaacttttgtttcagattagatcaaatttgaaaatctacagtttacaactatgtcaagtgcttatctttgttagtaatttgttgtcctgtgggattcttttgttgatcacaccctatgatggcctgcgtttagcctaggaaaacttcaggtagggaaaattacttattttagttttcgtttagtttttcaccatgtcgctatgcaacaattgacggcctgtacaactcttgaattgtagctgccatctttgaaatagacatttaacattctggttggaacactctttctttggtactccacttgtttttcaacattcaggagtcatctctattcattttaggtgttaagcaaaatggaagtgtatcacatttcttccacagaacatttaaggcctacaacactgggactaggaagtgtccattggcacaacacaggcaagactattttcttctagaagataataagaagatttggtgggcttagcttgatggcagcaatgttggttttgtgtttgtacatgatggcagcactagtgtttcccccttatgttgctcctcttcaggtctctatggatgacattgccccgatgataagatgaatgaccgctatgaaaacatggggtgcacaacatcgaatgatttcatttgtagtttgccatgtgttttgacagattagtccatgcggcggaggctagacaacatgcacaagaggttgaggctgttggagcaacaaatggagacgctggaggcccaaattggcaaaaccaccgacaatgtgctgatttttatctattacttttctttaaaacatgtatacaaaatgtcccatccctgtttactgcgcaaacatgttcaacggaatgcaacataatcaatgcttttataattaagtttttaatctaaattctaaaatatttggttctgtattggtggttggcaaagaatatgtattgttcgtttttatgtaatcattgtgcactaacatttcattgaatatttgtgtgtcgtcgcaatgcacatgcattgtactatatacattatatgtgagttttcttacacttgagattctgaaattattagttatgacaaatccaatattgttgttccatgaaatttgttgggagagagatggaaattatggtcatcaacagctctagcacacagagtgtgcattgaactaaggattagttcctatataatggcacattggcactaacatttttatgcattttaatgcacccgtagcaacgcacgggcatagacctagtagatcaatagaagagtaaagaaaggatcaaaggaaatgcttctaaccaagctcaggataaaacagtaatcatgcaatgcaaccgagaaaatgtctgcaaactataaacagtaggcaagtggtagcagaacaggacaacttaagagtaattgcaaaaaag

SEQ ID NO: 63941 - DNA, 4069 bp, Zea Mays
cccgccatcgccaccgttccccaccactacccccgcacgcacgccgccggctccgcttgcaaccccgctcccccgttccccaccactacgcggtgctggatctcagcctcccacgttgccgtgccctcgttccccaccactccgtagtttataaagcttgatgctaacgttagtttattggtttgcttcttcacaaaaaagaattattagtttgcttgctgtttaaatacatgaacattattgaggagtaacttcaaatttcatctgtattaaaatgatccttggttagaaatattggatcatggctctatactatctttgtttacattctccttcaatgtgttgctgctaagattaataagcaattaataagcatgaggtgtttctcctgagatgcatagattatatgagcagatgcaagtgacaacccattggaaggtaacgagtttgtgctatatagaatcatttagtataggtctataaatttctatgtgcaatttttccttttatatattattacctttatagaatttattctcaccacgtttcatggatatagatttcagtatgttgctgccaagattaataaacgtgaggatttctgatgcatagggttatatacgagagcagatacaggtgatacccatttttaaaggtaacatgtctatggagaaaaaatatatagactcattttctatatgtgattttccatttttatattgttatattcaatggaatttgttctcaccacatttcctttatatagatcaaaatattctatggcaatgcctacaacaaaagtgttagctcatcaatgtaaaattattcaagcacttggcattctaaacagtgtcctcattttttagtttagttggatgatatgtacatttatgctgcattattgaagctgcctacgattttagatctaccatttgccactgccgtgctgttcatgcttcataccatgcttcaattgtgatgtactttaaatagattgttgcatgctagatgccaagaaatgcagcaagaaagttattctgaaaaattgctacatttttttgccagtttcatgtcccgtgagtgcataaacataatgcagaacatgcaacattaatagaggtagtgttgctacctcgccaatctaatgctcaccatcccctgtagtgctaatttgggataccttgcccaaacgagcatatgagttcatggtattctaatgtctcccaactaagtacttgaggtcatgggtattctaacgcttcactcagaaatgcatgacaaacccatttcctgctctatcattggataaagacatctttgttttcttcttagaaatcatatattccactatctttttttactttgctcgctcgatgaaggataggtctggcacagtggtgacaagccttctcattgagcgaagaccgtcctgggttcgatgtagcctttctgcaaaatgcaggggttttcatcacaggatgggtctaatcagtcatatggcacagcaaacccaggtttggctagaatcgctatacattctgaacttatctttaggcatttaggcaatggtagctagtggaggctaagtgtggttttgaatgtttgaaaccagatgtttgatcaatattattatgacaacaactttgacgaactgcaagttaattttgcttctagcaattgaattgttgtctacctgccaaaattatagctcgacctctatttcttaggtacatttaatgtgtggcctttatttttgtcttttttaattaccaatgactactttatgacaaaagactgaaattctggtgttgttgtttgtgttctgtagcaacccagcttattttttttctttcaatattttccacaggacaacttggataatggacaaccaaagattttccactaaaataaagtatggttctgggtcttcatatccaagtaaacaaaaatggatcggcaacccaagtaaagagtgcccaaagtgcaatcatgccattgataattatatttccacttttcattatatgccatttccgtttctctgtaatcaagcatggttaggaataaataaaaaaaacgatatatgagcaattgccaaagattaacagtttgcatatcttaaggagttcgtcaacatttttataaaattggaataaatgtctaaggttataattatatttgtcactttacctgccttacttttgagccagctcatggccaacttatatgttagtacacctattgtatttctaaaatgctttgatttttgcagatacagtatgggcctttagctatgaatattccttttaaaggttctattaaagtgtggtcagctgcaaagtctgtgaggttctattgaagtgtgatcagctcatgactgttttcttgttgcaggttgttcaccagtggcccgatttgcttaaaggtgtaaaatttgatccttctaaccaagaattaatctggcacttattggcaaaacatggaaaatctggcaaaaaaccccccatccgttcattgacgagttcattccaacagttgaagaagatgaaggcatctggtacactcatcgacagaaacttccaggtacttctatcttctttctgaaagattgtgggattttcaggattaaggttcgtagctataaacttttgtttcagattagatcaaatttgaaaatctacagtttacaactatgtcaagtgcttatctttgttagtaatttgttgtcctgtgggattcttttgttgatcacaccctatgatggcctgcgtttagcctaggaaaacttcaggtagggaaaattacttattttagttttcgtttagtttttcaccatgtcgctatgcaacaattgacggcctgtacaactcttgaattgtagctgccatctttgaaatagacatttaacattctggttggaacactctttctttggtactccacttgtttttcaacattcaggagtcatctctattcattttaggtgttaagcaaaatggaagtgtatcacatttcttccacagaacatttaaggcctacaacactgggactaggaagtgtccattggcacaacacaggcaagactattttcttctagaagataataagaagatttggtgggcttagcttgatggcagcaatgttggttttgtgtttgtacatgatggcagcactagtgtttcccccttatgttgctcctcttcaggtctctatggatgacattgccccgatgataagatgaatgaccgctatgaaaacatggggtgcacaacatcgaatgatttcatttgtagtttgccatgtgttttgacagattagtccatgcggcggaggctagacaacatgcacaagaggttgaggctgttggagcaacaaatggagacgctggaggcccaaattggcaaaaccaccgacaatgtgctgatttttatctattacttttctttaaaacatgtatacaaaatgtcccatccctgtttactgcgcaaacatgttcaacggaatgcaacataatcaatgcttttataattaagtttttaatctaaattctaaaatatttggttctgtattggtggttggcaaagaatatgtattgttcgtttttatgtaatcattgtgcactaacatttcattgaatatttgtgtgtcgtcgcaatgcacatgcattgtactatatacattatatgtgagttttcttacacttgagattctgaaattattagttatgacaaatccaatattgttgttccatgaaatttgttgggagagagatggaaattatggtcatcaacagctctagcacacagagtgtgcattgaactaaggattagttcctatataatggcacattggcactaacatttttatgcattttaatgcacccgtagcaacgcacgggcatagacctagtagatcaatagaagagtaaagaaaggatcaaaggaaatgcttctaaccaagctcaggataaaacagtaatcatgcaatgcaaccgagaaaatgtctgcaaactataaacagtaggcaagtggtagcagaacaggacaacttaagagtaattgcaaaaaag

SEQ ID NO: 63942 - DNA, 475 bp, Zea Mays
atcccgccgccaaccgcaaacgcgtgatccacgggcgccgcgattcgcgccaggatttggtacaacaacgtccctcacccaaagctggtggagtataagaaagatcagaactgggttacaagatttggtgattatcttgtttttcctggaggtggaactcaattcaaagatggcgtgggaagatacattcagtttgttgaacagattatgccaaccatacaatggggaaggcgcacaagaactgtcttggatgttggatgtggtgttgccagctttggtggatacctgcttgacaggaatgccattactatgtcatttgccccaaaagacgagcatgaggctcagatacagtttgccctagagcgtggaattccagcatttatagcagtaattggaacacaaaagcttctgtttcctgataatgtgttcgatgttgtacactgtgcaaggtgcagggtccattggtatgcaaatg

SEQ ID NO: 63943 - DNA, 3958 bp, Zea Mays
ggaagtgaaaaaatccataagagtgagctttcttattgcacatcatttgcaatgataattgaagttcttatggtcagctaaaaattatttatcatatgtctgtagatatctgagttggataaagtatcaaggagcacaggaacttcaaaaaggagaaaacatatgtaaatgaatgaaccttttattttctggtagacagacaatttcaacttgttactccattaggtaatagttacaatagtaaatctaagaattatctgagaccaggagggaccttgattttgttgactcagaatcatattctttttccacaatcctcaaaagaaaaacatcaagaattcgcactcgggcagccttcatcttatattcatacaaaaaggggaacacggaagaatttgcgatgaatctatgatgaagacacaacttgatcctactagtgaaaagataagaagcaaagtttttacatttaatagataagcaggtctattttttatcatactctgtataagactagtctacatacagcttgaaccatgatagcatcactggatttgttagtaaacatcaatgttcaagagcacttatatttcccatggtagtaaatgaaaagtgcagaatacaagaggccaaagctataatatttttccgaaaaggaaagagccgatcattcatgtcttacccagtataaatcaaaccatctccaccccacttgacacaggtcactgaactagtgtgacctgtaagggaaataacacatttccttgtggtgatgtcccaaatgcgagcatcaccgtccttgcttgcacttacaaagcggcggcacggagactgcaaatgaactggctcccatgatacagcagtaatccatttcctgtgtccctattttgtaacacaaggcacactaaatgagtggtggacattgtaaaaagaaacatctgaaagatgcaaagaatagaagtttgtgatagttctctttggttatcatctatttcaaattgtgggtcacagcacagggcagtctagcctaacaatacagaaaagaaaagctaccgtatttctaaattcgttgttcagcgggcctagaactcaaaaattgaacaatgcatgattgtaccataagtggagtgcccaattggttcccagtttttgggtcccataatataagttctcccgacttgctaccactaacaagatgttttccatcaggtgaccatgcaatacagagaacccaatttttgtgtcctggaaaatgaaaggttagaaacagcatatgagaagtgcaatgcacagaagtgcaacaaagattgcacaaatatgatagcctttcctaatgggttcaaatgccataaagtcagataggcctaaaaatggctcacatagtgtgtagggatgaaaacagatacttactcggatatcatttttttggtcttttttctttgattgtgaataaatatgatatacaatgcgctattcaaattcatattcttatttcgagcaatgagcttgtaaagattcataaaaggcaaatttcgaatttatcatatatcttctcaaatgttagatataaaattcggatacaattcggttacagatatttttttacattttttgttgtagggagcaaataatgtataaaacattttaagcattattttattcttatttataataatgtgcttgataacataagaaaatattagcatcaaatttcatacatatctattttaaagtattaaatttgtcctaataatccggatacctactttcatccctaatagtgtgttcaatgttcattgcgagggataggtttgaacctgcacaatattatagatcggaaaaaccactatgccattaaaagaaactgtaatatggcatcattcaaagattcaacggtttcaattcatatgtttgtccagcaaaagtgcatagaaggatcatcgaaccaatatattgtagtcatcctctctttgtccatttaatttgctaattatatatagatgctagttccaaggtcatcatcagcacctgaggaagcccacaaagatcccgacacaggagactgatattaggacctactgtgatatggggacctcccttggtccgtctagataggggcatggcacaatgtcaaattataccactcgaaaatcctcagaacaacacatcccgagacacacaaacgtaagccctcggggcccctcatgccccgaggcacttggcggtataagctcctgaggctcctcgcgcctaggggcactagtcggtgtaaggcctcgtggcagtacgatgggttctcaggacagactggcccctgagcacatgctacatttagctgctctggacacttaagtttccgaccttatactttgacgccgattaggacctatatcatctagggcctaggggccccccgagggatttgaaagctcggagtagctaagggtctgtttggttggactgtggctgtgaaaaaactgttgtggctgtgaactgctaaaaagctaaaaaaacgttggtggaaaccactgaaagccgctaaaaattcttccatatatattttcacagttccacctgaaagccgctaaaagcaggtccaaaggtgctttcagttttgcactaccaagaaaatcggcttttagaaaaagctactttccagattcagccctttggtttggcttttggggggcaaaagccaaaaccaaaccatacacaccctaagactaatcttatctcgaagcaaaaggatgtcgcaggtccaccagaggcggtacggctccgagataaggccctagaggttatccttagcaatagattaatggacaagtctcaggcacaacctattaaatgtgttggaggcaacattgcgggcctgacttagtgaactagcacaagacttaggccgcagagcactcgagaccgacacacagagcgagtatcggccatgtagtcatgcatgccacacgaagtgtaccatgaaatgtaaaaaatagaagaggctatattggtcgctaagcaccatagactagttggttcagacctcggtgttcacaggcgtaggtatgacagtcaccttggaaaggaatgatcgtcaccaagcgcttgtatcactttaaatgtgatacgtgacattacagacacgcctccgccctgataacacactaagaggcaagcatacctggcatttctgagaaagtgtactcatgcatttatgaccatatcgggttagacgatcttgctttctctaagagatggggaaaaaccctatagccatggctttacagtacaagtgtattttcctgtaataaagggtatgacaaaccgtactgagcaccattaatacaacgcccacactctggatcggtcctcggttggtcatttcaaggggtatgattacactgacacatgctacatgattacgaagcatgggacagagacggttggcccaatgacaagcagggcccgcaaataacatataaatgtaaacttgcaacttctttggagtataaaagagatggtagatcagcgtttaattcaggttagacacaccacaaagtatcattccaagatccaacaaaccgaacccaaaggagttcaattcaactgagcaaagagagcaacagttagaactagtctagcttgcctcatccctcctcaactaagacggactatttctcactgggttggagctcataaccttgtgtatcatctgcatacaacaatctatgatcgataggagattaggaggacaaggcgtattacgcacactatggcccaaacatctaaaaatctgtgtatattaggttgtgatgtcatgacttcgtagacatactctactgtttcaggactcactccctgcttccctaactatcttttggtactattgatacactggtgtctttggtacatcattcatcttagtggtttggcgtgcaactaagattaaattggccaatatggg

SEQ ID NO: 63944 - DNA, 2882 bp, Zea Mays
gttagtgccaatgaggtaggtgctgcttgttttatcttgaaatgggctctcatgatggcgaggatgaagagttgccacccccccctccggtgccaccagatgtgattcccattaaagctgaagatgctgtgggtgaatcaccagcaaaccatatattaaagccaaagagattactgatggacaggcctggtataggaagaaaagggcagccgacccagctctattcaaatcactttaaagtcgctgtgaagagtacagaagacgtcttctttcactactatgtaaacctgaagtatgaggatgatcgacccgttgatggtaaagggatcggcagaaaggtgattgataaactgcagcagacatatcgtgcagagctttctaacaaggactttgcatatgatggagaaaagagcctgtttacagttggtggtcttccacaaaaaaagaatgagttcaccgttgtcttggaggacgtatctactggaaagactgctgccaatgggagccctggaggtaatgacagtcctggaggtggtgataggaagagagtgaggaggccataccagacgaaaactttcaaagtggagataaattttgcagcagaggttcctatgagtgctattggtcaagtcattagaggcgaagaatctgagaactccctggaggcgcttcgtgttcttgatatcatactgaggcagcattccgcagaacaaggctgccttttggttaagcaatcatttttctacaacaacccttcatgctttgttgacttgggtggtggtgtgatgggttgtcgtggatttcattcaagcttccgtggcacacagagtggactttccctcaatgttgatgtctcaacaacaatgatcgtgaaacctggccctgttattgattttcttctttctaaccagaatgttaatgatcctagcagaattgattggcaaaaggccaagcgtgctctcaagggcttgaggattagaaccactcctgcaaattcagaattcaagatttttggtctcagcgagaggatctgcaaagaacaaacgtttccgctgaggcagagaaatggtagcaacggagattgtgataccattgaaataactgtctatgactactatgcaaagaaaggaatcgatctaaagtattctggtgatttcccctgtataaatacagggaaggcaaagcgcccaacatattttccaatcgagctatgctcgcttgttccgcttcaaagatacaccaaagctttgtctacgctacaaaggtcatcccttgtggagaagtctagacagaagcctgaagaaaggatgaccgttctaaatgatgcactgcaacgcagtaactacgattctgaccccatgttgagggcatgtggtgtttcagttgctccaaaatttacccaagttgaaggaaggatccttcaagccccaaagctgaaagccggcaatggtgatgatatcttttcacgaaatggacggtggaatttcactaataggaagttttatgaaacctgctctgtgaataagtgggcggtcgttaatttctctgcacgttgtgatgttcggaatcttatccgtgacctgatgaggaatgcatctgcaaagggaattcaaatggaggaaccttttgatgtgtttgaagagagtccctctatgaggcgtgcacctgtgtcaagaagggtggatgatatgtttgggcagataaaatcaaaacttcctggagctcctaggttcctcttgtgccttctccctgagaggaaaaattgtgaaatctatggtccttggaagagaaagtgcctggccgagtttggtattgtcacacagtgtctagctccattaagagtcaatgatccgtacctgcttaatttgctgatgaagatcaatgcaaagcttggtggtctgaactcgttgctgcaagttgaagcatcttcgtcaataccacatgtgtcgcaagtacccaccatcatcttaggtatggatgtttcacatggtcatccaggacaagatagaccttcggttgcagcggtggttagttctcgtcaatggcctcttatctctagatatagagcatcagtgcacacccaatctgccagactagaaatgatgtcctcgttgtttaagccgcggggtactgatgatgatggcctcatccgggaatcactgatcgacttctacactagctctggaaagcgaaaaccagaacacataattattttcagggatggagtcagtgaaagtcagtttacccaggtcatcaacattgagctggatcagatcatcgaggcatgtaagtttctggatgagaagtggtcacccaagttcactgtgattgttgctcaaaagaaccaccacaccaagttctttcagacggcatcaccagacaatgttcttcctggaactgtggtggatagtaaagtttgccatcctaagaacttcgacttctacatgtgtgcacatgctgggatgattggaacaacaaggccgacccactatcatgttctgcacgacgagataggtttcagtgccgacgagatgcaggagtttgttcattcgctctcttacgtgtaccagaggagcacgacagccatctcagtggttgctccagtgtgctacgcccacctcgctgcagcccaggtgagcacgttcctgagattggaggagatgtcagacgcgtcctccagccagggaggagggcatacctcggctggcagtgctcctgtgccggagctgcctcgcctgcatgacaaagtcaggagctccatgttcttctgctagctgatgtgcgtgcgcatcaggatcgagctccatgttttgtgttagtgaaaataagaccctcaaaaaggaggcgaatgagctcattcacgtcttaattaaagcctacag

SEQ ID NO: 63945 - DNA, 2888 bp, Zea Mays
tatggaacaagtaaaacaaaatttctgcatcagcaatcaggcacaagactgaatgacgtggtaggtgctgcttgttttatcttgaaatgggctctcatgatggcgaggatgaagagttgccacccccccctccggtgccaccagatgtgattcccattaaagctgaagatgctgtgggtgaatcaccagcaaaccatatattaaagccaaagagattactgatggacaggcctggtataggaagaaaagggcagccgacccagctctattcaaatcactttaaagtcgctgtgaagagtacagaagacgtcttctttcactactatgtaaacctgaagtatgaggatgatcgacccgttgatggtaaagggatcggcagaaaggtgattgataaactgcagcagacatatcgtgcagagctttctaacaaggactttgcatatgatggagaaaagagcctgtttacagttggtggtcttccacaaaaaaagaatgagttcaccgttgtcttggaggacgtatctactggaaagactgctgccaatgggagccctggaggtaatgacagtcctggaggtggtgataggaagagagtgaggaggccataccagacgaaaactttcaaagtggagataaattttgcagcagaggttcctatgagtgctattggtcaagtcattagaggcgaagaatctgagaactccctggaggcgcttcgtgttcttgatatcatactgaggcagcattccgcagaacaaggctgccttttggttaagcaatcatttttctacaacaacccttcatgctttgttgacttgggtggtggtgtgatgggttgtcgtggatttcattcaagcttccgtggcacacagagtggactttccctcaatgttgatgtctcaacaacaatgatcgtgaaacctggccctgttattgattttcttctttctaaccagaatgttaatgatcctagcagaattgattggcaaaaggccaagcgtgctctcaagggcttgaggattagaaccactcctgcaaattcagaattcaagatttttggtctcagcgagaggatctgcaaagaacaaacgtttccgctgaggcagagaaatggtagcaacggagattgtgataccattgaaataactgtctatgactactatgcaaagaaaggaatcgatctaaagtattctggtgatttcccctgtataaatacagggaaggcaaagcgcccaacatattttccaatcgagctatgctcgcttgttccgcttcaaagatacaccaaagctttgtctacgctacaaaggtcatcccttgtggagaagtctagacagaagcctgaagaaaggatgaccgttctaaatgatgcactgcaacgcagtaactacgattctgaccccatgttgagggcatgtggtgtttcagttgctccaaaatttacccaagttgaaggaaggatccttcaagccccaaagctgaaagccggcaatggtgatgatatcttttcacgaaatggacggtggaatttcactaataggaagttttatgaaacctgctctgtgaataagtgggcggtcgttaatttctctgcacgttgtgatgttcggaatcttatccgtgacctgatgaggaatgcatctgcaaagggaattcaaatggaggaaccttttgatgtgtttgaagagagtccctctatgaggcgtgcacctgtgtcaagaagggtggatgatatgtttgggcagataaaatcaaaacttcctggagctcctaggttcctcttgtgccttctccctgagaggaaaaattgtgaaatctatggtccttggaagagaaagtgcctggccgagtttggtattgtcacacagtgtctagctccattaagagtcaatgatccgtacctgcttaatttgctgatgaagatcaatgcaaagcttggtggtctgaactcgttgctgcaagttgaagcatcttcgtcaataccacatgtgtcgcaagtacccaccatcatcttaggtatggatgtttcacatggtcatccaggacaagatagaccttcggttgcagcggtggttagttctcgtcaatggcctcttatctctagatatagagcatcagtgcacacccaatctgccagactagaaatgatgtcctcgttgtttaagccgcggggtactgatgatgatggcctcatccgggaatcactgatcgacttctacactagctctggaaagcgaaaaccagaacacataattattttcagggatggagtcagtgaaagtcagtttacccaggtcatcaacattgagctggatcagatcatcgaggcatgtaagtttctggatgagaagtggtcacccaagttcactgtgattgttgctcaaaagaaccaccacaccaagttctttcagacggcatcaccagacaatgttcttcctggaactgtggtggatagtaaagtttgccatcctaagaacttcgacttctacatgtgtgcacatgctgggatgattggaacaacaaggccgacccactatcatgttctgcacgacgagataggtttcagtgccgacgagatgcaggagtttgttcattcgctctcttacgtgtaccagaggagcacgacagccatctcagtggttgctccagtgtgctacgcccacctcgctgcagcccaggtgagcacgttcctgagattggaggagatgtcagacgcgtcctccagccagggaggagggcatacctcggctggcagtgctcctgtgccggagctgcctcgcctgcatgacaaagtcaggagctccatgttcttctgctagctgatgtgaaaataagaccctcaaaaaggaggcgaatgagctcattcacgtcttaattaaagcctacag

SEQ ID NO: 63946 - DNA, 3027 bp, Zea Mays
ggagaggaagcaggacctgggagacctcgcctcgtccgtcctcctgcctacttccttgcttttggtaggtgctgcttgttttatcttgaaatgggctctcatgatggcgaggatgaagagttgccacccccccctccggtgccaccagatgtgattcccattaaagctgaagatgctgtgggtgaatcaccagcaaaccatatattaaagccaaagagattactgatggacaggcctggtataggaagaaaagggcagccgacccagctctattcaaatcactttaaagtcgctgtgaagagtacagaagacgtcttctttcactactatgtaaacctgaagtatgaggatgatcgacccgttgatggtaaagggatcggcagaaaggtgattgataaactgcagcagacatatcgtgcagagctttctaacaaggactttgcatatgatggagaaaagagcctgtttacagttggtggtcttccacaaaaaaagaatgagttcaccgttgtcttggaggacgtatctactggaaagttagttttagtctttgatctgctttcttgttgtttatgcttacccagaatcagtaattgccatgttttttgtttgtggaagagagtgaggaggccataccagacgaaaactttcaaagtggagataaattttgcagcagaggttcctatgagtgctattggtcaagtcattagaggcgaagaatctgagaactccctggaggcgcttcgtgttcttgatatcatactgaggcagcattccgcagaacaaggctgccttttggttaagcaatcatttttctacaacaacccttcatgctttgttgacttgggtggtggtgtgatgggttgtcgtggatttcattcaagcttccgtggcacacagagtggactttccctcaatgttgatgtctcaacaacaatgatcgtgaaacctggccctgttattgattttcttctttctaaccagaatgttaatgatcctagcagaattgattggcaaaaggccaagcgtgctctcaagggcttgaggattagaaccactcctgcaaattcagaattcaagatttttggtctcagcgagaggatctgcaaagaacaaacgtttccgctgaggcagagaaatggtagcaacggagattgtgataccattgaaataactgtctatgactactatgcaaagaaaggaatcgatctaaagtattctggtgatttcccctgtataaatacagggaaggcaaagcgcccaacatattttccaatcgagctatgctcgcttgttccgcttcaaagatacaccaaagctttgtctacgctacaaaggtcatcccttgtggagaagtctagacagaagcctgaagaaaggatgaccgttctaaatgatgcactgcaacgcagtaactacgattctgaccccatgttgagggcatgtggtgtttcagttgctccaaaatttacccaagttgaaggaaggatccttcaagccccaaagctgaaagccggcaatggtgatgatatcttttcacgaaatggacggtggaatttcactaataggaagttttatgaaacctgctctgtgaataagtgggcggtcgttaatttctctgcacgttgtgatgttcggaatcttatccgtgacctgatgaggaatgcatctgcaaagggaattcaaatggaggaaccttttgatgtgtttgaagagagtccctctatgaggcgtgcacctgtgtcaagaagggtggatgatatgtttgggcagataaaatcaaaacttcctggagctcctaggtccttggaagagaaagtgcctggccgagtttggtattgtcacacagtgtctagctccattaagagtcaatgatccgtacctgcttaatttgctgatgaagatcaatgcaaaggtttgggacatgattttgtctttcttttgcactgtattgttccctggttcatgattatattatcctctttcctctgtttttaactagcttggtggtctgaactcgttgctgcaagttgaagcatcttcgtcaataccacatgtgtcgcaagtacccaccatcatcttaggtggttagttctcgtcaatggcctcttatctctagatatagagcatcagtgcacacccaatctgccagactagaaatgatgtcctcgttgtttaagccgcggggtactgatgatgatggcctcatccgggaatcactgatcgacttctacactagctctggaaagcgaaaaccagaacacataattattttcagggatggagtcagtgaaagtcagtttacccaggtcatcaacattgagctggatcagatcatcgaggcatgtaagtttctggatgagaagtggtcacccaagttcactgtgattgttgctcaaaagaaccaccacaccaagttctttcagacggcatcaccagacaatgttcttcctggaactgtggtggatagtaaagtttgccatcctaagaacttcgacttctacatgtgtgcacatgctgggatgattggaacaacaaggccgacccactatcatgttctgcacgacgagataggtttcagtgccgacgagatgcaggagtttgttcattcgctctcttacgtgtaccagaggagcacgacagccatctcagtgggtaggccgcttgaatctaaagccatcttgtgcagcacagggacagcaggttgatttttttctagtgtctgtttttgtgtttgcagttgctccagtgtgctacgcccacctcgctgcagcccaggtgagcacgttcctgagattggaggagatgtcagacgcgtcctccagccagggaggagggcatacctcggctggcagtgctcctgtgccggagctgcctcgcctgcatgacaaagtcaggagctccatgttcttctgctagctgatgtgcgtgcgcatcaggatcgagctccatgttttgtgttagtgaaaataagaccctcaaaaaggaggcgaatgagctcattcacgtcttaattaaagcctacag

SEQ ID NO: 63947 - DNA, 3051 bp, Zea Mays
ctcctgtatcaacggggtggtccgtctggaggaggtaccgaggtcccgccgttcgagagacgagctacgcatttaagccggggaggtcggagcagtgagtgggagtagttcagggactgggagaggagaggaagcaggacctgggagacctcgcctcgtccgtcctcctgcctacttccttgcttttggtgctgcttgttttatcttgaaatgggctctcatgatggcgaggatgaagagttgccacccccccctccggtgccaccagatgtgattcccattaaagctgaagatgctgtgggtgaatcaccagcaaaccatatattaaagccaaagagattactgatggacaggcctggtataggaagaaaagggcagccgacccagctctattcaaatcactttaaagtcgctgtgaagagtacagaagacgtcttctttcactactatgtaaacctgaagtatgaggatgatcgacccgttgatggtaaagggatcggcagaaaggtgattgataaactgcagcagacatatcgtgcagagctttctaacaaggactttgcatatgatggagaaaagagcctgtttacagttggtggtcttccacaaaaaaagaatgagttcaccgttgtcttggaggacgtatctactggaaagactgctgccaatgggagccctggaggtaatgacagtcctggaggtggtgataggaagagagtgaggaggccataccagacgaaaactttcaaagtggagataaattttgcagcagaggttcctatgagtgctattggtcaagtcattagaggcgaagaatctgagaactccctggaggcgcttcgtgttcttgatatcatactgaggcagcattccgcagaacaaggctgccttttggttaagcaatcatttttctacaacaacccttcatgctttgttgacttgggtggtggtgtgatgggttgtcgtggatttcattcaagcttccgtggcacacagagtggactttccctcaatgttgatgtctcaacaacaatgatcgtgaaacctggccctgttattgattttcttctttctaaccagaatgttaatgatcctagcagaattgattggcaaaaggccaagcgtgctctcaagggcttgaggattagaaccactcctgcaaattcagaattcaagatttttggtctcagcgagaggatctgcaaagaacaaacgtttccgctgaggcagagaaatggtagcaacggagattgtgataccattgaaataactgtctatgactactatgcaaagaaaggaatcgatctaaagtattctggtgatttcccctgtataaatacagggaaggcaaagcgcccaacatattttccaatcgagctatgctcgcttgttccgcttcaaagatacaccaaagctttgtctacgctacaaaggtcatcccttgtggagaagtctagacagaagcctgaagaaaggatgaccgttctaaatgatgcactgcaacgcagtaactacgattctgaccccatgttgagggcatgtggtgtttcagttgctccaaaatttacccaagttgaaggaaggatccttcaagccccaaagctgaaagccggcaatggtgatgatatcttttcacgaaatggacggtggaatttcactaataggaagttttatgaaacctgctctgtgaataagtgggcggtcgttaatttctctgcacgttgtgatgttcggaatcttatccgtgacctgatgaggaatgcatctgcaaagggaattcaaatggaggaaccttttgatgtgtttgaagagagtccctctatgaggcgtgcacctgtgtcaagaagggtggatgatatgtttgggcagataaaatcaaaacttcctggagctcctaggttcctcttgtgccttctccctgagaggaaaaattgtgaaatctatggtccttggaagagaaagtgcctggccgagtttggtattgtcacacagtgtctagctccattaagagtcaatgatccgtacctgcttaatttgctgatgaagatcaatgcaaagcttggtggtctgaactcgttgctgcaagttgaagcatcttcgtcaataccacatgtgtcgcaagtacccaccatcatcttaggtatggatgtttcacatggtcatccaggacaagatagaccttcggttgcagcggtggttagttctcgtcaatggcctcttatctctagatatagagcatcagtgcacacccaatctgccagactagaaatgatgtcctcgttgtttaagccgcggggtactgatgatgatggcctcatccgggaatcactgatcgacttctacactagctctggaaagcgaaaaccagaacacataattattttcagggatggagtcagtgaaagtcagtttacccaggtcatcaacattgagctggatcagatcatcgaggcatgtaagtttctggatgagaagtggtcacccaagttcactgtgattgttgctcaaaagaaccaccacaccaagttctttcagacggcatcaccagacaatgttcttcctggaactgtggtggatagtaaagtttgccatcctaagaacttcgacttctacatgtgtgcacatgctgggatgattggaacaacaaggccgacccactatcatgttctgcacgacgagataggtttcagtgccgacgagatgcaggagtttgttcattcgctctcttacgtgtaccagaggagcacgacagccatctcagtggttgctccagtgtgctacgcccacctcgctgcagcccaggtgagcacgttcctgagattggaggagatgtcagacgcgtcctccagccagggaggagggcatacctcggctggcagtgctcctgtgccggagctgcctcgcctgcatgacaaagtcaggagctccatgttcttctgctagctgatgtgcgtgcgcatcaggatcgagctccatgttttgtgttagtgaaaataagaccctcaaaaaggaggcgaatgagctcattcacgtcttaattaaagcctacag

SEQ ID NO: 63948 - DNA, 3037 bp, Zea Mays
cgactatgtgtgcaccagtgtctcctgtatcaacggggtggtccgtctggaggaggtaccgaggtcccgccgttcgagagacgagctacgcatttaagccggggaggtcggagcagtgagtgggagtagttcagggactgggagaggagaggaagcaggacctgggagacctcgcctcgtccgtcctcctgcctacttccttgcttttggtaggtgctgcttgttttatcttgaaatgggctctcatgatggcgaggatgaagagttgccacccccccctccggtgccaccagatgtgattcccattaaagctgaagatgctgtgggtgaatcaccagcaaaccatatattaaagccaaagagattactgatggacaggcctggtataggaagaaaagggcagccgacccagctctattcaaatcactttaaagtcgctgtgaagagtacagaagacgtcttctttcactactatgtaaacctgaagtatgaggatgatcgacccgttgatggtaaagggatcggcagaaaggtgattgataaactgcagcagacatatcgtgcagagctttctaacaaggactttgcatatgatggagaaaagagcctgtttacagttggtggtcttccacaaaaaaagaatgagttcaccgttgtcttggaggacgtatctactggaaagactgctgccaatgggagccctggaggtaatgacagtcctggaggtggtgataggaagagagtgaggaggccataccagacgaaaactttcaaagtggagataaattttgcagcagaggttcctatgagtgctattggtcaagtcattagaggcgaagaatctgagaactccctggaggcgcttcgtgttcttgatatcatactgaggcagcattccgcagaacaaggctgccttttggttaagcaatcatttttctacaacaacccttcatgctttgttgacttgggtggtggtgtgatgggttgtcgtggatttcattcaagcttccgtggcacacagagtggactttccctcaatgttgatgtctcaacaacaatgatcgtgaaacctggccctgttattgattttcttctttctaaccagaatgttaatgatcctagcagaattgattggcaaaaggccaagcgtgctctcaagggcttgaggattagaaccactcctgcaaattcagaattcaagatttttggtctcagcgagaggatctgcaaagaacaaacgtttccgctgaggcagagaaatggtagcaacggagattgtgataccattgaaataactgtctatgactactatgcaaagaaaggaatcgatctaaagtattctggtgatttcccctgtataaatacagggaaggcaaagcgcccaacatattttccaatcgagctatgctcgcttgttccgcttcaaagatacaccaaagctttgtctacgctacaaaggtcatcccttgtggagaagtctagacagaagcctgaagaaaggatgaccgttctaaatgatgcactgcaacgcagtaactacgattctgaccccatgttgagggcatgtggtgtttcagttgctccaaaatttacccaagttgaaggaaggatccttcaagccccaaagctgaaagccggcaatggtgatgatatcttttcacgaaatggacggtggaatttcactaataggaagttttatgaaacctgctctgtgaataagtgggcggtcgttaatttctctgcacgttgtgatgttcggaatcttatccgtgacctgatgaggaatgcatctgcaaagggaattcaaatggaggaaccttttgatgtgtttgaagagagtccctctatgaggcgtgcacctgtgtcaagaagggtggatgatatgtttgggcagataaaatcaaaacttcctggagctcctaggttcctcttgtgccttctccctgagaggaaaaattgtgaaatctatggtccttggaagagaaagtgcctggccgagtttggtattgtcacacagtgtctagctccattaagagtcaatgatccgtacctgcttaatttgctgatgaagatcaatgcaaagcttggtggtctgaactcgttgctgcaagttgaagcatcttcgtcaataccacatgtgtcgcaagtacccaccatcatcttaggtatggatgtttcacatggtcatccaggacaagatagaccttcggttgcagcggtggttagttctcgtcaatggcctcttatctctagatatagagcatcagtgcacacccaatctgccagactagaaatgatgtcctcgttgtttaagccgcggggtactgatgatgatggcctcatccgggaatcactgatcgacttctacactagctctggaaagcgaaaaccagaacacataattattttcagggatggagtcagtgaaagtcagtttacccaggtcatcaacattgagctggatcagatcatcgaggcatgtaagtttctggatgagaagtggtcacccaagttcactgtgattgttgctcaaaagaaccaccacaccaagttctttcagacggcatcaccagacaatgttcttcctggaactgtggtggatagtaaagtttgccatcctaagaacttcgacttctacatgtgtgcacatgctgggatgattggaacaacaaggccgacccactatcatgttctgcacgacgagataggtttcagtgccgacgagatgcaggagtttgttcattcgctctcttacgtgtaccagaggagcacgacagccatctcagtggttgctccagtgtgctacgcccacctcgctgcagcccaggtgagcacgttcctgagattggaggagatgtcagacgcgtcctccagccagggaggagggcatacctcggctggcagtgctcctgtgccggagctgcctcgcctgcatgacaaagtcaggagctccatgttcttctgctagctgatgtgaaaataagaccctcaaaaaggaggcgaatgagctcattcacgtcttaattaaagcctacag

SEQ ID NO: 63949 - DNA, 2891 bp, Zea Mays
cgactatgtgtgcaccagtgtctcctgtatcaacggggtggtccgtctggaggaggtaccgaggtcccgccgttcgagagacgagctacgcatttaagccggggaggtcggagcagtgagtgggagtagttcagggactgggagaggagaggaagcaggacctgggagacctcgcctcgtccgtcctcctgcctacttccttgcttttggtaggtgctgcttgttttatcttgaaatgggctctcatgatggcgaggatgaagagttgccacccccccctccggtgccaccagatgtgattcccattaaagctgaagatgctgtgggtgaatcaccagcaaaccatatattaaagccaaagagattactgatggacaggcctggtataggaagaaaagggcagccgacccagctctattcaaatcactttaaagtcgctgtgaagagtacagaagacgtcttctttcactactatgtaaacctgaagtatgaggatgatcgacccgttgatggtaaagggatcggcagaaaggtgattgataaactgcagcagacatatcgtgcagagctttctaacaaggactttgcatatgatggagaaaagagcctgtttacagttggtggtcttccacaaaaaaagaatgagttcaccgttgtcttggaggacgtatctactggaaagactgctgccaatgggagccctggaggtaatgacagtcctggaggtggtgataggaagagagtgaggaggccataccagacgaaaactttcaaagtggagataaattttgcagcagaggttcctatgagtgctattggtcaagtcattagaggcgaagaatctgagaactccctggaggcgcttcgtgttcttgatatcatactgaggcagcattccgcagaacaaggctgccttttggttaagcaatcatttttctacaacaacccttcatgctttgttgacttgggtggtggtgtgatgggttgtcgtggatttcattcaagcttccgtggcacacagagtggactttccctcaatgttgatgtctcaacaacaatgatcgtgaaacctggccctgttattgattttcttctttctaaccagaatgttaatgatcctagcagaattgattggcaaaaggccaagcgtgctctcaagggcttgaggattagaaccactcctgcaaattcagaattcaagatttttggtctcagcgagaggatctgcaaagaacaaacgtttccgctgaggcagagaaatggtagcaacggagattgtgataccattgaaataactgtctatgactactatgcaaagaaaggaatcgatctaaagtattctggtgatttcccctgtataaatacagggaaggcaaagcgcccaacatattttccaatcgagctatgctcgcttgttccgcttcaaagatacaccaaagctttgtctacgctacaaaggtcatcccttgtggagaagtctagacagaagcctgaagaaaggatgaccgttctaaatgatgcactgcaacgcagtaactacgattctgaccccatgttgagggcatgtggtgtttcagttgctccaaaatttacccaagttgaaggaaggatccttcaagccccaaagctgaaagccggcaatggtgatgatatcttttcacgaaatggacggtggaatttcactaataggaagttttatgaaacctgctctgtgaataagtgggcggtcgttaatttctctgcacgttgtgatgttcggaatcttatccgtgacctgatgaggaatgcatctgcaaagggaattcaaatggaggaaccttttgatgtgtttgaagagagtccctctatgaggcgtgcacctgtgtcaagaagggtggatgatatgtttgggcagataaaatcaaaacttcctggagctcctaggttcctcttgtgccttctccctgagaggaaaaattgtgaaatctatggtccttggaagagaaagtgcctggccgagtttggtattgtcacacagtgtctagctccattaagagtcaatgatccgtacctgcttaatttgctgatgaagatcaatgcaaagcttggtggtctgaactcgttgctgcaagttgaagcatcttcgtcaataccacatgtgtcgcaagtacccaccatcatcttaggtatggatgtttcacatggtcatccaggacaagatagaccttcggttgcagcggtggttagttctcgtcaatggcctcttatctctagatatagagcatcagtgcacacccaatctgccagactagaaatgatgtcctcgttgtttaagccgcggggtactgatgatgatggcctcatccgggaatcactgatcgacttctacactagctctggaaagcgaaaaccagaacacataattattttcagggatggagtcagtgaaagtcagtttacccaggtcatcaacattgagctggatcagatcatcgaggcatgtaagtttctggatgagaagtggtcacccaagttcactgtgattgttgctcaaaagaaccaccacaccaagttctttcagacggcatcaccagacaatgttcttcctggaactgtggtggatagtaaagtttgccatcctaagaacttcgacttctacatgtgtgcacatgctgggatgattggaacaacaaggccgacccactatcatgttctgcacgacgagataggtttcagtgccgacgagatgcaggagtttgttcattcgctctcttacgtgtaccagaggagcacgacagccatctcagtggttgctccagtgtgctacgcccacctcgctgcagcccaggtgaaaataagaccctcaaaaaggaggcgaatgagctcattcacgtcttaattaaagcctacag

SEQ ID NO: 63950 - DNA, 3916 bp, Zea Mays
gttagtgccaatgaggtaggtgctgcttgttttatcttgaaatgggctctcatgatggcgaggatgaagagttgccacccccccctccggtgccaccagatgtgattcccattaaagctgaagatgctgtgggtgaatcaccagcaaaccatatattaaagccaaagagattactgatggacaggcctggtataggaagaaaagggcagccgacccagctctattcaaatcactttaaagtcgctgtgaagagtacagaagacgtcttctttcactactatgtaaacctgaagtatgaggatgatcgacccgttgatggtaaagggatcggcagaaaggtgattgataaactgcagcagacatatcgtgcagagctttctaacaaggactttgcatatgatggagaaaagagcctgtttacagttggtggtcttccacaaaaaaagaatgagttcaccgttgtcttggaggacgtatctactggaaagactgctgccaatgggagccctggaggtaatgacagtcctggaggtggtgataggaagagagtgaggaggccataccagacgaaaactttcaaagtggagataaattttgcagcagaggttcctatgagtgctattggtcaagtcattagaggcgaagaatctgagaactccctggaggcgcttcgtgttcttgatatcatactgaggcagcattccgcagaacaaggctgccttttggttaagcaatcatttttctacaacaacccttcatgctttgttgacttgggtggtggtgtgatgggttgtcgtggatttcattcaagcttccgtggcacacagagtggactttccctcaatgttgatgtctcaacaacaatgatcgtgaaacctggccctgttattgattttcttctttctaaccagaatgttaatgatcctagcagaattgattggcaaaaggccaagcgtgctctcaagggcttgaggattagaaccactcctgcaaattcagaattcaagatttttggtctcagcgagaggatctgcaaagaacaaacgtttccgctgaggcagagaaatggtagcaacggagattgtgataccattgaaataactgtctatgactactatgcaaagaaaggaatcgatctaaagtattctggtgatttcccctgtataaatacagggaaggcaaagcgcccaacatattttccaatcgagctatgctcgcttgttccgcttcaaagatacaccaaagctttgtctacgctacaaaggtcatcccttgtggagaagtctagacagaagcctgaagaaaggatgaccgttctaaatgatgcactgcaacgcagtaactacgattctgaccccatgttgagggcatgtggtgtttcagttgctccaaaatttacccaagttgaaggaaggatccttcaagccccaaagctgaaagccggcaatggtgatgatatcttttcacgaaatggacggtggaatttcactaataggaagttttatgaaacctgctctgtgaataagtgggcggtcgttaatttctctgcacgttgtgatgttcggaatcttatccgtgacctgatgaggaatgcatctgcaaagggaattcaaatggaggaaccttttgatgtgtttgaagagagtccctctatgaggcgtgcacctgtgtcaagaagggtggatgatatgtttgggcagataaaatcaaaacttcctggagctcctaggttcctcttgtgccttctccctgagaggaaaaattgtgaaatctatggtccttggaagagaaagtgcctggccgagtttggtattgtcacacagtgtctagctccattaagagtcaatgatccgtacctgcttaatttgctgatgaagatcaatgcaaagcttggtggtctgaactcgttgctgcaagttgaagcatcttcgtcaataccacatgtgtcgcaagtacccaccatcatcttaggtatggatgtttcacatggtcatccaggacaagatagaccttcggttgcagcggtggttagttctcgtcaatggcctcttatctctagatatagagcatcagtgcacacccaatctgccagactagaaatgatgtcctcgttgtttaagccgcggggtactgatgatgatggcctcatccgggaatcactgatcgacttctacactagctctggaaagcgaaaaccagaacacataattattttcagggatggagtcagtgaaagtcagtttacccaggtcatcaacattgagctggatcagatcatcgaggcatgtaagtttctggatgagaagtggtcacccaagttcactgtgattgttgctcaaaagaaccaccacaccaagttctttcagacggcatcaccagacaatgttcttcctggaactgtggtggatagtaaagtttgccatcctaagaacttcgacttctacatgtgtgcacatgctgggatgattggaacaacaaggccgacccactatcatgttctgcacgacgagataggtttcagtgccgacgagatgcaggagtttgttcattcgctctcttacgtgtaccagaggagcacgacagccatctcagtggttgctccagtgtgctacgcccacctcgctgcagcccaggtgagcacgttcctgagattggaggagatgtcagacgcgtcctccagccagggaggagggcatacctcggctggcagtgctcctgtgccggagctgcctcgcctgcatgacaaagtcaggagctccatgttcttctgctagctgatgtgcgtgcgcatcaggatcgagctccatgttttgtgttagtaaggcctagttagtaaggctgtagaaagaatgtttaatgtttgcatgctaaagtccaaacaatcaaaaccactactatatctaccagagcactgatcgatcaaacaacaagagtcagcatcaatcaatcaaaaccaccactattctatctaccgatcaatctactctatacctgaagcactcactcgctcgcaaacaaccaagggatcatggatccttgagtagctccattgtccagtccctgaccttgacgaagcatttcatggacagcctctcgtacgccatctcgtacatccggaggttcatgtaggcgaagctcaagtaggtggcgatgcactcttggtgcctgtggtacagcgccgggatggtcagagcggccaccacacttgcgtagcaggcggtcgggaaatctgtaacgctgccgacgatggacacgctccacaggcagaggaaggctctgtagaagagcagcgagtccctgcccagagcgatgtcccggaaagcgtccgaggcggcgtccagagcagagcgcagcagcgccgccgcctcgtccacggcctgctgcggaacgcgcagctccgggacgggaggctgcggcctgttcaggaggcgcgccgctttggcccacaggaagagcacggtgaggagcaggagcagcacgttggaggcgagggacaccaaggtgtagccgccgtacaagagcagccaggaggagacggtgcccgccagcaggcaggcgctcacgtcggcgcggccccggcgccacagcagcacgtcccagactgctgcagcaatccgatccgattccgatccagatatattagttagtagatccaatctcgggcggccaatccgtaataataattggctgagagaaaaggtgggagagagtaccgaatcctccgacggcacatgtcccggcgccgccgccgccgccgccaacaccaacaccagcatccaccaccatcgtcgtagttaatactaagggaagggaactagagaaggaagggaggggccgatgcaacggaagaaatggatggaattcgaccaacagctagctagagcgaagcagaacccaatcccaatcaaaacccgag

SEQ ID NO: 63951 - DNA, 4042 bp, Zea Mays
ctcctgtatcaacggggtggtccgtctggaggaggtaccgaggtcccgccgttcgagagacgagctacgcatttaagccggggaggtcggagcagtgagtgggagtagttcagggactgggagaggagaggaagcaggacctgggagacctcgcctcgtccgtcctcctgcctacttccttgcttttggtaggtgctgcttgttttatcttgaaatgggctctcatgatggcgaggatgaagagttgccacccccccctccggtgccaccagatgtgattcccattaaagctgaagatgctgtgggtgaatcaccagcaaaccatatattaaagccaaagagattactgatggacaggcctggtataggaagaaaagggcagccgacccagctctattcaaatcactttaaagtcgctgtgaagagtacagaagacgtcttctttcactactatgtaaacctgaagtatgaggatgatcgacccgttgatggtaaagggatcggcagaaaggtgattgataaactgcagcagacatatcgtgcagagctttctaacaaggactttgcatatgatggagaaaagagcctgtttacagttggtggtcttccacaaaaaaagaatgagttcaccgttgtcttggaggacgtatctactggaaagactgctgccaatgggagccctggaggtaatgacagtcctggaggtggtgataggaagagagtgaggaggccataccagacgaaaactttcaaagtggagataaattttgcagcagaggttcctatgagtgctattggtcaagtcattagaggcgaagaatctgagaactccctggaggcgcttcgtgttcttgatatcatactgaggcagcattccgcagaacaaggctgccttttggttaagcaatcatttttctacaacaacccttcatgctttgttgacttgggtggtggtgtgatgggttgtcgtggatttcattcaagcttccgtggcacacagagtggactttccctcaatgttgatgtctcaacaacaatgatcgtgaaacctggccctgttattgattttcttctttctaaccagaatgttaatgatcctagcagaattgattggcaaaaggccaagcgtgctctcaagggcttgaggattagaaccactcctgcaaattcagaattcaagatttttggtctcagcgagaggatctgcaaagaacaaacgtttccgctgaggcagagaaatggtagcaacggagattgtgataccattgaaataactgtctatgactactatgcaaagaaaggaatcgatctaaagtattctggtgatttcccctgtataaatacagggaaggcaaagcgcccaacatattttccaatcgagctatgctcgcttgttccgcttcaaagatacaccaaagctttgtctacgctacaaaggtcatcccttgtggagaagtctagacagaagcctgaagaaaggatgaccgttctaaatgatgcactgcaacgcagtaactacgattctgaccccatgttgagggcatgtggtgtttcagttgctccaaaatttacccaagttgaaggaaggatccttcaagccccaaagctgaaagccggcaatggtgatgatatcttttcacgaaatggacggtggaatttcactaataggaagttttatgaaacctgctctgtgaataagtgggcggtcgttaatttctctgcacgttgtgatgttcggaatcttatccgtgacctgatgaggaatgcatctgcaaagggaattcaaatggaggaaccttttgatgtgtttgaagagagtccctctatgaggcgtgcacctgtgtcaagaagggtggatgatatgtttgggcagataaaatcaaaacttcctggagctcctaggtccttggaagagaaagtgcctggccgagtttggtattgtcacacagtgtctagctccattaagagtcaatgatccgtacctgcttaatttgctgatgaagatcaatgcaaagcttggtggtctgaactcgttgctgcaagttgaagcatcttcgtcaataccacatgtgtcgcaagtacccaccatcatcttaggtatggatgtttcacatggtcatccaggacaagatagaccttcggttgcagcggtggttagttctcgtcaatggcctcttatctctagatatagagcatcagtgcacacccaatctgccagactagaaatgatgtcctcgttgtttaagccgcggggtactgatgatgatggcctcatccgggaatcactgatcgacttctacactagctctggaaagcgaaaaccagaacacataattattttcagggatggagtcagtgaaagtcagtttacccaggtcatcaacattgagctggatcagatcatcgaggcatgtaagtttctggatgagaagtggtcacccaagttcactgtgattgttgctcaaaagaaccaccacaccaagttctttcagacggcatcaccagacaatgttcttcctggaactgtggtggatagtaaagtttgccatcctaagaacttcgacttctacatgtgtgcacatgctgggatgattggaacaacaaggccgacccactatcatgttctgcacgacgagataggtttcagtgccgacgagatgcaggagtttgttcattcgctctcttacgtgtaccagaggagcacgacagccatctcagtggttgctccagtgtgctacgcccacctcgctgcagcccaggtgagcacgttcctgagattggaggagatgtcagacgcgtcctccagccagggaggagggcatacctcggctggcagtgctcctgtgccggagctgcctcgcctgcatgacaaagtcaggagctccatgttcttctgctagctgatgtgcgtgcgcatcaggatcgagctccatgttttgtgttagtaaggcctagttagtaaggctgtagaaagaatgtttaatgtttgcatgctaaagtccaaacaatcaaaaccactactatatctaccagagcactgatcgatcaaacaacaagagtcagcatcaatcaatcaaaaccaccactattctatctaccgatcaatctactctatacctgaagcactcactcgctcgcaaacaaccaagggatcatggatccttgagtagctccattgtccagtccctgaccttgacgaagcatttcatggacagcctctcgtacgccatctcgtacatccggaggttcatgtaggcgaagctcaagtaggtggcgatgcactcttggtgcctgtggtacagcgccgggatggtcagagcggccaccacacttgcgtagcaggcggtcgggaaatctgtaacgctgccgacgatggacacgctccacaggcagaggaaggctctgtagaagagcagcgagtccctgcccagagcgatgtcccggaaagcgtccgaggcggcgtccagagcagagcgcagcagcgccgccgcctcgtccacggcctgctgcggaacgcgcagctccgggacgggaggctgcggcctgttcaggaggcgcgccgctttggcccacaggaagagcacggtgaggagcaggagcagcacgttggaggcgagggacaccaaggtgtagccgccgtacaagagcagccaggaggagacggtgcccgccagcaggcaggcgctcacgtcggcgcggccccggcgccacagcagcacgtcccagactgctgcagcaatccgatccgattccgatccagatatattagttagtagatccaatctcgggcggccaatccgtaataataattggctgagagaaaaggtgggagagagtaccgaatcctccgacggcacatgtcccggcgccgccgccgccgccgccaacaccaacaccagcatccaccaccatcgtcgtagttaatactaagggaagggaactagagaaggaagggaggggccgatgcaacggaagaaatggatggaattcgaccaacagctagctagagcgaagcagaacccaatcccaatcaaaacccgag

SEQ ID NO: 63952 - DNA, 3766 bp, Zea Mays
tttatttgtagtttgctcaattcacatttcacagtaaatattaattgatccacacgacatatgttcaccaaaataacatacaacatatatatgcaaccataaactccagttctcatgcaacaaataaccagcgaacttcgcaatactcaaatacaagttcttttacaactctccaacgaggcaacgacacataggtcgacttatttcacaatactcacatgttcatctcgagtcataatgatagtactcagtcatgttgtgctattgttccaattcatgatattgttccaatccgtcatagtgatagtgataggtctatacaaaatatatgagatacattagcgagaaaacaagaacggtaaataaatacttatccacaaagaaaaaacataccattatgtgtgtttggtgtttgtgtattgcatgtgcacctcaccaagtgttggacttttcttctgatcagcaaatcttaggaacacatatagaagaactggagttaagagttctagattgagccttgtctaaacaaatagttattagaagaattgaaactacttgatctacggattccatcttggacagaaaatgaaccaaaattgaccactaaatgtctaaactggacttgagctacgggtttatcttcatatatagcatataacagtaaacaagactaatatgcctaaattgaccactaaatacttaatcttggcgttaaatccggttttctggtaaaaattagcggtttatcggtaaaaaaagagttttacacgcggttttcggtttttatgtttttttttaatttttttaatttagaacgaattttgaaaaaaacagtggttaaccgaaatcgcacctcagtggtttcgataaaccgaccggtttactgcaccggttttgtaaaccatggttccaccatgcttttgtcccattctccctccacttcctttttgtttgtcctttttcgtttgttgccttgttggtttcgtttcgttcgtcttcccccccgtgctgcgtgcgctgctcgccttcccgtgctattgcgtctgcctataaagcggccggacggccataaacctcagccggccggcctcctcgctctcggaccggagctcggcctctgctctcctccctccgatctgctctactcgatctgttggtgttggccgtgcgccggtgcccgtaccatcgtcagtggcagtgcaccttcctccgactccagctcaaactctcttcaacggtagacgctagcgcccccctcccctgtctgtgacggctacaggcctcctcctcccgctacaacggtgccccctagcgctgctacagtgctagcggctgctgggtgcagacgctacatcaaggggtaccacaagggctcctcttgcctcgatttatgtgtacaaaaatatttattagttgtgaaaaaattgataatagatgatgaatatgtatggaaaatagtattttatgattatagtggggtatagggaaaggatttagggagaaccgctgtacaggatggagatatagggggaagagaacgctgacgtgacacgtgtgtgggatatagggggaaaaatttaggggtaaccaaccgctgaagacagtctcatcagtggccctgcgccgccagccccactcctcgccactcgcagtcgcagtagagtgggcgctggactgtagccagccgagcccgctgccgcaaaaaacacagacaccaaccaaccgcctctctctctctctctctctgtctctcccgctgctgagatctcatctgactgcccagagggagattgagactgcggaattgaagcagctacccaacatgtacgccgacgccctcgcctcctcgcagcccccgccgccacccttcctctccatgggcgtcatggaccacgaagcctacgccgccgtggtgagcaactactactccacctctgccctgctgcctctttcttgattgttgcagtttcatatgcctccgaaccacccaaaactgcttgctgctgtttcttggttgctcgagctagctagggttccatttctctgtttggtggaacgaatgaattcccaaatacgtaagagcaaatttctcctcttctgtggatggatggaccaacaacaatcgaaaaggaaggagtgtcgctttcctttcgttttcggccgacactccaccctcatcatatatataataattatataagaaacatcccttcgttagttggattctctcttcaatcaatggctttatttgcaatagcaagtatccgtcagccgatacttgcttgtcttattaattaccggatggctttatttgcaatagcaagtatccgtcagctgatacttgcttgtcgtattaattaccggacattggtacagccatccatggtatcagaatatgacctcggaggagaaggggacctgttcaaagctccacaagtcatcatccaagaagaagcgctgctcagccttgatcctgtcgcagctgcctgctcaatgatgaatcaaactattaaggatgcaggcatccagaacgacgctctcctgagtgaagtgttgtatgagtgcgagaaggaactcatggaaaagtctgcaatcgaagagacaatttctgaacttatggatgttaagatccctatgctgcaagctgaacaactcccggccatggagaatgagaagcgttccattcctgaatgctcgctccagaaaagtgttagttctggatgcctcaactcggcagattggatgaatggagctgtcaggccaaactttctagacttccaagggctggactttgaggcagcgtttgggctgaggagagcttacagtgaaggagacattcagaaccttggagccaacacgcctcgaccagcagcaaatgtttgtgtgaccatcagtgacctcaagaccgaagaaaggaagcaaaagctttccaggtatagaaaaaagaagatcaagcggaactttggcaggaagattaagtatgcttgtaggaaggctctggcagacagccagccaagggtgagagggagatttgccaagatcgaagaatgcgacctgctgctgctgaattcaagcacttagatggaggttcagtcgatcattcagctgttcaaaatccacctcctctacccagccgttttggtgcgagccgagggagttaagagctgaaagtggtggtagtctagttggttagctagcccctgtacaaaggcttgaatgaagatggcaataaaactcagctctcccctctgcttgcttggcactgcactccttgtgccttactgaaaacaagagcaaaaacagactcatgaagattaacaaatttcacggtgtattccttcctttccttgtgccttactgcaccacaatcaatccaactcaaaagtaataggtgacggtagctactttattacatcctgccttggtctgtcggcaattatgtgaaaactgaaaagaaaaaagcaaacctcaagagatttagtcgctggttaattcaccccatagacccacttctccgcattgctggtataagagaccagctccttgggttcaaaccacaaggcgatctcatcctttgctgtctccgggccatcacttccatgaatgatgtttctggtgtgttcataacaagcttgtgagtttgttgtaataagcttgcatgatgcgaaacgcaaacctcaagagaaaaggtaaggtacctaaccttcccacaacaacaccaagatcgcccctgatggttcctggttcagatttctgtgggtctgtg

SEQ ID NO: 63953 - DNA, 3256 bp, Zea Mays
tttatttgtagtttgctcaattcacatttcacagtaaatattaattgatccacacgacatatgttcaccaaaataacatacaacatatatatgcaaccataaactccagttctcatgcaacaaataaccagcgaacttcgcaatactcaaatacaagttcttttacaactctccaacgaggcaacgacacataggtcgacttatttcacaatactcacatgttcatctcgagtcataatgatagtactcagtcatgttgtgctattgttccaattcatgatattgttccaatccgtcatagtgatagtgataggtctatacaaaatatatgagatacattagcgagaaaacaagaacggtaaataaatacttatccacaaagaaaaaacataccattatgtgtgtttggtgtttgtgtattgcatgtgcacctcaccaagtgttggacttttcttctgatcagcaaatcttaggaacacatatagaagaactggagttaagagttctagattgagccttgtctaaacaaatagttattagaagaattgaaactacttgatctacggattccatcttggacagaaaatgaaccaaaattgaccactaaatgtctaaactggacttgagctacgggtttatcttcatatatagcatataacagtaaacaagactaatatgcctaaattgaccactaaatacttaatcttggcgttaaatccggttttctggtaaaaattagcggtttatcggtaaaaaaagagttttacacgcggttttcggtttttatgtttttttttaatttttttaatttagaacgaattttgaaaaaaacagtggttaaccgaaatcgcacctcagtggtttcgataaaccgaccggtttactgcaccggttttgtaaaccatggttccaccatgcttttgtcccattctccctccacttcctttttgtttgtcctttttcgtttgttgccttgttggtttcgtttcgttcgtcttcccccccgtgctgcgtgcgctgctcgccttcccgtgctattgcgtctgcctataaagcggccggacggccataaacctcagccggccggcctcctcgctctcggaccggagctcggcctctgctctcctccctccgatctgctctactcgatctgttggtgttggccgtgcgccggtgcccgtaccatcgtcagtggcagtgcaccttcctccgactccagctcaaactctcttcaacggtagacgctagcgcccccctcccctgtctgtgacggctacaggcctcctcctcccgctacaacggtgccccctagcgctgctacagtgctagcggctgctgggtgcagacgctacatcaaggggtaccacaagggctcctcttgcctcgatttatgtgtacaaaaatatttattagttgtgaaaaaattgataatagatgatgaatatgtatggaaaatagtattttatgattatagtggggtatagggaaaggatttagggagaaccgctgtacaggatggagatatagggggaagagaacgctgacgtgacacgtgtgtgggatatagggggaaaaatttaggggtaaccaaccgctgaagacagtctcatcagtggccctgcgccgccagccccactcctcgccactcgcagtcgcagtagagtgggcgctggactgtagccagccgagcccgctgccgcaaaaaacacagacaccaaccaaccgcctctctctctctctctctctgtctctcccgctgctgagatctcatctgactgcccagagggagattgagactgcggaattgaagcagctacccaacatgtacgccgacgccctcgcctcctcgcagcccccgccgccacccttcctctccatgggcgtcatggaccacgaagcctacgccgccgtgccatccatggtatcagaatatgacctcggaggagaaggggacctgttcaaagctccacaagtcatcatccaagaagaagcgctgctcagccttgatcctgtcgcagctgcctgctcaatgatgaatcaaactattaaggatgcaggcatccagaacgacgctctcctgagtgaagtgttgtatgagtgcgagaaggaactcatggaaaagtctgcaatcgaagagacaatttctgaacttatggatgttaagatccctatgctgcaagctgaacaactcccggccatggagaatgagaagcgttccattcctgaatgctcgctccagaaaagtgttagttctggatgcctcaactcggcagattggatgaatggagctgtcaggccaaactttctagacttccaagggctggactttgaggcagcgtttgggctgaggagagcttacagtgaaggagacattcagaaccttggagccaacacgcctcgaccagcagcaaatgtttgtgtgaccatcagtgacctcaagaccgaagaaaggaagcaaaagctttccagtatgcttgtaggaaggctctggcagacagccagccaagggtgagagggagatttgccaagatcgaagaatgcgacctgctgctgctgaattcaagcacttagatggaggttcagtcgatcattcagctgttcaaaatccacctcctctacccagccgttttggtgcgagccgagggagttaagagctgaaagtggtggtagtctagttggttagctagcccctgtacaaaggcttgaatgaagatggcaataaaactcagctctcccctctgcttgcttggcactgcactccttgtgccttactgaaaacaagagcaaaaacagactcatgaagattaacaaatttcacggtgtattccttcctttccttgtgccttactgcaccacaatcaatccaactcaaaagtaataggtgacggtagctactttattacatcctgccttggtctgtcggcaattatgtgaaaactgaaaagaaaaaagcaaacctcaagagatttagtcgctggttaattcaccccatagacccacttctccgcattgctggtataagagaccagctccttgggttcaaaccacaaggcgatctcatcctttgctgtctccgggccatcacttccatgaatgatgtttctggtgtgttcataacaagcttgtgagtttgttgtaataagcttgcatgatgcgaaacgcaaacctcaagagaaaaggtaaggtacctaaccttcccacaacaacaccaagatcgcccctgatggttcctggttcagatttctgtgggtctgtg

SEQ ID NO: 63954 - DNA, 85 bp, Zea Mays
gataagttaggcttgtgtataagctttggagggttcctaccttcttgctattgtaataagttatgcactttgtgtatatcaggat

SEQ ID NO: 63955 - DNA, 429 bp, Zea Mays
ggcgttgtctgatttacttgctgaagagactcgtcttcattctctgtcctctactggtggtaatcctcacagtgtgttggctgctgcccagaaacctaagaatatttttaagccttgtgatcattgtggcaagaccaatcatcgatctgagctttgctttgtcaagttccctgataagttgactgatttccgtgcacgacgtgctgctcgcggtcgtggtcaaggaccatctaatagaggctcagttgctgttgctgccacttcgtccgcctgtacttcagagtcggcctgggtacttgattcaggagcttcctttcatgtcacatctgatcagtcaaagttggcttctactacacctgtcacagatggtgcttcagtgcagacagctgatggtactgtatgccacattactcataagggttctctttc

SEQ ID NO: 63956 - DNA, 348 bp, Zea Mays
ccgcagtcgagatggccctacgcctctagctcgtgccgttgggtagcagagatatccgaccgccgtcgtgggcgattcttgcccaagccgccgatccggcctcaagaggagagcagagagggagtgcttcgatgccgctgacaccgctatcgccatgcgctggattcataggagttttggatttgggcggctgtgtgcgtggtcgccagtgttcgcctctgcggatagcatcttcacggggtgggcttggtgaccagcactgggcgaacttctcgccagtggtgcaccgtcgccgtgaaaccgcaccccaccgtgggcggggaaccctgtgcctacatcccaggtgag

SEQ ID NO: 63957 - DNA, 89 bp, Zea Mays
ctgactaaagaaaagactctcaagggtatgctagctgattgggaatcaaggtaaagtttagagaaaattcctggtatgccatcagattt

SEQ ID NO: 63958 - DNA, 303 bp, Zea Mays
gaatgagtatattttccagtggcatacagggaattggccctaaagtttatcaatgatcaaagactcctttttgcagaaaagcttgctaccagttgatccttaagccaaattttatttcactagttaggttattacctgaatctatatttgcatggtctagttcaagcacttggcctatactagttgcattttattcattctcatatttcacttgctaactacgatgatggtcaccgggatgagtctccataaccgaggagcaacgacgattcgaaccgattatacccagctggggatctctaa

SEQ ID NO: 63959 - DNA, 426 bp, Zea Mays
actcagtaatggaaaagaaaatgtgtcaccggtttattttccatttactcctacaaggcagggggtgtgcccccatcgaaagacaacttatacaaacctagggtttacaagacactaggaactcaggaatatacttttctaaatacttctctgactactacgcgactttatcttctgggtgttagttccactgtatttcgtaaaagtcggtaacttttcttcgagtgacccgatccttttgatctaacacctttatgggatattccgaggaggttaaacctggtttatggttaacatctgaaatctcaataccatatttggggactcgaagacatttcttccattgggacacgtggaacacgtcgtgcagtgttgaaggtccttttggcaattgtaccttataagctataggtccaccaaaatctc

SEQ ID NO: 63960 - DNA, 301 bp, Zea Mays
ccacgcggggtggcttggagcactggcccacctgaggctgcgttttttttccttcctattttccctttctttttcttttttttttcttctcttttattttctcggggctgttttatttttcatttttatctatactaatatgatccaccgtcatcgtgctccaccccacatctaaatagtaaaaatacaaaattaaacataaataagactttaaactatagttgttggctctaaatcatattcacacacttacctaatacctaacaagtctttatattttatactctatactcaactataa

SEQ ID NO: 63961 - DNA, 282 bp, Zea Mays
gtcaaaccctaatggttgggtgacgtggctggcgcaccggacccatcgacagcagcgtgccccaacggttgaattggtggttgagggctataaataccccacaaccacctccactccaacaatccaagcatacacaacagtgcattcaatacaagagcaatacacttcactccaaagacacaattcaagtgatcagtccgctcaaagtctcaaattcaactctagcgcattaggacttgtgagaggattctttatgtccattgttgctcttgtttgcttggc

SEQ ID NO: 63962 - DNA, 363 bp, Zea Mays
gtcagcgggagggagccacgcgcgggttgggccgcctgggccagggagagagggggaggaagtgcgggcgcgcgcgggttgggctggaattcggcccagccgagggagggggaagtttttctttttctttttctttttctaattctaatccctttcttctcctttttctatttttgtttcttttttattctttttctttggagaccaaaaatattttctaagtgatcttgagtgagaaacatagtctatgtgaggtgctctaattatttcaagtgtatgcacatgagaaggggttctaagggtagggttaagggggaaaggtaaaataagggggggaattaggaggttagggtttcaaacctt

SEQ ID NO: 63963 - DNA, 322 bp, Zea Mays
cggggctcgggtgtcagcgggagggagccgcgcgcgggttgggccgcctgggccggggagagatggggaggaagtgcgggcgcgcgcgggttgggctggaattcagcccagccgagggaggggggaagtttttctttttctttttctttttctaattctaatccctttctcctttttctatttttgtttctttttgattctttttctttagagacaaaaaatattttctaagtgatcttgagtgagaaacatagtctatgtgaggtgctctaattatttcaagtgtatgcacatgagaaggggttctaagggtagggttaag

SEQ ID NO: 63964 - DNA, 238 bp, Zea Mays
ctccaatataatgcactttattttattttggaattatttgtttcaattaatccttcttaattacatgtgtgctttttttatgatgcaaatatggcacatgaaatgaggaattcactctgtattctgtgcatacaaagttgagtattacagagtctttggtagcaaatatttattcttgttaaaagaggtagaaaatccaaatttgctcctaaggctgtagaaggctttttactaggat

SEQ ID NO: 63965 - DNA, 260 bp, Zea Mays
aaaaatcccaacccaaggtttggaaccctaacctcctacccccctcttattttattttctccctaaactctacccttagatcatctcatcatgtgcatacacttgaaatgataggagcacctcacatagactatattcatcattcaagatcatctagaaaattattgattcaaaggaaaaagaaataaaaagaaacaaaagtagaaaatgaaaagaaaagaaatagaaaacagaaaaagaaaaagaaaaaaccctccccc

SEQ ID NO: 63966 - DNA, 1281 bp, Zea Mays
ctcggagacgatggcctagaccactcacgaactcgtcatagcatccttcatgtgcctcatcctgcagtacctattcctaacctaggtggggggatgtgagtacagcaagggtgatttcacatacgttcatcgctcaacaagttatggggaataatgtgcataaacacaccaaaggtgggagctcatgtgaagtgtgaggcttaccaaaggagatggttacagctgagcattgcttttagagttggtcaaaattttattagcaattactacgtataagtagatacccacccaattaaataagagatcaagattaataacaacacccacaatgcaatgcatatgacaaattaaagttagttccataaattaatcatgtgagtgtctgagccgctcatgaccgtgagcacggctgatataccagttttacactctgcagaggttgcacatctttacccacaaatcgtgttacccattttccaagggatcacgactacctattcatctttgctgaggagatgaggtagggtaccactacaaggcctttacaaagttccactagcttcagaaaattcgctacggtttctgagaaggacaatataggaatccctcgtccgaaaaaccatcgtagcatgattgacccgagaacctccctatacgtagctcatctaccgcccttgcccctttcgggtaaggtagtttttcactagctttcctaattagtcagtcaagggcatcccataccaccattgtggtagcattgttttcccgggtggttctccatgttccaattaacatgatgatcttatcatgaacagtaattaaaacaacaacataattggaacatgatcataataaaacattaatttcccaaaaccaggtagagaaatagcaaatttacccaatagttcatctgtttgcaaggtgggggataacaatgctagggaaacctattaggtcccatcaaattaacctgagcatgtcataatgattaacatgaacattatttgataaagaaaggtgatcaagggcataacttgcctgagactcgagattcctaagtaccaacttggtcttcagattctcgtaacctcgttgctactcatagcaatacaaacaaacatggtatagacaaaactaacatcacacaaaacataataacaactgcataataatgttctacatgtcgtaacgagatcgcaggtttgagaaccactaaatttggagttacggttataaagttattatttttccgaaggtttaagtgttagatatagaacaaat

SEQ ID NO: 63967 - DNA, 258 bp, Zea Mays
ctgggttgtgtgcattaatatcctaaagatcaggggttgttgtataaatgtccggggcatgaatgcaactaaattgcactgacaacagacggagggttgatttctctgttttcgagggactctaacaaaattgactagccgaaggggtatcgttgcgtaggggtcgctagatcaactctggacggtaggtcgtggcttttacgaaaggggtatgttgaacccaccgtgggatccggatcggatggcccaacatttatg

SEQ ID NO: 63968 - DNA, 292 bp, Zea Mays
caaacggtatgggggtgttagtacctagattcgtgtcgtgatgcgcttcggccacgacaaagggcggatccgcaatggagatgccacactggtgagcaattctgtttgctccggttaccctcgaagctcgattatgcgatgaagacgtgcgtctgtgtccaaggctccttcccacacttttcattggatctccacaccggcgaatgcccgattcgagggacgcgactactctcttcctctctctcctatcttacggcgacggatggagaactggtggggcgatgaggtggct

SEQ ID NO: 63969 - DNA, 183 bp, Zea Mays
tccgactctgtgaatgacttgagaggtgtaggataagtgggagcctccgggcggaagtgaaataccactacttttaacattattttacttattccgtgggtcggaagcggggctccgcccctccttttggctccaaggcccggcctcgacgggccgatctgggcggaagacattgtcaggggg

SEQ ID NO: 63970 - DNA, 173 bp, Zea Mays
gacattgtcaggtggggagtttggctgaaccaccccatctgttacaagataacacaggtgtcctaagatgagctcaacgagaacagaaatctcgtgtggaacacaagggtaaaagctcgtttgattctgatttccagtacgaatacgaatcgtgaaagcgtggcctatcgatc

SEQ ID NO: 63971 - DNA, 216 bp, Zea Mays
cagaggcgcgcggataccgtccgcgccgacgacggctgccgggggcgcctagggcccccaggctttggccgccggcgcgggtgacaacggtccacgccccgagccgatcggcgaaccagcaggagccgttccgcatacggccagggcgcgtcgccagcccccatccgctccctcccggcaatttcaagcactctttgactctcttttcaaagtcct

SEQ ID NO: 63972 - DNA, 241 bp, Zea Mays
cctctgctcgccgcccgccccgacccacgttagggcgttcgcgccccaagggcccgtgccattggctcagcccgcccggccgacgcgccgcggcgggccacctcgaagctcccttcccaacgggcggcgtgctgaatcctttgcagacgacttaaaacgcgacggggcattgtaagtggcagagtggccttgctgccacgatccactgagatccagccccgcgtcgcacggattcgtccca

SEQ ID NO: 63973 - DNA, 83 bp, Zea Mays
gtgggctccagctatcctgagggaaacttcggagggaaccatctactagatggttcgattagtctttcgcccctatacccaag

SEQ ID NO: 63974 - DNA, 229 bp, Zea Mays
cctctgctcgccgcccgccccgacccacgttagggcgttcgcgccccaagggcccgtgccattggcccagcccgcccggccgacgcgccgcggcgggccgcctcgaagctcccttcccaacgggcggcgtgctgaatcctttgcagacgacttaaaacgcgacggggcattgtaagtggcagagtggccttgctgccacgatccactgagatccagccccgcgtcgcac

SEQ ID NO: 63975 - DNA, 108 bp, Zea Mays
ctggaaatcggttcagccggaggtagggtccagcggccggaagagcaccgcacatcgcgcggtgtccggtgcacccccggcggcccttgaaaatccggaggaccgaat

SEQ ID NO: 63976 - DNA, 144 bp, Zea Mays
ctacaatttcatcgtgatggggatagatcattgcaattgttggtcttcaacgaggaatgcctagtaagcgcgagtcatcagctcgcgttgactacgtccctgccctttgtacacaccgcccgtcgctcctaccgattgaatggt

SEQ ID NO: 63977 - DNA, 54 bp, Zea Mays
tgtcagtctgtcaatccttgctatgtctggacctggtaagtttccccgtgttga

SEQ ID NO: 63978 - DNA, 140 bp, Zea Mays
ctttaatttaacacttagacagtgtttgttggggaggtactcggttggcgagcatccactagttaagtccattcttcaggtcgtccaccacggcatcttgtggttggcaccacatcactggctcgatcatcatctctcgg

SEQ ID NO: 63979 - DNA, 934 bp, Zea Mays
cagctgactgggggaggtcgctagcctaatcctcgaactcgtcaacgtcctggaactcctgaaggtccacctcgacaccttcttctttacctgagcatagattgcaccaaaggcaacctggtgttttgtgaaagcaagggtgagtacacatcaacgtactcaacaaatgtcccgtttggctgagatggactagctttatgtggggttaggctcaagcagttgcttttagttggtcaggtatttattattagtgaagccaggttttagcaataactaacccgtgaatcatttcctcatcgaggaacatcattatcatcatcgaaccaaaatcataaatagaaccattgtatctcgaaccattcgtatctctaatcaaagaggatcccaagactgctcttaaccgtgagcacggctgatatatcagtttcactaccctctgcagaggttgcacactttacccatgagccgtgattccctttctgcccaaggatcgcgactccccattgatcacttccaaggtgaactagcagggtctcactacgtggcttttctctagggtcctcactatgcgaatgttggaaatgaccattgcataaagtccatctgacgtcccaaaacctatacctctgccctcaagaaaaagccatgggacgatgcccgtacccagatccctgagcgagaatataggagccataacagatgcctctgtttcccaatgaccaaaaaccagcacccaacataagacttccctaaatacttggccaagggcatcccataccaccctcatggttgcactgttttcccggggtgtcgctcctcgaacaggtccttacggagaggcactcaggaaacagtctgagtcccctaaagtgtcacaggaccaccatcaggataacatcatcgtatcataagtaatcacatcatgttcattgat

SEQ ID NO: 63980 - DNA, 2123 bp, Zea Mays
cttgccttcaccaaacagatgctcaggatcttcaatctcgtagagcttgaggagcttgatcacttggtcaccaaagcttgaccttcgatctctcgaagctcggaaacggatcgcaaattatttgcgacgcacaacgaataccaacaggcacaaacaaacaaacatatgtatatgcataagaacattacaccatacatgataaattgttataaaaacatgcagcataaaatagagctcgattctatagtcacgcgagggaaagaaacgtcgaactcgaagttacgtttgagaagttagcgcgttaacgttaaacaagtattaacaacaacttttagttcaacatgatcaaacataaatattatacatcagttagtttcgattaatctgatacgctaacaaatgtctgttaattaaataatttaattaaaaggatagattctaagcgagatgaatttatgacgcgtgaaacagcacgacagcgtgcaaatgacgcgcggacacgcgcgacatagcacgctgacgacacacgaaactatgctcgcggcacgcgtgaacgacgagcgactcagcacgcgaccaagacgagtagaaatgggtttacgacgcattatatatcaaataactgaccatttgcggctaacaaacgacgctaccaacgaatactactaaattgtgattaaacgcacaaaattatttgcgtaagatattttagataaatagaattatcgattagtcaacgattaaacaagaattaattaataagcatgaacgactatagcgaaacgattaactaatgtgtgtggatcgtgcgcgcgacacacgacaatgcttgaaaacagcgcgtggccgacgtgctatgacgtgcgcgaatagcacgcgcgccatgcacgaagaaacgcgaaaatcacaaatagatgtcgcttttacatgaaacaaatattagttgaaaacattaaagttggcattaatcacattaatttgtatttttaaaagcgcaaattaaaattatagattagtttaattatattgatattttaataaatatcagatgaacaaataattaactaattaattaaaacttgtgtacgaacagaataatgttattaacatgttgtcaacgttattacgaagctaacatgactcgaatgaattaaaacgaatatttaacgcaaataatgacgcatatccaattagccggggactgaaaaacatgtggcgtgatataattggctgaagacttgccacatgcagggccacacctagggacatagggaacatagccacaaaggatctgacgtcaggctgaaacgtgggcagttttcttttctctctctcatgtgcacggaacttttcttctctcatatccaatcgcatgaagttcttcttccttcatccatctttctccatggaatcagcagcaaggagagggagaaggaggggacgtgggcatgggagggggagccggtgctctaggctgggggctggccatggccatagccgaggtgagggcgctgggcacctaggcacgctgcggctggagcctggccgagtggccgaccatggcgccaaggctagggagctagggccggatgcctgagcacgcgggcgagccgccgcgctggcgtgtctaccgcgcaggccggctgccgcgccacgccctacgctggggagcatgtatgcggaggccggaggagcaggtcgagcggcctgcggcacggggggacacgtcggccggggccgagcaacaggctgccatgccaggtcggagaagcagggcgcggctgcgtgcgtgggaggcgcaagctcgatggagcgaggatagcagcgcgcgacaacttagctagacaacgcgcgcaggacaattcggtcacgaaactgcatggcaagtttgccgaggacgaaaaaagaacgcgctacgaaggttcaatccaacacaaagaaaaggaggagaactcacctggtcgaaggactcgtcggagaagaagaggccgcgccgagacagccaagctgggcgtctgggcgctcgccggggtgctttggatttgggcgctgggatcggcaaccaccaggtgataggtgtagtggcagttgcgagcatcagggagagaagatgggaaagggag

SEQ ID NO: 63981 - DNA, 209 bp, Zea Mays
cccggaccctgtcgcaccacgaggcgccgtcaacgagtcgggttgtttgggaatgcagcccaaatcgggcggtaaactccgtccaaggctaaatacaggcgagagaccgatagcgaacaagtaccgcgagggaaagatgaaaaggactttgaaaagagagtcaaagagtgcttgaaattgccgggagggaagcggatgggggctagcga

SEQ ID NO: 63982 - DNA, 104 bp, Zea Mays
gctttggaaactctggtggaggctcgaagcgatactgacgtgcaaatcgttcgtctgacttgggtataggggcgaaagactaatcgaaccatctagtagctggt

SEQ ID NO: 63983 - DNA, 153 bp, Zea Mays
ggctgccgggggcgcctagggctcccgggctttggccgccggcgcgggcgacaatggtccacgccccgagccgatcggcggaccagcaggagccgttccgcatgcggccggtgcgcgtcgccagcccccatccgcttccctcccggcaatttc

SEQ ID NO: 63984 - DNA, 223 bp, Zea Mays
tgcgacgcggggctggatctcagtggatcgtggcagcaaggctactctgccacttacaatgcctcgtcgcgttttaagtcgtctgcaaaggattcagcacgccgcccgttgggaagggagcttcgaggtggcccgccgcggcgcgtcggccgggcgggctgagccaatggcacgggcccttggggcgcgaacgccctaacgtgggtcggggcgggcggcgagc

SEQ ID NO: 63985 - DNA, 75 bp, Zea Mays
ttccacagttcgaattagttcatacttgcacatgcatggcttaatctttgaaacaagcatatgactactggcagg

SEQ ID NO: 63986 - DNA, 125 bp, Zea Mays
tggcagacaagcgttcatagcgacgttgctttttgatccttcgatgtcggctctccctatcattgtgaagcagaattcaccaagtgttggattgttcacccaccaatagggaacgtgagctgggt

SEQ ID NO: 63987 - DNA, 78 bp, Zea Mays
tagcaaaatgcgatacctggtgtgaattgcagaatcccgtgaaccatcgagtttttgaacgcaagttgcgcccgaagc

SEQ ID NO: 63988 - DNA, 75 bp, Zea Mays
gttgattcacacaattggtcatcgcgcttggttgaaaagccagtggcgcgaagctaccgcgtgccggattatgac

SEQ ID NO: 63989 - DNA, 243 bp, Zea Mays
ccgacgacggctgccgggggcgcctagggcccccgggctttggccgccggcgcgggcgacaacggtccacgccccgagccgatcggcggaccagcaggagccgttccgcatacggtcggtgcgcgtcgccagcccccatccgcttccctcccggcaatttcaagcactctttgactctcttttcaaagtccttttcatctttccctcgcggtacttgttcactatcggtctctcgcctgtatt

SEQ ID NO: 63990 - DNA, 157 bp, Zea Mays
atgcgcatgaatggattaacgagattcccactgtccctgtctactatccaaccgaaacccccagccgagggaacgggcttggcggaatcagcggggaaagaaagaccctgttgagcttgactctagtccgactttgtgaaatgacttgagagggtgt

SEQ ID NO: 63991 - DNA, 143 bp, Zea Mays
caagggcccgtgccattggctcagcccgcccggtcgacgcgccgcggcgggccgcctcgaagctcccttcccaacgggcggcgtgctgaatcctttgcagacgacttaaaacgcgacggggcattgtaagtggcagagtgacc

SEQ ID NO: 63992 - DNA, 630 bp, Zea Mays
agagccctgctcgaccgaagccagcaaggagatccgccgtccgcgagctggttctccaacaccggcgccgcacatgctttgcaggatatatggctgggaggccagagacgaggcagcacttcgagccgggcgtccgtgccgcgggagggtggtacgcaaccgcttttgtcatcaggagtgattgccggggttccatcctgctcacctgcgatcacaacattccgcttcaggaagatgtgccggattgagggccgtggcgcagtatactgcttccttgatttctaatacaacgttgtacttcagacatcctggcctgcatctaattactaatactgtctatggagcatgcagctagtcggcatgatccagtgttgattttgaacaaccaatacccataccaatattgattttgatcaaccaatacccatacttactcctgctagattcttttgtttgttaactagaaaacgtggctgtctggtgcacacagaattcaaaatatgttccacggctgaattttggatgtccttgttgaatttctaataagattagtcccggttctcatacatgtctacgtatctaatgggaatgaatgaatgaatgaatgaatgaaaaaaatctgtatctggg

SEQ ID NO: 63993 - DNA, 491 bp, Zea Mays
gacatgtcactgtttgagcgtacgagcattggaatagataaacccttagagagaagttttggttcaattaagaaatcgctcgagcgtgcctttggtgtcaatccggccggagacacatgtgccgagcgtacaagttgttgtcaactaggagggtgaagctgacacgtgggacttgatgggcatcgagaacactactgcttggcaggaatatatcgatgcagctacattacgtgggtggccttttggcatgcgtgtacagttgcatgaaaagccacaacgcgtaatagcacaagatgaagatgaaaggtatccgtctggatacgtggaggcagaacaacccgacagagctgagggccgccgtgcttatgacatagaatcgcaaggtgtggctgatgaaggggagaggataataagaattgtggatgaaatggaggctgaagaccgtgaggcacaggagatggaagaatgtggggactcatcggacgacgagg

SEQ ID NO: 63994 - DNA, 262 bp, Zea Mays
agatttggcacgtacgaggcttcatatgataatctgcccgtatgttgtctcatgttgtgcagagaaatccaggaagcgcctatcatatcttcctggtaccaagatcgcaaggagcaccaagcattcttcagcgagccttcttctgtcttggtgcatgtgtcagggcatttcaatactgtgcccctgtactatggcacattcctgaccggaaaatacaaaggacagatactatctgcaattggagttgattgcaataaccaag

SEQ ID NO: 63995 - DNA, 831 bp, Zea Mays
cagcagtatagtgaaatgtacaacgatgagagaaaacacattatgtaccgaaccattgcgaactaatcaattactacagcattagaaagcttaatcttgtttatgtataaacacacacacatgacgattgttgagtgtgggacagaggttatccaccaaattaatccttagaaaattggacatcataaccaaatggaaaggaatgtcccacgagcgtagagatgcaaaccctagtgaacaataattgtgaactgtttactgtgcaatagaagagtggaagaaacaataattggaaattgacgaatggcaagattaatttggtaacgcaataatgtaaggcatataacgttttggacatgattaaagtgccacaacaatcaaacaagtggcctgcctagatacacttttcgcagcactgaggtgttccctcgccttctctcccttcacaatattaactttgcattatttgtgaagtcttgttcaacaaatgagaaaaagagagaatgcaacaccgtagtctgtagaggtgcaaaagttcagcgttacagtgacagactgaactctacttccaagtctatgtatataagcactttcggcgtctaaaatttaagtacacaattccacactatcagccaaataacactcatgaattagacaccccccaccactctcctaccagccaatcaggagagggcatcaaaatattttcacttcacaattaaccagccctaataacagatgtatatatgggtttttggaagtaatgtgttatcgcctagaaatttctagcgatcgaatctgggatctagcgatggaatcgtgggggcttac

SEQ ID NO: 63996 - DNA, 1346 bp, Zea Mays
gtcaaatcttcattaacattcagttcttccatgggtaactgttcttcgggtactcttaagcacttcttgagttgtgacacgtgaaatacgtcatgcacatctgataatctatcgggtagctctaactggtaggctacttcgccttttctttccaaaatcttgaatgggccaatatagcgaggtgataattttcctttaaccttaaaccttttcattcctctcatcggtgaaactttaaggtagacaaagtctcctacttcaaacaacaattctcttcttctattatcagcatagcttttctgtcttgactgtgctgtcttcaaattttctctgataatttgcacttgcttttccgcctcttggagaatttctggaccaaatacttgactttctccagtctgattccaataaagtggtgttctacactttcgtccatatagtgcttcaaacggtgccattttgagacttgcttgataactgttgttatacgaaaattctgcataaggcaaacttttatcccagcttctaccatgctttagagcacaagctcttagcatatcttccaacacttggtttgtcctttctgtttgcccatccgtttgcgggtgatacgctgaactaaaatttagcttggtatccatggactcatgaagtcttttccaaaagcgcgaggtaaattgggttcctcgatctgatacgatcttctttggtactccatgcagacaaacaatcctcgacatgtataactctgctaactgggctcctgagtaagttgtcttcacaggtataaaatgtgccactttggttaacctgtctactatgacccatattgaatcatagccatctcgagtacggggtagtccaactatgaaatccatactgatttcttcccatttccattctggtaccttgagaggttgcagcaatcctgctggtctttggtgttcagctttaactcgctgacacacgtcacataatgcaacatgagtagcaacatctcttttcaaaccgtaccaccaatacttttccttaagatcctggtacatctttgtacttccagggtgaatagagtaagctgaatcatgagcttctctcaaaataagttggcgtaagtgctcgatttccggtacacagattctcttcttaaaccatattgtgccttgttcatcttccgtgaaatctggggctttacccaaactaatcaaagatttaatttccttaatcttctcatcggactcttgtcctttacgaatctcttcttccaaagtagattcgacttccatcaccgttgcttctacattattgagaaatccaaggttgagtcgttccatttcccagcacaattc

SEQ ID NO: 63997 - DNA, 2738 bp, Zea Mays
gttgcttccaatttagtatctcacttatctttcctgggtccactttaattccaccatcggtaacaatatgccctaagaaagtaacttctttcaaccaaaaatcacacttcgagaattttgcgtacagttggttgtcacgaagcttttgtaggactagccttagatgatcttcgtgtgtttcttcattcggagaatatatcagtatgtcgtcaatgaatacgaccacaaactgatccaaatattccatgaatactttattcatcaagttcataaagtatgctggtgcattagtcagtccaaacgacatgaccaaaaactcatataatccatatctcgtcgtgaaggctgtcttcggtacatcttctgctcggatctttaactgatgatatcccgatctcagatctatcttcgagaatatcttagctcccttcatttgatcgaataaatcttcaattcgaggtagtgggtatttattcttgatggttacttcattcaaacttctataatcaacgcacattcttctcgaaccatccttcttgttcacaaacagtactggggctccccaaggggatgaacttgggcgaataaaacctttttctagtaattcttctatttgtttcttcagttctactaaatctttgccatccattctataaggtcttttcgagataggtgcggttccgggtactaattcaatagaaaactctatatcacggtcaggtggcatacctggtaattcttccggaaatacgtctgggtattcgcacactactttgatattttccaagggcttttcttccaagtgattgatcactgtcttccctttttcatctgttgacttgtctatgttgacttggattctttcaccttgaggacttgtcaacgtaattgttccgttggcacaccgtatcactccatcacaacttttcaaccagttgcatccaagaatcacatcaataccgttggatcctaggaccactgggtcgactgtaaaatctattccttgaatcttgatattaacatgagggcatgagtgtgtggctttcatgtcacctcccggtgaactaatgtgtaatatcctcttcagagggtacttaggtatgttatgtttttccacaaatgactcagttataaatgaatgtgatgctccagagtcaaataaaactgatgcaggtatggagttaacaaggaacataccatacacaatgtcggcatcctcaggcactgattccgcagtgacgtgattgacccttcctcggctctggttctgcggagtcttgttctgagcagatccacgagcgggggtgctctggtcatttctctgagtgttgcctttctggggtgtctgctggttgcgccttgggcagttgttggcatagtggcctaattcaccgcacttcaaacagccgttgggttggacaggtgcgttgtttctggcctgagtgttgttggtgccaccctgacggttctgtgaatttccaccagacctctggttggtctgggggttgctcctttgttgattctgattctggttgtttctctggccttgctgtccagagcgttgcacttgataattatttccaccctgatttccagagcggaactgcgacccttgagcattattcggacgagtgtttctgcttgactgaccctggaacttccttttatggtcagataattccttccttttgctctcaaggccaattgccttgttcaggagtgtctggaagttggggaatgtgtgactctgaagttgatagttcagaggtccaatcaacccttccagaaaacgctcttggcgcttctcatcagtgtccacttcctcaggagcataacgtgaaagctgagtgaagcgatcacgatactcactgacagacatattcccttgagtaagggaaagaaactccttcttcttcagcttcatgattcccgaaggaatgtggtgagcgcggaagttctcttggaactcctgccaggttattgtgtcagcattgggatgtgccgctgtgaaggcatcccaccaatcggacgcagctccctcgagtcttcctgaggcgtacaagaccttctcccggtcgttgcactgagtgatgtccaacttctttccgataaccttaagccagtcatcggcatccaaaggatcaaccgcatgagagaaagttggcgggtgatgactcatgaagtcccggtgcttatctctagccgggggtgcatattgctgctgctggggttgctgattctgttggttctgttgcaattgttgaaccgcagcagtgagtccttgcagaatctgcatttgcgcggcgatgaactgctccatgttgggattaggtggtggtggtggtggtgcttgttgtccacgctggttccggttgttaggtccttgacgttggttcaccatctgatttgttaggaagtgaagtccgtagaaaagtgaggagtagaaaagattcaagagggaaaatagcttaagttttacaaattttatatgttcttatggccatcattccataagaccatagcactcaaacaaagattcaaatcaagcatttcaaccaatcaccatcacatggttgatatttattaatataaaaattaaagatagtttcatcgtctaatgcgaagcgtaacttattacatcatgactcaaaactcctaaagcagcctagtgactgatccggcctctccgtagcgcagcctcttgcggggaggagacaacgtcacggcgggaacctgag

SEQ ID NO: 63998 - DNA, 367 bp, Zea Mays
gaagagtgggccgagcggcgttgggtgtgttgggccggttggccgagatgggccaaggtgaggagagttggcccagccggggtcttcccttttccttttttttctgtttttttttctttcttattttcaattccctatttcaagtttcaaattcaaacttagttttggatttccaattcaattaaatgcacacccaaaactccagcatgagatgcataaactaaatctcttctctctctctctctctctctttttaaatatttattgaaagaaaccatgtttcacaaataaatcctaattttatttctccagggctacttactttaatactatattttaagggtttacagcaagctgcaggttggag

SEQ ID NO: 63999 - DNA, 204 bp, Zea Mays
agactgagtcctgatttttttgtagctaaacatgtaatggctgctcatcctattttgtttgtgactttgcttagagatgaaacattctatagcaagtcatatttgtagcaaaatatgtgatggttgatctagctttggtaccaatgtattttggaacaagcgatatgttgatgggttcaaagaaaactatgcaatgttcttcca

SEQ ID NO: 64000 - DNA, 486 bp, Zea Mays
ctcccttctaccacaacaagaatatgggagcatcatcactattcttcacaacatggaggacttgaacaaaatgaccccgacaattgtgattggaaagattgcggcatttgagatgtcgtgaaagatgggtcaagaggagccaacttcttcaaggccatatgcttttgcatgtgatgaaaagaagaaaggcaagaagaaggctcccattccaagttcctcaagtgaagaagaggaagaagaagaaagtgatgatgataaagatgatcaaccctctacatcatcctccgaggacgaagaaacagtccgacgcgtcagaaaggtaatgaggatgatctgaaagattaatctaatgggtgtgcccctgcaggtcgaggatcttctctttaatattgacaggaaaaggcaaagaaagagaggatgcttcgcatgtggggagaatggtcacttctgggataattgcccaaatatggccgaacccaaaaagag

SEQ ID NO: 64001 - DNA, 2595 bp, Zea Mays
ctcttaatggcctcaaaattcacatgacacaaacgggaatgccaaatgtcattaatggaatcgttattacagaccacattaacatggtaagaagaatgattgttcaacactaaaagacggaacaaaccgcctgattcatatgactttctaacaaaagtaccaaacttagacaggaccactttattagactcaaacactaatttgagaccatgtcgaagtagcagcgacacagatatgaggttccggttcatcgagggcacatagagtacgtccttcagcacgagcgtcttccctaaagttaacttcaggtagacctatccagtacctcgaactgctgccggaacaccatttcccatcaagactggtgcgctgttgtatccctgcaatgaagagaacatggatcgatcagcacaaatatgaacagcagcacctaaatcaatccaccagtcatctgatggacttgccatgaaggcctgaggtgcataccctggggtggagttaaccaccacgttcccttctttgcgctgaggtggaggaccttttcccttccttagtttgcacctccgagcagtatgcccgaagtcaccacaaacaaagcagataaagtcctccttcttcttcatctttttggacttaggttggttctaattcttctatggagagttcttcttcttcttctggaattttctatctccgcccttctcaacaacatgagcttggagttgctaggatggcttgttactggcccttgcacgctcttccacatttatagcagcagacaattcagtgagagtcatttgcttcttcatgtggtggcgtgaagtcacaaagtcttgccaagaaggcgggagctttgccagtatagcattcacctgaaaactgtctgctaagacgcagccatattggaccaagtccctaacaaggagttgaatctcctgtagctgctccataacagaccttccctcagccattttatagttgaggtagttttccgttgtgaatgactcattgccattgtcaacttcagagaactcattctcaagttcagtccatagacccttagcggaggtaaaaccagagtacacgtcaaataagcgattcgacaagacgttcagcagacgagacaagcatgcctcaatggtttcgtcccacttggccttctccgctagtgcgtcggccttcgctgcatcatcagcatcatctgatgcagcctcgggaacagccgacatcactacccaaaatagttttaggtcagtgagccacatgcgagtcttaatctgccagcgcttaaagcttgcgccgtcgaacggcttaatgacatcagaaccggaggccattacacaaattggttttctggattgttgtagttttatagaaataagtgacatgcttccaacatatttaaaaatattaaatattctaattccgaataaaacaagcatacaactcagataaatgtcatatgtaattataacagcaatgaacagtagcaattctagtacatgaaaacgtgaaacatagctactcaagtccatttgagaattaaacatggctagtagatgaagaaggcagattaaacacataaacatgattgtttatattttgatattgctctcaaaatagcgggttgctgtactagacagcccttcaacgctaaaaggtgatcaaagatccttgactaacgtgacagtcctatcttaccaaatcagggttttagatcagataaaatgagcctagaaaccaagcatgaataccaagagtaaggaactgtgcacttaataaaataacataacttaacacaagtaatcagcctcaacaaagagagatataactaggcacaaatatatatttaatgctgaaaataacaacacactaaaacccagactgtcacgtcgtctcactacaccgctatcatcatcgagtaaataaatccgcccacaatagtgcaatcacacccaagtatataatactagcagattgcacaaaattaatcagtaagtaaagagaggcaacaggtaactcacagcacgtagattgtctacgtgggaagaccagctcagcgaacacaaggttctgtcccagaaaaccaattccgccgcccacgtccggacctgcatggcgggaggttgacggagatactagagtcgctgctgaggccgagggagacgtccacggcactagcccgagaagaggaacaccgcgcagtaggaaactcaagcaccaggccacggtagatagtaaccagagaggatgcacggcaccacacaggtgcttgagcacagcaacagggcacaagaaactcacgagcgcagctccactttctcccacttccaatcaccactggctagatcaacacaagaataccaggaacgaacgaatcgctccaaatcgtgactggaatggtgaaaaggaagagagaacagagaaccttgcgtctctaagagatgatggctaggggattcgcctcccatacttaaagagccgagcacgcgccgagccggaggaagttgcataggaggcggcgcaagaaacgctcgagcacgccgcggaaacagggacggcagttgaccgacgccactcccgtgcccgtctggc

SEQ ID NO: 64002 - DNA, 306 bp, Zea Mays
atcagccccagctgctccctcattatcagggaagggagtgagaggtctagtgagaaatccgatctcattcttgaaaggcctaaacggattatgagctatctcacagcggccctcaaatctggtcttagccttgatcaaagccatgatgtatggagcatataccaagttctggttcttgtccatcttgaggtcattaagctgcatcatcatgaacaggaccacattcattacttctcccttcatcacatgatcaataatgttccagaatttatctttgattttccctttgtccccactctttggcag

SEQ ID NO: 64003 - DNA, 293 bp, Zea Mays
gccagacgcaagtctgagaagttgggcagtggcaagtgtgggccttgggccacctagttttttttttatttttagaaaaatctgaaacttaaatttggtaaatttagattaaaaattgttaagttatttagggttcggatatttattcggataatggtcggatatatcagataaatttcttggatattcgaactcttggatattcgaaatccgatggatatcatacatattgtattcgtatcggataatccgatatccgaacaaactatccgtatttgtatttgatatccgac

SEQ ID NO: 64004 - DNA, 309 bp, Zea Mays
atcgctcaacaagttgtgggaaatagtgtagtgtaaggcttaccaaagagaatgattaaggctgagcattgcttttaataagttggtcaaaattttattagcagttactaagtataagtatataccatcccagttaaataattgatcacaattagtaataaatcccacaatgcaatgcaatgcatgtcaaattgagtttagttccataatttactcatgtgagggtccgagccgctcttgaccgtgagcatggctgatataccagttttatactctgcagaggttgcacatcttaacccacaagtcgtg

SEQ ID NO: 64005 - DNA, 4088 bp, Zea Mays
tggaggctttgtcctcatgtggcaccggacagtccggtgcagcaccggaaagtccggtgcccctctgacttctgctctgacactctgaattcaactgtacactttgcagagtcgaccgttgcgcgcagatgaccgttgctccgctggcgcaccggacagtccggtgaacaccggacatgtccggtgaattatagcggagcggctgccgcgcgttcccgaggcttacgagttccggaggctgcgcttccttggagcaccggacactgtccggtgtacaccggacagtccggtgaattatagcgcgccggcctgggaatttcccgaaggtggcgagtttaagatggtgacctctggtgcaccggacactgtccggtggtgcaccggacactgtccggtggcacaccggacagtccggtgcgccagaccagaggtgccttcggttgcctctttgctcctttgttgaatccaaaacttgatctttttgttggctgtgtgtgaaccttttacacctgtataacttatacactagagcaaactagttagtccaaatatttgtgttgggcaattcaaccaccaaaattatataggaactaggtgtaagcctaattccctttcaatctccccctttttggtgattgatgccaacacaaaccaaagcaaatatagaagtgcataattgaactagtttgcataatgtaagtataaaggttgcttggaattgagccaatattgatacttacaaaatatgcatggatcgtttctttgttttttttaacattttggaccacgcttgcaccacatgttttgtttttgcaaattcttttgtaaattcttttcaaagatcttttgcaaatagtcaaaggtaaatgaataagagtttccaaagcattttcaagatttgaatttttcttcccctgttttgaatgcttttcctttgactaaacaaaactccccataaaatagatccacctcttagtgttcaagagggtttttgacataccctttttgaaatactactttctcccccttttgaacataataggataccaatcgataaaattcttttgaaacacgaaatttttaatttggtggtggtgcggtccatttgctttgggctaatactttctccccctttggcatgaatcgccaaaaacggatacttagaatgagatataagccctttctataagttgtctccccctttggtaaataatatatgagtgaaaggttataccaatgtggagagatagtatggagtgatggcgaagggtagataataccaatagagttgagtggaagccttgtcttcgccgaagactccatttccctttcaatctacgacttagcatagtaatatacttggaaacatattagtcgtagtcatggtacaggaataataggatatatgcatttgtaccaaaatgaaagagatatgatcaagagatatgtcaattaagcatgatcatagttctgtataatatagatttctcctcctaaatatgtgccttgagaggaatacatattttggccttaaatgccaagggcacataattaggttaatgagaacaagtctatatcatagagaaagtgaagtgcattgtgtcatagtatatgtgtgatgctcaagacagtttatgcacttatgaaagcatgttgcaaacgttttaagcattttcctttaaagatttcaaagagacttaaggaccatccacctttggaacaaaggtagcttatcctcgttacaaggttaagctttaagctctttgacaatagaaccacttcatctagttttagcaaagatgcaataatgcatgagtgaaattttaagaggtgaaactaggtgtgaagcagggataaatgcaaaggtcatgctttctcttccttttatacaagatatgcaaagaatgtatatgagaggaagatttaggtacatgtatgaataagattgaatagttttacccttttgtaccttcacatagagatgctctcttcattgtgctttgtccttagtcttagtcgcttaagacctatactcaagacaaagcatgagaatattttgcacaagagagagttctacaacttgtgatccttttctaagccatgttattatgtatcaagaagatcacaaattgcataaataaatcatgaattctccttttaacttagtgcatatcaagatagatgtcgattgaaattaccaattgaaatcaaattgaaactgcatgaagcactaagaagcataaatgataattgaagttattcaatgatcataaaatagatgcgatcaaaagaacaacataggcattagattttcaaacatgctcataaataggagaatccgataaatatgctactttaacattgaaagctacaatccttgataaaagcgacattaattttacaagttggattgatgtgtagtagcatactttatgagaaacttattctcattcaagagactatatgaaatttctaagataaagtaatagtctcaacataatcaagatataagaacagactccccctaaagatatgcatcaagtatttgaaagaattgattcaatgcttttacttttaaagatatatagggagaagcattatatatcttgatcaaggcttataaaatttgcaataaacaacttaagcctggtactctcataatgaaaaagatttaaaatgcttacaaccacaccattgattgttgtgaagaccttattgtccaagtaggtgttgttgtccttgatgttcttcctttttcatttgagtgtcctccttttgtggttgtctctttttccttctaaacttattgaaaatactcaagagagatgttaatagcgcaagggagtaaatgatgaatgatggtttctttagatagaagataagaacaattcatcatccataagtcacatagacatgaggtaaatttcttgacattagtgcacatcaaaagaaatatgcactatctaaacattttgatcaatcacaggaaatttacttcttcatattgaatttattaatcatcactttgaggtaagtcaatatgagaacatatatagcaaaggcatgaaatagattctaacggacaaatgcatttttaagaatgagattgaatgcacatctagttaattttaggtccaatcaagaatccattcctcacatggatagaatatgataatgtagattaagtatccattgagatgggaactaaacttgattaagaagaaaagttcccatacctttgcttttacctttcttcctttaggtgaagagcaacccacgaggcttgtgcactttctttcttgtagattttcataattgaactcaagagaaatgttagtagcaacacaagcactagtttccatttttgtaatcattttgataaggaatgggaagctagattactaaaacatggaaacttcatagcatgaactagattatccatagatgatgttatgctcaattttaactcataaaacaagcataaacaatcctttaagattgagggaataaatctaattcataatatggaaagcgatagatgtgaaagaatcaaatccaattttaagcaggtagaagtacattataaatcattggattgatttttcttttcatgttagattacatgcttttccaaagagaaacctattctctataagtaagactatttgggttacttagataaaaacataagtcccacttatctagttatagagagagttttccttttataagtatcctaaggatttgaattccttacatgacaccttattcctttaataacatgaaatatctctctatatctagaatcatggcaataataggaatattagtgtaaaacatgccatgaggttttgcaatattgaagcatgtagattgccatagaagggaaatgatgagcatgcaatctaccatatgagaggaaattcttgaaagaatggtaatataagtttaaagacatttgaagtgcttcattttcctatgtgactacccaagacacataagaagtgataatttaaaatacgtgcactcaaaagcataaatgttaccatcctttggctttcctccatgttgtaggtcttgacttttcg

SEQ ID NO: 64006 - DNA, 883 bp, Zea Mays
caaagatctaggaacccaaaagtcctttgtgttagcattaggtaaactcattacctttctagcacaagttgcaattttgggttgcctagttacatgagaagtaattgacaagctaggagtgggagatttacctatgggacaatccttgcattgatgtcccttctttcggcatatgtagcataggcgatcttcaactcttgaagatttcttccttccttgcttcttgcttgctacatggttagtgaatattttcttttctaaccctatgcctttttgttttaaatggggacaagatctaagcaagtgtcccttcttagagcatttaaaacaaagtttattatccttgttaataatcaagccatttttaatgtagggacaagacctaatcaagtgtccctcttcaaagcattcactacacttcttaattttcttagtgagaagtgtggcttgatcattaccttggatgttaccttttgtggaggcgtggttgaggcttttggaggaggtattggatttcatcttttgtttcttcctcttagtaatcctcaaatccttgacattttcttcaagggatgtagtgcatgccacggttgttcccgtcttaagcttcttcaccatgtgatcacggttatcttgagaaggttgggcaatgcatttcccttttagttgtgtcaagctcatctttagcctctcattctcttctttgagcttttgataagtatcatcttttgttcctgcaaattctagctcaaaggaagatttgcttgtcgacggacaacaagcattagcacatggtaatatagtatcaatttgaatacatgtgcatgagtgaggttgttgggattttaagttttctatcacaacctcatgagcaatatttaat

SEQ ID NO: 64007 - DNA, 3074 bp, Zea Mays
cttgtctcagatgtcgactctcacctctctatttatagggatgcgcaacaggggcccaccagcctcgtcttgggctagacgcccccgatcaaggcgcgagatcaagggcccagttaaccgttgggctaactggtggagatcaattctaacattctcccccttgatctcatcttatacttttcactttataccttttaattcttttcgtattccatcacaaagtagtgcatagagcatgcttcgtcgtcacgatcaatcggcgatagacttaacagctacaatacatgtctctgttctgaaatagatcttttaactttgggcccttttattgtccggaaaacataggctataccataaacccatgtcgactgtgtgttctctaaacgcactggatggtaagcctttagtaagcggatccacaagctcttgcctactacatataggttcaatacttttaatatgattctggactttctcctttacaacgactttgtgtcaacgtgtttggcagcacacttgacccgttgtcataggagtgaactatttgaatggttaatgctgttgtcaaccattatcaactctaggtaccattttccttaaccattttgcctatcccttagcctcatatcatgctatatcatgtctttgcatcacattgatgataactgtttgtttggagcttttccacacaaaaactccaagtgtgaacattagcgataattgtggatttcgctacacatttcacaaggttctatctttgtacttttgagagtacttcttctttctttttagcatgagactgacattcataactaaaatccagtgatctatatctggactggacactgccaaaacaacccggatacgtgaactacgtcagggtaacaccatacttgtgcattcatttagcttccaacagctgaagcatatggtaccatattcatttaatctattccatattgcctcttggaacattgaagttcccaaatccattacccttgatcattggaacaggcgtaggttttctcgcatgcatactttatttctttacaacatttcgtagcatgccaatgcgataatcctaataccccttttctcttctatctcggtaaatctcaattcttagaacgagagacactttaccgaggccaatttcatttaatcttgaggacaagaacttttcaccagtagattgacattactactgacaagtaagatgtcatccatatatgtagaattagggaatgaactcccattctgtaactttgcacaaatgcaattgtcctctcattctctttaacccaaacattctttttggctcttcaactttaaatgctactgtccagggacttgctcaagtccattaatgacttttcaggtagcatccctcatgcacttttactatcatggcaaaacttttagcttatgccatgtaatcatttcataataatcccattggcgaatgtcgcctttactttcatctgatataactcagatcatggtgtgccactagcactcattgcaatctattcttctctttaagcaataatctttcgattcaagttgcgcttttcatatttacatattccctttaaagtcacatttcgtcttgtagaccctttacagcctattgttttggctctattaggaattatttctgagttccaaacattgttggtaatcagttattcttttgccaattagacgagcgagtgcctccatagcttcttcaaatgaggtgggattgtcctccaactgaatatcacaaatatagactttgtagtcatcagaaatatctgatttttttatttttttaagaccatttaggcctcagctattggcacttctttcatatggggctattgttgctctttattgccaagaggcaattgattctacaatctcctgtatcacaggattcttatttactttttctttgagggaccaacaacaggtaatgtatcagtcaaacaacatcaacatgtattgagctatttgtcgttcttgaatcattggagtaggaacacaatcccacttctcttcaagtcttaggtttctatatacatgctcccccagattactccatcttctgtaaagatggtgtatcttcaaactttctcaactttgtttgggtttattcttttagaactcatatggcaccttaagcaccatttctaaactatattcttttccagcatgaataccggttgactatgctatcttcctatcagaaccacaaaatgtccgcttagaaatttagccatttctttgctttaggggtatcgttattatgaccgtcgtactcccccgacgaccacattcatctttaatagatcactcttgccttcaatgcatagtatgcatttcattatctgaagtataggggagtatctttcttaattgatcccacatatctccccctcgaaatgttgcatgaacttttctgccacaatttcgaaaccatttagaactcttgtgattgaggaactttgatcactgcatccacatgattacatcatgcataattcgtatgggagtattttttactcatttcacttcaagaactcatacagaatcctttatcattggtacttttgcaagccacgctcgcatatcattcttatctttaggttcgtctgtaactttctattttccttaaactcattgagttcataatgattgtgcacataggatagcatattagctaatccatacttttctcttagtgtgggatacactaaaaccacatgagacgtcacaactttctcctgctatgcaggacaagctctatgccaactttaactcgccgtgcgagtatgcatttcagacttttcctgccatgtgggtgttatctcaaacttttcccgccatgcgggtaattccctcgaagggacataaatgccaggattggctcacattcaatcattaaattcagaaatgaatctgaaattctataacacacatgtttgatccaacgttggtcaaatcaaacatgcatattacttatcacaactcttaccataatgactgaaacaagaaaaaaaattcttatttatagagagtacataaaaggc

SEQ ID NO: 64008 - DNA, 1064 bp, Zea Mays
gttctattttatatcactgttgggcagaaatagaataaaacatcattcttctacattaattccacatcaccgttgggcagaaatggaaataacatactcaattatcttgaaaacatatgattactcctcaatcaaattctcccgttggttcgaaattaattagaagataatcatcatcattgcatcggaaacatgaaaaatacaattctctagtttaagagcattccttgatctttatctattctctgaaaaattgatcactttgatgcaaaatctatcaaagacttaaactttaactgtaaactcatcaaattttaatattgttatcatccacgttggtcagaaaataacaatatcataattaactttgaacaaatatctttcttctctaattaaatagaggttaaacataatctcaattctatgaataactgtgagcgaaaacaataaatattatgtttttccagaagcatttatttacttttctattatatgaagattatatccatgtttcaaaattaaattctcccgttggttcgaatttaataatgaaacaataactataaatacgcagcagaaactttactgaacaatttattcagaagcacaaaatttattatatattctctaatcaaattatcccgttggttcaaatttgagtagagattaaacattcataattcaacaaataattgcttctgaaaaaaacaaatataaaaactataacattctttctatttaacttggcctagaaacggctcaaaacaaggcctatcttggcccattagggttaaaccctattttcttttctttccttttctttcttttattttcttttcctttttttgattttatgcgcagggccatcccatgcacccgtgaggagcattgcatccgaccctccccgtggggtttttttcttttcctttttttctttatccagcacgccattcatcagttttcctttcgacgcatctttttccttctcgtttgcgcaacggccgccgtatcacccgccactcgggcgcgacgcgtgcgtgtggccagccgcgtcctctccgccg

SEQ ID NO: 64009 - DNA, 380 bp, Zea Mays
gttgtcattaattaccaaaacattaccaaaggggcctagatgattcacaatctccccctttttggtaattgatgacaacaccacattgtatataaaagagaagtttagtttctccaaatctctctcatacctaaggtataagatagatcttggagatgagttttataggacttatcttgatttgaagttctgtctgagagatagataaatcccaataaaaaaactcagaatgtaagaaaggctccccctaagtgtgtgcaggattatctgacgttgaagatataacacacataatatatttgagcttgatggagactttcctgcaaatatggttatcgaggcatacaagagatgattcatagagtgagcgcagcaattat

SEQ ID NO: 64010 - DNA, 257 bp, Zea Mays
gtctcatgtgacgttgtgtttgatgaaactaacggctctcaagtagagcaagttgatcttgatgagataggtaatgaagaggctccgtgcatagcgctaaggaacatgtccattggggatgtgtgtcctaaggaatccgaagagcctccaaatgcacaagatcaaccatcctcctccatgcaagcatctccaccaactcaaaatgaggatgaagctcaagttgatgaagttgaagatcaagcaattgagccacctca

SEQ ID NO: 64011 - DNA, 301 bp, Zea Mays
gggggagaaaatttcaaatcttgaaaatgctttaccaaatcttattcatttacctttgactatttgcaaaataacttagaaaagatttacaaaagatttttgcaaaaacaaaacatgtggtgcaagcgtggtccaaaatgttataagtaagaaacaatccttgcatatcttgtgaagtagttatattggctcaattccaagcaacctttgcacttatattatgcaaactagttcaattatgcacctctatatttgttttggcttgtgttggcatcaatcaccaaaaagggggagattgaaa

SEQ ID NO: 64012 - DNA, 558 bp, Zea Mays
ggcgtgtctgactctgctcagatgcgtcgtccgcatcgcagaaacaaaggagacagccgcggcggcggcgtcatccgcctgtggcggcctcgctaggccccctgcaccccgcgctcgcccacgccagacgtcaccaccgccccatcttacccctccctgctcctgctctctccgtcgggactccgagcagatcgaggccggagaggaggatgagaagaacacgccagataccaacgccgcacaccgtgctgcccctggcgtggagccgcgagcaggcccagggtcaccgaagcctggtgttgagcaccgtttgtggcactcggcacgaccggacggttcgacctgcggacggtccgtccataggcgcggacggtccgcgataggattagatcagcctgttaaaactcctatctcctcgcgtgtttatccctctaatcacgcgggagctgttggagaacgccttgtaacgggtccagacctcctccctttatatagatgaagggttacggtcgattgagcgacacaatcgaacccaaatcaatatattaccagttcttt

SEQ ID NO: 64013 - DNA, 1116 bp, Zea Mays
gtttgttcttatgataccttcttgatttggttctttgattgagtgatgtatttgtggggttatatccacaataaaacctagtatagtaggtacattctagcatgtaccaacatagctgtagtatagtaatgataggtaggtggcactctaatcaactgagctattttgacctaaaaagccatgtgttgtgtaccgagctatctatcttatctacaaatctctcttaccctatgtctctaacccagatggtcaataccaggacagggggaggagttgatctgcctgcacgcatacgtcgaagaagggcagtaattaattcagaatcgcagatgaatcccccaaatcccccacctgccggaatggaagcgttcctaactgcccaaacgtagttactgcagcagatggccaatacaatggcccatatgcaggctcaactcaacaacaatcagcagcaccagcaccaaccacctcccagagacaagcatagagagttcatgagtcacaagcctccaaccttttccagctccctagacccattgcaagctgacgactggctgaaatctgtggagaagatgctcaacattgcccaatgcactaacagggaaaaggtgctatatgcatcgggtcgcctcactggccccgctgctgattggtgggatgcgtattgcgcagcacataccgccactgacaccatcacttgggcggaattctcgaccaactttagaagctatcacatccccgccggtttaatgaagatcaagaagaaggagtttctctcactcaggcaaggagggatgtcagtaagcgagtatagggacaagttcattcaactgtccagatatgcccccgaggaagttgccgacgatgagaagaagcaagagttatttctagagggacttattgggccattgcagtatcagctcatgtctcactcattcccatctttgcagaaacttctggacaaagccatagctcttgaacacaaacgtgttcagctaggcgagatgaagaggaaggctatcacctagggtcaaacaggctgcagcagccgccctcgctacactcagcctcagggtaccctagtacgttcaggaggagggcagcagtcatatcaac

SEQ ID NO: 64014 - DNA, 237 bp, Zea Mays
ctcattcccatcctgcttcacacacgccaagaatccaccacaatcccatccatcacagccacacaccacatacacacaccaagtcgcatgaatagtatatgtatagggtagtagcatgatatcaagtaggagcaatgatatcaacaaaggcttatcaatcaaacggcatgaatatcaaaaggcgagacattcatgaaggctaggaatgagatctcgggtttttaggggtctcactcc

SEQ ID NO: 64015 - DNA, 465 bp, Zea Mays
agaaaatgaaaaatttaaatttgctagaagtatgctctataatgggagacgccctggcatcaaggatggcattggcttccaaaggagagacaatgtcaaacttagtgcccctcctaaaagattgtctaattttgtaaagggcaaggctcccatgcctcaggataacgagggttacattttgtaccctgccggttatcccgagagcaagattaggaaaattcactctaggaagtctcactccggcccaaatcatgcttttatgtataagggtgagacatctagttctaggcaaccaacccatgccaagttgcctaagaaaactcctaatgcatcaaatgatcgtaatatttcatttaaaacgtttgatgcatcttatgttttgactaacaaatccggcaaggtagttgccaagtatgttgggggcaagcacaagggctccaagacttgtgtttgggtacccaaagt

SEQ ID NO: 64016 - DNA, 646 bp, Zea Mays
aaagggggatatcgagatttcttacattaatactaaagatcaattagccgatatctttaccaagccacttgatgaacaaacctttaccaaacttaggcatgagctcaatattcttgattctagaaatttcttttgctaacttgcacacaaagctcatgaatatacctttgatcatgtctctttaatatgctatgactaatgtgttttcaagtctatttcaaaccaagtcataggtgtattgaaagggaattggagtcttcggcgaagacaaaggcttccactccactccactactcatccttcgccggcactccaagccgctctctatccttgggggagaaagagcaaagcaaaaggactcctactttggtataatcttctctcttttatttatgaccaaaggaggagaaattagctaaagggctctaatgattccgtttttggcgattcatgccaaagggggagagagattgagcccaaagcaaaaggaccgcaccaccacccggtttttaaaatataattttcaaattgtcaaattggtatcttcttgagttcaaaagggaagaaagtagtatttcaaaatcatatctcaaaaccctcttgaacactaagaggaggatttcacttagggggagttttgtttaag

SEQ ID NO: 64017 - DNA, 405 bp, Zea Mays
gttcggtcggggcttgttaaagcagccgactgaactcaaccgatagagatccggttgactctggtttgaccgatcttgagtttgtcgttttgtgggtatctcatagattgagtttttcagaaaatccgatctgtacacccaatgggtgcgcccaatggttgtgtatgccatcttgtctgcagaatagttacctgaagtgacggggcataataatgcgcctaagcggttgatttactggtctctggtgccgtgttacgccaacggatgacaaaggcatgcagtttcttggaaatttaaacggctcttgaaggcttgcgactgttcgtcgtacggatgagagccgaaagggcaccctttggcttctttaaataaaccgtccgtctgcggcgtacttctgcactcgcc

SEQ ID NO: 64018 - DNA, 537 bp, Zea Mays
acgacagcaagggcggcggcggcgaggacggcgacaaaggtgacggtggcgagggtggcgacggcaatggtggcagcagcaagggaagcaacagcggcgggggcggcagcgacgacgacaagggcaagggcagcaatggcggtggcaaggcgccaccagcttagatatgtagcgtagttgtaggggtagtaggcaggtgtgatggtaggggtagggggcttttgctaatgaactgattctgcttaatgtaatgatacccctttaactaaagttgatgactccctcctttgaattctgagtctccagtttatgtttcatgtttgaagtcttgttggtattgaactccctattttgctcagtttttgtgtccttgctatttgattctagtgacttatctctctcggccgacctttactccgaagcaaattctctgtccgactccacttgactgacttatcatcctttcattcaatctgaaaaactgctccccttgtgctgatgctgtgataggtctggggtatacaggttctacgcctg

SEQ ID NO: 64019 - DNA, 399 bp, Zea Mays
cctctcctgtacagggtgtcacctaagactatgtagtgggccgactgcctcacgagtcgctcagcggccgacttatcatccggctcttcttcatctctgacgtacctgataatcggcgtcctccagtcgtctgggtcttgctctgcaggtggttttgcttgttctattgctttacattcttctctgggacctgatgaaatgctgggttgctgtacttcctgaacaaagacatctagtggtgcctgagcctggcttgatcctagcttggataatgcgtcagctgccatgttgcggtccctccctacatggtggatctccaagccttcaaacttgccttcaatctttctgacggttgcacagtagtcactcatggattccatagagcagtcccaatccttg

SEQ ID NO: 64020 - DNA, 357 bp, Zea Mays
ctgaaatttacaaagttaaacacaactacaagccggggttagcgttagtaataaagaaacgagtccgcgagagagggcgcaaaacaaatcacaagcaaatgaggagtgtgacacacggatttgttttaccgaggttcggttcttgcaaacctactccccgttgaggaggccacaaaggccgggtctctttcaacccttccctctctcaaacgatccctcggaccgagtgagcttctcttctcaaatcaaagccgggaacaaagcttccccgcaagggccaccacacaattggtgcctcttgctttgattacaatggagttttgatcacaagaacaagtgagaaagaaaagaagcaat

SEQ ID NO: 64021 - DNA, 7056 bp, Zea Mays
agagaggatagagggaagaagtaaatcgcaaagtattaatcaacacaaatgaacacaacgatttgtttcctgaggttcaaccccaaaggatgtacgtccccgttgaggaggctacgtaggtcgggtctctttcaacccttccctctctcaaacggccacggagaccggttgagttttttccactaatcacaaggacactaagtcctgcaaggacctccacacgaagtattcggattctattgcctcgctttacaacaattgaaaatggggaagtgagagcaagagtgaaaatccaaatcaagagcacaagagaatgcaacactctagagcataagcgcttaagcttctaatcactcaaatcaatcgaatccgcgcttgtatggctttggagacttgggagttattgcacttgaagtatacgactttgtggtagctcttatgtctttaatgtgctggttgggggtatttatagccctcaaccactcaaatggccgttggagagaactgccaaaagctggctgtcaggtggtgcaccggacactgaacagtgtctgtccggtgcacaccggacactacgcagtgcggtcgccagaggccgttctgacgggcagaagccattctgatcgcttgcaggtgactgttgctgctgtggtcagactgtctggtgcacaccggacagtccggcgctcttcccctaaaaattcccgaagctgctgagttcctggggtcgccgctataattgcgaccggacagtccggtgccttcctctggcgctggcggcttctctggtgcttctcgggttggtccctatgcccccactggacagtctggtgcccctctggtagcaagctgaaattcttcttttcttcaaactttcttcaaattgttttggctgtttttgaggatgttcctagggcttagacaaacatatttgctaactatccaactagtctaagtcccaattcttgaactttttccattctccaacttgtaattcttattttgctcaaactagctccaaaagaacgattctttaaatttgagctatccaaccagtcttgatgtatcaaaaaggttcctaggggtgtatgtaacttatccaatgtgtgaaactaagtgatctttatgttttctaagatttacccctctatggttggttttgagctatttctgtcttagaaccgagttgagtggacttatgcaattgtgaattaaaaactaggcaaaccagttagtctatttggttgtgatggtcatcaagcaccaaaatcatttatagaaaatggttaaggccatttccctttcaatctcccccttttaagtgattgatgccaacatcaaccaaagcaaatataaagtgcagaaatgtaataagtttgcatttttgacagatgtgcataagttacttgaattgaaagcagttctaagtacatgagtatgttttgacatacttaaaattttggaccacatatgcaccacttagcttgtttttgcaaatcttttggaaattcttttcaaattcatttgcatttggcctaaggtatagaaatagatttttcaaagatatttttaagatttgaaagattctcccccctttttttaaatgcttttcctttggccaaatagaagatcccctgaataagttctccccctttggcataaatagtttttctcctcttagctgtcaagagggttttctcagaaaagtaccaatttggaagacttaaaagtttttgaaaacagggtggtggtgcggtccttttgctttggcctattgatttctccccctttagcattaatcgccaaaaacgaagaaacctggaggcctttacaagaaagatatgaatttaagtacatgagttgggcaaagaggtctttgataccaacggagatgcagtggaagctttgcctttgccatcaactccatttccctttcaatctaagactaaggatggaaatactcttggaagcacattagtcttaactttggcacaagaagaaataagaagtatgcatttgtaccaaatgaaagagatatgccatgatcaaaggtattaaatgagcaaagtgtgcaatatttcaatcaaggttccgagaatcaagtacatttagttcactcctaagaagaaataagaagtatgcatttgtaccaaatgaaagagatatgccatgatcaaaggtattaaatgagcaaagtgtgtaatatttcaatcaaggttccgagaatcaagtacatttagttcactcctaagcttataaaacctcttttcatccaggggtttggtaaagatatcggctagctggtttagggtgctaacatggtcaattgcgatatctcccctttgttggtgatctctcaggaagtgataccggatgtctatgtgctttgtgtggctgtgttcagcaggattatccgccatgcggattgcactctcattgtcacataggagggggactttactcaacttgtagccatagtccctgagggtttgtctcatccagagtaattgtgcacaacaatgtcccgcaacaatgtactcggcctcggtagtggatagagctactgagttttgtttctttgaagcccaagacactagggatctccccagaaactgacaagtccctgatgtactctttctatcaaccttacatccggcataatcggcatctaaatacccgattagatcaaaggtagatcccttggagtaccatagcccaaagttaggagtatgaactaaatatctcataattcttttcacggcccttaggtggcattccttagggtgggcttggaatcttgcacacatgcatacagcaagcataatatccgatcgtgaagcacataagtaaagtaaagatcctatcatcgatcggtaaaccttttgatctactgatttagctcccatgtcgaggtcgagatgtccatttgtccccataggagtcttgatgggcttgacatccttcatcccaaacttcttgagtatgtcttgagtgtacttcgtttgcctgatgaagatgccctcttggagttgcttgatttgaaatccaaggaaatactttaactcccccatcatggacatctcaaatttctataccataattctactaaactcttcacaagatgacttgttaatagacccaaagataatatgatcaacataaatttggcatataaacaagtctttgtcaatagttttagtgaagagagtaggatctgctttgccaactttgaagccattagcaataagaaagtctctcaggcattcataccatgctcttggggcttgcttgagcccatagagcgcctttgagagcttataaacatgtgaaggatactggctatcttcaaagccggggggttgctcaacatacacttcttccttgatagggccattgaggaaagcactcttcacgtccatttgatacaacttaaagccatggtaagtagcataggcaagtaatatacgaattgactcaagcctagctacaggtgcataagtttcatcaaaattcaaaccttcgacttgtgaatatcccttggcaacaagtcgggctttgttcctagtcaccacaccatgctcatcttgtttgttgcggaatacccacttggtacctacaacattttggttaggacatggaactaagtgccatacttcattccttgtgaagttgttgagttcctcttgcattgccaccacctagtctagatctctaaagtgcgtcctcaatcctgtatggctcaatacaagacacaaaagagtaatgttcacagaaatgagcaactcgagagcgagtggttacccccttttgaatatcaccaaggatggagtcgacggggtggtctcgttgaattgcttgatagactcttgggtgaggtggtctttgagcctgaatctcttgctcatcctccttgtcttggtcatcttcatctcccccttgatcaatgtcctcttcttgaggtggctcgttgtcttaaacttgatcttcattttcttgagccagatcctcatcttgagttggtggagaagcttgtatggaggatgatggttgatcttgtgcttgtggaggctcctcgggctcttgtgggcacacatctccaatggaaatgttcctaagcgcgatgcatgggtcctcctcatcatctagctcatcaagatcaaattgctctacttgagagccattagtctcatcaaacacaatgtcgcgagaaacttcaactaatcctgtggacttgttgaagactctatacgaccttgtgtttgagtcataaccaagtaaaaagccttctacagctttaggagcaaatttagaacttctacctctcttaacaagaataaagcacttgctcccaaaaactcgaaagtaagaaacattgggctttttatcggtgaggagttcatatgatgtcttcttgaggattcggtgaaggtagagtcggttaatagcgtagcaggcggtgttaaccgcctccgcccaaaaccgatccgatgtcttgtattcatcaagcatggttctcgccatatccaagagagttctattctttctctccacaacaccgttttgctgaggtgtgtagggagaagagaactcatgcttgatcccctcatcctcaaggaatccttcaatttgagagttcttgaactccgtcccattatcgcttcttatcttcttgattctcatttcgaactcattttgagcccgtctcaagaatttcttcaaggtctcctaggtttgtgatttttcctgcaaaaagaacacccaagtgaagcgagaatagtcatcaacaaaaacaagacaatacttactcctgccgatgcttatgtaagcgaccgagccgaatagatccatgtggagtagcttaagtggtctctcggtcgtcatgatgttcttatgtggatgacaaactccaacctgcttccctgcttggcatgcactacaagtcctgtctttctcaaaatgaacatttgttagtcctaaaatgtgttcccctttagtagtttgtgaagattcttcattctaacatgggcaagtcagtgatgccagagccaacccatattagtcttagcaatcaagcaagtgtctagtccagctttgtcatcattaaaatcaactaaatatagctggccacttaacactcccttaaaagctagtgaatcatcactccttctaaagatggtaacatcaacatcagtaaataaacagttgtagtccattttgcataattgaggtacagaaagcaagttgtagcctagagattctacaagaaatacattagaaatagaatggtcaggtgatatagcaattttacccaatcctttgaccaaaccttgattcccatccccgaatgtgattgctttttggggatgttcatttctctcatatgaggagaacatcttcttctccccagtccattttgttcctctggatgcataaacctacaacataaaatttgggccttgtccttaggtacccaaatggtcttgggtcctttcacattagaaacaagcaccttgggtacccagacacaagtctttggactcttgtgtctgcccccaacatatttggcaactactttgcctgatttgttagtaagcacaaaagatgcatcaaaagtcttaaaagataacttagactcatgagatgcatcaacaatcttctttttaggcattttatcaattttagcatgtgaagtacgatgcctagagctagaagcttcattcttgtaaatataagcatgatgagcaacagaatgagattgtctagcatgaattcttctaatcttatactcaggatagttctcgggatataaaatgtaaccttctctatcttgagccataggagccttgcccttaacaaatgagaaattttgttttcataggcattaagcttggtgttgtcttgactcccatgttggaagccaacaccatccttaatgtcagggcatctcccattataaagcatactacgagcaaatttaaatttctcattttcaagttcatgctcggcaattttagcatctaacttagctatgtgatcattttggtttttaatcaaagcaaggtgatcactaatagcatcaacatcaacatctttacatctagtgcaaatagtaacatgctcaatagtagatgtagaagcagagcaagcattcaattctctaatcttagcaatcaaatttacattttcagatttaagacaagaaattgaatcattgcatgtttttagctcattagtcaagtttttgcatttttccttctcatgagctaaggtcttctctaatttgacatatttatcatgttccttagtgagaagttcttggcattccaagacatcattcttttcattaaccgaggttactaattcattgattttatcaatttgtttttgagaaaggcctttgaagagcaaagcaaagttttcttcatcatcactagaatcaccctcatcatcggaagtagtatacttggcgtggttctaggtgttaccgtccttttgccctccttgtccatgaggcacttgttgccgatgttggggaagagaagtcccttgttgacgaggatgttgaaagggaaatgtgcccttggaccatttctaagtgttttggtgattaagtgcccaacacatcactttgatctaacatgccttctatgagtgtaagcacaggaataaagaaagcaaattgaagtgatcaagtccaaatgaaatgaattggaggaccaaagtgcaacttgtttaaagccaagatggaaatatggtttgagtgttcgataagttgcatattccctcgcctttgtatttagcactttgttttgatcactaaccctgttatgcaaagaaagtgcatattggacttaaaatggaacatattgcaaaacctttggagaaatggataaaggtatgtctctagcacttagtcaattgttttgattgctaactatgttcatctaagtgctaggtaactcaacaagtcaagcaaaattgaagaaaacaagtttggcaaaggttggccaaacttggccaagtctgggcagcaccggactgtccggtgtgcaccgg

SEQ ID NO: 64022 - DNA, 7766 bp, Zea Mays
ctccgcgaccacgccttttgattcattagagagagaattgagcgcgttcttgagctgtgactctgtcgttttgtttcttgcgctctcttcttgttttgtgtgcgtgttgttgctgtgattgtgctcttgtgtgcgttgctattccctcccttactcttgtgttgatcgagatcatttgtgtaagggtgagagactccaatttgtggagattcctcacaaacgggattatactataaggaagataaccgtggtactcaagtttgatctttggatcacttgagaggggttgagtgcaacccttgtccaaaggaggtctccataaacgtggatgtaggcattggccgaaccacgggataaatcgctttgtctcttttgtccatttactttattgagattattgttcttcctagctctttacttcactttaatattgctctaagtttaatactcaccttgtgagagcaattaagtaaagaagtcctctttctcctctcacttttctcattcgaacttagtttaattttcactaatccatatttggaccaagtttgttttgtttagagctgtttttataggatcacctatttacccccctctaggtgctctcaattggtatcagagccgttctcttcatcaagggactaaccgcccgaagagatggatcctaaaggcaaggggaaggtgaccgaggagacggagaaggagaccgtcaacaacgagccaaagggtgaagaactcatcgactcaggctcaaagaagaaggacaggaagaagaagaggcgcatcaagaagattgtctactacgatagcgacgactcttcttcttcaccaaaggaggacgacgactcttcctccaaacaaaagacggttaaacaaaattattctcatatgtcttttgattactcccgtattccgtacaattcaaatgctaattttttgcatattcctcttggaaaaccccctcattttgatggggatgattatgcttgttggagccataaaatgcgtcatcatcttatttgtcttcatcctagcatttgggaagtagtagagaatgggatgcattttgatagtagtgataatgctaatttcattcatgagcaaattcacaaaaatgcccaagctacttctgtgcttctagcatctctatgcagggatgaatacaacaaagtgagtggcttggacaatgccaaggagatatgggacaccctcaagctcgctcatgagggaaataccgccacaaatcaccaagatggagttggtggaaggagagctggggaggttcgccatgaagaggggtgaagagccaacagacacatacaacaggctcaagaccctggtgaacaagatccgaagctatgggagtacaagatggaaggatcatgacgtcgtgcggctaatgctaaggtcatttaccgttattgatcctaaccttgtaaaccttattcgtgagaaccctaggtacaccaaaatgacgcccgaagaagtactcgaaaaattcgtaagcgggtgcatgatggcgaaggaggcgagatacgtcgacgacatcgccaatggacgtcttccacaatatgagccgcaacccgtggctctcaaggcgacggcaagcaaggaggcgctccccgacaaggtggcgcaaatcgaggcgaccgaccttaatgaggaggagacggcagcgcttcaagaccgtgttgaagagacgcaaggactaccccaccaagagcaaatcaaggggcaagcgtacatgcttcaagtgcggtaagtccggtcattttattgctcaatgtcccgataatgaaaatgaccaggaacaagagaagaaagggaagaaggagaagaagaagttctacaagagcaagaagggcgaggagcatcttggaaaggaatgggactcggacggctcgtcatccgactccgacgacgagggactcgccgcctccaccttcaacaagtcttctctcttccccaacgagcgacacacatgcctcatggctaaggagaagaaggtacatactcgtgatactccaaaatatacttcttccagtgatgactgatgaggactccgatgatgatgttgttgattatagagatcttttcaaggatttagaaagatctaaagttgataaaatcaatgaattgattgatgctattaatgaaatggataatttgttagaaaagcaagaggatattctttatgagaaacatgataagttggtcaatgttgaaaaatcccttgctatacaaatcaagaagaatgaaatgcttgcttttgagttatcttcttgccatgattctatttctagtctcaagagtttaaatgttgatttaaatgctagaatagagaaattaaatgttgctagttcatctttggagcatgtatctatttgcaatagatgtaaggattttgatgttgatgcttgcaataatcatgcttctactatttccaagttgaatgatgaaattgccaatcttcacgctcaacttaaaatttgcaaagatgaatgtgataaaataaaatttgctagggatgcctacaccattggtagacatccctccattaaggatggacttggtttccaaaagggaaccaaggacacaaagagccatagggcccccagcttcattaaggagaaggggaaagcgcctatggctagtagctcgcattcctttcatgagaagaagaatcatgcctatttgtatactcatgttaagaatgtatctcatgttgctcatcatgatgcttgtaatgatcatgctgtttcacctacacgtcatgatgctgtttttgctcctttcgccatgaatgcttcttctagtagacctcatgctcatggtaggagtagacctaggcgacgtgcttttaatgttgtttctcatgcgactaggaacacatctcatagtccaagcatgctttaccatacttatgatacctcttatgtgcttcattgcaaatatggtaaagtatgtgctaaaaatgtgggacctaaatgcaagggaggtaagacttgcatttgggtaccaaaaacctttgtgactaaccttgtaggacccaacaagagttgggtacctaaatcccaagcctaaattgccttgcaggtttatgcatccggggcctcaagctggatcgtcgatagtggatgcacaaaccacatgacgggggagaagaagatgttcacctcctacgtcaagaacaaggattcccaagacatgatcatctttggagatgggaaccaaggcaaagtcaaaggtttgggtaaaatagcgattactatcgagcattccatttccaatgtgtttttgatagaatcgcttagttataatttgctttctgtcagtcaattatgtcatatgggctataattgtctttttaccaatatagatgtatctgtctttagaagaagtgatggttcattagcatttaaaggtgtattagacggcaagctctatttagtttattttactaaagagaatgccgacctagatgcatgtttaattgctaaaaccaacttgggctggctctggcatcgccgtctagcacatgttggaatgaagaaccttcataagcttctaaagggagaacatgtgttaggactaaccgatgtatgttttgagaaagacggaccttgtgcagcgtgccaagcagggaagcaagtaggaacaagtcatccaagcaagaacgtgatgacaacatcaagaccattggagcttcttcatatggatctcttcggacccgttgcttaccttagcatcgggggaagtaagtatggtcttgtaattgttgatgacttttcccgcttcacttgggtattctttttacaggataaatccgaaacccaaggcactttaaagcgcttcctaaggcgagctcaaaatgagttcgagctcaaggtgaagaagattaggagcgacaatggatcggaattcaaaaaccttcaagtagaagaatatcttgaggaggagggcatcaagcatgagttctccgctccctacactccacaacaaaatggtgtagtggagaggaagaaccggacacccatcgatatggcaaggacgatgctgggggaatacaagacgctggagcggttttggtcggaagccgtgaatacggcttgccatgccataaaccgcctctaccttcatcgtctcctcaagaagacggcatacgagctcctaaccggtaacaaacccaatgtttcatattttcgtgtatttgggagcaaatgctacattattgttaagagaggtagacattcaaagtttgctcccaaagccgtagaagggtttttactaggttatgattcaaatacaaaggcatatagggtcttcaacaaatcttcgggtttagttgaagtcactagtgacgttgtatttgatgagactaatggctctccaagagagcaagttgatcttgatgatgtagatgagaatgaagttccaacggctgtaatgaggactatggcgataggtgatgtgcgaccgcaggaacaacaagaacaggatcaaccttcttcctcaaccatggtggaacccccaactcaagatgaggaacaggtacctcaagatgaaggcatggatcaagggggagcacatgaagaaaaggataaggaggaagaagaagtaccccaggcacctccaactcaagtccgagccaccattcaaaagaatcatccggtggatcaaatcctaggtgacatcagcaagggagtaacaactcattcacgtattgctaacttttgtgagcactactcctttgtttcttctattgagcctttcagggtagaagaagccttgcaggatccggactgggtgatggccatgcaggaggagctcaacaacttcaagagaaatgaagtgtggagtttggtgccacgtccgaagcaaaacgttgtgggaaccaagtgggtgttccgcaacaaacaagacgagtacggggcggtgacaagaaacaaggctcgacttgtggcaaagggatatgcccaagtcgcaggtttggattttgaggagacttttgctcctgtagctaggcttgagtctattcgcattttattggcctatgctactcaccactcttttaagttgtttcaaatggacgtaaagagcgctttcctcaacgggccaatcaaggaggaggtgtacgtagagcaaccccctggcttcgaggatgacaggtatctcgaccatgtgtacacgctctctaaggcgctctatgggcttaagcaagcaccaagagcatggtatgaatgccttagagatttccttatttctaatgctttcaaggtcgggaaagctgatccaactctttttactaagacttgcaatggtgatttatttgtgtgccaaatatatgtcgatgacataatatttggttctactaatcaaaagtcttgtgaagagtttagcagggtgatgcaatagaaattcaagatgtccatgatgggagaattaacatacttcctcggattttaagtaaagcagcataaagacgggactttcatctctcaaatgaagtacacacaagacttgctcaagaagtttgggatgaaagacgcaaagcccgctaaaatgccgatgggaaccgacagacatttggacctcgacaagggaggtaagtccgttgatcaaaaggcattccggtctatgataggttctttgctttatctttgtgctagtagaccgcatataatgcttagcgtatgcatgtgtgctagatttcaatctgaacccaaggaatgtcaccttgtggctgtgaagcgtattcttagatatttagttcatacgccttgcttcgggatctggtatcctaaggggtctacctttgacttgattggatattcagattccgactatgccggatgcaaggttgattggaagagcacatcagggacttgtcagtttctgggaaggcccctggtgtcttggagctcaaagaaacaaacatccgtcgccctatccaccgccgaggccgagtatgttgctgcgggtcagtgttgcgcgcaactactttggatgaggcaaaccctccgggactttggctacaatctgagcaaagtcccactcctatgtgataatgagagtgcaatccgcttggcggataattccgttgaacacagccgcactaagcacatagacatccggcatcactttttgagagaccaccagcaaaggggagatatcgatgtttgccatattagcaccgaccaccagctagccgatatcttcaccaagcctttagatgagaaaaggttttgcaggctgcgtagtgagctaaatgtcttagattcgcggaacttggattgatctatagcatacatgtgtttttatcatatttttgagctttattgcttatttttgtgctcaagttgttgaatgtcatccccggacctcacaagtccttgtgcaaatgatgcatatgtttagggggaggatatgctacaacttgaccctttgagactaatgtgtttgttgagatatgatgatgtagtctcaaaggtgcattgaaagggatcatgtgaacttgaacaaagaaaaatgcttccactgcattacggtatcaatgtattttgttccaagttgcccttatgtttttctcattgctttcgatgtttatttgcaatttttggtaaggcaatggggttaagaggccactaagttctccgttttggtgcttaatgccaaagggggagaaattaaggccaaagcaactggatcaactgccacttgtgaatttcaaattttttgttttttgaacttgtctatttgatcaaaaccctcttgatagcaaagaggagctctctaattataaaactattatcttttgggggagaaagctttttaagagaaaaagggggagctttgagtgtttgatcaaatctagtctttgaaaatggtttgttttgcaaaaataaagtgatttgacttagaagtaagaaaaatgaatttgttttgcaaaaataaatcaagtggtggcaaaatgatccaaatatgccaaatcctgtgatatttcaagtggttttaagtttgacttcaatttgcacttttttggctctcatttggttttgttagtgcattttgatttgcttttgatgtgttggcataaatcaccaaaaagggggagattgaaagggaaatgtgcccttgggccatttctaagtgttttggtgattaagtgcccaacacatcactttgatctaacatgccttctatgagtgtaagcacaggaataaagaaagcaaattgaagtgatcaagtccaaatgaaatgaattggaggaccaaagtgcaacttgttcaaagccaagatggaaatatggtttgagtgtttgataagttgcatattccctcgcctttgtatttagcactttgttttgatcactaaccctgttatgcaaagaaagtgcatattggacttgaaatggagcatattgcaaaacctttagagaaatggataaaggtatgtctctagcacttagtcaattgttttgattgctaactatgttcatctaagtgctaggtaactcaacaagtcaagcaaaattgaagaaaacaagtttggcaaaggttggccaaacttggccaagtctgggcagcaccggactgtccggtgtgcaccggactgtccggtgtgcaccggactgtccggtgccctgccctagtcaatggtcaactcgagggtcgactcagcggccgtactggccactctcgggaaaagagccaggcgacgtggctcaaattcaccggactgtccggtgagccagcagccaacggtcg

SEQ ID NO: 64023 - DNA, 917 bp, Zea Mays
agatcaagaaaggtccaatgaagcgaggggacaactttcctttaactttaaatctccccataccccggagtggtgacaccttgaagtacacataatctcctatctcaaattccagtggtctttttctattatcagcatagctcttttgtctggactgtgcaattcttaaattttctcttatcatttgtacttgctcttctgcctcttgaatcaattcaggcccaaagaactatcttcctctagtctgatcccaatatagaggagtcctgcacttcctgctatatagagccttgaacgatgacatcttcggactggcctagtaactattattatatgagaactcagcataaggtagattcttatcccaactactaccatgctgaagggcacaagctctcaacatgtcctccaatacttgattagtcctttccgtctgtccatcagtctgagggtgatagattgcactaaaattcaacttcgtatccatattctcatgaaaacttttccaaaatctggaggtaaactgtgatcctctattcgaaacgatcttcttcggtacaccgtgtagagacataatctgagccatatatactctgccaattgagatcccttataagtagtcttgaccagaatgaaatgagcaactttggtcaatctatccacaatcacccatatatcatcatatcctttctgggtgcgaggcaatccaataataaaatccttaccaatctcttcccacttccactcgggtatcttaaatgggtacaatagtccagctagcctctggtgttcagccttaactctttgacacacatcgcacatagccacatgtgcagccatatctctcttcaattcataccaccaatacttctgcttcaaattctgatacatcttggtactactatgatgaataaaat

SEQ ID NO: 64024 - DNA, 720 bp, Zea Mays
tgatcattctgctatcggccgctctcctttgaggtgctctacggttacaaaccaaagccttttgggattatagctctagattcagtcacagcacctgatctccaatcctggttacaggatcgataggttatgactgacttgattcattagcatctggtccgttctcgtatccatatgaagaagcaagccgacaggaaaagatctgaacgctagtttcaagtgggtgataacgtgttagttaaactgcagccgtatgttcaagcttccttagcacgtcgctccaacaaaaaattggccttcaaattctttggaccatatgaaatatagcttcggattggcacagtggcttatcggctgcagcttccaacatcttttagcatccacccagtctttcatgtctcccagttgaaaccctttgtctcatcgagctcccaggtaccattgtcacttcttgatgatttgacattaccccattttctagaacacatgctatagacacatatcacctccaagaactccctgtcggtgcaacaaggactcattcagtggtcacaatggccgccggaattggcaaattgggaagatcttaccagcctcaagcaagcttttccttttgcgcctgcttgtggacaagcaggccttcaagaatgggagaatgttagtactgctgaaccagtcgcacagcaagaggatgaaggacaacagcagcattccaatgag

SEQ ID NO: 64025 - DNA, 431 bp, Zea Mays
atccctctaagttgtcctcatgatgtatctttctgttcctctattcttctacttcctcacgtctccttttgctcctcagatccctactcctcctaacacaaagatttttagtaaaatccactcgacagggagggagggcattggccacggagagggagaccattgaaacagcagtgaaaggaaaatggaccctagccttgcgctagtgaaattttggtggtttaaatgacaatactaaccaatgggactaatttgtttgctagaatatttgttttaagttctacggatgcaagtgattgacttggggaacaaaacctcaaaggagcattcaagggaacaagaaaagaacttgaagaccaaccaaaggacctaagacatcaaaagaaagatggtggcgacaacagacgaagataggatgacggccaggcaaa

SEQ ID NO: 64026 - DNA, 235 bp, Zea Mays
atttgactcgggtgaatagggaggagtcctctcatgaataatgccatgttctgcacagaaatcgtcaaagactttgggaaagaactcgccaccacgatctgatctaagacgtttgatctttctctctagttggttctcaacttcagccttatagattttaaagtagtctaaagcctcatctttagtttttagcaagtatacatagcaaaatctagacgcatcatcaatcaatgtc

SEQ ID NO: 64027 - DNA, 1072 bp, Zea Mays
ggacatcccccggtgttccatcacactgctgaccctatggaggcagatgattggttgcgtgctgtggaaaagcaattgaacatagcacaatgcaacgacctagaaaaggtactatatgcttcaggccaacttcaagggccagctcagcaatggtgggagtcctatcagtatggatgaccccaaggtgcacccgagatcacctggaaggaattctgtgataatttcaggtcctatcacatccctgaaggattggtggaactgaaacaggaagagttcggggcattgaagcaggggacaatgatggtgggagaatatcgtgatagattcgtccagctgtcacgatatgctccgaatgaagttgctaacgatgctaacaagcaatgtcgttttctgaaaggactttatgatggactctagttgcaactgatgacaaacacttatcccaactttgaagagctagtgaatcgcgctattgtgattgacaataagcgtagggaaatggaagccaggaagaggagacttcaaggacaagcttcaggaagcaacacccgtcagcgtgcttacccccagcaaggttttcagcagaggaaccagggtccacccaggcaatggaattagggtcagtacccacagcggaacccgaactagccgtgccctcaattttagcaacagaatggcagttagcaacgtcctcagcagcagccacagcaggctagcaaccagacatctcatcaaggaccatccaacaatgcttcgacgaagagagaaacacctaacaatttcaatgtgtgtttcagctgtggagagcctggacactatgctaataactgtccaaaaaagcagaatcggcagattccgcagaaccagaatgtcaatcagaaaccttatgccaggccacccaacagtggaagggtgaatcacgtgtccacggatacagcccaggatgcaccggaagttatgctgggtacgttcagtgtcaactcccactctgctactgttcttttcgattctggcgcatcgcattctttcatttctcaagcttttgttagaatgcatagcatttcattgtgtg

SEQ ID NO: 64028 - DNA, 190 bp, Zea Mays
cttgcattccatgctggagttctatgtgtgcatttagttgaatttaaaagctagaaatcaaatctgaaattagatttgaaaacagaattaaaaataaaaagagaaaacataaaatagaaaaaaaggaaaaaaaaagacaaaaaccctcctgggccgaatccccgccttcggcccagctctttcacctttc

SEQ ID NO: 64029 - DNA, 284 bp, Zea Mays
cttaatccatatgaaaccttggctctctcgtgacgctccaaccctacgcgtgcatgtagctctgcgctctacgctatgacatccggactgacggggaccatgtgcttaaacgtaacaggctaactacctggggaaattacatggcctaacaagatcaagaaacgaaaaattttatcactcattcgtatataaaattgtcaacgtctattttctccgatctcttttactaaaacttgcacagtcttcagtgataatttctagcagctcctaactgttttttctag

SEQ ID NO: 64030 - DNA, 277 bp, Zea Mays
aaagaagggaagtagcagcacggtcactacacccttaaataattgtaccactgcttagtaatgatgttaaacaggggttcaagtctaggggattaatttgttctagccttcatggtagtcgaatttgcttttgggttggcagaatttcatttttttattttggtcatgaatgttcattctacctttgcattctgattatactatgtggactatctttcttttacattatgtataaactttatgttcctcccgttatgctactttcaagggaggtgct

SEQ ID NO: 64031 - DNA, 164 bp, Zea Mays
ttacaattcatcgtctacgggagttctgccactttatacgctaggtaagtgctcaggcccaccgacagggatacgtacgtgtgtatggacatctatgccctcctacctctctctttctctccagaccgcatcggcgaccctgctttctcgtccccatctccgac

SEQ ID NO: 64032 - DNA, 707 bp, Zea Mays
aatcaacggttcctctcgtactaggttgaattactatcgcgacgcggtcatcagtagggtaaaactaacctgtctcacgacggtctaaccccagctcacgttccctattggtgggtgaacaatccaacacttggtgaattctgcttcacaatgataggaagagccgacatcgaaggatcaaaaagcaacgtcgctatgaacgcttggctgccacaagccagttatccctgtggtaacttttctgacacctctagcttcaaactccgaaggtctaaaggatcgataggccacgctttcacggttcgtattcgtactggaaatcagaatcaaacaagcttttacccttttgttccacacgagatttctgttctcgttgagctcatcttaggacacctgcgttatcttttaacagatgtgccgccccagccaaactccccacctgacaatgtcttccgcccggatcggcccggcgaggccgggccttggagccaaaaggaggggcggtgccccgcttccgacccacggaataagtaaaataacgttaaaagtagtggtatttcacttgcgcccggaggctcccacttatcctacacctctcaagtcatttcacaaagtcggactagagtcaagctcaacagggtcttctttccccgctgattccgccaagcccgttcccttggctgtggttttgctggatagtagacagg

SEQ ID NO: 64033 - DNA, 110 bp, Zea Mays
gtgcgacgcggggctggatctcggtggatcgtggcagcaaggccactctgccacttacagcccccttcgcgttttaagtcatctgcaaaggattcagcacgccgcccgtg

SEQ ID NO: 64034 - DNA, 292 bp, Zea Mays
accgtaacccggcttccggttcatcccgcatcgccagttctgcttaccaaaaatggcccacttggagctcccgattccgtggcacggctcaccgaagcagctgcgccgtcctacctatttaaagtttgagaataggtcgagagcgttgcgcccacgatgcctctaatcattggcttttacccgatagaactcatctgggctccagctatcctgagggaaacttcggagggaaccagctactagatggttcgattagtctttcgcccctatacccaagtcagacgaacgattt

SEQ ID NO: 64035 - DNA, 103 bp, Zea Mays
ctccagactacaattcgggcggcgaggccgcccgattctcaagctgggctgctcccggttcgctcgccgttactaggggaatcctcgtaagtttcttctcatc

SEQ ID NO: 64036 - DNA, 64 bp, Zea Mays
cccacggtagcttcgcgccactggcttttcaaccaagcgcgatgaccaattgtgtgaatcaacg

SEQ ID NO: 64037 - DNA, 60 bp, Zea Mays
gtgaaattgggatgcgaagagcatagaagagaacattaaatggataaaatcctttattcc

SEQ ID NO: 64038 - DNA, 67 bp, Zea Mays
cactcacgaactcatcgcagcatcttccatgagcatcatcctgcagtacctggtcttgacctggggg

SEQ ID NO: 64039 - DNA, 139 bp, Zea Mays
gcccccaacagtagtaccgttagttcctcgccgaagtttagggcggtttcaactccgacgactcctccggtgaacttcatctccggtgagttccctcctccgtttcttcgttgaagtcgtcgtagcatgcctcgctctc

SEQ ID NO: 64040 - DNA, 143 bp, Zea Mays
aaggcgcatggaggatgctgcgatgtgttcgtgataggtctaggccgtcgtctcccagtcaactttgggttgctggatcatgtctccttatgatgtaatcatttatttattttgtacagaactcctattgtataataaagttg

SEQ ID NO: 64041 - DNA, 354 bp, Zea Mays
ctttaaaattgtgtattctatttatgaaaatattattataatttttatgaattacctatttaaaaaaagaatttcaaaaataaaagaaaaaagagaattttgaaataaataaaaaagaataaaataaaataaaaaaacgcacgagcctagccccactctcgtcgtacgtgcctccctccctctcctacgcttacaggtggtgccctctttctatttttttccttgcttctcatctttcacggttggaatttggaaagcaccgaccaccattcccgtacatgcagccgccgcagtttctgttctgataattacgccgtccatacggttcatctccccactcatgcctccacttat

SEQ ID NO: 64042 - DNA, 327 bp, Zea Mays
gactttacaaaacattctttttatttctaaaactgaaggttattacataggaagagttacatttattacaagtcctgatatactcaaagtgcataacttattacaatagcaggaaggtaagaaccctccaaagcttatacaaaagcctaacttatcttcctccagaactagaaatgctctccagccacaggaacacctagagtactcatcacctacaacaacatgggttcgaaaaccctgagtacggagtgtactttcgcaagtcttacccgactaaggaaaaatgactctcaaggatatgctggttaaataggaatcaaggaaaag

SEQ ID NO: 64043 - DNA, 266 bp, Zea Mays
ataaataaaatgtataaataattatcttcagtcttagtatgtttaattgcaaaaaaatagagtttataaaagaggatccagaaaagtttgaactaattcaaatttggtttgaaaatatagaaaatagaaagaaaaaaaataaaaaaagaaaatggaaaaagaatagcaatgctacctgggccgaacaaccccatttcggcccatctcgccaaatcgccgctacgcgtgcagcccaaaccctcccaggcgccgacacccggggcccc

SEQ ID NO: 64044 - DNA, 1266 bp, Zea Mays
ggtccttagcaggacttgtggcgtagatgtcattccttcggagtggcccgacatcaagttgctcaaagggtcaagcccctaccctggcctaggatggcggagatcccagggcagtgatcattgtcctaatagttgagtccctatcacaccctgatttaaggggtaaacccgggtgcatctcatatgtacgccaaagaagaacaacacatataatgaccaagtgtatagagataaatgtcacaatcattattacatagcggaagagtcttacaataaatgataacaataaagcgaactaataattattccttggcgacattaagctgactggaagacgccacctagacaagctcgtactcctcgtagtagacctcctcctgtgctacttgttcttctcctgtgggggatttatatatcgcaagggtgagctcataaaagatcatagctcaacaacttgtggagaataatgtgcatgaactcacaaaggtgggagctcatgtgaagtgtaaggctgatcaacatataatggttaaagctgagcattgcttttaataagttggtcaaattttattagcaattactaagtataagtaaataccaacccaaataatgagagatcacaattaataagtaaaccacaatgcgatgcaaataatcaattaaatttaattccataagttactcatgtgagggtccgagccgctcatgaccgtgagcatgactgatataccagttttacaatctgcagatgtgcgcatctttacccgcaagtcatgttacacatctgccacgtggttgtacgggccccatacacctctaccaaggaagcgagacagtgtaacactacgaggcctttacaaagttccactagctttagaaaacccgctacagtttctaggaagcgcaatataggaatcccccgtctgaaaagctatcgcagcaaaatcaacccgagaacctccctataccaacaactcacctactgaccttgcccctttcgagtaagttagtcctccactagctttcctaattagtcagccaagggcgtcccataccacccttgtggtagcactattttcccaggtgttatgtttcaattaacatagtgatcttgtcatgaacagtaaataactcatttataataaaagcatgatcatgaataatgtgtatcttaacaccctaaaccatataaagcaatagcaattactacccaaaaatttagtggtaaacaaggtataaagatagtcaaactggggtgacctattg

SEQ ID NO: 64045 - DNA, 393 bp, Zea Mays
agggcgatgcggcaaaattattggaacggtgagagtcgtggatatggttgttgttgaggcgattgacgactggttcgagctttttggtcgtgctctcggtgaatattactcggctagcttcgtcttcacccgacgcacagaacgacgacaggattatgtctgaagcgagctgacgaggtgggtttgagcagaggatgacaggtttgacgactcgacgctaaacgtgaacccgtcagaacccgatggatgaggagtgagcgcatgcggcgcaaacaggacgcagccaacaggggagcttcgatggcgagcaactaagaacggctcgactacgacgaacagacagctcgcgaccagcgggaggggctcaacacgcaaccaaggaatggagcaaag

SEQ ID NO: 64046 - DNA, 267 bp, Zea Mays
ccgttgattcacacaattggtcatcgcgcttggttgaaaagccagtggcgcgaagctaccgtgtgccggattatgactgaacgcctctaagtcagaatccaatctagcaaccggtgcctctgctcgccgcccgccccgacccacgttagggcgttcgcgccccaagagcccgtgccattggctcagcccgcccggccgacacgtcgcggcgggccgcctcgaagctcccttcccaatgggcggcgtgctgaatcctttgcagacgac

SEQ ID NO: 64047 - DNA, 124 bp, Zea Mays
gccagtagtcatatgcttgtctcaaatattaagccatgcatgtgcaagtatgaactaattcgaactgtgaaactgcgaatggctcattaaatcagttatagtttgtttgatggtacgtgctact

SEQ ID NO: 64048 - DNA, 53 bp, Zea Mays
acgcaagttgcgcccgaagccttctggcggggggcacgtctgcctgggcatca

SEQ ID NO: 64049 - DNA, 485 bp, Zea Mays
aattcaccaagtgttggattgttcacccaccaatagggaacgtgagctgggtttagaccgtcgtgagacaggttagttttaccctactgatgaccacgccgcgatagtaattcaacctagtacgagaggaaccattgattcacacaattggtcatcgcgcttggttgaaaagccagtggcgcgaagctaccgtgtgccggattatgactgaacgcctctaagtcagaatccaagctagcaaccggcgcctctgctcgccgcccgccccgacccacgttagggcgttcgcgccccaaggacccgtgccattggctcagcccgctcggccgacgcgccgcggtgggccgcctcgaagctcccttcccaacgggcggcgtgctgaatcctttgcagacgacttaaaacgtgacggggcattgtaagtggcagagtggccttgctgccacgatccactgagatccagccccgcgtcgcacggattcgtc

SEQ ID NO: 64050 - DNA, 60 bp, Zea Mays
gggcgaaagactaatcgaaccttctagtagctggttccctccgaagtttccctcaggata

SEQ ID NO: 64051 - DNA, 358 bp, Zea Mays
ttttttaactgctcttcgaatgtcatcccctttgcaacttcagaaggaagcccttcttaagtcaaatccataacttagactatccttgttatctaagtttttcttataattgacttcaaagggcaggtggggtggggtcttgggttacataccgattcctttgggtagaaagtcggggaagcgagagcgtagaaactcctccgtctcccatgtagcttcttctgctgaatgatgactccactgaaccttatacattttgattgaccttgcccgagttgatctttccttctgatccaataccttgacggggtactcttggtaggacaaatctggttctatctcaatgtctggttctggt

SEQ ID NO: 64052 - DNA, 344 bp, Zea Mays
ctccctttcagctaccccatttgactgaggtgaatatggagcggtggtttcatgaatgattccacactctttgcagtactcatcaaaaaggttggaaaggtattcacctcctctatcagaccgcagccttttaattttcttgtctaactggttttcaacttcagtcttatagatcttaaagtgttctagtgcctcatctttggttatgagtaagtaaatataacagaacctggtagcatcatctatcaaggtaagaaagtatcttttaccgccttttgtgattataccatacatctcacagacatctgagtgaattagttctaaaggagtggtacttctgcctt

SEQ ID NO: 64053 - DNA, 1595 bp, Zea Mays
attcacatgacacaaacgggaatgccatatatcattaatggaatcgttattacagaacacattaacatggtaagaagaatgattattcaaaacagaaagacggaacaaaccgcctgactcatatgactttccaacaaaagtaccaaacttagacaggaccactttattagactcaaacactaatttgggaccctgtcgacatagcagcgacactgatatgaggttccggctcatcgagggcacatagagtacgtccttcagcacgagcgtctttcctgaagttaacttcaggtagacctgtccagtacctcgaactgctgccggaacaccatttcccatcaagactggtgcgctgttgtatccctggaatgaagagaacatggatcgatcagcacaaatatgaacagtagcaccggaatccatccaccaatcatctgatggacttgccataaaggcctgaggtgcataccctggggtggagttaaccaccacgttcccttctttgcgctgaggtggaggaccttttcccttcctaagtttgcacctccgagttgtatgcccggagacaccacaaacgtagcagataaagtcctcctttttcttcttcatctttttggacttaggttggtttcgattcttctgtggagagttcttcttctggaattttctatctccacccttctcaacaacgtgagcctggagttgctgggatggcttgttactggaccttgcacactcttccacatttatcgcagctcacaactcagtgagagtcatttgcttcttcatgtggcggcgtgaagtcgcaaagtctcgccaagaaggcgggacctttgccagtattgcattcacatgaaaactgtctagtaggacgcagccatattggaccaagtccctaacaaggagttgaatctcctgtagctgctccataacagaccttccctcagccattttatagttgaggtagttttccgttgtgaataactcattgccattgtcaacttcagagaactcgttctcaggttcagtccatagacccttagcggaggtaaaaccagagtacacgtcaaataagtcgttcgacaagatgttcaacacacgagacaagcatgcctcattggcttcgtcccacttggccttctccgctagtgcggcggcctttgctgcatcatcagaattatctgatgcaacctggggaacaactgacgtcactacccaaaataattttaggtcagtgagccacatgtgagtcttaatctgccagcgcttaaggcttgcgccgtcgaacgcttcaggcttaatgacatcagaactggaggccattatagtaattggttttctggaacagaaccttgtgttcgctgagctggtcttcccacgtagacaatctacgtgttgtgagttactcgttgcatctctatatttattgaataattttgtgcaatctgctagtattatttacttgggtgtgattgcacaatctgtgggcgtatttgattgctcgatgatgatagttgtgtagtgagacgacgtgacagtctgggttttagtgtattgttattttcagtggtaatattatttatgcctagtaattt

SEQ ID NO: 64054 - DNA, 578 bp, Zea Mays
cgtcgattagggcaactagtcgtccgatttatgtaccctggtcgtcccgggtagggtttagttattgggccttttttaacccatctacagtataatttagagcaccctctcctgttctaacctagccgccaacacagtctccagccggctcgtctcctctcctctcctttcttggcaccgcccctgtagtcctgaactcctgatttgtcggcggctacaacaccctgctgcagtccttctcttgcagtcttcaggaatcaagtgttcaagactcaagaggtaggtctgcaaggttgatggacagatggagagatgaagaattggagattatgccattatgggatgtcacatgtcaagttcaggtaagtcacaaatcaaaatgaagcaatatgttactttgtttatcctagttgtttgttctaatttatataatgtataattgtatacaggtatatttatatatatatacctatataagtatagctactagtctaggacgaccagggaccgactaggggtcgactagtcgccctagtcatcgcctaatcgcgactagtcggttggtcggtcccgaggtt

SEQ ID NO: 64055 - DNA, 298 bp, Zea Mays
cgatgtttgggttagaacccgtggtcgtccttgttgtacttagtcatttgttggcgtctagtattttctcacaagtgttgcagcgcctcgtcattgtgcttaattctttattgtgtgtaatatggtgtgttatttttcattatgtttatacatgtgcatcatgcatttcaattaggtacgctagttgatcacgtgatgcggaagtcgagctgagtcgaccacgagatgctgttaagcgtgggcttcttcgcaaggagatactgataatgaacctgaagatggataatctgaacgagtg

SEQ ID NO: 64056 - DNA, 1593 bp, Zea Mays
tagtcctgaaactcctcaaaatcatccatgttgccagcatctcctcctgagcactgagtacagtggggacaacctagggtggggaggtttgtaaagcaagggtgagtacacatcaacgtactcagcaaatgtcccgtttcgctaaagtggactagctgtatgtggagttaaggttaagcagttgcttttagttggtcaaatatttattactattagtagagctaagttttagtaataaacccagttattacccaaatgtactccctccaagagtaaataccggagatcataattatgccatcatcattaatcatcatcgtaaaagtaatcaaagttcttctaatcaaagaggatcccaatgccgctcttaaccgtgagcacgaatgatatatcaatttctaacactctgtagaggtcgcacactttacccacaagccgtgattcccattctgcccggaaagagccagtctccattcaccactacctaggtggcctggcagggtatcactacgtagcgtttacaaagatttcccagaggtcataaccgctcgttaggtttctccggtttgataaacacagtacatctctccaaagtaagggtgactaacaaaaccaaatcaagaacctctgcaaccagcctcggcagagcaagtactgtgcccgaaacccattgacggccctacggctaagccaactactcctctggttcctctaattaatgagctaagggtgtcccattccaccctcatggttgcactgttatcccgggttctcactccccaaacaggtccttacggagaggtactcaggaaaatggcctgagtccctaaagtatcacgttatcatcatcgggataacatcatcgtatcataaatattcacatcatgttcattgattaaagtaaagcaatagtatagtgctaaccattataaccgaaaaggtaaacaagggtaaggtagatacatactagtcaatccttaagtttcaataatgtaatgcaggacggtgaattataaagtagataggacataataggtcagagaacacttgccttcaccaggttgttgctcaggaagatcttcggcaacacactcaggaaccacggtctactcgttgtctaagtaaagcgatcatacattcaaaacatttggaaagtataaatgaacaacacatcaaacatgtacaatcaagtgaacacaagtatgataaaacactaagaacatatagggtagacttaaatgctagggtttaatataattagagatcagtgattccctagatattatggactatttagtttagtgccagtaattttagtgagacacaaaattatatcagggatcaattcatgcacaacattttactaatctcacaaaattacacatctaagtgccattaacattttcgttttatttattttcttaaataaataaatcaactcataaactaacctatagcttggaccaaaaattagagtacttagactatggatgaacataatttatttggacagagagtattcctatgaacattttgcaatttgaaccactaaatttggagttcatatgaaaaagatatgaaataaacaagttt

SEQ ID NO: 64057 - DNA, 282 bp, Zea Mays
ttcaggcagttaaagggacatgatgagcggtatgatctcgcaactgctatgcgagaggggtgtctgccccaactacgcctgttacgacaacaggcaccccaatgatttaccgtctgatcccgacttcaaaacaaaacacaaatattttcgtttttggttctaagcgttttgtaattcgttttgattctagtttgaaaactgcaaaaattttcatttttttctaaaaaaactctagtggtgtatggtttgtcacatttcatttttctaggttctaaactttgc

SEQ ID NO: 64058 - DNA, 142 bp, Zea Mays
agagtatagagataaatgtcacaatatcatcagagtacttattacatagcggaagtcttacaaaataaaagataaatataaaacgaactaaagtccatccttggcgccataaaaaagtcaacttggagatgctacctagatc

SEQ ID NO: 64059 - DNA, 108 bp, Zea Mays
aagtaaatgtagagggtcatgaatgtaattttacccaggctacgtcccgtgcctataaatagatgaacagtaatatcgtattgttcacgctgaattgtaatcactcgc

SEQ ID NO: 64060 - DNA, 1102 bp, Zea Mays
caaaccatagcactaccagtttgctacagtagtccaaggtcaaaatcatacaaaacacaagctatggtgcaccaaaacataacaaaaacactgaaacatttcaattttagaatctaaaacagcacatgtttaatctgacagagagtttttcaactcctttttctctaaattctttacagtagcaagccaactctctgtatgacactttctctccttgaaatggtctttcactttgctatagaattcttaccccaattcttcttggattaattaccacaaggacccaaatttgaataaaaacacacaaattcagacttaaatattattctaaatctgaatcccaacacctgacagtccatcttttggctacttttactcccaaatttatgtggaatcaggtccatctcactttagcaaacttgttcactttactatggtctacaactttgctatgggacccttaatccaaaaccccatgaatcagtcacaaatgaattccaaactaggcatactgctgcaattcagttcatagaactgaataaaaaaattcagttgtgtccagcctgacagtccaactttaaccaaccttttctccaacttttacacatcaacagaccaagctcacattaccaaagttattccttagatatagctctactactttggtatagcacccctatgttgaaaacatttagaacaatttttacgaagcaccaaagtggagctcaacacactaaaacctagtttcagccttatgcactaagtctgggatccagaaatctgacagcctatgtttgagcaaatttcacacctagttccaggcaaccaatagtggtagagttcaagcagtaaatggtgtgagcttcactgacctgtgagaaacaaggaacgggcacaacacggccgagacaatctccacgaaccctggccatggtgaggttaagaacgggtgggcgtggtcaccactggcaggaagatggcgtgcaagtttctgtgaggggcaaagtttggtgactggggagaggtgagtactagcgggaacacaggaattccagcacttacgcagtggtctcgagctaaaacctgagggcaaggggaagct

SEQ ID NO: 64061 - DNA, 1637 bp, Zea Mays
atttgctctaggttctaagtcttacatttaataccttaaattccaagccaacttattacttgctcaagagacgacttctcttcccatgtcttaaacaaagttcttaatctgagccctgtactctaatacacaacaccacacttttgaatcgaaaattttaacctagtaaatgcattctaggtgtaacaagcaagataatgcaaatgtttatgatgacatgtcagagttttagttcacgtaacaccaggggtgttacaaccttcccccctaaaagaaatctcgtcccgagatttaaaactctaggcttagtaacggaaaaggaaatgcgtcactggcttatttccccaatactcctacaaagcaggggtgtgcccctattggttcaaaccaaagacaaactgcacaaaacctaggacttacaagaacctaggaactcaagcacatgttcttccaaatactccttcgattcccatgtggcttcatctttcgtgtgtattggttccactttatctcgtaaaactcgataacttttcttcgagtgacctgatcctgttgatctaacacctttatgggatattgcgaggaggttaaacctggtttatggctaacatctgaaatctcaataacatatttggggactcgaagacatttctttaacggagacacgtggaacatgttgtgcactattggaagatcttctgacaattgttccttataagccacaggttcaccaaaacctttgtttcgaagcttggtagtcttcatgaacaggaaatggtagcatagaaaggcaaagacagatagcaggaatagggtggatgaaacatgtactaatactgctacatagggggcttaatttaaaattgtatgtcatgatgcatgctcgtcctattcgtcctcacaattcttgccaacatatagtggctttcatgttctatggcggtggcatacctactcactcgttatttatcactagtcgcactttcctagggtttagttagtgtacctgcacaaaattgcattatagttgtgggttagtggttagcatcctaaactaagccaccttatagtctttaacttaactatatactatttgcacttcgactatcaggatttgatcatattcttaagtttttccaaaatagtttggactcaaaatccttttgaagtttatcaaaggattactttaatatccatgataatgggggatcgctccgataccacgctgtgacagccctcccaagttatcaggcccacatgcaccaatccttgccttactggcctcagatggctgtgcacgtgtaccgggtaacttaacaaggctatcgagttcgccaactggaactcatcatcccaaggatctcccacataacaggtatattacagtaatcacatttgatacacacacattggagatagagcggaagacttttacaaagtacactttacattccagaactcaagttttacatggtagaaagagatgtatttattacaagtcctgatagtactcgaagggcataacttaactacataattggaagggtgaagcctttccataagagatatatataaaaaccttctaagcttcaagtcctccacatgaagtaactaacccaaagaaaagggaataaaac

SEQ ID NO: 64062 - DNA, 1113 bp, Zea Mays
acttaactcacctaacaattcattagatatgttaattggtttcctcaccggctaaactttttggctagctaccctgaatagccaaactaagatgatacatatagagagctcaaaatgaagaatcccttgatgaagatgctctaatggttctaagcaggacctcaattagctatccagtactagagagaacgacgagtattaattagcactctcgcatagtagtagtagagagaaagagagagagagaaatgatctgttgtatctgatgatctcatggtcacgcgggcgatcaggatcagctgcacccgtccagtacgcacggccaggaattttacttacccttttggagggcacaagcactcacatcattctggtggtgcttcgctacactagtgctacccctgctagtactgcactactagagaaggaaagagcgcgtgcaggtgcagagcgcagcagctgagcaggcagcagcaaaaaagaaaaaaaagattcccatatcgctcgcgacccacggtttgagaccgcacgcaccacgagaggtgaggtgattgatagcgtacctaacctacttactctactctacccgtcgtgtgggcccttcaccaagacgagtttccaaaacgggcatacgcccacgtcaggacccagtcatcgcacacgcacacaacccaaaccgaggcccgtctagtgtagtgtagtgggcccgcggccgccatcaatgggatctgcgtcccatctcggcgggcgcgaggtgaggagaggagtcgtcgtcgacgacgacgagtagtctgcctctgctccggcgggccggacggccgcagtggtgtggtgtggtcgtcatggttatgacagggacgacaggcgcccgtgggcctggtggctggacgacgatgcatatctccgatccatgtgctgtgtgtgcccatcatcctgttggtacggttggggggaacaggagcagagacagcaggcaggcacaggcagggctcactccaccggccaagcgagccaaatctcggtcggaatgaaacgtgcgtgtttgctagccttttgctttattagcactcattatatatatatatatatatatatatatatatatatatatat

SEQ ID NO: 64063 - DNA, 919 bp, Zea Mays
ggaaagcaaagatacagctggtctgcgcgcaatattttctgatggctcccctgcaggctgcagccctagcccttcacaccatgtgtccgaattctcgatggtcctcccaacccatcctctctgacacgacatcacctttctttccccaccgccgcgcgcggcggattccggcgaggggcaagcaaaaggcgctgctgcgtgcgactggcgacggccgggggattcgggcatcgatcggtctcaggtctgaacgaacccgcgacggcgacggcgacggcggctcgcgctcggataaacctcggccaggaagatcgccatcctgcttttacctcgcgatactgccgggacaaggatcaccgatgcgacggctggcatatttctcaaccctattggtgaacagaagcatctggtgtggacgcgacaagatttgcagctgatacagtttactgaaaatgagatagataaatagagagagagagagatgagtaacctgcagaccactaatgtctatgcatgctgtggtttaaaagaccccatggtgttctgaaagaaacgcaaagaaactgagacatcagatacggcatgccatccaaggaacgcatagcagcagctggtaatctgaatggcggtgtcgactattaacaagaagaaacggcgagatggcacacaactgaatctgacgaatgacgcaaacagcagcaaccctactggcaggttagcaagcagatgggtgtgatcttgcgtttactcttcaattatatactaggtaagtgcccgtgcgatgccacggaagtaaaaaaatagtgtaaaacatagatatgatggaaaatccatgtagcacatatgaagtgtaagctgaatgcccgtgcgttgcaacggaaatatataatacaaacagtaactatctccaacaacataa

SEQ ID NO: 64064 - DNA, 285 bp, Zea Mays
cctccctccctcgcattgctacgctccctctcctccctccatccattctccgatcgtcttggcggaccgcaacacggcggggatcctgggcacgggcgccgcggaccatgacggttcccgttccgctcttccatcctccgtggaggtttcctttccttcgttgacgcgtgtgtttgctggcttgctgctgtttcccttctctctctgcgcaaaaaaaaaaaaaaaatgcgccggcaagtcgtccgcttgcatcatctcaagaaatgtacaaactgaggtgtccct

SEQ ID NO: 64065 - DNA, 1700 bp, Zea Mays
aaaaaaatcaactatagatgacattaaggaagcgtttgaatgcactagagctaatatttaattggttacaaattaattagccagctaactattatctaatttgctaaaattagctaataaacaaactattagcaagactatttggatgtctcaactaattttagcaactaactattagtttcagtgcatttaaacatcccctaactcaaatgatttaaagtttacttactccaagtctaacttataatccgtttaggccaacgacaggtctctaaagtatagctttgacccatgttttttttgttaaaatacaaatgaatgctttttcgttaaaaatacaaatgaactcttaataaatttatactcttgtagaagtaccatttaagacaaaatcggtgcgtatgactgcttaggtttcaaaactaactagacaacaaaatggttattcgtagaaccacatataatttaaacctagagtgagcacatcattttttcgctcctcgttaatttttcacacgcctaaatctaaaacgtcatctagtataggtagggccgaggaagtaattcctatagaattcgtcagacttaaaaaaaaatgtgttgactttggtcagacctagaattgtgttcgttctttaattttagaacggagatagtactgttgtactctagttggattgagccaagtagccaacagccagtgagtcacgacgtgtcgagttgtctttctttgagtgaagtttttctctctctcagcaaagaggggggacccacacctgccccatgcccccatcataaaaaaaaaactctcccaaggaaatgcaatgtatatggctatacatgtccaaacgggtcgggccttacgggtagcccgaagcacggcacgggttaggcccgacccgtacccggcacggcacggaaggcgacgggctcgggccggcccggcacgacacccgggccgtgcttgggcctgagtcggggcacgtcgggcggagcccgagcacggcccgtttaagcttacggcccgttccaagcccggctcacatcaaaatatccctccccgactccccgtccgccgcacgcgcacacattccagtcttccacattttcgtctcctctctcgccctcgccctctccgtctccgtcacactcgcggactcgccctctctggatctccttcgtggagtggctccgtggatccgtgctttgcgctcgtcggccgtcgactgtcgtgttcctcttgctccggtgagccgacatagcccctgccccctgtctgtaagttcgactacttctcggcttctcctaaccctaaacctaaactggtgagtggtggtcgtcggtgacttttcggtgctcttgctcttctgatttgttcttagatctcttgtttcctctcgccttctccgtctcgcttcttcgcttagggtttagggtttgtgcctccctgattctgtgcgactgtgcgtgcctctccggctctccgtctcgtttctttgttctaatctgctctgcctacactcgtccaatcctccttgacctcaagcaacatcagctctgcccctctggttgcccctcgtcgacgactccggtgctccggccactcaggtgaagttctattttcctagatctactacctttgtgctcttgattttgatattttgtattttatttatacgatttgaaggtcgttgaggaac

SEQ ID NO: 64066 - DNA, 2274 bp, Zea Mays
gaactagaagactggtgataaaatataaggtgaaaacataatacacacagtcaatcataagcaacgagagtatatatcgagtttgtgagccaaaaacatcaagctagtatagagagtagcaagcacatatattacatcaaaatgactctctactaactctctaactccccctagttctcacaactcatatctctccccctttggcgtcaaacaccaaaagggtacccgaacctaaacatctgaagtgggaggaggtggcgggggcgcatccggtcgcggtcgaggcagcagagcgaacgccggcggggggtcagagtcagtctctgatccaggatctgctgtagaagctggagctggtactgactcggactgaggccgcgctgcaggagctgccggaacagaagaggtcacatatactgccacagcagtagtggtaactgtaacaccccaggatccacaaacaccccagaatgctactaaactacacatctaacattcgtatataaaatttcgacagcatctcctttgaaaattgcataaacggggaagcaacaaagtataaatagatatcatgataagcaaacacaatagacattaatagtctgctagcaatgggaagacaaccataacggcatgagctaaattaaccagtgcgcacaactagttagaaacaaacatcctttgacaagaagcttctaattaaatcatgactgcgcctaagcagcgttattataagagtgaaggtggatgtgctgctacttcccacttcccttgatgagcaacaagcacctgcattgagtaatgcaagagtgagatgaaacatctcagcaagcgaattattttgacgagatatttaaaccacaaattgaattcatcaacattttaaaagagtcacaattaaaatcagaaatacttgtagatatagaactcagtagtcccactataaccaataccatctcatttcctcgaacaaccacaataggttctataacacttccctgcgtcaacaatacctgcaaatatcacttcaatgtatgcataggaatgcaatgtgtaggtactctatcttcatacctctgagggtataaaaccacatcatctgcaaatatcacttcaatgaatgcatatgaatgcaatgcatatgtcctctgccttcatacctaagggtatgaagccgcatcgtacccctcctcgggcaacgtacgatgctaaaatgtaccggtacggtcggaccataggtcacgacaaaacttcagatgcaaatgagtcatgcaatgtatatggcatgctgcatttatcaataaacttcacttccttcagatataatacaaacctcaaataatactttatttaccttcagatacaataccaacctcaaataatacttcatttaccttcaggggtgtgaattaatctcatgaatcatactcgaatcataatcatcatcaatatatgattgagcattagtataatgcaagaaagtaaagcatcaccatagagtccaattatgaaagaatccaatacttctgaatattagagtgtaggcaatagaaataacaggtcagaacgaaagcaaccaccgctacattcacttgccttcatcgaagaagaagaaatgtactagacatgatctggagtgtagccacctgctagcgggcataaaacttagtacaaatatttcacaaacatttgccatcaatcaacaaaacactcctacacttgaaaccaagacccagtggaaagactcccacactgaaccacatgccacacagcagcaacgctgtttgttaattttgtatctttaaaattaaaacagcggtgatatcaaacaaatactctaggagtatctacacaaaatattctacaacttcagtattcaatagataattaaattctgccatctacaagttctaaaacatctcacaacataactgactgaatctgttttagacagcagtatggttaactttaaaattcgatatctcccaaactactgaaccaaaaattatgaaattcttctggaagtaagaacttttatccctctacaaaagtctccatagttggaagagccaattcggccatttactagatgaaacccaccagtgaacagacccactcatttttgtcaggtaaacaggaacagccacagtaaaacaaacataactggagttttaaaaatcatatgaatgcactctttaacaatctggaaagcttatgaaattatctacaacttcttttaccaactcacagtttaattcggttgataaaattgcc

SEQ ID NO: 64067 - DNA, 521 bp, Zea Mays
cttttcttgtgacttgagcctgagaatctaactcaacaatttttgaaattcacaagtggttggctgatccagttgctttggccttaatttctccccctttggcattaagcaccaaaacaggagaactatttagccctttaaccccattgcctcaccaaaatgtcaaataagatcaaaaggcaatgagaacacaaataagaacttgggagaagatacattgataccggaatgtagtggaagccctttctttgtccaagttcaccatttcactttcaatgcaactttgagactataccaaaagcactcaagcaaacacattagtctcaaaggagtcaagttgtagtacatcctccccctaaacacatgcatcatttgcataaggacttgtgaggtccggggatgacttgtacaacttgagcaccaaaaaataagcaagtaaagacattaatgcttaaaagaacatgatcaaaggcatagaacacatgtatgttatagatcaatccaagttacgcgaatctaag

SEQ ID NO: 64068 - DNA, 50 bp, Zea Mays
gagaacgcctggatacttgttggcttttaacgaggtcgtcgaggagcacg

SEQ ID NO: 64069 - DNA, 762 bp, Zea Mays
ctcaaatttgtgtacaaaggaagatagtggatttccacatgttgtgtgccttatttgcatcataaaaagagcatatacaagaatttagagatttattcaaacagatgataaaaaaatgcatcatgttggagtttatatgattgtgcattaaacaaaataataaggttaatgataataatataataatttctagaagtagaattaaaccctaaacttaaaaatagggttttgaatatgagaaggagaaagtataaaaaaaaatataaaacaaatttcataaatgtcccaaattggtatttcctaagttcacaataaaattcgaggacaagttctgcacaaggcttgaatctaaaatttgaattcaaattgaagttgggatagaaataaaaagaaaaaaaaaagaaaaaggaagaaaccctaattgggccaaactccccaaaccggcccatcctctcaaccctattccacgcgctcacccggcgctgacgtaaggaccccacgggtcaggctcgctgcgcgcgcggatctcgcgtcctcgctgcgcgtggggcccggcctccagtctcattttcctttgttccacgcgtgcgccagtgactctatgactggtggacccccccctctacgctgagcagctcgtcccttctctgcactgcgcggaccgcttccttcgccggcgaagacggactccgttcaaccctcttcgcaacttccctgcgaaccgcccgggagcctcgacttcgtggataaagccaacacgcc

SEQ ID NO: 64070 - DNA, 2001 bp, Zea Mays
ctaaactacacaactaacattgatatataaaaatttcgacagcatctcctttgaaaatttgcataaacgtggaagcaacaaagaataaacagatatcataataagaaaacatactagacattaataatctgctagcaatcggaagataaccataacgtcatgaactaaattaactagtgtgcatgactagttaaaaaacaaacatcctttgacaagaagtttctaattaaatcatggttgtgcctgggcagcgttattatgagagtgaaggtggacgtgctgctactcccctcattcccaacatgaatcaagtacctgcattgagtaatgcaagagtgagatgaaacatctcagcaagtgaattgtttcgacgagatatttaaaccaaaaaaattgaactaatcaacattttaaagggatcacaattgagatcagaaatacttgtagatatagaactcaatagtcccaaaataaccaatgccatctaatttcctcgaacaaccacaataggttgtataacactttcctgcgtcaacaatacctgcaaatatcacttcgatgtatgcatagtaatgcaatgtgtaagtcctctgccttcatacctcttagagtataaaaccacaccatctacaaatatcacttcaatgaatgcatatgaatgcaatgcatatgtcctctgccttcatacctctaagggtatgaagctgcatcataccccttcttgggcaacgtacgatgctaagttgtaccggtacggtcggaccataggtcacgacaaaacttcagatgcaagtgaatcatgcaatgtatatggcatgctgcatttatcaatatacttcacttccttcacatacaatacaacctcaaataatacttcatttaccttcagatacaataccaacctcaaataatacttcatttacctttaggggtgtgaattaatctcacgagtcatactcgaatcattatcatcatcaatatatgattgagcatcagcataatgcaagcaagtaaagcatcaccatagagtccaattatgaaagaatccaatacttctgaatattagagtgtaggcaatagaaataacaggtcagaacggaagcaaccactgctacattcacttgccttcatcgaagaagaagaaatgtactatgcatgatctggagtgtagccacctgctagcgggcataaaacttagtacaaatatttcacaaacatttgacaacaatcaacaaatcgctcctacacttgaaaccaagacctggtggaaagactcccaccctgaaccacatgacatacagcagcagcgctgtttgttaattttgtatctttaaaattataacagttgtgatagcaaacaaataatctaggattatctacacaaaatactctacaacttcagtattcaatggataattaaattctgccatctacaagttctaaaacctctaacaagataactgactgaatctgtttcagacagcagcgtagttaacttcaaaattcgatatctcacaaactactcaaccaaaaatcatggaattctactggcagtaagaaattttatccctctacataagtatccatatttggaagagccaattcggccatttacctaatgaaacctaccagtgaacagacccgctcatttttgtcaggcaaacaggaacagccacagtaaaacaaacataactggagtttcacaaatcatatgaatgcactctttaacaatttggaaagtttatgaaattatctacaacttcttttaccaactcatagtttaattctgttgataaaattgtctaactcttaagagaacagattctgcacagaattatgagactgaaaaaactgctataatcaaactgcaataactttctgatctgatgtccgattgaggtgttcttcgcggacacggaaagatctacaaattatctacgactcatatataaactttttatttttttgaggccactaagaccacggaaaactggtatgaac

SEQ ID NO: 64071 - DNA, 1887 bp, Zea Mays
attacactctaccccacttaaaaagaattcgtcctcgaattcggccactccgagcaaaacacccaaggtaccccatcaccatcattcaaaacatgggtccattattggtcttaattaacacaagaacttctaccttggactaattgtctgaggaaactacacaacctgacatcaagcatgaaacaacatgcaatgaagctcaaagcaagtcatagatgcaatcaacactacaatttcacaccatcgaatttggatgcaactatacatcaacatcaatgtcttaagacaacactcttttatgaaggggtaatatgcactaagcacaacccttaccaacttcaacaattaattttaattaaatggtgaaacatccacacccgacgaatgtataagaagatcaaacacctcacctcaaagcaccacgaaacaagtagttctattgaaacaaaactcctaatcttcctaaaccttattcttgccatcatgaaaagataatcatgtaatctaacattctttgcaccccgcaaaagggagaaaatctacagaactaatggagcaataaagctaataagaagccaataacattctgcgcggcacatgtcatcgaagaaatgccaaaagctccacaaaaagcactgacagcacaacaacacaatacatggttaaccactgtcactatacttcatccaacaactcaactaagaaaaatatccaaactagtgaggttaacctacacataatataagtcttcatctactgtagttcataaacttacatttcattctatcatacgatgcactcaaagtaccagacatacaaggtcaataataaccctgtaatccttcacacatttgacaaacatctcaagctgatgtaaaaaccacatcatttaggaataggtgactaaccacacacaaccaactctaggctaggcactggcttcattcaaaccaatagataggtggtccaacaatggctccacaagcatgcatcggggagagaactatctgatcctcaatgtattaatacataatccatggatctagaaaatcaaagatttattctacaactagcatgactaacatgcaaccactttaaaccacatctaggctttgtggctactaaaacacacaatagaagagagacatgtaagccattctagctaggtaaagacttcccccaaaattcctataaaagtaccaatattcatttctttcagaaatggtttctcgacataaacaatcattctttgcaaagatagttggaactatccaccaaccgctcaaccacttaaattcaaattgatggttaccttgtaacccaaaacacgcaattcacactcctcttagaaacatcctcaatcaagcatatataacaatattattgtaataaaactcaaccatgaaaaacatagtgaaaacaacataggcatacttgtatatcacagacataataacaacttcaatctcacaaaagaccagcgatatcaaatgcattaataaaacaatataaagttttagagataaattatatcaggcattaagtcataaacaacttaccacatcaccataaaggaatggggaggggtgaaattattgtcacctacacttcaaagacattaatatatatcaaagatatttgtacccatacccttcctatatgtgcaagtgtgtcaaatttatcttcaaattgccaagaatctaaagcctatgctttgataccaactgtaacaccccgggatccacaaacaccccgaaatgctactaaactacacaactaacattcatatataaaaatttcgacagcatctcctttgaaaatttgcataaacgtggaagcaacaaagtataaatagatatcataataagaaaacatactagacattaa

SEQ ID NO: 64072 - DNA, 212 bp, Zea Mays
ggccgccaccctccccccattttcccttcgttggccaccccctctcctcgcatggcagccgcccaccatttcttcctcctccctagatctccccctcccccacgcagtaaggatcgagaagaggaggagcaagatggattgaagaggaagagaggatcaaggagatgttctacccccccccatctattgcagattttcttgaggaaacccta

SEQ ID NO: 64073 - DNA, 429 bp, Zea Mays
aaataatagaattagtaaaatatggtaatcataattttttttaagtgtttaattatttatttgcactttgatcattttctttgtatgcgcttgattgattatctgatgtttattatcaattctttttaaagaaaaacctagtaattaatatagtaattaaataatacattaattattagtctaaaaacaagtattttatttacaaatatttttggtaatttttttaatgaattttaaagttctttaaaaatgaatttcggaatttaaaaaaaaagaaaaaaaaacctaaaactacccagccggcccacttaggggcccaaaactacctaaccctagccttatgcgccgcgcgcccctgggaaattttcccccagccgccgccgcctcccactctctctccctctcttctctctctctcccactctctcc

SEQ ID NO: 64074 - DNA, 1257 bp, Zea Mays
cccacatccacgcaccgaagatcaacttttggtcaacattttttttgggatattacactctaccccccttaaaaagaattcgtcctcgaattcggccactccaagcaaaacacccaaggtaccccatatagcaccaccattcaaaacatgggtccattattggtcttaattaacacaagaacttctaccttggactaattgtctaaggaaactacacaacctgacatcaagcatgaaacaacatgcaatgaatctcaaagcaagtcatagatgcaatcaacactacaatttcacaccatcaaattgggacgcaactatacatcaacatcaatgtcttaagacaacactcttttatgaaggggtaatatgcactaagcacaacccttaccaacttcaataattaattttaattaaatggtgaaacatccacacccgacgaatgtataagaagatcaaacacctcacctcaaagcaacacgaaacaagtagttctattgaaacaaaactcctaatcttcctaaaccttattcttgccatcatgaaaagataatcatgtaatctaacattctttgcaccccgcaaaagggagaaaatctacagaactaatggagcaataaagccaataagaagcgaataacattctgcgcggcataggtcatcgaagaaatgccaaaagctccacaaagagcactgacagcacaataacacaatacttggttaaccaatgtcactatacttcatccaacaactcaactaagaaaaatatccaaaccagtgaggttaacctacacataatataagttttcatctactgtagttcataaacttacatttcattctatcatacgatgcactcaaagtaccagacatacaaagtcaataataacccctaatccttcacacatttgacaaacatattaagctgatgtaaaaaccacatcatctaggagtaggtgactagccacacccaaccaactctaggctaggcaatgacttccttcaaaccaatagataggtggtctaaaaaaaatggctccacaagcatgcatcgaaaagggaaccatcagatcctcaatgtatcaatacataatcaatggatcaagagaatcaaagatttattctacaattagtatgactaacaggcaaccactttaaaccacatctaggctttgtggcaactaaaacacacaataggagagagacatgtaagccattctggctatgaaaagacttcccccaaaaatccatataaagtac

SEQ ID NO: 64075 - DNA, 2372 bp, Zea Mays
ccacaatcaagcatatataacaatattattgtaataaaactcaaccatgaaaaacatggtgaaaacaacataggcatacttgtatatcacaatcataataacaacttcattctcacaaatgaccagcgatatctatcgcattaataaaacaatatcaaaatttcagaaataaattatatcaagcattaagccacaaacaacttaccacataaccgtaaaggaatagggaggggtgaggttattgtcatctgcacttcaaagacactaacatatatcaaagatatttaaacccatacccttcctatatgtgcgagtgtgtcaaatttatcttcaaattgccaagaatctaaagcctatgctttgataccaactgtaacaccccaggatccacaaacatcctgaaatgctactaaactacacaactaacattcatatataaaattttgacagcatctcctttgcaaatttgcataaacgtggaagcaacagagtataagcagatatcatgataagaaaacatactagacattaataatcggctagcaatgggaagataaccataacgacatgaattgaattaactagtgtgcatgactagttaaagacaaacatcctttgacaagaagtttctaattaaatcatggttgtgcctgggcagcgttattatgagagtgaaggtggacgtgctgctactcccctcattcccaacatgaatcaagtacctgcattgagtaatgcaagagtgagatgaaacatctcagcaagtgaattgtttcgacgagatatttaaaccaaaaaaattgaattaatcaacattttaaagggatcacaattgagatcagaaatacttgtagatatagaactcaatagtcccaaaataaccaatgccatctcatttcctcgaacaaccacaataggttgtataacactttcctgcatcaacaatacctgcaaatatcacttcaatgtatgcatagtaatgcaatgtgtaagtcctctgccttcatagctcttagagtataaaaccacaccatctgcaaataccacttcaatgaatgcatatgaatgcaatgcatatgtcctctgccttcatacctctaagggtatgaagccgcatcgtacccctcctcgggcaacgtacgatgctaagttgtaccggtacggtcggaccataggtcacgacaaaacttcagatgcaagtgaatcatgcaatgtatattagggatgaaaacgggacggatacagccggatagagggtcatcccgtatcctaccctaatgtatttctctcggatacgggaccggatacgggtagttaagaatcgggacggatacaggacgggaccgggtaataatccgggcgggtaagaaacgaataactgatactacgcgggtatgtaccggatagttgtcgggtagttcgtaccgatgacattaattgcccaaccaaacaacaaacacataaattaagcaatacataatcacaaaaacattgcggaacctagaatatcttgatcggttttctatataaaatagacatctaagaaactgtatcatactataatagagtgtatttaaaatcaatgacatcataaatgatgtcaagagttattattatggatcgtagattcatgtaaagacgagcttttcacaaatagactctcttttatatatatttttatattaactctctagagatctctcgtaagacagagtattaaatgtagattcctagctacgaccgtttgttttgacgtccaccggcaacgagtgccattgcactaccagccggcgcatcctctgcatgccaataattgatttagtgataatctatgtgatggaatttcaacaatcgccagggattactcgaccagcaggagggcaggatcgtcgatcgatgctgatgtgtggtgtcatgctgccgcccgcccgatcttattttcagagttacgcatctgcaggtgtgcataccggtgggcagtgggtgcgatggaatgcccgcgacaaggtgaccgtgtccgtcagcacagcttgcgagcacgcggagcgtacgcgatgctagcaggctgacagcatcaagtctaattccaaacccggagcagcgttccagtccaccttgtcgtctccggctctccgctaccagccgcctggcccgccgcgtcgagacgacagagctgacgaggaaggatccggatcctcggcagtcactcagtcgactgggcgctggatccgtcgcggactcgcggtgggcgttgccgcatccgcgttggctctggcctctggctgaggtccctccgcggctctgtccctagccggctggccgctggcagctgctgggcgctgagcggaggcgacgaccgccggacgagggtg

SEQ ID NO: 64076 - DNA, 209 bp, Zea Mays
gggacatgtaattaaataaaggagtataataataataaaaggtaattaaataaccaaatatattttactgcatgtgtttggacataaatttggtttgaaagttgaactcaattttgaatttgaatatctagaaaaaaaactaaaataaaaatagaacaggaaaaagaaaatgggaaaaaaactaatctgggccgcgaccctcacttctg

SEQ ID NO: 64077 - DNA, 431 bp, Zea Mays
gtaattaattttctcttaagtgttcgttatttatttgcctttggaatgatttttgaatgctcgtgattgattttgaatattgaatatcatttcttcttaaatgaaaattcacataaataatataataaatattagtccaaaaattaatattttatttataaataattttggtttgattattatggattttatgattatttaaatatgtatttcgaatttagaaaaaaaaagaaaaaaaagagaaaaaaaccctaactaacggcccactagaggcccatgtaggagagccgccgcccctgacctattcctccctggccgtcgcgcgccctatccccattccctgctccagccgccacctcctctcttcccacccattcttctctctccgtccctttctcctgttctctacctcacgcagctgcagaccgcgc

SEQ ID NO: 64078 - DNA, 159 bp, Zea Mays
aataattttggtttgattattatgaattttatgattatttaaatatgtatttcgaatttagaaaaaaagaaaaaaaaagagaaaaaaacctaactaacggcccactagaggcccatgtaggagcaccgccacccctgacctaatcctccctggtcgccg

SEQ ID NO: 64079 - DNA, 217 bp, Zea Mays
aggaattggttgtatccatttttatatcataatgatgatggtctgtggacaacgatccatggggatgcgttgtctatgagacggaaattggaataaggattaaggtgtggtaccgtgtgtcaagcgtttgaacgtactaaacacatgccgagaaatatggtaaattggtaagcctagtacctgagtgaacctgcccgcagactttacccctcacgcg

SEQ ID NO: 64080 - DNA, 234 bp, Zea Mays
cgtccttgatcgccaggcccttcttttgcaggacagagaaaatggcgacgtgttgattataattcatgaagaatgcgtgtcaggctggaaggaatgccatggaatggccggtgcctgcatttgctgtggatgatgagccaccagaggaggaggaggagcgcagattctgcgcttagttgtccacacgggagtcactggtaggtggtgatgacgaagtggtggtggggatcagga

SEQ ID NO: 64081 - DNA, 12835 bp, Zea Mays
tgcatatgtcaacccgccaccgggtttcttaagaccagatcaggttcacgcaaaccgagagcacagatacaccaccgtccagcctcttgccacgaagggtacacgctactctcaccaccgctccacgcccatttcgtgttatcttattctggccttagtctgcccaaggcaaggcttacccatgacgaggcatgtgacgagttaaagggtcctcggtcatcaagcctacatcgacacggtccttaatcgactcagacggagacactacaccgagactctcttctcgtgcaagtcacccgcccggcctcagcttaatcatttaaaacccaaagcttggtacctggcagaggtacatcttttccgatgttgaacccatcagggccctgatggatccaccatcaagttttatttttgaaaacaaccctcccactttgccaaacatcttttgtaaaacaaatccttttgtttttctaaagcaacactaagcatagtaaaacctttttgtaaaaacagggtttcaaggaaggtaatcaagttcaaggaaggtaatgcaggaattgtttaagcattcaactcctatcacctaatgcagcaagcaagtgagaaagattttaaaaacatcaagggaggtggaaaatgcaccggggcttgccttcgttaacaggtgagtcaggctcggacccgcagatatcgaagtagaaacagttcccggcctgagaatccgaaggtggtggtgtcttttcttcggtcacttcaatctcttcttcgttttctaaatataaccatataggtatatatataagaatgaatgccatgtaatgctcatgagagtgcgaggataataaagatttattatctaagtcttgaatacaactttccatcacggaactccgagagcttagggtttccggagtcagtaaaggagttcaaagggcaggggggttttgggttctagttatcaaacaaggtccaaatcaattcaaactctacccaaggcttctaaataatgtgggagttcatataaaaattttgaacatttttggcattactattaattctctaaaattctagaactatttctttaagctattttaaatgccctaaaattccttatttaatctaaaaatcatgaaactatttttattaaatattatgtaaaataagaagtctaggaaaattggtttcacaattttaggattttctaccattttctataattggtttggctctggaataaaaagaaaaggaaaaaccggtgaatagtactgggccagaagcagcccatacggcccagccactcagagaaacggggcgcgcccgcgcccgcgttggcagtcttgcagaagggcccccgaggttttcactatatgggaatgggtccttccactgtttaacacagtcactgacactttgcagaagagtccctgaggttctattcctttaccgcgccaagtccctgacgacggtgagcacggccgagctccggcgacctcgcgcactggccaaatcgcaccaagaccggcgccctgctacggcctaaaccaaattcacgccccaatcagcgtttcccctaacttaattgtgcaaatggtgatatactctcttctgtccacgagaaccgcggagactacggacacttgatcgtgttcccgacgattggtggactcctagtgcgaattggtgacacggtaagcatcccagagcgacaagagtgctcgaacgaaggagagtgagggatgaactgacctggaaagggctggccgcggtgatgtgtggttcacggcggcggagagtcgatttgggggaaaacccgaattgcggggctacggtgaacgagtggagatgagagtgggtgctatagcttgacgattacatggcgcaaccgacctggccctcaatttatagaagggtaaagcggtggccagcgaatttggggaggacgcgcggcggccggaaatgaagaagaaggcactggtcgcgtgagtgcgtgtccacagtcgtggcgagctcaccggcgacgatgggactgctataaggagtcacggcgacgcggtggaaagactcggacacgcggcggaaacggagatggcacgacggtggcgagcagctttatccacggcggtgagcaagggggaatgaattgcggctagccggagtggtttccaagtcaccggcggcgaagatattttgaccctgcgacgttatcgacttaccccgagcgtgaatcttgatgcaggcgacgcgaatcacggcgggggaggtcaccggtggtgggatttttctgtcgcgtccgatttgatccgttggggacactgtaccatcgcgagctcccatcagagcacctgacagccaatctttggtctggtttttctctcaaatcttcatggcactcttaccaaggtcggcagcaaagttgttcctatatagtagctctacaactttgttatagcaatcctaggtagattcccactggatcttagtcgaaatggctctcaaacttggaccaaagtcactgtccatctgaagttcagactatatcagcctgacagtccaactttgggcttcaatatctcctaaatcttcttgacaactgagctcacattcttaagcaaagttgtccacctatgttaggcctataactttgatgtggtgacctagggcaaaaaccctatactttgaaagttacaaggctccaaagttgagccctcaacactgaatttcagacttagtatagaactcaattgaggtccattttgcaattaagtccaaaatcaaatatttggcttacaagtccacacatttgtgaaccaaatgacttaggatacttatttaacctggtttttgcactttagtccaaaagtggactaattttgcacataggtccctagggtttggttttagggttttccagggttccaattagggtttctggtatcccaggggtataaatgtgattcaactttatttttggggatattttatgactattcccctaaagcttgtaggttttctcaacttgggttaagtcttaccccctttaatccctaattagggttaagttccctatctagggttctatttgcaaaataccaaaacaatacaacttgtttgaaatttttacctagtgaatgcactctaggtgtgtcaaacatatgcaatgccaatgtttatgatgccatgctcaagttttagttgctgtaacagcaggggtgttacaggtgaggtcccggaccatccctgtatgtgtgccggaccgtccgcgatgcatagaacaagttaccgtgtttggccacctgtttgtgcttgcacccagcgttggagcgggccacgcgtcgtccgcggatttggcggccgatcgttgcgctggcggccgttggctcaccggacagtccggtgaattatagtcgtacgccgccgaagttttcccgagagcagccagttcgccggaagccagtctggcacaccggacactgtccggtgcacctagaccgagcagcagttggttatacatagccaacttatttccaaacctttttcttctgtttctatcacttagatacaatgcattagtacccaaatcaatgtactaagtcttagaaacataccttcttgttgatttgcaccgcattcctcatttggcatataaaaacccacttaatatgtgttggacacttaatcaccaaaatatactagaaatggcccaagggcacatttccctttcaagtgtaaggctgatcaacaaaataaaggttgaagctgagcattgcttttataagttggtcaaaattttattagcagttactaagtgtaagtgaatatcaaaccatagtaataataaataaaataataataaagtaatcccaatgcgatgcaaatgacaaattaagtttatttccatagattaatcatgtgagggtccgagctgctcatgaccgtgagcatagctagtataccagttttacactctgcagaggttacacatctttacccacaagtcatgttacccatctgccaagagatggtcaatcccatacacctctaccgaagaggagaggcagggtaacactacgaggcctttacaaagttccactagcttcagaaaacccgctacagtttatagggagctccagtgcagagatccctcgcctgaccgccatcgcagcaaaatcaacccaaggacctacctacactgaccactcccatactgcccttgcccctatcgggtaaggtagtcatccactagctttcctagttaatcagccaagggcatcccatactacccttgtggtagcactgttttctcgggtggtcgctccatgttcccattaacataatgatcttaacatgaacagtaataataaactgataataaaagtgtaatcatgaataatatatctccatacccaaaaccacataaagcaatagcaagtactacccaaaaagtttagtggaatcaaggcataaagataatcaaactagggaaacctaaagggtcccatcaaaattaacctatgcagatcattatgattaataagaacatgactgggtaaaaagaagtgatcaagggcacaacttgccttcaatgagctcctgctcagcaacttctatatgctgaacaccagactcctcagtggctggctcgtctactcgcatcaatacaaacaagcacagtatatagagaaaattaacatcacaccaaacatgtaaacaaaatacataataataatctacacattaaaataagatcataggaacaggaatcattaatgttggggacttgttctcaaatgctatgaattaagaacaaggcaacataaaatgttaaatgtaaatgtcctccgtccgctaaagcattatctccccgaggatttaatgaacttcggacgaaggccatgagcaaaatatcacgaaggttacaccttcgtgatcagacttataagacaatgaaaaatgaaatataaaatataaaatattagagaaaagtataccaaaaacaagtaatattattcacatattttattatacaaacctaaatattaaaacataatatttagatatatttataccttcgtcttggcagaaaacaataattccagcgtaacgtgtcagcgattaccagattgcgtgaacaatacaggggtactgttcacctatttataggcacagggtgcagcctgtgtaaaattacatttatgccctttacaatcgactacgataatgacacaaaacatcatgggcctttaagtcatttcatctttaagtcggttcgccccttcgtcttgagatctgtcactgtgccgaagctttataggtgatagcttcggcgctgcttctgagaggatctaccgaaggtgttctcttgctttatgatcttcggctacgaagcatacccccaacagtagctccttcgcggtgctagatcgtttttcgtaacgagcttgatccgtgaaaaagtcttctaggcttcgggatgccgaagatccgaaaaacaccttccctgagctcgttggtgtcacacccgggtttcggggcaccaagacccgggtgcaaacataatcaccaggtgtgctgggaccaagtctcacacatatgatgaatcatggcacaagatcgaatgtcacatctttactacataataggagttctatacaaaataaataattacattataaggagacaacggtccagcaacccaaagttgactgggagacgacggcctagaccactcaagaactcatcacagcatcctccatgcgcctcatcctgtggtacctgttcttgacctatgggagggtgtgagacagcaagagtgagctcacatacgttcatcgctcaacaagttgtggggaataatgtgtatgaactcgccaaaggtgggagctcacgtgtggtgtaaggcttaccaaagaggatggttagagctgagcattgcttttaaagttggtcaaaattttattagcaattactaagtataagtaaataccaacccaattaaatagtagaacagaagtaacaacatcacctgcgatgcaatgcatatgacaaattgaatttagttccataagttaatcatcagagagtcctgagctgctcatgaccatgagctcggctagtataccagttttacactctgcagaggtggtaccctttacccacaagtcatgttacccatctgccaagggatcacgacttcccatacacctctaccgaggaggcaaggcagggtaacactacgaggcctttacaaagttccactagcttcagaaaacccgctacaatttataggaagctccaatgcagggttcttgcctgactgccatcgtagcaaaatcaaccaaggacctccctacactgaccactcccctactgcccttgcccctttcgggtaaggtagtcctccactagctttcctaattaatcagccaagggcgtccataaacccttgtggtggcacgtgtttctcaagttaagatctatgttccaattaacattaatgatcttgacatgaacataaatagaataacaaaataactggaacatagatatgataaataattatcccaaatccatgtaaagcaatagcaaactacccaagtgattcaggggtaaacaaggtaatgagataaacaatctagggtaacctattgggtcccatcaaaattaacctatgcatgaataaatgatattaaagaacattattgggtaaaaagtggtcaagggcacaacttgcctgggacttgagattccaggtactaggattatcttcaggtgacatgtaatctcgctgctagtcgaagcaatacagacaaacatggataggcaaaattaacatcacaccaaacataagattaaactgcgtattaataatctacgcgtcataacgagatcgtagaaacaagaaccactaaattcggagctacagatattgagttatgaatttatgaaatcaattagcacctagaatagattaattcaattgagcaattttaattcaagtttcatggttaaacaaaggtactaggtgataaacaatattaatacaaaattaatgccactgaaatgaattaatttggagttaaaatgaattaaatatgaattaaacaagttttaagatttatttttatactaaaaatcaatttctattattaattatctagtttctctgtgatctggactgcgcgtcatttactaagaagcttgaggtttaattcgcaaaatctaccagactcagccctgacccgaggtggacggcgggttgatactgaggaaatggaggggctcttttgtaaagatgacggtcgaaggggtatcggggcatgtgagctgctggattaaattcggacggccacgattagatctacagctatccgaacagttaggtatctgcagccgttcgatcagaaacagacgcgcctgattagatccaggcaagttacccatccgcgttcacccccgaccgtccgatcagatcctacgatcaggatccaaccacccgaaccggtgcgcgagatcaaatccgaagcgttcaagcgaagagcaacggccgagagccagctgagcaaaaggggcaccctattccaatccacgctgttccttcattatccaacggccgaacccacttctacccccaacaccactccacacagcggcggcgtcgccgcgagcggcggcgaagttcaccagagaccctgattcaggtgccccgagccccaaactatggtccacacaaccataccggaagcccggtatcatccgaagtcaacactctcccacgcaacaccggatttctgcgcccgcgcacgtcttctccgatccgcaacaggccacgacggcgcgactctgcccgcgacgcaccctcaccggcgaggtacccaacccgcggacaagagcacaaaacccccaacctgaaagccccaacgcgataaagagaggacgacgaacttcatggacggtttcttacatggaatccctgcggcaccgacgctctcctcggcccgcgacggacacggcaacagcgaggcgaggcaacaatgatggcagcggcaatcaaggtcaatcccccagcccagagagcactgccagcacgacggagcccccatgagcacccaaccgggacggcgaattcccccaatggctcccaaagcaccgaacgtggcaccatgccctcggcggcgatcctcgcccgaggtagccccagcccccaacagccacgagcctgattccaaccaccggtcgccagaacagcacaaataatataggagggggctcaccggttaatcgtgttgcgtcgaccccccgtgacttagctcgcggcgactgcttccggtagaagtccggtgatagggtctcccttcctcacggtgattctgtggcttcgatggtgtccagggccacgggcgctcggattttatagccaagaggaagggagaagtccgcgtgagaggaggccgagatctccggcgaggttcacgcgattctctagcgcgcgtgggtttgttgggatacggcggggttcgttcagaggacagagatgttactgacgtggtgaccccacaagtcagtggtacgaaagaaaagaaaaggggaggtgttggggacttgttctcaaatgctatgaattaagaacaaggcaacataaaatgttaaatattaatgtccttcgtccactgaaacattatttccccaaggatttaatgaactacggacgaaggttataatgacacaattacgaaggttatatcttcgtaattgaactctcaaagataatgtaaaataacacgagtcataaagcattaaagacaagtaaattagaagtaaacaacatcatttacatattatataaacccaagatattcaaatataatgtttaggtacatttatacctctgccttggcaaggaataatttccgagtgatgtgattgcaattacaagaatgcgtgaacagtaaaggaatactgttcactatttataggcacaggacgcagcctgtgagcaattacaatcatacccctcataaaagtttacaacaacgactcaaactcttatggactaaaaggtcattctatctttaagtcggtttataattccgaagcttcatgaacggcaccctttggcatcacgtacagacagcttcagccgaagctgtttcttcccgcaggaccttcggcgacgaagcatggacccaacagtagccccttcgcggtgctagatcgtttttcgtaacgagcttgatccatgaacaaagtctcttaggcttcaggaagccgaaggtccgaaaaacaccttccctgagctcgttgtcgagaaacgatacagtttccgagcgcgtagcggtcccaccatgcaggttcactattttggtctttgcggcccaccgcgcagcgggtgcgagcagttgtttgccttgtgtaaaaatcctgacgattcaccttcttacctgcaacactatataaacagacaggtaggtgtgaagttaccacagcattcattgctattgcactgttttgctgccaaaaattttaaccatagccgaagcttgactctcgcattcagacgaagctccagtttggtgcctacttcatcagaagaaaagcttcgggagaaaaggttatttaattcccaagagatctttcaagaaattcaaaattaaatggccagagtgcgctctactgctagagttgagcgtgagggagacgaagccgaaggtgcggagactgttcctatctccgaagcaatgcagcgatccggattagtgacctcggaaagaatccccactgccgaaacagaacaagctgctgccgaagcggaacaaggagatattgaggaagctgattctgacggtgattaccatatcgcagtaccgagcaagcctagccatttggactttggaaagtcgactatctccaaggctgatttttccaaaatggtgaagtcgggctatttcaatgaagatgagaagaagctgattcgcttcgggggagaagaaactatcccgaagccagaaaaggatgaaatagttattttcaagagttttctaaaagctgggttgagattccctttaaatagaatgatttctgatgtgctgcaaaagtttgggatttattttcaccaactgactcctaacgccattgtcagacttagcgtttatatcagggctctctgaagccaggcggtggagccgcttgccgacagcttctgtcgagtacatgagctgcattaccagactaaggccagaaaggatgggttgcatgaaaattttggttgttataattttgcctatcggaaaaccacaaaatttcttgtgattagataccgaagcaaatggccggcaggctggaagtcagaatggttttatgtcaaagttgacgatgacaaagagaagctggtacagagccctcttgaactgatcttcggagaaaccagaccccgatgcaatatggcagcagaaggtccaacttggaccgcactggctgaattcaaaattattgcagaacacattggcactagagatttagtgcaggaatttctggccttcagagtatttccaactatgaaggagtggactatgccgaagcttaaaggagaaaagaaagagggggagcttgtccgactaccctattattataagtttaagaaatattttaaagcaccctgccaagaatggctcgatacaatcgaagtgatgagtaatgaaattcttggaaattactccaaaaaagaagaccagctgatgacagcagccttcggcactcggccgaagcgaaggctgaacagggtgcttgatgctataggatttgaatatgctgattatggtcgactgagcggagatgctggaggcccgaagcgaaaaagaattgccagcgctgctgacgaagaggtcgccaaggtagccaaaaagaaaaggggagattctgaaaaacttagccctgaagagttgaaccctgagccgaaggtggccactgcaagaaagaggaaaactgcatctccagaaccaaaaacgttggttcaagaagaagatactcctgcaacgccttttgctgttgaagtagaagagattatgaaggtaatgactgaacccttgcctgtcaagctaagtccgctggcgctggaactgacgaagttttttctgaaggacaaggcagcttcggcagaagaaggtcctgcactaccgaaaaaacgaaggattattcaaatagcagatgtaattcatgggacaccgtcaccgacaccggcatcaagaattgctattgaccagactgccgaaaccgccgaagctaaaggcgccacaaccgaagccaccagagcggaaaccttcgaagctgaaactggcgcagccgaagctgccggggttgaaaccggggccacagaagatccgaacctggaagagacacttgaagttattgataacatactcctaaaaatgactgaggaagaatctgttgtggccacggcgagcacagctactaaaaaggggaaaaaacaaactgaagacattttgggggaagaagattttgaatttcaagatttacttgggcaagaactgacagacgctgaaaaagcagagcttaaaaaatgtgccatagcctgcggatataagccaggggctacactgttcggtggggttaacgaaggaaagctgaggtgccttcgaaaccgcagcgaagctaaaattgttagaactctctgcaaaaacattggcctgccgaagctagaaacggacctctgccgttaccaacgacaccatatcgccggaagcttgctttatgctaacttcaaggtaacaaatatttttgttattttattattattattattatcttttaggtcgttttctaacgaagatcgtttcgacagagcatattattaagtaaggtactaaaaatgcaacaagatctcgaagaagagaagaataaagctgtcatccaagatctggctgaaaaagttgaaaattacgaagctaatctgaaaaagaaagacttcatcatccaagaccttgaaatcatggttaaagagcacgatggtgcattagaaaagaaagattttgttattcagactatggagggttctttggctgaagtccaaactgagaataacagtttaaacaatgaattgctccaacagtcagaaaaatttgagcaagaaaagaaatatcttgaagcaagcctgaaaactgaggtggataaaaattcaaatttgcagaaatcctttaaagaacttcaagagaaatgcctaagcttcggcagccgatgcgtgcagcggctgaaggatgtgtttcattctgtcggagccagctctgcaaaatttacaccttcagctgaaaatctgcccagcacattagaatatattgaaggcgaggtgatgcccttgacgaagttattggtgggcatgcggacttctgcgccctggtagcttctcggggcacagccaccgcttttctgaaggctaactgtacgcatggaaatattgtgaatagaccaaactttagcttatcagcatcagatctgatagatatcccaagcctagcccgaagcattggaaatagattcatgacccagatctgggtaattggcgggcgaaaaatggcgggtgacgaagctcgaagtcatcttaagccggtaagaaacttatacttgttacttttaccttctccttgaaatttgcacctttcttattctgctatttgatacacgcaggatgacgaagctgaagaatgacgaagctgaagcttgacgaagcctagcctgaagcttgatagttgtttacaatatactttcctgcaaaaattttggagaaacttttgtaatatagttatggaacaacttatgtaaatttgta

SEQ ID NO: 64082 - DNA, 868 bp, Zea Mays
attccgagagatgcgattgcaaataccagaatgcgtgaacagtaatggaatactgttcactatttatagacacaggacgcagcctgtgaggaattacaagtatgccccttataaaaacttacaacattgactcagacatttatggactaaaaggtcattctatctttaagtcggtttgcaatgtcgaagctttacaaagaggaaccttcggctatcttatacaaacagcttcatccgaggatcgcttctttctataagaccttcggcgacgaagcatggacccaacagtatcaaattctgatttacaaaaatgcttagccctgctcagatcttgtggatagaggtttgtcttttgctttaaggcctagctcaggggttatcctgagaaaagatggcttctacctgcaagaatattttcattgagagcgtggtgggatcttactgcaaagttccctgtgatgctcttttcatcctaaggaacacaaacaatcctaaggatggaagtacttaaatcgggacttgggctatgaacaggtgatgttctacccaggttatttaaggattggatgcgtatgtaggcctgtatgatcaaggactatcttaactagccacatgccctggatatgggacagggtaagcttgaacccggctattccatacatgaaaagacaatcgcgcactgggagtggagagatggcaagagtggcacgtaccctcctggcaaaggatcgcctaaaaggggtggtgtgctctcgggtggcgtggacctgttcatgtagtggaggatccgtgggaacggttgacatatgcaagggttaagtgctacatatgtcgtgtggttagagatcctcagctgagtaaatcgatt

SEQ ID NO: 64083 - DNA, 459 bp, Zea Mays
cttaaatggaaatccaaataaataatataataattattagtccaaaaataaatattttatttataaataattttggtttagttattatgaattttagggttatttaaaaatattttttgatttagaaaaggaaatagaaaaagaagaaagaaattcgaaattgaaaaaaaagaaaaaaaataaaaagaacaaaacgctcgttctcagccccagccaatcctgatcactcacccagcccagcctgagcgctccttttccctctctggatcacatagtggtgggtcccatttggcagtatgtttctttaatttccagcgtctcctatgctccttcaaccgtgtagccgccacccatgccgcttgagctacttgcaagttgctgcgtgtcctcgccacgcaccactgatctccgtagtggagtacggccggaccttcttcctccattactgcgccgcaaact

SEQ ID NO: 64084 - DNA, 187 bp, Zea Mays
cctcctctctccattcttgcagccaccaaaccctagccgcccccgcccccctcaatcccctcctcccaaggtgccaatccttgccgctcggatcatcgtcgtcgtggtgcgagtcttcaatcgttttggtggagggaagaagggaggaaggaaagggggagaatccaaggtgatttttgtgttcatc

SEQ ID NO: 64085 - DNA, 510 bp, Zea Mays
cacttctctcccccttggctgccgccccccctgcccatctcctcctctctccattcttgcagccaccaaaccctagccgccccccccctcaaccccctcctcccaaggtgccaatccttgccgctcggatcatcgtcgtcgtggtgtgagtcttcaatcgttttggtggagggaagaagggaggaatgaaagggggagaatccaaggtgatttttgtgttcatcccttgttcatttgcgctgcaatttaattgattagaggttgcgtttgcgattgggtagagggggctgtccagaattttaggtggtgggtgaacagcagtggtctagcagtttctgtgtttttttcgtgaggaattaagggaaataagtttggggatcatgtagaactttaccttacctttccaacgagtatttatgcgctcaatttggagttataaattgaaagttatcaccgtttgaatccgggtatgtggctgtccaaaaaaaacagattttcagggggatgaac

SEQ ID NO: 64086 - DNA, 849 bp, Zea Mays
ctcaattgtctaatattatggatgatcatattttggtaatgatatatgtggttgattcccatctggatgaagttgaagtgtctttttaaatcatgttatatgaagtgttgtaggcatgacatgcacatcgcatcatccatcttgcattttgaagttatgtcgtgatcttatggtccgaccgtaccggtacatttttagcatcgtacgttgcccgaggaggggtacgatgcggcttcatatccttagaggtatgaaggcaaaagtcatccttgcatttgcagacatttgcactcatgaggaaatatatgaagtgtgacattactatgttactattgtggtttctacctgcgaggtgtggtaactaggtgcgttgtacgttgtatacgtgctgcaccttcgtaataagaaggttgtggaatcaagtgatggtaaaacaatgttcttatgtggttaaactgtttgatatcattttacttgttgagatgtgtcatttcactcttgcattactcaatgcaggtacttgatacatgttgggaatgaggggagtagcagcacgtccactttcactctcacaataacgctgcccaggcgcagccatgatttaattagaaacttattgtcaaaataagtttgtttatttttttatatggtcgtgcgcactggttaattcagttcaggtcgtatgtttatctttccttgctggccgagtaataatacttagtatgttttggtcatgatatatgtttatactctgttgctccctcttttatgcaatcttgcaaagaggatgctgccaaaattttatatatggacgtcggaagtgtagtacagtagcattccgggttgttt

SEQ ID NO: 64087 - DNA, 354 bp, Zea Mays
cgaaaagaatagagtcgacccaggcgcatatttttcttttttctctttttattttcttttctgttttccttttatttttttatttttgaattcatattttgaattcccatttaaattcaactttgtggtagacttatctcaatattaaatgtctcactcaaacatggcatgtggttaacttatctatttttaatattttttttgtgattattaatgcttctcttttctcaaatcttagaatttccttttctatttcaaagttctcacttcaaattcaaacacatgttttgaactcaaacttttcaagtgtcaaaataattcctaatataaaatttattatttacaatattattt

SEQ ID NO: 64088 - DNA, 1633 bp, Zea Mays
cttaaattcaaattgatgattatcttgtaccccaaaacacgcaattcacactcctcttggaaacatcctcaataaggcatatataacaatattattgtagtaaaactcaaccatgaaaaacatggtgaaaacaagataggcatacttgtatatcacaagcataataacaacttcattctcacaaatgaccagcgatatctacaacattaaacaaacaatattaaaatttcagaaataaattatatcaagcattaagccataaacaacttaccacatcaccgtaaaggaatagggaggggtgaggttattgtcatctgcacttcaaagacactaacatatatcaaagatatttaaacccatacccttcctatatgtgcgagtgtgtcaaatttatcttcaaattgccaagaatctaaagcctatgctttgataccaactgtaacaccccgggatcctcaaacacccagaatgctactaaactacacatctaacattcatatataaaatttcgacagcatcccctttgaaaattacataaacggggaagcaacaaaatataaatagatatcatgataagagaacataatagacattaataatctgctagcaatggaaagacaaccataacggcatgaactaaatcaaccagtgcgcacaactagttagaaacaatatcctttgacaagaagtttctaattaaatcatgattgcgcctaagcagcgttattatgagagtgaaggtggatgtgctgctacttcccacttcccttgatgagcaacaagcacctgcattggtaatgcaagagtgagatgaaacatctcagcaagcgaattattttgacaagatatttaaaccacaaattgaattaatcaacattttaaaagaatcacaattaagatcagaaattcttgtagatatagaactcagtagtctcaatataaccaataccatctcatttccttaaacaaccacaatagtttgtataacacttctctacgtcaacaatacctgcaaatatcacttcaatgtatgcataggaacacaaagtgtaggtactctgtcttcatacctctgagggtataaaaccacatcatatgcaaatatcacttcaatgaatgcatatgaatgcaatgcatatgtcctctgccttcatacctctaagggtatgaagccgcatcgtacccctcctcgggcaacgtacgatgctaagttgtaccggtacggtcggaccataggtcacgacccaacttcagatgcaagtgaatcatgcaatgtatatggcatgctgcatttatcaatatacttcacttccttcacatataatacaacctcaaataatacttcatttaccttcagatacaataccaacctcaaataatacttcatttaccttcaggggtgtgaattaatcttatgagtcatactcgaatcataatcatcatcaatatatgattgagcatcagtataatgcaagcaagaaaatcatcaccatagaatccaattatgaaagaatccaatacttctgaatattagagtgtaggcaatagaaataacaggtcagaacggaagcaaccaccgctacattcacttgccttcatcgaagaagaaaaatgtactaggcatgatctggag

SEQ ID NO: 64089 - DNA, 457 bp, Zea Mays
ccgggatccacaaataccttgaaatgctactaaactacacaactaacattcatatataaaatttcgacagcatctcctttgaaaatttgcataaacgtggaaggaacaaagtataaacagatatcataataagaaaacatactagacattaataatctgctagcaatggaaagataaccataacatcatgaactgaattaactagtgtgcacgactagttaaaaacaaacatcctttgacaagaagtttctaattaaatcatggttgtgtctgggcagcgttattatgagagtgaaggtggacgtgctgctactcccctcattcccaacatgaatcaagtacctgcattgagtaatgcaagagtgagatgaaacatctcagcaagtgaattgtttcgacgagatatttaaaccaaaaaaattgaattaatcaacattttaaagggatcacaattgag

SEQ ID NO: 64090 - DNA, 1812 bp, Zea Mays
atcttcaaattgccaagaatctaaagcctgtgctttgataccaactgtaacaccccgggatccacaaataccccgaaatgctactaaactacacaactaacattcatatataaaatttcgacagcatctcctttgaaaatttgcataaacgtggaaggaacaaagtataaacagatatcataataagaaaacatactagacattaataatctgctagcaatggaaagataaccataacatcatgaactgaattaactagtgtgcacgactagttataaacaaacatcctttgacaagaagtttctaattaaatcatggttgtgtctgggcagcgttattatgagagtgaaggtggacgtgctgctactcccctcattcccaacatgaatcaagtacctgcattgagtaatgcaagagtgagatgaaacatctcagcaagtgaattgtttcgacgagatatttaaaccaaaaaaattgaattaatcaacattttaaagggatcacaattgagatcagaaatacttgtagatatagaactcaatagtcccaaaataaccaatgccatctcatttcctcgaacaaccacaataggttgtataacactcttctgcgtcaacaatacctgcaaatatcacatcgatgtatgcatagtaatgcaatgtgtaagtcctctgccttcatacctcttagagtataaaaccacaccatctacaaataccacttcaatgaatgcatatgaatacaatgcatatgtcctctgccttcatacctctaagggtatgaagccgcatcgtacccctcctcgggtaacgtacgatgctaagttgtaccggtacggtcggaccataggtcacgacgaaacttcagatgcaagtgaatcatgcaatgtatatggcatgctgcatttatcaatatactttacttccttcacatacaatacaacctcaaataatacttcatttaccttcagatacaataccaacctcaaataatacttcatttaccttcaggggtgtgaattaatctcacgagtcatactcgaatcatcatcatcatcaatatatgattgagcatcagcataattgaagcaattaaagcatcaccatagagtccaattatgaaagaatccaatacttctgaatattagagtgtaggcaatagaaataacaggtcagaacggaagcaaccactgctatattcacttgccttcatcgaagaagaagaaatgtactaggcatgatctggagtgtagccacctgctagcgggcataaaaacttagtacaaaatatttcacaaacatttgccaacaatcaacaaatcgctcctacacttgaaaccaagacctggtggaaagactcccaccctgaaccacatgacatacaacagcagcgctgtttgttaattttgtatctttaaaattataacagttgtgatatcaaacaaataatctaggagtatctacacaaaatactctacaacttcagtattcaatggataattaaattcttccatctacaagttctaaaacctctaacaagataactgactgaatctgtttcagacagcagcgtagttaacttcaaaattcgatatctcacaaactactcaacccaaaatcatggaattctactggcagtaagaacatttattcctctacagaagtctccatagttggaagagccaattcggccatttacctgatgaaacctaccagtgaacagacccgctcatttttgtcaggcaaacaggaacagccacagtaaaacaaacataactggagtttcacaaatcatatgaatgcactctttaac

SEQ ID NO: 64091 - DNA, 460 bp, Zea Mays
cattttgtgaccatatacaaataatgtaaaaagaaatatgttaatcactgaattagaatttaaattctaaaggaaattctaagagttgagggaagaggataaaactactacacataatagagaaataaattcatgaacacaagaagccctttccatagtagtatattaaatttgtacatttaaaatgagtatcagttcacaattggaattggattcaaatttgaattctagaaataaaaaaagaagaaaacagaaaaggaaaaagaaaaagaaaaagaaaaaagggaaactatgcgcctgggccaacttcgttcctttcggcccagtaaccaaaccctactgcgcagcccgtctatcaactgtgaaatggcgccgccaagtggggccctttcgtcagtcggacggtgctcatctgtgatcgcccctcacctcttcactggcgcgtgggccccaggcgtca

SEQ ID NO: 64092 - DNA, 227 bp, Zea Mays
attcggcccagccgagggagggggggggagtttttctttttctttttctttttctaattctaattcctttcttctcctttttctatttttgtttctttttgtttctttttctttggagaccaaaaatattttctaagtgatcttgagtgagaaacatagtctatgtgaggtgctctaattatttcaagtgtatgcacatgagaaggggttctaagggtaaggttaag

SEQ ID NO: 64093 - DNA, 286 bp, Zea Mays
ttgggccgcctgggctggggagagaggaggggaagcgcgggcgcgtgggcgggttgggccgaaattcggcccagccgagggaggggggagtttttctttttctttttctttttctaattctaattcctttcttctcctttttctatttttgtttcttttttttctttttctttggagaccaaaaatattttctaagtgatcttgagtgagaaacatagtctatgtgaggtgctctaattatttcaagtgtatgcacatgagaaggggttctaagggtaaggttaat

SEQ ID NO: 64094 - DNA, 339 bp, Zea Mays
gtttgctcatatttgatttatggttgtttttatagaatttcttttatattgaaagtccaatttattaatataaaaacattggtccaaaatgaaatattttagttataaataagtttggtataactattatgatttttagaaatatttaaaaatatatttgtttaaatttttaatagaaaagaaaaagaaaaaaaaggaaaaaaaagacaaatttcgaaaccctagccgtcggccgaagttggcccaaccggcccatccgccgcgccccctccactctccctctcattctctctatggcgcgtggggcccacccgtaggcgccttcttcctcctctcaac

SEQ ID NO: 64095 - DNA, 831 bp, Zea Mays
cttatattcacataaaaattatgttaattacatctccgtagagaaaacccctgattaagagttcaacatgtatacctaaaagaaaattgcatcatatggttgactattacaaactacaaaagaaaacaaaaaatcttcgcctcatgtagtcgtggatggttgcatgcgttcgtcagatacgacatgatttcattgttgacgagctaacaaatatctctttattgctggtttggtcagctctgtgccgaaccagacatatatttcaattcacacgcacttttgcgagttaaagccatgtcgtgccgctaagttttaataacttaacatatgactgttgcttatttctttgggtagtaggcacccgagtcatataatacaacacatacatgaataaccaagaagattagcttagtcaacatttatttctttaatggataacatgttatgttgtatatttatatggtttacctcgaggattatatttgattatcttatcggattatataatatcacgaatggagatgagatgtcttgaaatgtatgtttatgaatgcacttgacatatggtgtgagatttctttgagccaagtcaaatcataatatttaagttcttgatggaggatcgatattgggcatagttaagttgtttgtccaaattaattggaagaaatgacgattgatgaaggtgaccaagtgtattttaactagctaagggggtgtttggtttgtagggattaaactttagtccctccactttattccattttagttctcaaattgttaaatagggaaactaaaatagagctttaacttccatatttagtaatttag

SEQ ID NO: 64096 - DNA, 364 bp, Zea Mays
tatcaaggttttctcctgttcttcggacagttgggatcccaatagcaccttctgctatgttatgtcctcacataagagcatgggcttcggctgatcgactgaagcaactttctcccttctaaacttgtactgctcacaagctttagctccatctatgttatggattgcttttgagtctgtccagtttcctttggcccttctggcagcttcctgacttccatgaatggcaatgggtccttggtctgaaggtatcttcatgcaaagatatgctggatgaagaattgcttcgaaggcattgagagtaccacgaccaaggattgcattgtaagggtattccatgtcaacaatatcgaacacaacttat

SEQ ID NO: 64097 - DNA, 308 bp, Zea Mays
gcagaataagagttagaccttttgtactatttcattagtggtcatgcccgctatcatgatagttgctaaaggtttcttctccaattctgtatgtcagtagtgctgatgttggatatttctattgcagctttaggctggagttttccatttgatatttggagtgttagttgtattctttttgttattttggttttatctgtttttattgctataagatctcgtttgcaagctggcagttattatacctttaggttttcctttgtcatgtcaaggtgtgataatttcttctcccataatcgagattgttg

SEQ ID NO: 64098 - DNA, 336 bp, Zea Mays
cttatcttgacctaaggatagagctgtcttttcccgtggctggagatctgtaaaagaacaagttgatggattatatgaggccggatggcataacaacagtgagggatcagttgatggttgcaatgcagcgaagccagctttccgcggtggtgatcttgcaattttctcagtttcggacatcaacgactgcatcctggagaacggaggatgcgagcaaagcatgaccaacgatttttattttttatttttttatcgaacgcgcaggagaactgcacatcttatatattagagaggaataaaaaaccttacacaaaggagaccttgctgagcaagtct

SEQ ID NO: 64099 - DNA, 347 bp, Zea Mays
cacaatactcctccgtccggcctttagccaggagggtacatactactcccaccatctcccacgtccagtgcacgattgtcttttcacgtatggaatagccgagttcaggcttaccggagcatgtggctagttgcaaagtctccaccacaacaggcctacatcgaacggtccttaatcgacacagacgggcgaactttcttactcaacgtctggtctacatttcatattatttcccaaaacttgatacctgagagaggtacccaccttgaatgatgaaatcatcgcggccacaatgggttcatcatcacaagtccttttatttcacaaactcccatatcctgtgttac

SEQ ID NO: 64100 - DNA, 255 bp, Zea Mays
cttcacttgggtgttctttttacaggaaaaatctcaaacccaagaaaccttaaagggattcttgagacgggctcaaaacgagttcggcttaaggatcaaaaagattagaagcgacaacgggacggagttcaagaactctcaaatcgaagggtttcttgaggaagatggcatcaagcatgagttctcttctccctacaccccacaacaaaatggtgtagtggagaggaagaatcgaactctattggatatggcaag

SEQ ID NO: 64101 - DNA, 776 bp, Zea Mays
aaacatcatacgaactcctaaccggtaaaaagcccaatatttcatattttagagtctttggtagcaaatgttttattcttgttaagagaggtagaaaatctaaatttgctcctaagactgtagaagactttttactaggatatgattcaaacacaagggcatatagagtctttaacaagtctactggactagttgaagtctcatgtgacgttgtgtttgataaaactaacggctctcaagtagagcaagttgatcttgatgagataggtattgaagaggctccatgcatagcactaaggaacatgtccattggggatgtgtgtcctaaggaatccgaagagcctccaagaacacaagatcaaccgtcctcctccatgcaagcatctccaccaactcaaaatgaggaagaggctcaagttgatgaagaagaagatcaatcaaatgagccacctcaagatgacggcaatgatcaagggggagatgcaaatgatcaagacaaggaggatgaagagcaaagaccgccacacccaagagtccaccaagcaatccaacgagatcaccccgtcgacaccattctcggcgacattcataagggggtaactactagatctcgtgttgcacatttttgtgagcattactcttttgtttcctctattgagccacacagggtagaggaagcactccaagattcggattgggtggtggcgatgcaagaggagctcaacaacttcactaggaacgaggtatgacatttagttccacgtcctaaccaaaat

SEQ ID NO: 64102 - DNA, 146 bp, Zea Mays
cccctgcccacctcctccccctccattgttgcagccaccaaaaccctagccgtcccccccaatcccctcctccctaggtgctactccgtgtcgctcggatcatcgtcttttggtgtgaatctccaatcgttttggtggaaggaaga

SEQ ID NO: 64103 - DNA, 1223 bp, Zea Mays
gtttcagcaaaaggaatagaggtggatgaatccaaggtgaaagcaatcaaggattggccagctccaatgaatgaaaaacccaatatggaagcctccaagcgtgttgcatatataaaaaagatacatgtgaagaccaatgaagaaattaagctcaaagcagtgcgcaaggctgcaagcatgaacaagcataggaagaaaatgttatttgaaccgggggacttggtttggattcactggcgcaaggagcgttttcctgatcagcgcaaatccaaattgattccatgaggcgatggtccatttcgtgttcttgccaagatcaatgataatgcatacaagatagatcttccaccaagctatggcgtgagcaacacgttcaatgttgctgacctcttaccatatacaagcgaagacactttagagtcgaggatgactccttttcaaggggaggaggatgatatgaccatgccattaagcaacacattacaacccccaagtcatactacatcaactcaagtacaaccaacatcatcaccaactcaagcctttgatggaccaattacacatagccgagctaagaagctacatcaagaggtgcacgtgctactttatgaatttcaattaaacactaatgagaactttatgctacctaagtcgtgtatgttgatattacttaggttcaccaaagaggaaggacaaaacatatcgagggcgaatcagcaagaagagctatgtccgggtcagtccagcgcaacagaaccgtccagaagaaacagtgatatcttttgatacccaaaagctatgaaggcccataagtactttttggaaagctattgaagtctagtttctaatgcttctaaagccgacttaatcaaacctaccagaaaggcagccgacttactttagtgctgactggtcagaaggtcaacagtctgcttgatgaccaagttttcgtattaaactgcatcattctatgaagtttcattaagcatgctatatatggtgagaaagcttatcaagttagctttccaatgcaaccagtcccacatcatttgaagattcctagaagaagttattgtcaaaatactgaaggctgtgcagaagtcaaacagccacacggaaatcagctctgcagatctcccgaagaggctccttcacattagcacgtgaaaatacttttgtttcgtgtttatacctcgctaaggctggttgttactagtataaat

SEQ ID NO: 64104 - DNA, 684 bp, Zea Mays
gcttaatgggtcaagggaggaggggaggaaggcgaccaagcatttatcctccggagctgttggcggggacggctgagggtagctgaaagctcgctggtgggaggagaagaaatctgcggcaaaaacgcaagtctgttgtagcatgcggggagtgggagatctacaggaccccgatagcgggcccaccagtcattctggagcgtgcgcaggagacgatcgcgtgggatcgaagggggaatggccgaggtgcagagccggccaacagaattcggcccaacgcgccatttccttttctcttttttttattttttttttgaatctcaatttggatttcaaatttgtggtgtatttgtactcaattctctgtatatatgctttgattagattattgtggaataaatttatccatttataaatgtatagtattttctctttccttctctatttcgacccctagaatttcttttagaattaaattccaatttggatattaacatatatatatatgtatttttattctatttttatatcatcacaaaatgcacacaaaataaagcctcggcatgatgcatattccttttgttttgattaatcattcttaactataggtgtgctctcggtatgatgaatatatggaatacaaaataagaataacaactatatactcattgtactttttttttg

SEQ ID NO: 64105 - DNA, 458 bp, Zea Mays
gagtgcagggcgcacgactgggtaggggcgtgcggggctagtcgggtgctgctcagtcgcggccggtcgagcggggttctggtggcgcgtcgacttggccttcctagcggcttcaggcgcgagcgtgagagaggagcgagggagggaggagagagaacaggggagagggagaagagtagcagggaggcggcggcttctgctggctgggaggcaggcgctagcgccctagggttttggggattgggcccttagttgggccggctaggttaggtttagttttttttcttttttttttctaattccgaaatgtatttttaaagagctcaaaaattccataaaaattcaccaaaattatttataaataacatacttgtttttagactaacaattattatattatttaattattctattaattactaggtctttctttaaaaagaattgataataaacatctg

SEQ ID NO: 64106 - DNA, 472 bp, Zea Mays
gccgccggtcgagcggggttctggtggcgcgtcgacttggccttcctggcggcttcaggcgcgagcatgagagaggagcgagggagggaggagagagaataggggagagggagaagagcagcagggaggcggcggcggcggcttctgctggctaggagccaggcgcgagcgccctagggttttggggattgggcccttagttgggctagctaggttaggtttagttttttttctttttttttcttattccgaaatgtatttttaaagagctcgaaaattccataaaaattcaccaaaattatttataaataacatacttgtttttagactaacaattattatattatttaattattctattaattactaggtctttctttaaaaagaattgataataaacatctgataatcaatcaagcacatacaaggaaaatgatcaaaatgcaaataaataattaaacacttaaaaaaa

SEQ ID NO: 64107 - DNA, 1971 bp, Zea Mays
ctcccttttgcggggtgcaaagaatgttagattacatgattatcttttcatgatggcaagaataaggtttaggaagattaggagttttgtttcaatagaactacttgtttcgtggtgctttgaggtgaggtgtttgatcttcttatacattcgtcgggtgtggatgtttcaccatttaattaaaattaattattgaagttggtaagggttgtgcttagttcatattaccccttcataaaagagtgttgtcttaagacattgatgttgatgtatagttgcgtcccaatttgatggtgtgaaattgtagtgttgattgcatctatgacttgctttgagcttcattgcatgttgtttcatgcttgatgtcagggttgtgtagtttccttagacaattagtccaaggtagaagttcttgtgttaattaagaccaataatggacccatgttttgaatggtggtgctatatggggtaccttgggtgttttgcttggagtggccgaattcgaggacgaattctttttaaggggggtagagtgtaatatcccaaaaaaatgttgaccaaaagttgatcttcggtgcgtggatgtgggaaagggttgtgggccgttggatgcaaggcagaagtcatctggggcgtcggttcttttctcccacaaaaccctagggggccaccccttttccctccaccccccctctcttggccgccaccctcccccatttttcccttggttggccgtcccctcctcccatggcagcctcccaccatttcttcctcctccatagatcttcccctcccccacgcagcaaggatcgagaagaggaggagcaagatggattgaagaggaagagaggatcaaggagatgttctaccccccccccatctattgcagattttcttggggaaactctaggtaagtatgggatccttgttcctccatataattatgtgtttttggaggttgtggatcatgtggattgaagaattagaggttggattagatgtggggttaggttttgatctcgaatttaatttctacagaatggcagattcgacagtttctgttcatgccagttttccgtggtcttagtggcctcaaaaaaataaaacgtttatatatgagtcgtagataatttgtagatctttccgtggccgcgaagaacacctcaatcggacatcagaacagaaagttatagcagtttgattatagcagtttttcagtctcataattctgtgcagaatctgttctcttaagagttaggcaattttatcaacaaaattaaactgtgagttggtaaaagaagttgtagataatttcataagttttccagattgttaaagagtgcattcatatgatttgtgaaactccagttatgtttgttttactgtggctgttcctgttaacctgacaaaaatgagtgggtctgttcactggtgggtttcatctagtaaatggtcgaattggctcttccaactatggagacttttgtagaggaataaaagttcttacttccagcagaatttcataatttttggttcagtagtttgggagatatcgaattttaaagttaaccatactgctgtctaaaacagattcagtcagttatcttgtcagatgttttagaacttgtagatggcagaatttaattatctattgaatactgaagttatagagtattttgtgtagatactcctagagtatttgtttgatatcaccgctgttttaattttaaagatacaaaattaacaaacagtgttgctgctgtatggcatgtggttcagggtgggagtctttccacttggtcttggtttcaagtgcaggggtgttttgttgattgatggcaaatgtttgtgaaatatttgtactaagttttatgcccgctagcaggtggctacactccagatcatgcctagtacatttcttcttcttcgatgaaggcaagtgaatgtagcagtggttgcttccgttttgac

SEQ ID NO: 64108 - DNA, 432 bp, Zea Mays
ctggacttcactttgtgcgcatttttttgtgataatataaagaaaaaaagtgtattgatatccaaatttcggaatttaaccctaatttgcaagattagaataagaggaaagagaatgccttataaaagaaaactacataaaaataaaatttagctttccaaattgatgaccttgaattatacgttatacttgggtacaaattcacaacaataattgagttcaaattggggttcaaaacaaaaaaaaagaaaagaaaacagaaataaaaaaaagaaaaaggaatgaaacccctaactgggcctcagattcacatttggcccaccccgaaaacccctccgcgcggcccaacttgaatttcccctcccgcgcacgactcattgtcgggtgggccgtgttgtgtgtcgctgaggcgcacgcactcgcgaccgtgtt

SEQ ID NO: 64109 - DNA, 354 bp, Zea Mays
taggattaatagataaataaacgaatgaataaaatattgatgcatctcaagttgagtaattttagattgttgcatattgtttcatatttcaaattggagttctaaatttgaaacttgaaataatagaaaaaaggaaaaaaacaaaaaaacagaaaagaaaaataaaaaaatgttaggctattcagccactaaaatcaataaccagcccacgtccatgtatatttttctattatttattctttccgccaaatcctatatcaacgtgactttatcaatgacgtcatccaagcttcgcacgcatcgtggtcgtgtgtgcttctgtgctcacgcattgtcgctggcactggacctgcc

SEQ ID NO: 64110 - DNA, 814 bp, Zea Mays
cgaagtattatttgacgtttgtattgtatctgaaggtaaatgaagtattgtttgaagtttgtattgtatatgaaggaagtgaagtatattgataaatgcagcatgccatatacattgcatgattcacttgcatctaatgttttgtcgtgacctatggtctgaccgtaccggtacaacttagcatcgtacgttgcccgaggaggggtacgatgcggcttcatacccttagaggtatgaaggcagaggacatatgcattgcattcatatgcattcattgaagtgatatttgcagatggtgtggttttatactctaagaggtatgaacgcagtggacttacacattgcattcctatgcatacattgaagtgatatttgcaggtattgttgacgcaggaaagtgttatacaacctattgtggttgttcgaggaaatgagatggcattggttattttgagactattgagttctatatctacaagtatttctggtctcaattgtgacccctttaaaatgttgattaattcaatatttttttggtttaaatatctcgtcaaaacaatttacttgctgagattttttcatctcactcttgcattactcaatgcaggtacttgattcatgttgggaatgagggaagtagcagcacgtccaccttcactctcataataacgctgcccaggcatagccatgatttaattagaaacttcttgtcaaggatgttgttttttaactagtcgtgcacactagttaattcagtttatgtcgttatgattatcttcccattgctagcagattattaatgtctagtatgttt

SEQ ID NO: 64111 - DNA, 848 bp, Zea Mays
gtttcatcgcctacactctaatattcagaatcatcgaattctttcataattgaactctatggtgatgctttacttgattgtattatattgatgcttaatcatatattgatgatgatgatgattcgagtatgacccacgagattaattcacacccctgaaggtgaatgaagtattatttgaggtttgtattgtatctgaaggtaaacgaagtattatttgacgtttgtattgtatctgaaggtaaatgaagtattgtttgaagtttgtattgtatatgaaggaagtgaagtatattgataaatgcagcatgccatatacattgcatgattcacttgcatctaaagttttgtcgtgacctatggtccgaccgtaccggtacaacttagcatcgtacgttgcccgaggaggggtacgatgcggcttcatacccttagaggtatgaaggcagaggacatatgctttgcattcatatgcattcattgaagtgatatttgcagatggtgtggttttatactctaagagatatgaacgcagtggacttacacattgcattcctatgcatacattgaagtgatatttgcaggtattgttgacgcaggaaagtgttatacaacctattgtggttgttcgaggaaatgagatggcattggttattttgggactattgagttctatatctacaagtatttctggtctcaattgtgatccctttaaaattttggttaattcaatatttttttggtttaaatatctcgtcaaaacaatttacttgctgagatgttttcatctcactcttgcattactcaatgcaggtacttgattcatgttgggaatgagggaagtagcag

SEQ ID NO: 64112 - DNA, 471 bp, Zea Mays
gaatgtttatgtgtatctcttatggaaaggcttcacccttccaattattataatcagttatgcactttgggtactatcaagacttgtaataattacaattcttcttatgttgtaaaacttgagctttggaaatgtaaaatatgtttttgtaaagtcttccgctctatctccgaagtgtgtgtatcaaatgtgattactataatgtacatgttatgtgggagatccttgggatgatgagttcgagttgatgaactcgatagccttgttaagttacccggtacacgtgcacagccatctgaggccgttaatggcaaggattggtgcatgtgggcctgataacttgggagggctatcacagcgtggtatcggagcgatcccccattagcatggatattaaagtaatcatttgataaacttcaaaatgattttgagtctaaatgaattttataaacttaagaatctataatcaag

SEQ ID NO: 64113 - DNA, 2102 bp, Zea Mays
gtggtcgttggcttgggattcaacggccaggatcagagagagagttgtgagatatactgaaccgttgatcttgtgattaaaggccacgaatagaagagagaataggatgcttggtgccgtcgatctctggattgagggtccagattagaagcattatacccctttggtttataaaatctgagccatcagcttttaatccagcggcccagatatcgcgataccctttcgccctggcgttttgcttaagagaccctaggttcctttgaaatagaacccgccgtccattagtcactatgcactgtgtctctggaattttatccccgagccccctgcgcttctgtttaattaaggcgcagtccagtggataggaaaatcatagaaaatgatttagaaaatgattttagtgttaaaataaatcagaaacttatttaattcataactaattcattttagctcctttttgacccattccagttgcaataattttgttttaatattatttaccacttagagcctctgttttgtcatgaaaacaattagaaatttaatctctcacttaatccattttaaacacataaaacctttgaaaattcataacttaaaatctataactccaaaattaatgaatcctgttcctatgatcttattttaatatgtatattattaatgtgtattttgttcttatgtttggtgtaatgttaaatttgcctataccatgtttgtttgaattgctacgactagcagtgagaacacgagtcacctgaagatcatcctggtacctggattctcaagtcccaggcaagttgtgcccttgatcacttcttttacccactcatgttctaattaatcataatgatctgcataggttaattttgatgggacccaataggtcaccctagtttgtttatcctgaataccttgtttacccctaaatcacttgggtagttctgctactgctttatatggttttgggttaatatttcattatatctatgttccagttatgttgttatttcatttatgttcatgacaagatcattaaatgttaattggaacatagagcttaacttgagaaacacgtgccgccacaagggtttatggacgcccttggctgactaattaggaaagctagtggaggactaccttacccgaaaggggcaagggcagtaggggagtggtcagtgtagggaggccctcaggaggattttgctgcgatggcggtcctgcaagggattcctgcattggagcttcccataaactgtagcgggttttctgaagctagtggaactttgtaaaggcctcgtagtgttaccctgcctcgcctcctcggtagaggtgtatgggaagtcgcgatctcttggcagatgggtaacatgacttgtgggtaaagggtaccacctctgcagagtgtaaaactggtatactagccgagctcgcggtcatgagcagctcaggactctctgatgattaaattatggaacttaaactcaatttgtcatatgcattgcatcgcaggtgatgttggtacttttgttctactatttaattgggttggtatttacttatacttagtaattgctaataaaattttgaccaactttaaaagcaatgctcagcttcaaccatcctctttggtaagccttacacttcacgtgagctcccacctttggcgagttcatgcacattattccccacaacttgttgagcaatgaacgtatgtgagctcactcttgctgtctcacacccccccacaggtcaagcacaggtaccgcaagatgaggcgcatggaggatgctgcgatgagttcgtgagagatctaggccgtcgtctaccagtcaactttgggttgctggatcgtttcctcatatgatgtaattatttaattatttttgtacagaactcctgttatatagtaaatatgtgacattcgatcctgtgccactatgcatcatatgtgtgagacttggtcccagcacacctggtgtttatgttcgcacccgggttttggacccctaaaatccgggtgtgacaggatcaattggtagtaagcttttctgccaaaaagggtctttgataaatgataagctttaccttgagtccca

SEQ ID NO: 64114 - DNA, 396 bp, Zea Mays
atcaattaaaaataatgaatttagttattatggtaattaggataataattttgttttaagtgtttaattatttatttgcattttgatcatttttctttgtatgcgcttgattgattatcggatgtttatcatcaattcttttaaaggaaaaaacctagtaattaatataataattaaataatataatagttattagtctaaaaacaagtattttatttataaatagttttggtgaaatatttaggaattttcgagctcttcaaagatgcatttcagaattagaaaaaaaaagaaagaaaaaaaaccctaacctagccggcccactaggggcccaatcacctaaaccctagcgcgcctgcttgctctcagctcaagccgccgccgcccctgctaatt

SEQ ID NO: 64115 - DNA, 245 bp, Zea Mays
cagaaatcgccgcatgactcggatcccgctactgcttccctggccgtgcggctgtagcgctactgacgggcaggcccgctgaccaaccttcccatcgcgcacggacttctttcgcacgcctagcgagtggagcgcggattggtcatcgggtgagatccgctgcaagctcgtcttcatcctctcgtgattaccgtggactccgcgcaacagaaatccaagcatcgcggcctagcaaatcccatcag

SEQ ID NO: 64116 - DNA, 50 bp, Zea Mays
catccactggctccgataacaagtcctctaggaccatatcctcaagagtt

SEQ ID NO: 64117 - DNA, 122 bp, Zea Mays
cagccgtcaccctttcgtgccttgccccaagagatgagatgaagaaaaaagaagagaagagaggggagatgagggcataccgtcactcatcatcgtcgttcctctccaagaattggttggat

SEQ ID NO: 64118 - DNA, 613 bp, Zea Mays
gttagaaaactgatatatcagccgtgctcgcggttatgagcggccaagggagctctagtgattagtggtacttgatcagagatgttcggtttgcaggtggcaatgagattgatggttcttggttttgactctggtaatggtaagtggtactctttccgtttggaaaggagtacatttgggttaataacgtgggttaattctaaaacttgactttctctactagtaataataatctgaccaactaaaagcaactgcttgacttacccccacataaagctagtccactacagccaaacaggatacttactgagtatgttgatgtctaatcacccttgctctacacaccaaacccccccatccccaggttgtcagcattgcaaccactgcttaggagaagatgaagccgtggaaggagacttccaggagttccaagactacgacgagttttaggcatgggttagcggcaaccccctagtcggctgcctgtgaaggccgcgtttatctacgttttgttttcgcactttgattattgtaaagactatgtggatgtctcagacatatgatgtaatcgactattatttccctttttaatactatttgagcactgtgtgat

SEQ ID NO: 64119 - DNA, 2376 bp, Zea Mays
gccctttcgtcattccgtgtgcgtgtagagcgaaccgtgggtgcgccgtcatcgtgctgtggggcgtgattacgtgtattcctcaagcttgctgcacacaattactgctaggaggtcgtggaagcccacccgaaagcagtcgaatctttcatcggaatcgagccctccccgctggcctgctcgtccgtgcatctctgcggacgcaaagaaccacggtacgacgagcggtttaaaatacccctatcgctttctcgaccctcccttgcttggtgcagcgcctcactatgtttgttatggagccataggttgacggtaatttcttgctagaaaattagctttgccgcaggcagtcgcgtggcgtggggtgcgctatggcagccttagttctaggtgagacctcatctctgatgttcgctatgacctcccgtttcgtttgcactgggtagttgtcggattagagcactagagcacaaatctgggtgctcgctggcaatgtgccgccgtggggcagggcgccgccgccttatgttggctaggtggggaagaacgactccttgtcgttcgatctgaatggacggacgagattagatgatagcgtaccgtttcgtgggtggatctggtccgttggattgcgatcgggcggacgccttgcgatccgtgcttatttaaaactgtggccgttagatcttgatccaagggtctacgtagcgtacctgttcggatgatggcaaatctaatatgtgtcgtttgcttttgatcggggacctcttcggtcgttgaatattgcaaaagagaccttaggctttaggaaaactaactcgccgtcctgttattcatagaagtgaccttggaaataaattttgaaatcgcagaccagccctcagaaatttagataagtccctggcatctattttggcattaaaatttataatagaaacaactcaaacttgtttaattcataattgctcattttaactctgattcgtctcgttcaaattgtgttagcttcgtaataatattatctatgtagtaacatcatcattcgtaccatatcacttacttttataaaagaatattgtttaaacctatatttaatagactaacctccctaatcaaagttagtctgtttatgattataatctaactaaaatatgatttctactcaagtataatgtagattacagctatttctttaatatctttagcacatgatttgtaaaatcaacaaatgatctagatctaatggattaatcatgcaggtctcccggaaaccatatctttttaaacgaaactctgattttagtcattctcgaaaccacgctctcgtaacatcgtgtagaatatttttacactgtttgttctcatgtttagtgtactgttatttttatgtgatccttgtctatttgtatgtatttctacgaatagcagtgaggtcacgagaatctgaagaccaagttggtaccttagaatctcaagtctaaggcaagttgtgcccttgatcactcttatttacctaataatgttcctgttaatcactgtgacatgttcaggttaatttgatgggacctaataggctttcctagcattgttcatcccacaccttgtttgccactgaactattgggtagttttgctattgttctacctggttttggaaaattaatgttatattatgatcatgtttcagttatgctgttgttttaattattgttcatgacaagatcattgtgttaattggaacatagagcttaacttccgtgctaccacaatggtggaatgggactcccttggctgactaattaggaaagctagtggaggactaccttacctggcaagggcgatagaggagctgcgtatagggaggttctcgggtcgatcatgctgtgatggcttttcggatgagggattcctatattcaaggtttaaaataccttgtgaatttgatgaaacaacaatttatgacatttaaagaggcacaatgcttgtcgggctcattgaagcaacttctttaataatttgggatgagacattcatgacacatagaaatgcttttgaagccgtagatcgctcagtatgtggtttactttctttgaattgttcccaagcatctcaagttccttttggtgataaaacaattgtattaggaggtgatccaagacagatactacatgtaatagaaggtggcacctgggcacaaattatcaatgctgctataaccaattcaacactttggaattcagtaacaattttacatcttacacaaactatgagaatttattcaacacacttaacagaaagcgaaagagctcagcttgcatatttcagtgcatggatcttagatgttggcaatggtactataccaactatagaaaaacag

SEQ ID NO: 64120 - DNA, 312 bp, Zea Mays
agatactcaaattggaatttgagttctaaaggaaaccctagaaattgagaaaagagaggaagatattacgcaaatgggataaaataaaatatataagtaagaatatatttcttaaacctcaaaaatttgaaatttggtacattctaatcatggatgaatcccataaccaaatttaaattcaaatctgaattctaaaaacaaaaaggaaaaaaaacaaaacagagaaataaaataaaaaaagagaaaagggcaactcggcttcccccatcagttcggcccactaccgaatttcctgggcgcggcccaatcttc

SEQ ID NO: 64121 - DNA, 2233 bp, Zea Mays
ctttgggacccccctgtctcgaaacgccgacaactgtgataaaatgtcatgtgtgactgcatcatgggaaaaatgggctgtgatggaattttctgcaggtacactaacctcgaaaacgtatgtgtagctgacgactagcaaaataccgtgagagttgtaagtatgccaccgatatagaacgttattgccacattatattggcaaaaatcagtgaggacgcataggatgagcatgcatccttattgttgcatcatgtttgtcacctatacacccaaaatgcttctctcatctttattccagtaaccattgattgtagataatatggtgtaatgttgaattatgagcttatgatgaaataggtgtcctccattcattaagagacctcttagggtgctttatgtgcttgctcttgtgtttgatgtgccgatagaaagttggtaattgattgcctaaacccaaaactaggccatgttcttatttagtgaaccatgacccaaagttgatttttccgttatcactccatgaccagacatataaaaataaatgcctagataatttctttgttggacctaaagtgtacccagacttaaaaaaaatctcaagtcatgtctccttctagagccattcccttattcagttgatgcaggttgaggtctctattgtgtttggtctctccttgcggattatcttatcccttgtcaacctgacctagaaaagacctgtccgagtattctcttgaatttgatgcctttggtttcaccatatctatcaaaggcataccaacttaatttgatgattgttttcccttcgtatctaatcagatactaatccttgaccttgtaatctctatgatgggcatagaaatatgcctggggctgaattaacagtctcccatcatactcccttcatcaaccaatttaggttatggccgtgttttgttcatttcatcgggtcataatctatttggctctctacttgtaaccattcttacaggtggagtttctccttgtatattgtcacccttacccaattcatttgtgtcgtgtgagatttcctattggttatgtttggtaatggcgttatgactaaaaccgatggtgccgtgacgaaaccgagggcctcctgtgaatgtacacacatggttgcgctacttggcacgcgctggtatcacggttagtagttgtaatccattatgagactatgtcgatacgttatcttggcacaatctgtttttgctacgtgagattcattattggtgccagtttggtaatggtgtcacgattaacgacttatggtgccgcagcgaaactgagagctccttgtgaatgtacacgcaaggttatgctgcttggcgcatgctggtatcgatgtctctagtcatgatccattgtggaactacactgatgtgtgatcttccgtggagtcctcccttgaaacaatttctatgttgtttgtcaagtgatcaagcaacatctatcatctctgttggatcaaaagggcataccactttcatgtgtgatctcttatcttttgactttgatggtgacttcacacatacaagttccctttacatcctttgtgtaaaggtgaagccttggagctttttagtgttgcaagacaaccaattagttcccaaaatggagatttgtttcccctgctgctgaaatgcaggagtttgttcattcgctctcttatttaattcatgtattccctaaccaagtcggttcatcttgtatagaagaaacggatgaataacctgaccaaatgaattcctacccaagtgcatgaccttttactagcaaacataagctcgaccgttggcttaccgatggtactgagaggacttgctcaatgtcaaaagtagttcaacaagttggttttactgacttgtaactgctcaatgaacgaaggttgagtttagagatcgttttatcgatttgcctgaactcactttggttcaacccactcaagaaagtacttgcaagaatcaagattaaaccgactaataaccacctaatcatcgctctagtcatgcctcgatcgcctcacgtgtgctttttcagcatgtgtgatcaagtcgagccatggttagtgcttgctataatagattggttgcaaagacaacatctacagatccctccactggtgattctctcgaatctatatcacctttcagggacttggattttctggctagtcacgggtcaactgtgatgttattcgacattcaccc

SEQ ID NO: 64122 - DNA, 171 bp, Zea Mays
tgaaggtcctcaaaaacatgattaacaatgtttcccaagcttaatatatgtacaggaaccttcagactcaggatgaagctatacacaatatgaagagcagggtcggaacgaaggttgaaccagcgccgaagcagagcgcaagggagcttcggctcaatagcagaaaaagga

SEQ ID NO: 64123 - DNA, 172 bp, Zea Mays
gagagatagagggaggagatggggaggtggcggccggtttaggcctaatgggccaaattggccgacatgtctagggtttcaaaatcttttttttctttttttttctttttcactaaaaatataaataaatatactttcaaatatctctaaaatcataatacttatccaaaat

SEQ ID NO: 64124 - DNA, 391 bp, Zea Mays
tccgattctcccccgggacacgatccacaccaccgtcgaggtgtccgggagcgcaccacgagtgctaagcggggacggcggcggcagacggctatggtggcgctcccatatctaaaggcatgctcacgaggcgtgtattctagggcgaggacgaagcggacgggactgaggatcgatgcgggttaatatgatggctgagcgcggactcaaggggttgaggttgggaacggattcccgacgcatgcgaggaggccgatttggcggcgtggattcgacctttgcggaggtggaagacgacccgtgggtcccgcattcagaggctgcgcgcgcacatgcccagaggcgctctcgaacccggtcgcttggatagcttggagaaagggctgcgcgg

SEQ ID NO: 64125 - DNA, 594 bp, Zea Mays
agtattttttacatagcggaagtcttacgaaataaattataaataataaacgaactaaagataatccttggcgccataaagtcaactgggagacgacgacctagacctctcatgaacacatcgcagcatcctccatgcgccacatcctgtgatacctgttcttaacctgtggggggtgtgagacagcaagggtgagctcacacatgttcatcgctcaataagttgtggggaataatgtgcatgaacttaccaaaagtgggagttcatgtgaagtgtaaggctgatcaaccataggggttaaagctgagcattgcttttgataagttggtcaaattttattagcagttactaaatgtaagtaaataccaaaccataataaataatagaacaaaattaataaataatcccatgtaatgcaaatgacaaattgaatttaagttccataaattaatcatgcgagagtcctgagctgctcatgaccgtgagctcgactagtatatcagttttacactttgcagaggttgtaccctgtacccaaaagtcgtgtatcccatgttgccagggttagctagacccttagacactaccgaggtg

SEQ ID NO: 64126 - DNA, 975 bp, Zea Mays
ggcgatttcaggaatgcgtgaacagtaaaggaatactgttcactatttataggcacaggacacagctcatgaggaattacaattatgcccctcgtaaaagtttacaacaatgactcagacctttgaaggctaaaaggtcattttatctttaagtcggttcgacccttcgtcttcggatatgctgtagttccgaagcttcgtgaacggtgtcttcggcatcatgttcaagcagcttcagttgaagttgtttctttttgcaggaccttcggcgacgaagcatggtcccaacagccttcatacctctaagggtatgaagccacatcgtacccctccttaggcaacgtatgatgctaagttgtaccggtacggtcggaccataggtcacgacccaacttcatatgcaagtgaatcatgcaatgtatatggcatgctgcatttatcaatatacttcacttccttcacatacaatacaacctcaaataatacttcatttaccttcagatacaatacaaacctcaaataatacttcatttaccttcagatacaataccaacctcaaataatacttcatttaccttcaggggtgtgaattaatctcatgagtcatactcgaatcataatcatcatcaatatatgattgagcattagtataattcaagcaagtaaagcatcaccatagagtccaattatgaaagaatccaatacttctgaatattagagtgtaggcaatagaaataacaggtcggaacggaagcaaccaccgctacattcacttgacttcatcgaagaagaaaaatgtactaggcatgatctggagggtagacacctgctagcggacataaaacttagtacaaatatttcacaaacatttgccaacaatcaacaaaacactcctacactggaaaccaagacccagtggaatgactcccaccctgaaccacatgtcatacagcagcagcgctgtttgttaatttt

SEQ ID NO: 64127 - DNA, 167 bp, Zea Mays
cttagggtttccccaagaaaatctgcaagagatgggggtataacatctccttgatcctctcttcctcttcaatccatcttggtcctcctcttctcgatctttgctgcgtgggaggagatctagagggaggaggaagcagtggagggcagctgcaaaggggaaggggg

SEQ ID NO: 64128 - DNA, 368 bp, Zea Mays
agtttataatggtaattgggataataagtttttcatttaattgtgtgtcatttatttgcatttggaataattttgattgcgcacgattggtttttgaatatttaataacattccttcttgaatgaaaattcacaaaaataatataattattagtcaagaataaatattctatttataaataattttggtttaatttgtataaatattaggagtatttaaatatgtatttcgaaattagaaaaaaaaaagagaaaagaaaaaaaaacaaaacctaactaacctaaggcccattaggcccaacaactaaccctagccaacatcacccctagccgccgcccttgtcccctgctctcctggaagccgccgtc

SEQ ID NO: 64129 - DNA, 320 bp, Zea Mays
ccctttggccgtcaccctccccccctcttccctcttctctcttccccaagtgctgcagccgccccctctccattctcaagtttttttgcagcagccatctcctcaaccctagccgccacccccccatctcctcttctccaagtgtcgttcttcctcgtcggaccttcttcgtgtgggtgcaagtttcaattggagaattggtgggaggaagtaaggaggaaaaaggtggaactcaaggtgatcttgaagttatctatgtttttgcgctaaaattcaattgattatatgtttatctatgcgaatcggtagaggtgctgtcc

SEQ ID NO: 64130 - DNA, 1435 bp, Zea Mays
accgtttggtttgcatcctattccctgtcattgagtatgcataagttttaattatgttaatcattgaattctatgatgaagtttatttgtttggaagtattaattctcaaatgtctaatattgtggatgatcataatttggttatgatatatgtggttgattcccatcttggatgaagttgaagtatctttttgaatcacgttatatgaagtgttgtaggcatgacatgcacatcgcatcatccatcttgcattttgaagttatgtcgtgatcttatggtccgaccgtaccggtacatttttagcatcgtacgttgcccgaggaggggtatgatgcggcttcatatccttagaggtatgaaggcagaagtcatccttgcatttgcagacatttacactcatgaggtatatatgaagtgtgatattactatgttactattgtggtttctacctgcgaggtgtggtgactaggtgtgttgtacgttgtatacgtgctgcaccgtcgtaataagaaagttgtggaatcaagtggtggtaaaacaatgtccttatgtggttaaacagtttgatattattttacttgctgagatgtgtcatctcactcttgcattactcaatgtaggtacttgatacatgttgggaatgaggggagtagcagcacgtccactttcactctcacaataacgctgcccaggcgcagccatgatttaattagaaacttattgtcaaaggaagtttgtttcttttaactagtcgtgcgcactagttaattcagttcatatcgtatgtttaacttctctttgctagccgattaataatacttagtatgtttttgtcatgatatatgtttatacactgttgccccccccctcatttatgcaattttgcaaaggggatgctgccgaaattttatatatggatgtcagaagtgttgttcagtagcattccgggtgtgtttgtggaccccagggtgttatagttctggatgctattttacaatccactaagttgcccactattgctactactgaggtttctgatgataaaattgaagatgcaaggtaagtagccactgcaagcgattcttttattcatgctaaatcagagccttcgggagctacgctagtagagctggcgaaagaaaatcttctagaaaagcccaggacacctgctcccgaagcaccaccccagggtgatttggactacattgttcgacatgcttcaggaaaacaggtatcaggagatcaaattgccaaagtgcaacactatgctaaggagctgaaatacccccaagggtccttggtatacggaggagacaacgaggatgacttcctttactgtctacctgacagtaaagagatcaatgtttgccgtgaaatgatggacaacatggggtatccaaaggttgagcttggtctgtctgtaatgacgaagga

SEQ ID NO: 64131 - DNA, 584 bp, Zea Mays
gtaaacacccatgcagccgcaccgcttgctacccacggcggcgacatcgtcggaccttgccacactcgctggtggtcgctaaaactttgattcggcaggtgttacacgtagtgaaggcgaaggagaacaaaacgaggccctaactagcaatgggcacgcaacaggtggtgtccacgccgccccacggatccgtgaccccgacccgactccggcgagcgattaacgacattgatacggtctaacccgaccaatgccgatgagaacaaaggcaacaacgaggcaaactcaggctgagggcgttatcagtacctgggcttgcggaggcgcttggccacggcgtggcgcagatcctaaggcggtggcatcctccggcgaggaattacacagagctccgaggtccccaatgctcgcagatacctcgcacaggtaccacgggacttggcagtcttcctggcttattcgtagagggagcgacaacgacggtggtgaatctccacggcggccgcccttccctctcttctatgctcgcgacaagcattcacggtggggtggattcaggtgagagcataagcacggggtctggg

SEQ ID NO: 64132 - DNA, 256 bp, Zea Mays
cggcggctgcctggctgaaaagccagagcgcgcgcgtgtgcagtaggtctagggtttgggggttgggcccctagtgggccggccagtgtagtataggtttttttttctttttttttaaaattccgaaattcatttttaaagaactctaaaaatcataaaaaaattaccaaaaatatttataaatggagtacttgttcgtagactaataattattatttttcttcattattgtttagttactaggattttctttttc

SEQ ID NO: 64133 - DNA, 533 bp, Zea Mays
ctcggaccctcacatgattaatttatggaacttaaatttaattggacatttgcatcgcatttgagattattttactattatttttctttattattattaaggtttggtatttacttacacttagtaattgctaataaaagtttgaccaacttataaaagcaatgctaagcttcagcctttattccattgatcagccttacacttcatgaactcccacctttggtgagttcatgccacattattccccacgacttgttgagcgatgaacgtatgtgagctcactcttgctgtctcacaccccccacaggagaagaacaggtggttcaggaggagccacaaggcgaggagtatgatctgatctaggtggcgtttctcagtcgacattggcaccgacgatccttagttcgttttacatttattcctttattttgtaataagtcttccgctatgtaataagtactctgatgttttgtgacatttatctctatacactctgttattatatatgttgtcttctttggcgcatgtatgag

SEQ ID NO: 64134 - DNA, 434 bp, Zea Mays
acaatgttcttatgtggttaaacagtttgatattattttacttgctgagatgtgtcatctcactcttgcattactcaatgcaggtacttgatacatgttgggaatgaggggagtagcaccacgtccactttcactctcacaataacgatgcccaggcgcagccatgatttaattagaaacttattgtcaaaggaagtttgttttttttaactagtcgtgcgcactagttaattcacttcatgtcgtatgtttaacttatcgttgctagccgattaataatacttagtatgtttttgtcatgatatatgtttatacactgttgccccctcatttatgcaattttgcaagggggatgctgccgaaattttatatatagatgtcagaagtgttgtttagtagcattccggggtgttggtggaccccggggtgttaca

SEQ ID NO: 64135 - DNA, 207 bp, Zea Mays
gaaatttagagttacttaaaaatataactcgaatttacaaaaggaaaaaaaagaaaaaaaacctaaacccaaacgaattcggcccaccagggcccaacatttccctggcttccccaaccctaagccgccgcgccaccttgctccaggcgctccagccgccgccccctgtgcttctcccactggcatctctctctcccttccccttgc

SEQ ID NO: 64136 - DNA, 279 bp, Zea Mays
gtacttgatatatgttgggaatgaggggagtagcagcacgtccactttcactctcataatagcgctgcccaggcgtagccatgatttaattagaaacttgttgtcaaaagaagttatttttttttgctagtcgtgcgcactggttaattcagttcatgtcgtatgtttaacttccctttgctagccgattaataatacttggtatgtttttgtcatgatatatgtttatacattgttgtccccccccctcatttatgcaattttgcaaaggagatgctg

SEQ ID NO: 64137 - DNA, 958 bp, Zea Mays
gctttacttgcttgcattatactgatgctcaatcatatattgatgatgattatgatttgagtatgactcacgagattaattcacatatctgaaggtaaatgaagtattatttgaggttggtattgtatctgaaggtaaatgaagtattatttgaggtttgtgttgtatctgaaggaagtgaagtttattgataaatgtagcatgccatatacattgcatgactcatttgcatatgaagttttgtcgtgacctatggtccgaccgtaccggtacaacttagcatcgtacgttgcccgagaaggggtacgatgcggcttcatacccttagaggtatgaaggcagaggacatatgcattgcattcatatgcattcattgaagtgatatttgcagatgatgtggttttatacccccagaggtatgaagatagagtacctacacattgcattcctatgcatacattgaagtgatatttgcaggtattgttgacgcagggaagtgttatagaacctattgtggttgttcgaggaaatgagatggtattggttatagtgggactactgagttctatatctacaagtatttctgatttttttattgtggctcttttaaaatgttgatgaattcaatttgtggtttaaatatctcgtcagaacaattagcttgctgagatgtttcatctcactcttgcattactcaatgcaggtgcttgttgctcatcaaggggagtgggaagtagcagcacatccaccttcactctcataataatgctgcccagacacagccatgatttaattaaaaacttcttgtcaaaggatgtttgttttaaactagtcgtgcacactgattaattcagttcattgttgttatggttgtcttcccattgctagcagattattaatgtcttatatgttttcttatcatgatatctatttatactttgttgcttcccccgtttat

SEQ ID NO: 64138 - DNA, 1128 bp, Zea Mays
aaatactctacaacttcagtattcaatagataattaaattctgccatctacaagttctaaaacatctgacaagataactgactgaatctgttttagacagcagtatggttaactttaaaattcgatatctccaaaactgctgaaccaaaaattatgcaattctgctggaagtaagaacttttatccctctacaaaagtctccatagttggaagagccaattcggccatttactagatgaaacccaccagtgaacagacccactcatttttgtcaggtaaacaagaacagccacagtaaaacaaacataactggagtttcacaaattatatgaatgcactctttaacaatctggaaagcttataaattatctacaacttcttttaccaacccacagtttaattctgttgataaaatttcctaaatcttaagagaacagattctgcacagaattatgagactgaaaaactgctatagtaaaactgcaataactttctggtcggatgtccgattgaggtgttcttcgcggccacggaaagatctacaaatcatctacgactcatacatagacttttcattttttgaggccactaagaccacggaaaactggcatgaacagaaactgtcgaatctgccattctgcagaaaactaaattcgggatcaaaacctaaccccacatcaaatccaacctctaatccttcaattcccatgatccacaacctccaaaagcctataattacagggaggaacaaggatctcatccatacctagggtttccccaagaaatcttcaagaagagatggggaagaacatctccttgatcctctcttcctcttcaattcaacgtgcccctccttttctcgatccttgttgcgtaggggaagatcttgggggaggaagcaatggatgatggctgccatagggggagggggcgtccagccaagggggagaaaagggggtggcggccaagagggggtgaagggaaaaaaaggggtggccacctagggtttttgtgggagaaagaaacgacgcctcagatgacttctatctttgcatccaatggcccacaaccctttacctcatccacgcaccagagattaacttttggtcaacatttttttgggatatt

SEQ ID NO: 64139 - DNA, 960 bp, Zea Mays
cccctttttctcccccttggctggacgccccctccccctatggcagccatcctccattgcttcctcccccaagatctccccttacgcagcaaggatcgagaaaaggaggggcacgttgaattgaagaggaagagaggatcaaggagatgttcttccccatctcctcttgaagatttcttggggaaaccctaggtatggatgagatccttgttcctccctgtaattataggcttttggaggttgtggatcatgggaattaaaggattagaggttggatttgatgtggggttaggttttgatctcgaatttagttttctgcagaatggcagattcgacagtttctgttcatgccagttttccgtggtcttagtggcctcaaaaaaataaaaagtctatgtatgagtcgtagataatttgtagatctttccgtggccgcgaagaacacctcaatcggacatccgaccagaaagttattgcagttttactatagccgtttttcagtctcataattctgtgcagaatctgttctcttaagatttagacaattttatcaacagaattaaactgtgggttggtaaaagaagttgtagataattttataagctttccagattgttaaagagtgcattcatataatttgtgaaactccagttatgtttgttttactgtggctgttcttgtttacctgacaaaaatgagtgggtctgttcactggtgggtttcatctagtaaatggccgaattggctcttccaactatggagacttttgtagagggataaaagttcttacttccagcagaattgcataatttttggttcagcagttttggagatatcgaattttaaagttaaccatactgctgtctaaaacagattcagtcagttatcttgtcagatgttttagaacttgtagatggcagaatttaattatctattgaatactgaagttgtagagtattt

SEQ ID NO: 64140 - DNA, 646 bp, Zea Mays
cacctatcagggaggtgtgtggctcaacgctggcgcgggtgggaagctggccgaagggccccacttggcaaggacagaacgagggacgaagagcacctgagaaaatgggccgcatgggtagagttttggcgcacatggccagggtagaggggcgaggctggaacgaacgacatggaaaacggcccaagcgcaggtatggattctgcttttctttttcttttttatatttcctgttttctttctttttttgtttttagttttcaagttcacataaaaattcaaaactccgaatttatgttcaaatgctaccatatgaatgcaaagtacatagttttatatttttatataaagatgttttattccttagttttagtcaaaggtccaaaatgtgccatgcacacatttatttcattttaggaaaaatattacttttgatctttttctttctttttgttttgtttttagttttcaaattcacataaaaattcaaaactccaaatttatgttcaaatgctaccatatgaatgcaaagtacatattttatatatttatataaagatattttattccttagttttaggcaatggtccaaaatgtgccatgcacacatttatttcattttaggaaaaatattacttttgagtat

SEQ ID NO: 64141 - DNA, 677 bp, Zea Mays
tgccgatatccgaagggatcaggccggacaggtaattctgtgctaggttcagcttatagagactgctcaatttgggaccgtcgtcgaaatcagacctgagatctggttgtatgcgacattcaacacgttgagggacaccaggcttccgagtttaggcggcattgttctagttttgctttcttcagttcaaattttctagattttacagattaattaatagcccctaattattggtgcaactaatattcagtctgctaaaatatcaatggcccgcctaattttgtaaaaaaggatgagcactacatgaaccattcctgtactttgtgaactttgtttccgaacatgccttctagctttaccatgttaacaatagacaaccaattcagttggtgctttgacttcttcattccaacgttaagtagtacccctgctcctcaaggacaacatcagcgaggtaattgctttatcccttagcttattttatagttaaataatatacaatcagatgtttgcataccatatctttcttaatttcttttgttccatctgccttgtcatctgtactgcagtcatgttcgtatatgcacattaagatcttcagtgacttttctatatgcacaccatgaacttcactaactttgaagcattgtaggtgacttttaataatattcccattg

SEQ ID NO: 64142 - DNA, 176 bp, Zea Mays
ctgacctacaatctaggtcaggatgtaaacattatgaataaaaataatgttgtattaatgagatggtgaaattagactagatgcaactagagtctattaatatttaattcggcgttaaaatattgaaagtaaggactcactttagtaagctatttctgcaaaagtatctaagttgg

SEQ ID NO: 64143 - DNA, 315 bp, Zea Mays
ctctattctaatttttaggtcacaataaaataaattgaactatgttatgtaattgtgagtaacacttagaggaataataatctattttcaaatgaagttaatttatgttatagtttatttatgctttgaactcattatcccttatgtagtattgtgtccttttaaggtgcattcctatgttcgtacatgtttggtgtgttgtttatttgtattttccaaatgtattgaatgcatgctcgctctatttagacaacgagcagtccgaggttcctgagtgtgttgttggagacctccctgagcaacaacctggtgaag

SEQ ID NO: 64144 - DNA, 947 bp, Zea Mays
cgatcatatactgatgatgattatgattcgagtatgactcatgagattaattcacacccctgaaggtaaatgaagtattatttgaggttggtattgtatctgaaggtaaatgaagtattatttgaggttggtattgtatctgaaggtaaatgaagtattatttgaggttgtattgtatgtgaaggaagtgaagtatattgataaatgcagcatgccatatacattgcatgattcacttgcatatgaagttgggtcgtgacctatggtccgaccgtaccggtacaacttagcatcgtgcgttgcccgaggaggggtacaatgcggcttcatacccttagaggtatgaaggcagaggacatatgcattgcattcatatgcattcattgaagtgatatttgcagatgatgtggttttataccctcagaggtatgaagacagagtacctacactttgcactcctatgcatacattgaagtgatatttgcaggttttgttgacgcagggaagtgttatagaacctattgtggttgttcgaggaaatgagatggtattggttatattgggactactgagttctatatctacaagtatttctgatcttaattgtgattcttttagaatgttgattaattcaatttgtagtttaaatatctcgtcaaaacaattcgcttgctgagatgtttcatctcactcttgcattactcaatgcaggtgcttgttgctcatccagggaagtgggaagtagcagcacatccaccttcactctcataataacgctgcttaggcgcagtcatgatttaattagaagcttcttgtcaaaggatgtttgtttcaaactagttgtgcgcactggttaatttagttcatgctgttatggttgtcttcccattgctagcagattattaatgtcgattatgttttcttatcatgatatctatttatacttt

SEQ ID NO: 64145 - DNA, 261 bp, Zea Mays
tgagcacttggtgaatatcacccggctagcttcgtcttcacctgacttttaggatttcttgatgacgcgcggaacgacgatgaccttcgattgaagtcttcgaccgagcacttgataagcgatgtacagggaccctgtttatttttgcataacgtccggggtacggggttggatgagattgagtaaggaagaatgaggttcgacaggctcggcgacgatatgggagggtgacgtatatagagctgcacacgcaacgcgacg

SEQ ID NO: 64146 - DNA, 433 bp, Zea Mays
gttaagttacctagtacacgtgcatatccatctgaggccatcaaggcaaggattggtgcacgtgggcccgataacttgggagggctgccacattttgcctactggtttcaaagatttggagctctgaagtctggtctgtctccctgcccgagcccaaggcaaatccttggttttgtcatgtctagggttcgcgtcccaatgccatcttctggcatgtgacagagggattagttagacacgattttgttaatgggagcattaggattagagctaaggatcaaggtgaacacgctcggttttggttcaagggctgaaaattcagaaatctaaatttcagaaatccccattgaacctccacttgaatggcttgtttggagtttttaataaactattttggacaagatttcataatctttattgtagcttatttaat

SEQ ID NO: 64147 - DNA, 2844 bp, Zea Mays
tttgatttacataaatgcttagccctgcttagatcttgtggatagaggttgtcttttgcaatactgcctagctcaggggttatcctgagtaaagatgacttctacctgcaagaatatattttcattgggagcatggtgggatcttactgcaaagttccctgtgatgctcttttcatcctaaggaacagaaacaatcctaaggatggaaatacttaaatcaagacttgggctaggaacaggtgatgttctacccaggttgattaaggattgaatgcgtatgtaggcttgatagagcaaggactatcttagctagccgcataccctggaaatgggacagggtaagctttgcctcgggcagactaaggccagaataagataacacgaaatgggcgtggagcggtggcgggagtagcgtgtaccctccgtggcaagaggctggacggtggtgtatctgtgctctcggtttgcgtgaacctgatctggtcttaagaaccctggggtcgagttgacatatgcaaggattaagtgctacatatgtcgtgtggttagagatcctcagctgagtaaatcgattcggatcgccgttatatccccggagagtggagacttgatcactgccctacaacctaagtcaggatgtgaacttcgtaaataaaaatgatgttgtattgatgagatgatgaaattagactagaggcaaacagagtctattaatatttaatctggcgttaaaatgttgaaagtaaggactcactttagtaagctatttctgcagaagtatctaagttgattcttgctaaagcctctccttgattcctatttatccagcatacccttgagagtcttttctttagtcgggtaagacttgctgagtaattccatactcagggtttatccctttgttgtttttaggtgaggaagcgacaaatttttgttgcttttgctccaaggtggtatcaaatgaagaaaaacaagagtgaagatgcgggaggacgtggtcctccatataggactttttgtttaaagctatcgggaggagtttttgcctcccttgatatgtgtactactcagcactcgtttatagctctggtctgtaataagtaacttgatcttactttctaaataaatgtaagtttatgtaatagcttccgcatttctttatctccaatgttctgtaatgtctgcaagacgggtgaaacgttcctggtaaggtaaggaaagataccgaacttgtcaagtgacttaggaacatctacagggtgcctgatgtctgttagacaaggacaactgtaggtgggcctaattacttgggaggttccgtcacatattgcttcgaaggacgaagagcattaacctttaacattttgtgttgccttgttcttaattcatagcatttgagaacaagtccccaaaagaatttgcaaaaacaaaacaagtggtgcaaaagtggtccaaaatattaaatagaagaaagaaatccattcacatctagtaagattataaattggtttaattccaagcaacctatgcacttatcttatgcaaactagttcatttctgcactttatatatttgctttggtttgtgttggcatcaatcaccaaaaagggagagattgaaagggaaacagggttaaccttttcccagtattaattttggtggttgaatgcccaacacaaatattggactaactagtttgctctagattataagttctgcaggtgcataaagattcaacacaaaccaataaaagattgaagttagggatcaaattcaaaggagcaaagaaaccgagtgtgctctggtctggcgcaccggactgtccggtgtgccaccggacagtgtctggtgcaccaggtccatacaagaatgaactagccactctctggtttctccaggggcgctccgctataattcaccggactgtccggtgtgccaccggactgttcggtgtaacagcggagcaacaactacttcacgcaacgatcgactacaaaagcgcggtgatcagatgaacagtgaagaacagtgcacgtagagtcagagccgcaggtcagaggcgcaccggacactgaacagtgcatgtccggtgcggcaccggactgtccggtgccactagaggacaaagcctccaatggtcaaaagctctagaaccctaacggttcggtgatgtggctggcgcaccggactgtgtccggtggcgaacgggactgtccagtgtgcccatcgacagtagcctgccccaatggttgtttggtggttgagggctataaataccccctaaccaccaccactccaagcatccaagatttctgagtatcacactgattacaagagctctagcattcactcctagacacaattcaaaagatcaaatcctctccaagtccccaattcatctcaaacacttagtgacttgtgagagagagattttgtgttcttttgagctcttgcctcttggattgccttattcctttctcatttcttttctcaagtgatttgtaatcgaagcaagaggcagctaagtgtgtggtggttcttgcggggtctaagtgacccgggagattaaggaaaaggctcactcggtctaggttaccgtttgagagagggaaagggttgaaagagacggtctttgtgaccacctcaacggggactaggttctttagaaccgaacctcggtaaaacaaattaccgtgttcatccgctttatttcttggttgatttgtttttccctctctaccggactcgatttaaattctaacgctaaccccgacttgtagtttgtgctttaagttgtaaatttcagattacacctattcacccccccccctctaggcgactttc

SEQ ID NO: 64148 - DNA, 730 bp, Zea Mays
gccgactcaccttggtggtgtttgagggtttgatcgacctgaggcataaagggatcacgacttgtgggtaaagtgtgcaacctctgcagagtgttaaaaactagtataccagccgagctcacggttaagagcagccttgggatcctctttgattagaagaactttggatacttttattatgatggttaatactgatgttataaaatctgatctctggcatttccgcttttgagggggtacttctgagtaataattgggtttattactaaaaacttggctctactaataataataagtacttgaccaactaaaagcaactgcttaacctcaactccatatacagctagtccactttagccaaacgggacatttgatgagtacgttgatgtgtactcacccttgctttacaaaccaccccaccccaggttgtccccacttcacccagtgctcaggaggtgatgttggcaacatggatgacttcgaggagttccaggaatatgacaagttctagttcttttttagtggcaaacccccagtcagctgcctgtgtaggcttagcttctacatttcgtatttccacactttgatagttatgtaaaagacaatggttatgtaatagactctgtggatgtcttggacatcttgatgtaatcaagtacttttccgctatttatttcgagcattgtgtgatgatgtccaattatgtaatcgctatgtacgtgagtttctg

SEQ ID NO: 64149 - DNA, 558 bp, Zea Mays
aaaaattcaggttagatcttataccagcacccttttgagcctcgcaccttctttcaataatctgcattgttgaatttgtgtgctttcgcgtcatttgttgctggtcgcattgtgttttttttctcaccatccttcttccttgtttttctccttcggttacatcaaaccctagcgcgctgcaaccatcttccttgtttttctccttcggttacatcaaaccctagtgcgtcgcaaccatcttccttgtttctctccttcggttacatcaaaccgattcaacgccacaaaccgagtcaacgccgcttccttgtttttctccttcggttacgtaaaaaaaacagaaacaaaaaaaaagaaaaaaaaagtaaaagaaagagaaaggatagaaccagagaacaaacaaaaaaaatagggaaaggaaacaaagcggttgtctcatctcggtcggtttaaacataacttgaggtaccttccttaaaccgggcataacttttcgctcggttgtccaaaaaatctgaaatttttacaggagctagttgacaccattctgaggccggc

SEQ ID NO: 64150 - DNA, 318 bp, Zea Mays
taaaaatttaggttagaccttatcccagcacccttttgagcctcgcactttctttcaataatctgcattgttgaatttgtgtgctttcacgtcatttgttgctggttgcattgtgttattccaccattcaaaccctagcgcgccgccaccatattccatttgatcacgccacaaactgagtcaacgccgcttccttatttttctccttcgattacgtaaaaaaacaaaaaaaacaaatcgagtcaacgtcgcttccttgtttttctccttcggttacgtcaaaaaaaaacagaaacaaaaaaaagaaaacaaaggaga

SEQ ID NO: 64151 - DNA, 733 bp, Zea Mays
cacaaaaccacataaaaattcaggttagaccttatcccagcacccttttgagcctcgcactttctttcaataatctgcattgttgaatttgtgtgctttcgcgtcatttgttgctggttgcattgtgttcttccaccattcaaatcctagcgccgccaccatctcctctttgatcatgccacaaaccgagtcaacattgtttccttgtttttctccttcggttacgtcaaaaaaaaaacagaaaaaacaaaccgagtcaacggccgtttccttgtttttctccttcggttacgaaaaaaaaacagaaaaaaaaaccgagtcaacatcgtttccttgtttttctccttcggttacgtcaaaaaaaaaacagaaacaaaaaaacaacgaaggagaaaggatacggttgtttcatcccggtcgtttgaaaacataacttgaggtaccttccttaaaccgggcataacttttcgctcgggtgtccgaaaaatctgaaatttttacaggagctagttgacaccattctgaggccggccaaactcaccttcggtctgtttgggttcgacaaaattgtcaaaaaattcaggaaaataaagaaaaaaatccgtcaaagttctcgcacgcttttcagagaactttctgattttctgtagaccacatttgaactctgttttaggtgaaacttcgtgtagctcctattttgttgcttcttgtgctgagaaaaatatcaaaaaaa

SEQ ID NO: 64152 - DNA, 266 bp, Zea Mays
aaaaaattcaggttagaccttatcccagcacccttttgagcctcgcactttctttcaataatctgcattgttgaatttgtgtgctttcgcgttatttgttgctggttgcattgtgttcttccaccattcaaaccctagcgccgccaccatctcccgtttgatcacgccacaaaccgagtcaacatcgtttccatgtttttctccttcggttacgtcaaaaaaaaaaacagaaaaaacaaaccgagtcaacagccgtttccttgttt

SEQ ID NO: 64153 - DNA, 509 bp, Zea Mays
cagatttctaggttgatcggtgagtttatcgagtgtttttttctcctacagtccacaaaaccacataaaaattcaggttagaccttatcccagcacccttttgagcctcgcactttctttcaataatctgcattgttgaatttgtgtgcttgcgcgtcatttgttgctggttgcattgtgtttttttcaccatccttctttcttccaccattcaaaccctagcgcgctgccaccatctcccgtttgatcacgccacaaaccgagtcaacgccgcttccttgtttttttccttcggttacgtaaaaaaaacagaaacaaaaaaaaagaaaaaaaagaaaaaaagaaaaaaaataggaaaagaaagagaaagagaaatgatagaaccagagaacaaacaaaaagaaattgtcaaaaatattcgtcaaagctcttacacgcttttcagagaacttgctctttttctgtagaccacacctgatctctgttttaggtgaaacttggtgtagctc

SEQ ID NO: 64154 - DNA, 280 bp, Zea Mays
attttgtctgggttgtgcctcgtgcctataaatagatgaacagtagcaccatactgttcacgctggattgtaatctttctctcacatcatccttgctctcccaccttctggcaagccgaaggtacaattgtaatacaaacatttgacaatgtctatttatgctcgataaagataataataatgatagaacattgatatgtgacaattattatctttgtccctttgcatccttgtcggcgtttcgaccccggggggtccctggaccgacgagtaaattgtc

SEQ ID NO: 64155 - DNA, 2079 bp, Zea Mays
aagtggtccaacaatggctccacaaacatgcatcggggagagaaccatcagatcctcaacgtattaatacataatcaatggatcaagaaaatcaaagattttattctacaattagcatgactaacatgcaaccactttaaaccacatctaggctttgtggctactaaaacacacgatagaagagagacatgtaagccattctggctatgtaaagacttcccccaaaatccatataaaagaaccaatattcatttctttcagaactggtttctcgacataaacaatcattctttgcaaagatagttggagctatccaccaaccactcaacaacttaaattcaaattgatgattaccttgtaccccaaaacacacaattcacactcctcttagaaacatcctcaatcaaccatatataaaaatattattgtaataaaactcaaccatgaaaaacatggtgaaaacaacataggcatacttgtatatcacaagcatagtaacaacttcaatctcacaaatgaccagcgatatcaaccgcattaataaaacaataacaaattttcagaaataaattatatcaagcattaagccataaacaacttaccacatcaccgtaaaggaatcgggaggggtgaaattattgtcatctgcacttcaaagtcactaatatatatcaaagatacttgaacccatacccttcctatatgtgcaagtgtgtcaaatttatcttcaaattgccaagaatctaaagcctaagctttgataccaactgtaacaccccgggatccacaaacaacccagaatgctactaaactacacttctaacattcgtatataaaatttcgacagcatctcctttgaaaattgcataaacggggaagcaacaaagtataaatagatatcatgataagaaaacataatcaacattaataatctgctagcaatgggaagacaaccataacagcatgaactaaattaaccagtgcgcacaactagttagaaacaaacaccctttgacaagaagctcctaattaaatcatgaatgcgcctaagcagcgttattatgagagtgaaggtggatgtgctgctacttcccacttccctggatgagcaacaagcacctgcattgagtaatgcaagagtgagatgaaacatcttagcaagcgaattgttctgacgagatatttaaaccacaaatttaattaatcaacattttaaaagaatcacaattaagataagaaatacttgtagatatagaactcagtagtcccaatataaccaataccatctcatttcctcgaataaccacactaggttttataacacttctctgcgtcaacaaaaacctacaaatatcacttcaatgtatgcataggagtgcaaagtgtaggtactctgtcttcatacctctgagggtataaaaccacatcatctacaaatatcacttcaatgaatgcatatgaatgcaatgcatatgtcctctgccttcatacctctaaggttatgaagccgcatcgtaccctccttgggcaacgtacgatgctaagttgtactggtacggtcggaccataggtcacgacccaacttcatatgcaagtgaatcatgcaatgtatatggcatgctgcatttatcaatatacttcacttccttcacatacaatacaacctcaaataatacttcatttaccttcagatacaataccaacctcaaataatatttcatttaccttcagatacaataccaacctcaaataatacttcatttaccttcaagggtgtgaattaatcttatgagtcatactcgaatcataatcatcatcaatatatgattgagcattagtataatgcaagcaagtaaagcatcaccatagagtccaattatgaaagaatccaatacttctgaatattagagtgtaggcaatagaaataacaagtcagaacggaagcaaccaccgctacattcacttgccttcatcgaagaagaaaaatgtactaagcatgatctggagtgtagccacctgctagtgggcataaaacttagtacaaatatttcacaaacatttgccaacgatcaacaaaac

SEQ ID NO: 64156 - DNA, 417 bp, Zea Mays
ctcaacccgtggtgccagtgccaggatccaacgtatacatgttgaggaagagactgggtagtgggcccgcttggtcagctactaggaagctagcacgcgccggcggatgtgggataaactggtacaggccgcgcgggtccacgggttgatggcccggaagtaaggatgccagcacagtttgggctaattcttcttttttttcttttctttttcttgattttctttttttagtttgaaattcaaatttgaattctgctgtgaatttgtacccaatttaaaattacaaagaagacaaaatagtatggagggttttaattatttatatttatattttctttatttttatttagcattcctctttctttcttccaattcttaatttccaaaattagttttaaatgcctatttcaacttaag

SEQ ID NO: 64157 - DNA, 112 bp, Zea Mays
ctgcttcctcctccgtctagatctccccacatgcagcaaggatcgagaagaggaggagcaagatggattgaagaggaagagaggatcgaggagatgttctacccccatctct

SEQ ID NO: 64158 - DNA, 344 bp, Zea Mays
gttaaaacgaccgagatgagacaactgctttgtttcctttccctatttttttgtttgttctctggttctatcctttctctttcgttttcttttttttcttttctttttttttgtttctattttttttacgtaaccgaaggagaaaaacaaggaaacagcgttgactcagtttgtggcgtgatcaaacgggagatggtggcgacgcgctagggtttgaatgggggaaaacacaatgcgaccagcaacaaatgacgcgaaagcacacaaattcaacaatgcagattattgaaagaaagtgcgaggctcaaaagggtgctgggataaggtctaacctgaatttttat

SEQ ID NO: 64159 - DNA, 2233 bp, Zea Mays
aaacaacaaagtataaatagatatcatgataagaaaacataatagacattaataatcttctagcaatgagaagacaaccataacgacaagaactgaattaaccagtgcacacaactagttagaaacaaacatcctttgacaaaaagtttctaattaaatcatgattgtgcctaagtagcgttattatgagagtgaaggtggatgtgcttctacttcccactccccttgatgagcaacaagcacctgcattgagtaatgcaagagtgagatgaaagatctcagcaagcgaattgttttgacgagatatttaaaccacaaattgaattaatcaaaattttaaaagaatcacaattaagatcagaaatacttgtagttatagaactcagtagtcccaatgtacccaattccatctcatttcctcgaacaaccacaataggttgtatgacacttccctgcgtcaacaatacatgcaaatatcacttcaatgtatgcataggaacgcaatgtgtaggtcctctatcttcgtacctctgagggtataaaaccacatcatctacaaatatcacttcaatgaatgcatatgaatgcaatgcatatgtcgtctgccttcatacctctaaggttatgatgccgcatcgtaccctccttgggcaacgtacgatgctaagttgtaccggtacggtcggaccataggtcacgacccaacttcagatgcatgtgaatcatgcaatatggcatgctgcatttatcaatatacttcacttccttcacatacaatacaaacctcaaataatacatcatttaccttcatatacaatacaaacctcaaataatacttcatttaccttcagatacaatacaaacatcaaataatacttcatttactgtaacaccccgggatccacaaacaccccagaatgctactaaactacacttctaacattcgtatataaaatttcgatagcatctcctttgaaaattgcataaacgggaaagcaacaaagtataaatagatatcatgataagaaaacataatcaacattaataatctgctagcaatgggaagacaaccataacagcatgaactaaattaatcagtgcgcacaactagttagaaacaaacaccctttgacaagaagcttctaattaaatcatgaatgcgcctaagcagcgttattatgagagtgaaggtggatgtgctgctacttcccacttccctggatgagcaacaagcacctgcattgagtaatgcaagagtgagatgaaacatctcagcaagcgaattgttctgatgagatatttaaaccacaaatttaattaatcaacattttaaaagaatcacaattaagatcagaaatacttgtagatatagaactcagtagtcccaatataaccaataccatctcatttcctcgaataaccacactaggttctattaaacttccctgcgtcaacaaaaacctacaaatatcacttcaatgtatgcataggagtgcaaagtgtaggtactctgtcttcatacctctgagggtataaaaccacatcatctgcaaatatcacttcaatgaatgcatatgaatgcaatgcatatgtcctctgccttcatacctctaagggtatgaagctgcatcgtacccctcctcgggcaacgtacgatgctaagttgtaccggtacggtcggaccataggtcacgacccaacttcatatgcaagtgaatcatgcaatgtatatggcatgctgcatttatcaatatacttcacttccttcacatacaatacaacctcaaataatacttcatttaccttcagatacaataccaacctcaaataatatttcatttaccttcagatacaataccaacctcaaataatacttcatttaccttcaagggtgtgaattaatcttatgagtcatactcgaatcataatcatcatcaatatatgattgagcattagtataatgcaagcaagtaaagcatcaccatagagtccaattatgaaagaatccaatacttctgaatattagagtgtaggcaatacttctgaatatcagaacggaagcaaccaccgctacattcacttgccttcatcgaagaagaaaaatgtactaggcatgatctggagtgtagccacctgctagtgggcataaaacttagtacaaatatttcacaaacatttgccaacgatcaacaaaacactcctacacttgaaaccaagacccagtggaaagact

SEQ ID NO: 64160 - DNA, 338 bp, Zea Mays
gtaaatacatattcacataagggagttttgcagcggaaataatatcacaacaagtttacaaatacagagatgggagtaagtaaaaaacttgattagaaagaaatacaactttgaacaatatggatataactattgttttgaaatacatgctagctcaatgacaatcctctagaaaatagagatgagataactatatagaaggtcgagcccaccggtacttatccaccatcatcggcaggccaagatcttcacttgcaacatggtgggataaactttgagtactcgaatgtactcaactagacttacttgtccaaaaccaggaaataagaaggtaaaag

SEQ ID NO: 64161 - DNA, 386 bp, Zea Mays
atttttctcattatgtgtggactttccctttgcgtgccaagtctgaagctttccccgccctccgccacttcttcgtctgggtgtccactcagttcggcctcaccattaaggtcgtccagtgtgacaatggtcgggagttcgataactctacctcccgcgccttctttctctcccacaggatgcaattgcggatgtcttgcccgtatacctcctcccagaacggcaaggctgagcgcatgatccacacgaccaacgacaccatccgcactcttctcctccaggcgcaccttccggcacatttctgggccgagggcctccacacctctacctacctcctcaaccgtctcccttctactgcgtgcccggctcctactcctcaccaggca

SEQ ID NO: 64162 - DNA, 879 bp, Zea Mays
gtaaatccactaatgtcatatgtttgccatgtcgtgacctagcgtgatggtccagatgccaaccccttaatggtttgtgcttctattgtatctccatgtgaaatgtccttcacaattagtcatgtgttgaaccgcaggttatgtcaatcatctgtttgcccaggattttgctcgcgaagctcattgatgtgttgttggataaatggctccattatctctagctgatgtaggatgctgtgatgtgcctcaagtactgtaacaccctggggtccacaaacaccccggaatggtactaaacaacacttctgacatctatatataaaatttcggcagcatcccctttgcaaaattgcataaatgagggggcaacagtgtataaacatatatcatgacaaaaacatactaagtattattaagcggcttgcaaagagaaattaaacatacgacatgaactgaattaactagtgcgcacgactagtaaaaaacaaacttcctttgacaataagtttctaattaaatcatggctgcacctgggcagcgttattgtgagagtgaaagtggacgtgctgctactcccctcattcccaacatgtatcaagtacctgcattgagtaatgcaagagtgagatgacacatctcagcaagtaaaataatatcaaactgtttaaccacataagaacattgttttaccaccacttgattccacaactttcttattacgaaggtgcagcacgtatacaacgtacaacacacctagtcaccacaccgcgcaggtagaaaccacaatagtaacatagtaatgtcacacttcatatatacctcatgagtgcaaatgtctgcaaatgcaaggatgacttctgccttcatacctctaaggat

SEQ ID NO: 64163 - DNA, 198 bp, Zea Mays
atcaccttgggttcctcctttcctccttcctttcttccttcttcctccctccaaactccaatggaagactcgcacccatacgacggggtaccaagcggggaggctgcaccatggagaggaggagggggggggggcggctagggttgaggggtggtgctgcaatcacttggggaggaaggagagggagagagagagggg

SEQ ID NO: 64164 - DNA, 269 bp, Zea Mays
agaagaggttgatgtcgccaccagtattggttatgccagacctacagaaaggatttgatatctattgcgatgcatgtggccaaggcttaggatgtgtgctcatgcaagaaggacatgtgattgcctatgcatctcgtcagttgcggaagcatgaactgaactaccccactcatgacttggaactagcagcagttgtgcatgcacttaagatttggagacactacattatggggactaagtgccaagtgtacacggatcataagagtttg

SEQ ID NO: 64165 - DNA, 254 bp, Zea Mays
gttgatgggccgtccgtaggtgaattcggcccaggcaagcacattacctcttttttttttatttttttctgttttgcttttcctttttagtttgaaattcaaatttgaatccaaacagtgccgtgaatcttgtattctaattaatgtacagaatattcttagtggtatagaagggttttaattatttgtatacctttatttacttcattttgtgtagtatccttactatctttctccaaatctcaatttccaac

SEQ ID NO: 64166 - DNA, 637 bp, Zea Mays
gtacgatgcggcttcatacccttagaggtatgaaggcagaggacatatgcattgcattcatatgcattcattgaagtgatatttgcagatgatgtggttttataccctcagaggtatgaatatagagtacctacacattgcattcctatgcatacattgaagtgatatttgcaggtattgttgacgtagggaagtgttatagaacctattgtggttgttcgaggaaatgagatggtattggttatagtgggactactgagttctatatctacaagtatttctgattttaattgtgactcttttaaaatgttgatgaattcaatttgtggtttaaatatctcatcaaaataattcgcttgctgagatgtttcatctcactcttgcattactcaatgcaggtgcttgttgctcatctaggaagtgggaagtagcagcacatccactttcactcttataataacgctgcttaggtgcagtcatgatttaattagaagcttcttgtcaaaggaaatttgtttctaactagttatgcgcactggttaatttagctcatgccgttatggttgttttcccattgctagcagactattaatgtctattatgttttcttatcatgatatctatttatactttgttg

SEQ ID NO: 64167 - DNA, 500 bp, Zea Mays
ccaagcaagaccaagcgccacctgttgcagacaggaggccgaggagaagatgcagcagggtgtgggcgcaatgcggaggagccatggacggccatggagctaatgtgtcgcgccatggggaggagatagcagggggagacgccggtcgggcctaggcgtccatggtcggagtggagcaggtcgacggcgcactgctcgcctgggcgcgctagggaacagagatggcagcagagagcttgcggcttgtcctgggcgcgtgcacttggagattttctgctggcgaggtgcgctagggagaaggagtggctggagcttggggcgccggccatggagagaaggggaggagacaccatggatgggggagagggacatcgcgccatggatctgatggggaaggggcgcctggcccatgggtgctcagccatggaggagaggggtcgctggacatggggcagaggaggctggcgttgagggagttgaggagagcggctgccagggag

SEQ ID NO: 64168 - DNA, 1235 bp, Zea Mays
caaagttcatgtcaacttactgatagtcaaaattcagtgttaaggtcgactgacagaccaacttcaggtctatttttctcccatttccatgtagctttaggacttaatcacttaataaaatttgtactcctatcatagctctataagtttgatgtgttgacccattgcaaaatcctcatagattttgaaatataaggcctcaaacttggcctaattacactgaaatttgagagtttgtcacatagatgccttagaggctttttgcacttaagtccaatttgctccacattacttgaaaatcctccaatgtaaaagttgcttgctttttgatgttctaccatttatatatatacactttgttccaaaaatgtatagaatttcaaatcacacccctagggtacaaattagggttttctagggttccttttagggttttgagcactctagagtttttgtgccatcaaatccatcaaacttgatctcttatgaatatctccaatgacttttaatgtattactcattttgtcttcccattacccacatgccctaatcctagggttaagtaccctaccctagggttaagaatatttcaagccaccacatcacacttgttttgaagtcttacctagtggatgcattctaggtgtaacaaacaaaatgaaatgtcaatgcatatgatgccatgctcaagttttagtgtcagtaacactaggggtgttacaccaccttcgagcagaaacaacaaaactccgctgtttcatcacctacaacaacatgggttcgaaaaccttgagtacggagtgtactttcgcaagtcttacccaacaaaggaaaatactctcaaggatatgctggcttgtgggattcaaggtaaagctgatcaagaatcatagaatctatttgcagaaatgcttactaacagtggatccttaaaaatccaattttattatcaggttaagtcattacctgcagctagagttctttctatcctagttcaagcacatggcctacactagccgtcttttatcaacccttcactttactggattgctacgtgtagggcagtgaccaagtctttatgtccgagaagtggcggcgatccgaatcgattaatacccggctggggatctctaaccacacgacatatgtagcacttaacccttgcatatgtcaactcgccaccgggtttctcaagaccagaacgggttcacgccaactgagagcacagatacacc

SEQ ID NO: 64169 - DNA, 333 bp, Zea Mays
ctaggtttaggcatctttaaatgctaaataattcctggtttggactaaaaatcttgaaactatttttattaaaaactagatgaatttaggagtctagtaaaatcggtctcatgattttataattttttaagaattttctataaatgtccaagtttggaagaaaaaataaaaggaaaaagaaggaatagtattgggctgaaaccagcccaaaccggcccaccaacaggggaaacccgcgcccgcgcgcgcccgcactgaccatcttgcgtagaggccctcgactttttgaataaccggcaaagaagtcgtggaactattcatgtgtctctctga

SEQ ID NO: 64170 - DNA, 339 bp, Zea Mays
gcacgctatgtgacaaaatgtgacacttgtagacgtgtcaaggcgatacatatgaaggctgttaggccgttacaatccttgccaatcccaacctggaaatgggaagatatcagtatggatttcattgtgggattactcaggacaacagtatggatttcattgtgggattactcaggacagctaaaggattcgactttatttgggtcataattgatcgacttacaaagacagcccatttttcccgttaaggtgaaatatcccgtggttgcatatgcagaattttatatcgctcgtattctcaatttacatggagttccaaagacgatagtgtcggaccga

SEQ ID NO: 64171 - DNA, 461 bp, Zea Mays
attcatacaagttccctttgcatcctttgtgtaaaggtgaagccttggagctttttagtgtcgaaagacagctgattagctctcaaaatggagatatgtttcccctgctgttgaaatgcaggagtttgttcattcgctttcttattaatccaagtattccctaaccaaatggatttctacccaagtgcatgatcacctggtgacctgagtgaactctcaacccttggcttaccgatggtactgagaggacctgctcaatgtcaaaagtagttcaacaagttgattttactaacttgtaactgcattgtgaacaaaggttgagtttagagatcgttttatcgagttgtctaaactcacttttgtacaacccctcttaaggaagtactttcaagaatcgagattaagtctgccagtaaccacctaatcatcaccctagtcgtgcctcgattgcctcacgtgtg

SEQ ID NO: 64172 - DNA, 1456 bp, Zea Mays
ggcagatcctctggtgcaggctcgggtgctggatccggggctacctcctgagcagctccttgctccggcacaaggatgtactctccgtcagcaaggttacagtctatctaaatgcaatgaacatgtatgtcatgattatgcaggatttaataacattatgctaagagaagaaaaactaagttaatgagtaacttagggtttctgggtcatacgtggcttttagtggtttatgcttatcactctaggtttaggttttgttagggctaggcatagtgaattggtattgcctttatatatttcagtggacaagttataaagggttttaggatgacactaattcctattattcatttttccctttctttattttctatttatggtttctagtgtaggtttgaactacaatagtggtttaactttttttccaaaacttctgtaaaaattacagtgggttgccatgggtcattatagcctgttctaggaatttgaagtttaaaataaaaaggctatgctttagacaaaaataacaaaagttgtgtaaaatgggccactttgcactacatctcttaattaggggtgggttctgtcctaagggttatttttgttggcatttaacagtaataataagcttctgtgccaaagatcacagaaagctaagggatggttatttagttatgattttctaaagtttaatgccaaaaaggcactttctattacattgttatttgaaaaatgtcaaacaacagatttcatatttttcctaagttcttaataacaaaacattaattatcccaagggttggggtgttttcaccttggggttatttttgtagggtttttctaagttttccttgttttcttaaaataaaagggatcctacttattttatactaaaccagggtataatagatttttctagtaaactacattgaataagtactctaacaaaaataggggtgccctctggttcattatttaattcaccttttctatttttcttaaccttaagcatattgtaaaataaatgacaaaaaccaacttaatggggtagacagagaggtttagcatttttaaacaggtcagtaggtggatataaacttctccaaattttcctaaacctagtcaaatagtgcaactgtttttcttcttattatttagcttttggccaaaacaataattaaatcagaaccctaaagttttctgtagtacataagggttttatatttttcctaagtagtttacattatttaaagtctgacaaaattggtttgactaaatttggatgaataaaacagaagttatggattattcaagttctgtcaaaatttaaatcagatttaaataagggtttcctggaaaactactttgcatcgaggaccctgggttatttccaaactaactctctcagttatacccccgcgttactattcatttgagtcaccgacagttcaaaaaac

SEQ ID NO: 64173 - DNA, 1768 bp, Zea Mays
ggaagggcgaccagggagggggcgcaacccctagtggtggccaaccctaggcgcccacacaagggcctcagttgggccagcgtctattcttctgggccttcattctttagtagcatgacaaagtttagatctcttgcacgagcccaggtgattggtccagatgaggaagaaggtggcgcctgaggagaaggtgcatctggtggcgctggaaaaggtgctgctggtgtagtcgtactggtgttgtatttgatgtcctcatcatcctccccttctagaaccgaagtcgtcctcgacggcaactcctcatccttgaccacatatggtttcaaatctgcaacattaaaactagtggaaacaccaaattcctcaggtaggtcaaggatatcaacattatcattaatcttggttagcaccataaaaagaccagcagcacgagacatcaatttagaacggcgcaaagtaggaaaacgatccttgctcaaatgcaaccaaaccatatcactaggtgcaaaagtaacatgttttcttcctttactaccagtaacctgatacttagcattagcagcagcaatgttttggtgtgtttgttcatggaggtcaatcatttgttcaacatgtgcaacatccccgatatgtggggtgtcctcagcatcaagcgaaaacaaatcaataggtgcccaaggaatgtaaccataaacaatctgaaaggggcacatctttgtataagaatgtgttgcacgattataagcaaattcaatatgaggcaagcaatcctcccaatgtctcaattttttgtctaaaacagccctaagcatggttgttaaagttctattcaccacctcagtttgcccatcagtttgagggtgacaagttgtactaaacaacaatttagttcctaatttattccaaagagacctccaaaaatgaatgagaaacttagcatcacgattagagactattgtattcggaataccatgcaaatgaataatctctcgaaagaacaattcagcaacactgctagtatcatcagttttatgacagggtataaaatgagccattttggagaatctatcaacaaccacaaaaatgttatccctccccttcttagttctaggaaaacccaaaacaaagtccatagaaatatcaagccaagggaacgtagggacaggcaaaggcatatacaaaccatggatgctcaatcgtgacttagcttactgacaagtagtgcagcgtgcaacaaggcgctcgacatcacggtgcatccggggccaaaagaagtgtgcggccagcacctcgtgcgtcttgtagacgccaaagtgtcccatgagaccacctccatgtgcttcctgtaacaacaaaagacgaaccgagcttgctggaatacacagcttgttagcgcgaaacaggaacccatcctacatgtggaaatggccccatggtctgccatgcatgcaatgtattaaaacatctttaaaatcagcatcattgacatattgatccttcacagtttgcaagccaaaaattttaaaatctaattgtgaaagcatggtatatctacgagacaacgcatcagcaatgacattttccttcccgttcttgtgtttaataacgtaagggaaagactcgatgaattctacccagttagcatgacgacggttcagatttgtttgggtacaaatatgtttcaaagcctcatgatcagaatgaattataaactcgcgatgccaaagatagtgctgacatgtttgcaaagtgcaaactaaagcat

SEQ ID NO: 64174 - DNA, 1660 bp, Zea Mays
ctgggcaccggggatgaggtcgatctggtgttcgatgccacgaagcgggggaagacccggtggcaagtccatggggaaaacatcagcgtactactgcaaaagattagaaacagtagggggaatatccaaaggcggggcatcattaagtgaaatgagcatactagaacatacaagtgcatagcagggcaagtgagtatcagtaggtcatcaaaatctccacgtgtagcaagtaaaacaggagcgtgcaacttgatttcagcattaacaggagtggatggcgtaggtgcatgttgctttgcagtttttgtagcccgagcaagatcatcttttataatttggtcaggggtcatgggatggataattattttctgacccttaaacatgaaagaataatgattcaaacgaccatgatgtaaactatcagtatcatattgccagggtctaccaagtaacaaagagcatgcttccataggaataacatcgcaatcagcataatcagaataagagcccaaggaaaagggaacacgtaccgaacgtgtaactttgattttgccaccatcattaaaccattgaatgtgatatgggtttgggtgcttacgagtgggcaaggataacttctctaccaaagttgtactcgccaaattgttgcagctgccactgtcgatgatgatgcgaatcgaccgttcttgtataactcctttagtatggaatagagtgtgtcgctgattgttctcaggttgggcaacctatgtactaagaacatgctgtgcaacaagactctcatacctctcggcatcgctaggagcgacatgtacctcattatctgcatggtcagtggcatgcatagcatgtcgagtttctttggaatcactagcggaagagtactcaccattgtcacgtatgagtaaggtaagcttgctggggcagtcccgaattacgtgcccaaatcctttgcaacaatggcactgaatatcccgtttacgtcctatggaaggaacaacgcctgtagctgggggcgctgcaggtttggtcgtcctctcgcgtggtgtagtgctagtggtggatggcacggaaagagaaggagctgagctggatgtcaggctctgtcctgcaaaagagttagtatgtgtcttggatcgacgcccctgcacttcacgttcagctttgcaagcatattcaaacaatgtggtcatatcaaaatattccttataatcaagtatatcctgaatttctcggttcaaactaccgcgaaaacgtgccatagcaatgtcatcatgttcaaacaaaccactacgaatcatacccttttgtagttcctagtaatattcctcaacagattgttgaccttgctgaaaacactgcattttattaagcaaatctcgggcataataggaaggcaaaaatctgtgtcgcatagcagcttttaattgagtccaagtggtgggagtggcagtgggatgtttttgtttatattcacggcaccaaattaaagcaaaatcagtatattcactaatagcagctttaacttgagaagaagcagaaatatcatggcatgaaaatttctgttcgacctctaattcccaatcaagatatgcagcaggatcatatttgccattaaaagatggaattttaaatttatttttggcaaatgagtcattag

SEQ ID NO: 64175 - DNA, 865 bp, Zea Mays
ctccgtgtcaccgccataatccttctgcaactccgtgagcgtcatagtcaacgcatcgagtcgtgacacgatgtcgtcgagcgtggtcgcagtggccgtctgagtgaggtctagctggtcgaaccgctcgttcgatgaagtgatcgatgaatcaagtcgttcatgcatcgtcctcatgtctgcggcaagtccatcaacttgtgtccgcacgtcccgcagttgtgcatccgtcgtgtcatcatctcctgccatagttagcgcaaacacaaagcaaagcctacgacaacaagggtgggggttaggcgctcacagtagtgctgttatcaaattcttatctgtttttaccaagcacacaggggtgagctgcaaccaacatgtagaaccggcgaaagattggaggagcgattgccaggagaaacaaagtctgctcgtcgtagaactatatggagttctgggtaggctgcactcaaagcaaggattagcacaatcaaacaataatgcaaggttgaattatagtaccaaacacataataaaagctgctagaaacaaagtacaaaggtggagcaagggtaggggggcaaaggaaaacagaaagaggagaacaagtagcagcgggtgcgcacccctgggcgtcctgcgtgacgcgcccacacaaggtaacctccggtttgtgtcccccttttttcccttttttctttttttttgtttttcatttttttctttacggagaaactcacaaactgattatatgggcaaaggaatacaaaagaaagttaccacacacactctctctctctctagagccggtcgatcaggattaggaaatcaggaggcgagatcttttcctttcttttttgctttcgat

SEQ ID NO: 64176 - DNA, 967 bp, Zea Mays
gtttgatgtcgattaacacagagtattagggcaacagtgttttttccgtcccctgcaatggtgcagtacaggggtatttatagtaaccaagggatagctataccctatcaaagacggttgtgcccttggttacctacgttatccccagaatattcccccttaggaggttatggtgggtcattacagcgtgattaattacaagcgcagacagacacactaacaactctgccctcacagcggcttacaagtgggaccctataacgtgggccggttatacacaagtcccctattacaataacgagcgagtaacaacatatggtctttgtgtcccacatgctcagccttcgaaattcatggtggccttcatcatgacccgccaagacgaaggtaccgcccaagccttcgcccgctctttgctctccctctatagtggagctctctcttcagtctttgcgctctttagtcttctcttgaatcccttctgatatgttctgcttttgttgtgtagtcgatcgagcgagggggcatcgtgccttcgcccccaacatatatagtccaggggcaggttactagtcggttacaaggtaggaatcctagtaggattacatggtatgagtcctagtaggattactgtaacaccccaggttccacaaacaacccagaatgctactgaactacacttctgacgtccatatataaaatttcggcagcatcccctttgcaagattgcataaataagggggcaacaggttataaacatatatcatgaccaaaaacatactaagtattattaatcggctagcaagggaagataaacgtacgacctgaactgaattaatcagtgtgcacgtctatataaaaacaaacttcctttgacaataagtttctaattaaatcatggttgcgcctgggcagcgttattgtgagagtataagtggacgtgctgctactcccctcattcccaaca

SEQ ID NO: 64177 - DNA, 282 bp, Zea Mays
gttttcctagaataaatgattttgtgggatacagctttgcaagaaattgcttgaatgaataaatagttaataaataaatagatcaaatgtgtcttaatttcatgttgatgtcctttgcttgtttcatatagccagtgtttgaattttaaaacagatttgaacttaaattaaccaagtagaaaataaaaaaaagggaaaagaaaaaaaatgaaaagagagtcacctgcgcctgggccaccagctcctagcccagtatcaccacggtaccgcgctcctcctcgg

SEQ ID NO: 64178 - DNA, 504 bp, Zea Mays
cggaaggaagaccggcgcccgcatcctccgcgcacatcggaagttcgtcgtgtgcgccaacaccctatacctatgcgctggcgggcggggaaatcattgccagaacgttgggcgaacctaggcgtcgttgtttggatgggtcgcggaccagagcgcgctcaccagtgctggttgcatacgccgcgccgtggccatgtgcaaggacggtgtcgtcaatccactgctcgccgcggattgtacgactgacgcccaaaaccacgtcatggatgcttccccatgcttcgctatccttcattagatgcgtagcaaacctcgtctgttcgattcggggccggaatcgccgggtggccacaactcgaccatggcgccaccgtcgagttgtgggcgtctctgttggtgctgtcggaggaagaaggtgaaaccgtggccattcgatccattactggcgtttaggattagattggtggggtgtgtcatcgtgtgccgttgatgctaggaaggtcg

SEQ ID NO: 64179 - DNA, 540 bp, Zea Mays
cgaagccctcccatggtgcccgactatgcttgcacatggccgccgttcccaggatcagcctccatctgcagttcgtctctctccctgtgcgctttccctgacgcgcgcccagctcctcgcgcgggtctctggtgctcagccgcccagctccctctgctcgcgacgcacgcccagcctctcccaagaactcgagttcctctacttctttccccaaccgcgcgcagtacttctcctctgctcgctcgtcgccatggcgatggccgccgagctcccttgtcgtggcttccagcttcctcgtcgcgcgcgtagcgttccgtcgttccctgccgtgacgccaccatggtgcttcctcgcgcgcagcttgccccaactcccgttcgtagtggtcacaagtcgtcgaccctgctcggattccatctcgccaacacctgctcctagtcgatgcttgctcggattcgtgtccctgcgcgcagccgtgggtttctctgtgcagcgttcctcctccccggcctccgtcgtgctcgacagcatgtaattcat

SEQ ID NO: 64180 - DNA, 170 bp, Zea Mays
cttgtgttcatggtgatgctaaccccctcccaagtcttttggttggtcagttccagagctgtgtgcgctgtcttcctgtgtttgtggtgaccacagccaccgagttcaccacaccatagccagaacattctagggagttgcacggccgcatgaagtccgtccggtcatca

SEQ ID NO: 64181 - DNA, 97 bp, Zea Mays
ttgcgataataataggcaagccgacgtgtatgttatttagcgggctatatcgttgctctagttagccgaattgttagatggtttggttaagctcgta

SEQ ID NO: 64182 - DNA, 187 bp, Zea Mays
ctcgcggcgccggcaaatttctagggtccgtgtccaaacagccagttcacccgttccttatcttccgtggttcagccggcgtcctctctctctcgtggcgatgactgggtgacctccccgcccccgccgctctacaccaggtgcccaggtcttcctcgggcccttcgccgaagagcagccaacaggt

SEQ ID NO: 64183 - DNA, 388 bp, Zea Mays
gttataagctgaagttcggcctatttacaatattcccgtgcgtgcaaccagccttcataaaagcaatagttgtgccacgagaagctagcacagcgcagaagtcaccatgcctagctatgacttcatcaagagcatcaacttcgccttcaatatgatcgaagatgcctgacaggtcttcagctgaaggtttaaatttttcagaactggctccaactgagtcgaagacctgctttagtcgttgcacgcaccggttgccgaagttcagacatttatcttgaagttccttcaatgactttttcaagttcgaactctttgcaacttcagcttcaagctttgcatcaaaatccttcttctcttattcgaagctttttgatttcatggagagttc

SEQ ID NO: 64184 - DNA, 546 bp, Zea Mays
acggtgttttcctttcctttgatcttttcccgtttgcgaggaatctccacaacttggagtctctcgcccttacaattgagttcacaaagaaatacggagtaaggtgggaatgagcaacgcacacaagactcgaaaatcagagcaacaacacgcacacaggtcgcaacaagagctcgcaacgcaacacaaagagttcacaactccacaagagctctatatgctatcacaatgaaacgaatgcgtgagattgatgtcttggtgcttagaagagttgtaggaatgcttggtgtgctcctccatgcgcctaggggtcccttttatagccccaaggcagctaggagccgttgggaacaaacctggaaggccatctttgccttctgactcgtggcgcaccggacagtccggttcacaccggacactgtccggtgcctgatttgtttccttaaacagcgcatccgaccattgctgtctgagtcagatctgcgcacagttggcgcaccggacatgtccggtgcacaccggacagtccggtgtatctttccgacc

SEQ ID NO: 64185 - DNA, 1685 bp, Zea Mays
atgtgctgctacttcccactccccttgatgagcaacaagcacctgcattgagtaatgcaagagtgagatgaaacatctcagcaagctaattgttctgacgagatatttaaaccacaaattgaattcatcaacattttaaaagagtcacaattaaaaatcagaaatgcttgtagatatagaactcagtagtcccactataaccaataccatctcatttcctcgaacaaccacaataggttctataacacttccctgcgtcaacaatacctgcaaatatcacttcaatgtatgcataggaatgcaatgtgtaggtactctatcttcatacctctgggggtataaaaccacatcatctacaaatatcacttcaatgaatgcatatgaatgcaatgcatatgtcctctgccttcatacctctaagggtatgaagccgcatcgtaccccttctcgggcaacatacgatgctaagttgtaccggtacggtcggaccataggtcacgacaaaacttcatatgcaaatgagtcatgcaatgtatatggcatgctacatttatcaataaacttcacttccttcagatacaacacaaacctcaaataatacttcatttaccttcagatacaataccaacctcaaataatacttcatttaccttcaggggtgtgaattaatctcatgagtcatactcaaatcataatcatcatcaatatatgattgagcatcagtataatgcaagcaagtaaagcatcaccatagagtccaattatgaaagaatctgatacttctgaatattagagtgtaggcgatagaaataacaggtcagaacggaagcaaccaccgctacattcacttgccttcatcgaagaagaagaaatgtactagacatgatctggagtgtagccacctgctagtgggcataaaacttagtacaaatatttcacaaacatttgccatcaatcaacaaaacactcctacacttgaaaccaagacccagtggaaagactcccaccctgaaccacatgccatacagcagcaacgctgtttgttaattttgtatctttaaaattaaaacagcggtgatatcaaacaaatactctaggagtatctacacaaaatactctacaacttcagtattcaatagataattaaattctgccatctacaagttctaaaacatctgacaagataactgactgaatctgttttagacagcagtatggttaactttaaaattcgatatctccaaaactgctgaaccaaaaattatgaaattctgctggaagtaagaacttttatccctctacaaaagtctccatagttggaagagccaattcggccatttactagatgaaacccaccagtgaacagacccactcatttttgtcaggtaaacaggaacagccacagtaaaacaaacataactggagtttcacaaatcatatgaatgcactctttaacaatctggaaagcttataaaattatctacaacttcttttaccaacccacagtttaattctgttgataaaattgcctaaatcttaagagaacagattctgcacagaattatgagactgaaaaactgctatagtaaaactgcaataactttctggtcggatgtccgattgaggtgttcttcgcggccacggaaagatctacaaattatctacgactcatacatagacttttt

SEQ ID NO: 64186 - DNA, 554 bp, Zea Mays
gtctaatcaggttgatggaacacagatcatgtacacacatagattttgttaatttataccatgaaatatgcgtgcattgtatttaatgttttcctttagaaaaaagaagtcaccatatgtacataagaatatatatataatcaggggcgaagacaaggggggccggcagaggccatggcccctcccaaggctgtgacacatacaagagaatatatatatagttgaatttgtgtgtaaatatatatactataaattttatatagcgtaattaatcaaaggtttaatatagtggttagtaatacatgatccataactctagcgtagtatgtcaaccaaagtctaaaggagacaaaaaaagataaaatattggttaaatgatcaatcaatgcattaaacatcaaacctaatttgcctacagacgctgatatctgaacctcaccctttatatttcatcgtattgtctggctaggcagctgccgattgccactgaccacttgacttgcctctaccataaccccacaaccaaagtccaacacgcgaagcagcagaatgag

SEQ ID NO: 64187 - DNA, 754 bp, Zea Mays
cttccatattccatatcgccgtaaatttaatgtgacatctcttgcaatctatgagcttattaattatacctgctctaaacgggaggagtaaggtagggtcttttgaggggtctttagggaaggataactaaaaatgtacaagagatggtctacatttttatgatatatgggtttgggttgtatcatgtaatctcttattgcatcttataaatgaaaaacggtctaaaggcttagggcatgtacaaccctcatttaatataagatctcttatggtatctctagataaggggttaattaaaaatacaagagacttgcccttcggattaaagtcgattattttgaactgctgcagctgtaatctatagagacaaaaacactatagaagtagcagaagccggcacggattaaagccaagcgaacaagctcatactaatttctattgtttctacaatatttttgtatctatagattgcagatatagcagtacaaatagccggctttaatttgaagcgaacagcctccataaaaatcatggatgggagctaagggtcaatccacaatcctatattatacaccctcctaaaatatagttatttttcatcctcttttaaccgtccacattcatctgaatgctaatgatatagatacaaactatatttatagattaataaattaatatttgtttagtttaaaacgaattattttttgggatggaggaatataataatgtgtcgttgcccgcggtcgtcgtttt

SEQ ID NO: 64188 - DNA, 168 bp, Zea Mays
cggaatcgcgccgctcgcgcagaaggcggaccacgggtcctgcgaagcacccttcgcaacaaccgccgtcgtcgatgaagtggccaccaccggaggcgggacaacagccagttgccccacatccgaccctgcaccatgatcttgattaagacctagtcttaaaaaaag

SEQ ID NO: 64189 - DNA, 566 bp, Zea Mays
ataaaggctattactactactattaggatgctttagaagcatccgaaaaaaaaaatttagttaggtctgagaagacgactagaatgagcatgcatcatgattgtcgcattataattgtctcttgtgcatcaacatgcttctctcacctttattccaagaataagaaattgtgaataatgtgttgtattgctatgaactgcaaaaaaaaactgtcttacctcgtgtcagattggtaagtcttgttaggtcgcgttatgtgtttctcttgtcttgctatctaggtggcattgcaattgttcaaccctttttgccaataaaaaaaatttgttgtctgttttgcccataaaaagacccctccaaacaaccttgagtttagcaagtgaaacctctaaaacaaattcattcttgtgttggtgttttctaacctttgtgtgttttaccctgaagttgcacctacacaacttgtagacccccatagcttaacagctagccaaaccgaaacttccttaagcacgtggttatgtcaaaaaaatttattggtatctagttgcgcaaaccctattaag

SEQ ID NO: 64190 - DNA, 1257 bp, Zea Mays
gggaattcctaagaaaactggagaatggagattatagtgcatattacatgggaaaatggccataacaatgagtcaacattaaatagaacatgagatattcgaactcatcaaacttcaccattctaactcaggatatattctaccagcatcaacactgcttacgaagaccaagagaacatcaggacctatattacctcaagttattatatgaataaatttaacagaacctgttaatggaaaatgcagagctgatcatggcagctaacaaaataaatgcaaaacttatattaagagaggaaataaatgcacaaaaataaatggtcaagcatcttacatagtgttaatctaagttaaaattaaatggtaaagtagcttatagagtgtttttagagacaaaaaatatggcattagatctaagctaaaattgacaaattgttaatgtaataagacagggaaccagaaaaccttacgcaatagcaaacctcaattagtaaaaatgagtgagatactctagatttcattgtcatataaccccctcaattagtagcatgatgaggacgttttcattgaatttccaatgatgttgatagcttaccacttgacatagcatgctcatcatacttctcactctgaacaaaccaagtttcaagctagtaatggttagtttgactcatcgcagaaaccagagagttagtctgcatagatttgttaaatgaaaataaggatttagatcccttctctattatatgataatactgctagtctatgaactcagtctctctgactctctcgaatatgcaccatggatcatcacagatagcagattagcagaacagaagatagtgagataccttcatactggcatgtgagccacggatgcgatggccatgcaccagcgagatgtggcggtcctagcaacacagtccatgtgtggcggctctgctctggcgagatgtggcggccctgtcctggcggctagcaggctgcgattgcggatgggggacggtgaaggatgcagtagggtgggtggcggcgggccgccgccggatctgcgagtgggcgtggtgtgtccgtctgggtgtgacatatgtggtggccctagggagcaggatgtggcagccctgtcgagttgcaaccgctgatcggtggcggcggcggatgtgatgggcagccgatcagtggcggcggcggatggttgggaacttgggagggatcgatggtgacggtgtgaggacgtggtctgggagttctctagag

SEQ ID NO: 64191 - DNA, 238 bp, Zea Mays
ggcaaagtgggccgaaggtgtgaggatccagcccatgcgcaggtatctcctttcctttttttttcttttatgttatattttctgtttttttttctttgagtttgaaattcaaagttcaaaattcattttttttctgtggtaaatcctcctcaatttaagagaatcatgttgcacataatattctttcctttatttataatttgtatacacattttcttttctttctccacttctaaat

SEQ ID NO: 64192 - DNA, 338 bp, Zea Mays
tggaggagggagaagcaggaggcggcggctagcaggagcaggcgcggctggctactaggggcgcgctaggttttaggtcagtgagcggctgggatgataggcccctagtgggccaaagggctttagggtttagtttaggtttttttctttttctttttttttctatttccttttttaattttgaaatacatatttaaataaccctaaaatttataataatgaaaccaaaattatttataaataaaatgtttatttttggactaataattgttatattaattatgtgaatttttttaagagaaatgttattcaatatccaaaaatcaattatgtgaaat

SEQ ID NO: 64193 - DNA, 180 bp, Zea Mays
gtgatgaagaagacattgatggagatttcgatgaatactgagtctaacgatgcgccggtcatcttcctgtgggaggtcacccatatttaattccgccttactttgatgttgatacttgttaaagatacaatgatttagatgatgtaataaagtactctactcactttacgcctttattgc

SEQ ID NO: 64194 - DNA, 132 bp, Zea Mays
cagggagcctgtgtgtgcatgggaagctgaagagcgcgcgacgggcgggctcatggtgtggaagcgatgaagaacagcgaactcggcacaaggtgctggtcggacaggaagacaaagttcggacgaacggag

SEQ ID NO: 64195 - DNA, 842 bp, Zea Mays
cttgagggcgacagcaccatggggagcttgacctgacgccggagcagagacgaacagggagggatctcggctggggaaggaaatccgagccaggggcgagatccagagagccacgcggccaagctgcgcgcagggagccggcgagcacagcagggagaagatgccgagaggaggggatgaccggatgagggagctccggccacagagatgaggagagagagaggaacaccgaccagggcagaagaagcagggagggcggctggggcaggggcatccccagcgagctcgccatgggagaactgagcgagctggagagagccgcaacgctgtggagaagaagaagcttggaggtagcgacaggattttgaagaatccaggggcggcggcgccagaaaaatcccaggggagggggcggcggaaggatatggacggcgggatcattctctttttttttttcttttttttctttttttagaggtcacagatattttagatcgggatttttagtgatgattaaagagtcgacgcgtaatacagctatacatcttattttccgaatcatgaagcatagagttagaggaataacagcttagacggttctgttcgaatctcgtttggataattttcgtgactattccggccacgatgtaaacggatcaaattgcaacgagttcggcttcggtattttaatctgctctacgtgattagccgaagccaaatccgctaatgcatacgcgatttcgtcgtcaaaacaacgtgctcaaggataaattgaatcatatcctcgcgtacgatttcactcagacgacgcacgattcggattattttgcactgagtatttt

SEQ ID NO: 64196 - DNA, 546 bp, Zea Mays
ctcattctttcccacacttcgcgtcgttcctctctcgtctctggtctcttccgtcttcggttcgatccagtttcagaggaggttggtttgcgtatccgattcgtcctcctgtggtagaagaagagtggccccctctgggtcgcgctgcttccgtgtcacggatggatccaaaaggcagaaaccctagctgggatcgttggggcccgaaagatgttcgacaaggttcccagacgtggggtaagaatcggaatctcagctagagattcaaaccaactcttggaaaatttgataacaaggaagacatcttgacatcttcttctggcgatggtggtcaatcaggtattctccagtcccccgcctgttttgaaaaaagagaatgaaattgttcaccgttttttctgtcaaaagtgtggtgcagagggacatcatgccagggattgtttcaaatctttgtggtgtgatatttgccataaagaaactcatatgaccgctagatgtgttcttcccaaacaaaacaagccttgtatgcctattgttggtatggcg

SEQ ID NO: 64197 - DNA, 468 bp, Zea Mays
catatagtaaagagggaaccgaagccctgccctgaagaagctcttaaacacaacaacctcatcttccttcggctctggaactacttctcaagcaaagcgaatcagttcatcttcattttctccaaagttacctagcttcttcatcacaaccaagtcttactatggattttccaaattcaatatgaccaggtttggttgggcatataatgctatcgtcctcttcactttcgttgtcactcccgatttttgctacaacttgttcagcttcggctttggaggtaccttcggcagtagctttctcttgcataactagacctgatcgcctcatcacttctgatatgggcgctgtctcggttacttcagtctcatctccctcacgggacaccctggcagtggatcttactctagccattttagtgttgggaacactctaatcatccctcaactaacgcctaaagatgaaatgac

SEQ ID NO: 64198 - DNA, 828 bp, Zea Mays
gaaagattcagcaaaagtcctttgaagatttaaaacaatatcttatacaattaacaaccttgactccaccttcataaggagctccactgctattatatgtagctgtctcccacgttgcagtcagtgcaacactagttcaagaaaagcaggatgaacagagaaagaaaaacgtcccagtatacttcgtctacgaagtattaagtccatcaaaaaggaattacacagagttggagaaggaactatatgccatattgatggcttctaggaagcttcaacattattttcaatcttatcatataatggtaccttcgtctcaacccttaaaggacatcataagaaacatagaagctacatgaagggttggcaagtgggctgcagagttgaacgaattcaccattgactttgttcatagatcttcgatccaatctgaagcactagcaaacttcattgctgattggacgccaggggctcatgaagaaggacatctgacagatgacaaagcctggaaagtgttctgtgacggctcgtgggaaccttcggcgcaggtgcagcaactgtttaaatttcaccatcaaaaataaaaacttgctatgcagccaggctagaattcaagtgcacaaataacattgcagaatacaaagcagtcctattggggcttcaaaagctcaaggccatgggaataagaagagtagtacttaaatctgactctcaagttatcacagtgtaacactccgggttccacaaacaacccggaatgctactgaactacacttccgacgtccatatataaaatttcggcagcatcccctttgcaagattgcataaaag

SEQ ID NO: 64199 - DNA, 183 bp, Zea Mays
atttgcaatcttgccattatcaaacgtgggttgcgtcagattgccaccaaatgaatagatttcgcttagataccattatcaaccataatgcacacgctaaaaataagatagaatataattttgtagaccattttaccaaacccgagatgtctttgccgacgaaggcagggacgacaccatctg

SEQ ID NO: 64200 - DNA, 730 bp, Zea Mays
cccaaggtaccccatatagcaccacaattcaaaacatggatccattattggtcttaattaacacaagaacttctaccttggactaattgtctaaggaaactacacgacctgacatcaagcatgaaacaacatgtaatgaagctcaaagcatgtcatagttgcaataaacactacaatttcacaccatcaaatttggatgcagctatacatcaacatctatgtcttaagacaacactcttttatgaaggggtaatatggaccaagcacaacccttaccaacttcaaccattaattttaattaaatggtgaaacatctacacccgacgaatgtataagaagatcaaacacctcacctgaaagcaccatgaaacaagtagttctattggaacaaaactcctaatctttctaaaccttattcttgccatcatgaaaagataatcatgtaatctaacattccttacaccccaccaaaagggagaaaatctatagaactaatggagcaataaagccaaaagaagccaataacatcttgtgcggcatagttcatcgaagaaatgccaaaaactctacatagagcactgatagcccaacaacaacacaatacttgcttaacccatgtcactatacttcattcaacatctcaactaagaaaaatatccaactagtaaggataacctacacataatataagtcttcatctactgtagttcagaaacttacatttcattct

SEQ ID NO: 64201 - DNA, 409 bp, Zea Mays
aacctccaaaagcctataattacagggaggaacaaggatctcatccatacctagggtttccccaaaaaatcttcaagaagagatggggaagaacatctccttgatcctctcttcctcttcaattcaacgtgccccttcttttctcgatccttgctgcgtagggggagatcttgggggaggaagcaatggatgatggctgccatagggggagggggcgtccagccaagggggagaaaagggggtggcggccaagagggggggtgaagggaaaaaaaggggtggccacctagggtttttgtgggagaaagaaacgacgcctcagatgacttctatctttgcatccaatgacccacaaccctttacctcatccacgcaccagagattaacttttggtcaacatttttttggg

SEQ ID NO: 64202 - DNA, 3172 bp, Zea Mays
ctcagctgagtataatcgattcggatcgccgtaccttcgcggttatgaagacttggtcactgacttacacgtagcaatccactaaagatgatggttttgttaagaaattggctagtgcaggacaagtgattgaactagggtagaaagaactctagctgcaggtaattttacttaacctgacaataaaattggattttaaggatccactcgtagtaagcttttctgcaaaacagagtctttgattcttgataagccataccttgactcccatataaccagcatacccttgagagtcttttctttagtcgggtaagacttgctgagtaattccatactcagggttttattccctgttgtttttcaggttctaactttgtgctgttgttgatggtgttaagtgccggtgggctcggccttcttataagtctaagtaacccttctatacttcttattgaggatgatcccttaagctagcatatatttcaaacttatacttttgtaatcactccgataaaataatataaaatttttgtaacttgtaaaatttggtagtaagatttccgctgcaaaaatgttggtgtgtgtgatttgtattacttaatctcgcggttctggttgaaagtggtttatccgatgtccttggggcaatcggacagatcctgttgagttatctggtgcacatgcatggctgtctgaggtctttgggacaaggacaggtgcatgtgggcccaataacttggaggttctgccacagagcacacccattgggatcagcaacagatggagcacacccattgggatcagcagcagatggagcacacccagtggggtcggcgtcagtaaattcaggcacaggcgcttcttcagtagcaggaaccgaagtaccaacgtcctgatccaaactagatactcgccggaggcgcctctttttctttttctgctcatcagcaggaggatcaagttgattgactcggcaaggacgtctcaagcgaacactgacaggcttttgaacatctgaggttgtaccagcctctgggagaggcgccaccaccaatgtcctagcaggagcagcatcagaagaatcctcagccagcaaatcaagcatagcacttatctctgcatcgctaggatccaagggcacctcaaagtggacctgtcgttcactatcaggaacttccccgagcgaggcaaccaagatgctaacttcttcagcagagggtcgcactctaaggcccaaattgccgttagtgacaggtggattcgacacaaaaagagtgaaggccttgggaggaggcaagttccaggctgagtatgccactagggcaccaacatttgataccttgcctctaagaatcatctcaagccggttcaccaagtctacagagggaattcttctgttggtaacccgagtcgagtcagctaggcctcggtacagataagccgggtatgccctgtctttcaacggctgaatattcttgaagacaaaatcagcaaccacagcctcagcagtcagacccctctccttcagcagtccaacttcagctagcaaagcccctgcctcagccacctcctgatcagtgggggattcagtccaactcggagtacgaacatccggttgtcttcccgaccgagaagggagagaattgccatggttctcaacaataaaccattccaagcgtcatcccttgatactgtctttgagagggatttctagatactcagtcttcctcccacggcgcatctccaaactagcacccccaaccaactgatgctgccccccggccatcccagggcgacagtgatacaagtacttccacaacccaaaatgtggcagcacgccaagaaaagcttcgcataaatgaatgaaaatggaaatttgcagaatagaattgggattcaaatgggtcaggttaagatgatagaaatcaaggaggccgcggaaaaagggagaaatgggaagaccgagaccgcggagaagaaaaggaacgtaaattacggattcatgggtatcctctgtcggaacagtaaccccatgacaaatccgccaagaacacagctccctcgggggaaggaccccgatggacacgaggtggagaaggtcgagctcggagacaacagacatgtgattacctgcgaaaggcaactgactgttggggtcaattgggggaatcaccgcggcggatgaactcgaggctttccgcttgggtgccatctcaatcctactggcggacggagcaagagccgaattgcagagaggatttggaggcaggaaagcaagaactagggcacggaaagcagaggcggctaaaagtgcagtacttatggatattcccgagccagataccgtttcaaaaagcgcccagtcagcacccggcagttacctccaaaacaccagcgtgccacgttgtcactcggcaattacttccaaagcaccaacgtgccacatcgtcacccgacggtcactcccacatcatcactcggctattaccctcagcatggccagcgcagcccgttctaattcggtcgttatctctaaaacgccgacgtcgtcttcagtcgctcggcagttatctctaaaactccgacgctgtcttcaagccgctcggcagttacctctaaagctctgacgtcatcgctcggcagttacctctaaaacgccgaagtcgtctttggtcgcccggcagttatctctaaaactctgatgtcgtcttcaagtcactcggcagctacctctaaaagcgtcaatatgatgcccaagttatttacttaccattccaaggaaatcaacttcacaaataaggtgggcggaggaatgattcaagaactctaagttatgctacaaccaaagagcatcatgagcaatgaatatcacagtagaagttaactgattacaaagcagaacaatcggcacagagaaggcaatatcattcttcattaaggggaagtaacagtacttacaaatcaactcattatgagttgatacttccctactactactattactactactactactactactacgctacactatactactctacactactaatactactacattatttcactatactacttctaatctatactaatatctaaaaaccaatggcatttagccactggccttattgctgcccttgctgctgccgccgccgccgctgccacccct

SEQ ID NO: 64203 - DNA, 979 bp, Zea Mays
gttgaactcatttcttggtctttttattggctaagtgtgaacctttggcacctatataacttatagactagagcaaactagttagtccaattatttgtgttgggcaattcaaccaccaaaatcatttaggaaatgggtgtaagcctaattccctttcaatctccccctttttggtgattgatgccaacacaaaccaaagcaaatatagaagtgcataattgaactagtttgcatgatgtaagtgcaaaggttacttagaattgagccaatataaatacttataagatatgcatggattgtttctttagtttttgtcattttggaccacgcttgcaccacttgttttgtttttgcaaattcttttgtaaatccttgcaaagtctttttgcaaatagccaaaggtaaatgaataagattttgcgaagcattttcaagatttgagattttctcccccctttttttaaatgcttttcctttgacaaaacaaaactccccctcaataaattcctcctcttagtgttcaagagggttttgatgttaattttgaagagagtataccaatttgaaattacactacgaataagatactaatttgaaaatcctcctttaaaaccaaattgaaagactaaatttttgaaattggtggtggtgcggtccttttgctttgggctcatgctctctccccctttggcataaatcgccaaaaacggaatcattagagccctttaaataactttctccccctttggtaaaagacatatgagttaagattataccaagagacggagagatgctcggagcgatggcgaagaatgagttacggagtggaagcctttgtctccgtcgaaggctccaattccctttcaatacacctatgacttggtttgaaatagacttgaaaaacacattagtcatagcatatataaaagagacatgatcaaaggtatatgaatgagctatgtgtgcaaatcaacaaaag

SEQ ID NO: 64204 - DNA, 541 bp, Zea Mays
aatcggccgagcactgtttaagcttttcctttttcttttttagtgaaactttggaaatctgtagaaaagtgtagaaaaatcctaaaaatgtcaaaccaattttgctagattcctaattttccatagtatttaacaaaaatagttttatgatttttaggtcaaattggaaattttggagcatttaatatggcctaaaacattgttcctggatttttagaaaatcaataataattccaaaaatccccaaactttttatatgaactcaaaacattatttagaagccttggttagaatttggtatgatttggaccttgtttgataattagaacctaaaaccccaccccctgctctttgaacttcactattgactctagaaaccctaagttctcggagttctgtgaaggaaagttgtattcaagactttagatattaaactcttattatctttgcactctcatgagcattacatggcattcattcttatatatatatggtgatatttagaaaacgaggaagaagttgaagtagaagaagagaagac

SEQ ID NO: 64205 - DNA, 747 bp, Zea Mays
ccatgatgacgtctgttttgaaacctggtggaggaatagtgctgccagggtgggcaagcctttatccaagggattcaattctcttgtcattttgggtgcatggactttgtggaagcatagaaataggtgtgtttttgataattgtaaccctagcgctgcggtggtgttggcagctgcaagggaggagttgatgggttggcgtatggctggagccaaagcgctctctttcttacatttagaagaggtgtcttaggtgtcttagttgtttgaggggtgttttttggttttggtttgccaaatgtaacacctttgtactgggggtttttctccctattttattcttcttcttaatacaaaaatacgcggctctcctgcgtattcaagaaaaaaaagttgcattatggcgtgaaaataaggggtattttagtcctcttattattcatttaatatgttttgaataattttagtccctaaaactaaataggatagagactaaactttaatctcctaactaaactttaatctttagactaaagaaaccaaacggagtcttactattgtatactccatccatcggcgcacaagttcctttctattctgtatttatgttcctttctcaatggtatccggcaattgtttgcccagtctgccatgcattctggttctttaccatacttcgttcaatgtttctggggcggtaattagggcacagaaaatcattgctcatcttacatttattgaaaaaat

SEQ ID NO: 64206 - DNA, 489 bp, Zea Mays
ctctgtttgaagcttcggcactgtctccaattccccgcagctatcgcgctgccctggcagatccccattggcgcgctgctatggaacaggagtatgcagctctagttggaaaccacacttgggatctcgttcctcggccacctcactccaatgttgtgacaggcaagtggatattcaagcataagttcaacgccgatggctcccttgagcggtataagtgtaatacctaatttgtaatagataataaaagaggagaaaagtttttttcctatattttatgtgtatgttgaacctacttatcatcacatgtgaacaccatattcaaaaaaataataattaataaaagacttaccacaaaaaaaatgtgcatcatgttggttctttattttgtgtgcattatgtggcaatataaaagtaatgtgacaagaaatatattaaattcccaagtggaaatttagaatttaaaagaaatcctagaatttagaaaag

SEQ ID NO: 64207 - DNA, 123 bp, Zea Mays
atttcgatgaatactgagtctaacgatgcgccagtcatctttctgtgggagattacccatgttatttccgctatactttgatgatactgtttaagatactattgtctggatgttgtaataaag

SEQ ID NO: 64208 - DNA, 434 bp, Zea Mays
cgtaactgcttcaggcaagaagtaagagcactccggcacgcaagcacaactctgctgacgccgctccggcacgccggcatacagccgtcttagccccgctaccccgctacgagggcatcgcgccgcctctgttttgaaggcgcgctgacgcacagacgtggccccgcccgccgcaaaacaagcacagactgtcgccgagcgcgcgggtgcgcaggccaccgtcgccgccgacgcaggcgagcacgcaggcagctgctgccgcaagaaggcgcgggctcaggccccgatgctgcctcaaagacgagtgtgcaggccgcgatgccgcagccacgggcgtgggccccacagctgccgccgccaacccacaggcgagcgtgtaggcgcgcggattgcatccttccgtcgttccatcgagccagagaagaaagaagagg

SEQ ID NO: 64209 - DNA, 167 bp, Zea Mays
gtggaatggtcccggaagaaccgatgcaccgactgaggtgaccggaagagtggaactgttgcccacgacgatagactgagggtgtgagggatgtggaagatgggagtgagataacgagctaacagtaggagtagtgtggaaggaggcgccagagtcgaccacccaat

SEQ ID NO: 64210 - DNA, 1063 bp, Zea Mays
atcttttggtgtgcttttgcctgttacctcccttacctttgtaatctctagatctttccatgatgcttatcttaagcctaccctttgaaatatcatcttccccatctcaaattgataatggtgttttacctatcctgaccttggttgcattctctccctgtcggttacaatccttgcttcaactccatcctttatgttgctcatgaccctatcctgcatgtcttatcatcccccttgcctttcgatggccttagagtagttccccgtgataaggaaagaccgccatctagttaacattaacgtgtagcaatgagatgcttgtgtaacactccatggttccacaaacaacccggaatgctactgtactacactttcgacgtccatatataaaatttcggcagcatcccctttgcaagattgcataaaagagggagcaatagagtataaacatatatcatgactaaaacatactatgtattattactcggccagcaaggaaagataaacatacgacttgaactgaattaaccagtgcgcacgaccatataaaaaaaataaacaaacttcctttgacaataagtttctaattaaatcatggctgcgcctgggcaacgttattgtgagagtgaaagtggacgtgctgctactcccctcattcccaacatgtatcaagtacctgcattgagtaatgcaagagtgagatgacacatctcagcaagtaaaataatatcaaacagtttaaccacataagaacattgttttaccaccacttgattccacaaccttcttattacgaaggtgcagcacgtatacaacgtacaacgcacctagttaccacacctcgcaggtagaaaccacaatagtaacatagtaatgtcacacttcatatatttcctcatgagtgcaaatgtctgcaaatgcaaggatgacttctgccttcatacctctaaggatatgaagccgcatcgtacccctcctcgggcaacgtacgatgctaaaaatgtaccggtacggtcggaccataagatcacgacataacttcaaaatgcaagatggatgatgc

SEQ ID NO: 64211 - DNA, 545 bp, Zea Mays
tactcccgaaaaatccccagaaactgctaatactgctgctgttcatccccctgaaaatctgttttttggacagccacatacccggattcaaacggtgataactttcaatttataactccaaattgagcgcataaatactcgttggaaaggtaaggtaaagttctacatgatccccaaactgatttcccttaattcctcacgaaaaaaacacagaaactgctagactactgctgttcacccaccacctaaaattctggacagccccctctacccaatcgcaaacgcaacctctaatcaattaaattgcagcgcaaatgaacaagggatgaatacaaaaataaccttggattctccccctttccttcctcccttcttccctccaccaaaacgattgaagactcgcaccacgacgacgatgatccgagcggcaaggattggcaccttgggaggaggggattgagggggggggctagggtttggtggctgcaagaatggagagaggaggagatggacaggggggcggcggccaaggggggagagaagtg

SEQ ID NO: 64212 - DNA, 430 bp, Zea Mays
cactataaaaatcataaaataaaaataatgcatttagttattaatggtaattatgttaatgaattttcttttaagtgtttgttatttatttgcatttggaatgattttttgatttctcatattgattttagatattaaataacatttcttgttaaataaaaatcaaaataaataatataataattagtccaaaaatataaatatttttatttataaataattttggtttaattattatgaattttagggttatttaaaaatgtattttgaatttagaaaaggaaatagaaaaaaaaaaagaaaaaaagaaaactaacctaaaccctaaagcccattaggcccaacatcccccccaagctgccgcccgttgacctagccggccgccctcccctgatctccagccgtcaccagggacattttagcccttttc

SEQ ID NO: 64213 - DNA, 109 bp, Zea Mays
gtgcatttaaaaataataataatataaataaggtgtgaatctcatgctgaaagtattacctaaaataaaataataatactaaataaagtaattaaatagattagtataa

SEQ ID NO: 64214 - DNA, 538 bp, Zea Mays
ccacctgtccccacaaatcagtgaaagaacaagcgcgcaggctggctatgaggctgctgcgtgggtcctaaggcgcagtggcaagcaaatgggccacgcaagccagcatttggggtacagatgggccgcggggagggagattcagtccaagcgtgacagccgttttccccattctctttttttttgtttttattttttttattttcactttcccttccatttgaatctttattttaaattcaaactcacactcaggttttgaattcaaaatgcacaaccaattaagactcagcatgaaatgcagatttatttacttatttgttatttgcataatttaatgtcatcagttgagtatgcaaagagaaaaaaaatgaattcaaggaatccccaaacaccctcttataaatttatttatttatttttcctaccaattttgggctttacaaatcctaccccacttaacagaaatctcgtcctcgagatttgtaaggaaagggatgtagaaagccataggttttggttgtagtttagcttcgag

SEQ ID NO: 64215 - DNA, 321 bp, Zea Mays
ccagcatttggggtacagatgggccgcggggagggagattcagtccaagcgtgacagccggtttccccgttctcttttttttgtttttattttttttattttcactttcccttccatttgaatctttattttaaattcaaactcacactcaggttttgaattcaaaatgcacaaccaattaagactcagcatgaaatgcagatttatttacttatttgttatttgcataatttaatgtcattagttgagtatgcaaagagaaaaaaatgaattcaaggaatccccaaacaccctcttataaatttatttatttatttttcc

SEQ ID NO: 64216 - DNA, 158 bp, Zea Mays
cttacatttagtaattgctaataaaacttgaccaacttattaaaagcaatgctcagctttaacccctattgttgatcagctttacacatcacatgaactcccacctttggtgagttcatgccacattattccccataacttgttgagcgatgaacatg

SEQ ID NO: 64217 - DNA, 1129 bp, Zea Mays
atttttgtagcggaaatcttattaccaaattttacatgttacatcaagttttacaatgtacatgatcggagtgattacaaaagtgattcaaagaaataactttgaattgttataaattgtttataagtttgaaatatatgctagcttaagtgaccatcctcaataagaagataaagacagggtatacttatataagaaggtcgagcccaccggcacttaacaccatcaacagcagcacaaaactataacctgaaaacaacagggaataaaaccctaagtacgcaagtactcagcaagacttacccgactaaagaaaagactctcaagggtatgctggttaaataggaatcaaggaaaaggctttagcaaggatcaacttatatatttttgcagaaatagcttactaaagtgagtccttactttcaacattttaatgctagattaagtattaatagaccttgtttgcatctagtctaatttcaccatcacattaatcagtccaacatgatttttgctcattaagatttcatccatgacttagattgcagggcagtgaccaagtcttcatatccgagaagtaacggcgattctgaatcgattaatacccacctggggatctccaatcacacgacatatgtagcacttaacccttgcatatgtcaactcgccaccggggttcttaagaccagatcaggttcacgccaaccgagagcacagatacaccaccatccagcctcttgccacggagggtacacactaatctcaccatctctccactcctattgcgtgttatcttattctggtattagtcggcccaaggcaaagcttacccatgatgaggcatgtgaccagttaaaaggtcctcgatcatcaagcctacattcagtataatccttaatcaacatgggtagaacatcacctattcctagcccaagtctcgatttaagtacttccacccttaggattgtttgtgttccttaggatgaaaagagcattatagggaactttgcagtaagatcccaccacgctcccaatgaaaatattcttgcaggtagaagtcatccttcctcaggataacccctgagctaggcattaacgcaaaggacaacctctatccacaagatttacc

SEQ ID NO: 64218 - DNA, 238 bp, Zea Mays
ggccggttcaaccgcccccccccttttttttatttttttttatttttttttatttactttctgtgatcatagttattttattttaggtaggctaatcattgttaatgttattgaaatatgaagcttaatttagaattccgttacgctaattgattcatgtgattaactgtttatctcgttcaatgttgatcaacttaaaatgactaagtttccattagtgtatataacagaattcttt

SEQ ID NO: 64219 - DNA, 280 bp, Zea Mays
gagaaatcggcctaggcgaggcagccttgctctttttttttattttttttgtttaatttctattttttcatttcttttttaaactgaattcaaataagatctaaattttcaaactcaattataatgcccattcaaaggaatccagcatgcataatataatttatgatagtgatttatctactatttcatttatttgtgcaaatgttttccaaatgtgcactcaaaatcaatcatgatgcaatatttattttaattactttatttgtttggtagatgtttg

SEQ ID NO: 64220 - DNA, 553 bp, Zea Mays
atctcacatgaggggaacgacgttaccatgctcaccaagatggaattggtggaaggcgaactcgggagattcgcgatgataagaggggaggagccaacccaaacatacaacaggctcaagaccctcatcaacaagataaggagctatggaagcacgcgatggacggaccacgacgtcgtccgcctaatgctaaggtcctttaccgttcttgatccacatcttgtgaacaatatttgagagaatcctaggtacacgaagatgacgcccgaggagatccttggaaagttcgtaagtgggcggatgatgatcaaggaggcaagatacgtggacgacgcgttgaacggtccaatccatgagcctcaacccattgctctcaaggcaacgaggagcaaggaggcgctacctagcaaggtagcacaagttgaggcggctgggctcaatgatgaagagatggccctcatcatcaagcgcttcaagacggcgcttaaggaacgcaaaggacagccttacaagaacaagacgaaggggaagcgctcatgcttcaaatgtggta

SEQ ID NO: 64221 - DNA, 1890 bp, Zea Mays
gcataaatgataatttgaatgctaagttagaaatagctagtaaatcaacatcgtgtgtagaaaatgttgtaacttgcactaggtgtaaagatgttaacattgatgcttgtagtgaacacctagctcgcatttctaaattaaatgatgaagtggctcgtcttaatgcccaacttaagactagcaagagtgattttgataaactaaaatttgctagggatgcctacacggttggtagacacccctcaattaaggatgggcttggcttcaagagggaagccaagaatttgacaagccataaggcacccatctccatcaaggagaaagggaaggcccctatggcaaatagtgtgcacaagaaccatgctttcttatacaatgataggaaatattctaggaatgttcattgcaataatgttgtttcatatgctatggctgcttctagttcccatgttgtgcatgatagaaatttagcgaggagaaatgttattaatcacatgcctagaagaaatgttgttcatgtttctaggaaaacaagtagtgaaccttctacaatttatcatgctttaaatgcttcctttgctatttgtagaaaggataggaagatagttgctagaaaattaggggcaaaatgcaagggagacaaaacttgcatttgggtccctaaggatatttgtactaaccttgtaggacccaacatgagttgggtacctaagacccaagcctaaatttgccttgcaggtttatgcatccgggtgctctagctggattatcgatagtggatgcacagaccacatgacgggggaaaagaagatgttctcttcctacgtcaagaacaaggatccccaagattcaataatattcagcgatgggaaccaaggcaaggtgaaagggttagggaagattactatttcatccgagcactctatttctaatgtgtttttagttgagtctcttggatataatttgttatctgttagtcaattatgcaatatgggatataattgtctattcactaatgtagatgtgtctgtctttagaagaagtgatggttcattaggttttaagggtgtattagacgacaaactttatttagttgattttgcaaaagaggaggccggtctagatgcatgcttaattgctaagactagcatgggctggctgtggcatcgccgcttagcacatgtggggatgaaaaatcttcacaagcttctaaagggagaacacgtgataggtctaaccaatgttactttcgaaaaagatagaccttgtgcagcttgtcaagcaggtaaacaagtgggaggagcgcatcacagcaagaatgtgatgaccacatcaagacctctggagctgctacatatggacctcttcggacccgtcgcctatctaagcataggaggaagtaagtatggactagttattgttgatgacttttcccgcttcacttgggtattctttttgcaggataaatctaaaacccaagggaccctcaagcgcttcctaaggagagctcaaaacgagtttgagctcaaggtgaagaagataaggagcgacaatgggtccgagttcaagaatcttcaagtggaggattaccttgaggaggaagggatcaagcacgagttctccgctcgctacacaccacaacaaaatggtgtggtagagaggaagaacaggacgcttatagacatggcgaggacgatgcttggagagttcaagacccccgagcgcttttggtcgaaagccgtgaatacggcttgccacgccatcaacagggtctaccttcatcgcctcctcaagaagacgtcgaatgagctactaaccggtaacaaaccaaatgtttcgtattttcgggtttttgggagtaaatgctacattctagtgaagaagggtaag

SEQ ID NO: 64222 - DNA, 761 bp, Zea Mays
ctccaagagagcaagttgttgattttgatgatgtagatgaagaaaaagttccaacagccgcaatatgcaccatggcgattggagatgtgcggccacaggaacaagatgaacaagatcaaccttcttcctcaacaatggtgcatcccccatctcaagatgatgcacaggaggcgtgtgatcaagggggagcacaagatgatcatgtaatggaggaagaagcgcaaccggcacctccaacccaagtttgagcgatgattcaaagggatcatcccgtcgaccagattttgggtgatattagcaagggagtaactactcgatctcgattagttaatttttgtgagcattactcttttgtctcttctattgagcctttcagggtagaagaggccttgctagatccggactgggtgttggccatgcaggaggagctcaataacttcaagaggaatgaagtttggacactggtgcctcgtctcaagcaaaatgttgtgggaaccaaatgggtgttccgcaacaaacaagacgagcatggggtggtgacaaggaacaaggctagacttgtggcaaaaggttatgcccaagtcgcaggtttggactttgaggagacttttgctcctgtggctaggctagagtccattcgcattttgctagcatatgtcactcaccattctttcaggttgttccaaatggatgtaaagagcgctttcctcaacgggccaatcaaggaggaggtgtatgtggagcaaccccctggcttcgag

SEQ ID NO: 64223 - DNA, 168 bp, Zea Mays
tgatgggcgagttaagctatttccttgggttccaagtgaggcaactcaaagatgggaccttcatatcccaaacgaaatacacgcaagacttgattaagcgttttgggatgaaggacgctaagcccgcaaagactccaatgggaaccgacggacacaccgacctcaaca

SEQ ID NO: 64224 - DNA, 1178 bp, Zea Mays
catcggggacgtgccaattcttaggaaggtccctggtgtcttggagctctaagaaacaaactttcgttgccctatccaccactgaggtcgagtacgttgccgcatgacagtgttgcgcgcaactactttggatgaggcaaaccctcagggactttggctacaatctgagcaaagtcccactcctatgtgataatgagagtgctatccgaatgacagataatcctgttgaacacagccgcacaaagcacattgacatccggcatcactttttgagagaccaccagcaaaagggagatatcgaagtgtttcatgttagctccgagaactagctagccgatatctttactgttgggactatgcttcgtcgccgaaggtcttgtaggaagaagcggctttcggatgaagctgtttgtatgggatggccgaaggttcctcttcatgaagcttcggtattacaaaccgacttaaagatagaatgaccttttagcccataagggtctgagtcaatgttgtaaacttttatgaggggcgtaattataattcttcacaggctgcgacctatgcctataaatagtgaacagtattcctttactgttcacggactctggtgattgctgtcgcatctttcgggaaccaatctttgccaaggcagagcatttgagaacaagtccccaacattggcgcacacctccggtgaactcacttccacttttttgagctgatggctttgttcaacgatcaagctggagctgcttcggacccgaagctggtgcttccgattacaggtggttcgtgctcagaaccagccaataaaaagcagaagaaagaggcgcagagaagggtacaacatgttggagtgcaaggaccctttatcaagtcaaggtggtcccacatcccaatcaccttctcccaggaggaccttcagctcaaggattttcctcataacgatgctatggttatttcttgcgttatcaaagggtttctggtccacaatgtcttggttgatacatgcagtgcagctaatatcatatttgctaaggccttcagacaaatgcaagagccagaagataagattcatgatgctacacatcctctctgtggcttcggaggaagacagattgtagcactgggcaagatcaccatgtcagtgaccttcgggttcatcaacaacactagaa

SEQ ID NO: 64225 - DNA, 1287 bp, Zea Mays
aattcttcatcctgcttatctttgcatgaagataccttcggatcaaggacccatcgctattcatggaagtcaggaagctgccagaagggccgaaggaaactggactgactcaaaaccaatccataacatagatggagctgaagcttgtgaacagtacaaattcagaagggagaaagcagcttcagcagatcagccgaagcccatgctcttatgtgaggacatagcagagcagaaggtgctgttgggctctcaattatccgaagaacaggagaaaaccttgataaggtttttgttcaacaacaaagatgtttttgcatggtcagccaatgatctctgcggagttaatagggatgttattgaacactcgctcaatgttgacccatccttcagacccagaaagcagaggcttcggaaaatgtctgatgataaggccgaaggtgcttgtaatgaagtcaaaagactcctcagtgcaggagttatcacagaagtaaagtacccagaatggctggctaacactgttatggtaaaaaaggccaatggcaagtggcgaatgtgtatcgattttacagatctcaacaaggcttgtccgaaggacgaattcccattaccaaggatagactctttggttgatgcagcagcttcttcagagctcatgagtctgctagactgttactcaggctaccaccaaatctggatgaagaaggaagatgagtcgaagactagcttcataaccccaagtggcacatattgctatcttcggatgcctgaggggctcaaaaacgctggaggaagtttcagcagaatgactgcgaaggttctccagtctcagataggcagaaatgtgctaacttatgttgatgacatcattgtaaaaagcacgaaacagaaaaatcatattgttgatttgcaggagaccttcgccagtttcagacaagctggtttaaagttgaatccagaaaaatgtgttttcggagtaaagaaggggaaatttcttggatgcttggtttcaacaaagggaattgaagctaatccaagtaaaattgaagctatacttcaaatggagccaccaactacaaaaaagggggcccaaagattaacagggaggttggcatctcttaatagatttatatccagatcagcagaaagaaatttatcattcttcgaagtgctgaaatcagccgaagtctttcaatggggaccaagccaacaaaaaaccttcgaggaactgaagcaatatctgatagatttaacaacattaactccaccaacgccaggggctcctttgtt

SEQ ID NO: 64226 - DNA, 546 bp, Zea Mays
tgcattgattatgtgcatagatcttcgatccagtcccaggcattagcagacttcattgctgactggacgccaggggctcaggatgaagaaacaaataaagatgccgaagtatggacagtgttttgcgatgggtcttggggaaccttcggggcaggagcagctgctgtgttggtctcgccatccaaagttaaaacttgttatgcagcaagactcgatttcagttgtacaaacaatattactgagtacgaagccctgcttttgggtcttcggaagctaaaagcaatgggaatcagaagggccattcttaaaactgattcccaggttgtttcgggtcatatcgacaagagttgcaaggctaaagatccgaagcttgaaaaatatctggacatggttcgaagagtcgaagcttccttcgaaggattttctgtcaaaaatatccctcgaggacaaaatgagcatgctgatttgctagctaagtcagcagcgcaggggctgcccttacctttggatgtgttcttcgaaacaataaaagcaccttcggtggaa

SEQ ID NO: 64227 - DNA, 1155 bp, Zea Mays
gcaggcctgtgtggatctcacattggatctaggccattacttggaacagttttccgtcaagggttttattggccgaaggcagcttcggatgcaacggaattagttcaaaagtgcgaaggttgtcagaaatgtgcaagagatcaaaaacaacctttgtccttaacacagctcatacaacccatctggccattgcaaaggtggggccttgacttgttaggtccattaccaccggcccaagggaacttaagatatgttgtagtggctgtggaatatttttccaaatggattgaggcaaagcctttagccacaataacttcggccaccattcaaaagtttttctggtagaatattgtttgtcgtttcggggtaccaaaggccatcactgtggataatggaacatagttcgactccgaagctttcagagatttctgtgatcaaattggtacgaagattcattttgcatcagtcaggcatccggagtcaaatgggctcgttgaaagagccaatggcattataatgataggaataatgaaattaatcttcaatcaacccaggggaaagtggccagatcagctaaccaaagtggtgtggagccacaacacaacaacatcaaggtctacaggctttactccattcaagttattattcggtgacgaagcaataactccggaggaagctaaaactggatcaataagagtagtagcttcggcagaatcaggttctgaagatgcttattctgtggaaaaagatgctttagaagggatcaggcttcaagctgtggagaatatcaataaatatcaagccgaaacaatcaaatggcgagatagaaaagttcggctaaagaatattgagccaggacatttggtgcttcggagagtggccaacccagacacagtgggcaagttgcagttgaaatgggagggacctttcttagtagcatcttcgccaagacccggttgatacagattgaaggatatggacggcaatgacattcctagatcttggaatgcggatgagcttcgacgatattatgtgtaacttgatgtaactttttatgttttttctttttcatggcacccttttcctttctaaagggggagaaaggtttttaatggggccatcatatgtaatttccttttttagttctataagagc

SEQ ID NO: 64228 - DNA, 678 bp, Zea Mays
agcttcttctgattttcattgaaaaagcccaactttaccatcttggagagatcagccttcgaaacagtagattttccgaagtccaagtggctgggcttgcttggcatggcaatacgataatcgtcttcgggatcagtttcctcaatatcttcttcttccgcttcggcaattgcttgttctgcttgttctgcatcatcactggggatcttttccgaagttaccagtccggatctttgcatcgcttcggagatgggaacagtctccgaaccttcagcttcgcccccctcacgctcaaccctagcggtagaacgcactctggccatttaattctgaatttgtggaaatttaacactttttcttcccaagttttttcttctgacgaagcaggcttcaagttggagcttcgttcgattccgagagtcaagcttcggcgtcggttaaaaattttggcagcaaaacagtgcaaatagcaatgaatgctgtgataacttcacacctactcgtctgtttatatagtactgcaggtaagaaggcaaagcgccaggatttttacaccaggcggatatccgcttgcactcgctgcgtggtggaccgcagagtcaaacagtaactctgcaaggtgggaccgccacgcgctgggaaattgaatcgtttctcgacaacgagctcagggaaggt

SEQ ID NO: 64229 - DNA, 1203 bp, Zea Mays
ggctactgttgggactatgcttcgtcgccgaaggtcttgtaggaagaagcggctttcggatgaagctgtttgtatgggatggccgaaggttcctcttcatgaagcttcggtattacaaaccgacttaaagatagaatgaccttttagcccataagggtctgagtcaatgttgtaaacttttatgaggggcgtaattgtaattcttcacaggctgcgatctgtgcctataaatagtgaacagtattcctttactgttcacggactctggtgattgctgtcgcatctttcgggaaccaatctttgccaaggcagagcatttgagaacaagtccccaacatttaccaagcctctagatgagcggaccttttgcaagttgcgtagtgagctaaatgtcttagattcgcggaacttggattgatttatagcatacatatgtttatgcctttgatcatgatcattaatgcattttgttgtttatttatggtgctcaagttgtacaagcactccccggacctcacaagtcctttgcaagtgatgcacaaatttagggggagatgtgctacaacttgaccctttgagactaactgtgtgcttgagtttgcttaatttagtctcaaaggaggtttaaaagggaaaaggtggacttggaccatgcaagacttccactgcactccgatgaaagagtaactttttaccaagttcatatttgtactcatactgcctttttactcttagttgaagattttggtgaggcaatagggttaaagggccaaaattgatcccattttggtgcttgatgccaaagggggagaaaataaggccaaagcaagaaatggatcagctaccacttgagaatttttgaaaaagtagagttagagttaagtagagttagagttttgtttgtcaaaatactcttggttgcctcttattgtcaaaaattagtctcttgtggggcgaaggtttaattatgggaaaaagggggagtttttgaactctttgatcaatttctcttgaaatatctctctttatgtttcaacaagtgtgtttgacttagagataggaaattgaggttgatttgcaaaaacaaaccaagtggtggcaaagaatgatccatatatgtcaaatttgaatcaaaacaattttgagttcttattcgaagtgattttgcacttgttctacttgctttatgttgtgttggcataa

SEQ ID NO: 64230 - DNA, 230 bp, Zea Mays
ctgtccggtgagccaacggtcggccgggccaacggtcggccgcacgatccgcgcgagacacgtggccgagccaacggtcggaagggggcaccggactgtccggtgtgcaccggactgtccggtgtgcaccggacagtgtctggtgcgccaacggctcccaggcccaacggtcggcttcgccaaggaaggaaagaaatccgcaccggacagtgtccggtggtgcaccggac

SEQ ID NO: 64231 - DNA, 430 bp, Zea Mays
aaaagggacccctaggcgcatggaggagcacaccaagcatcctttgagcattgttgatcactcacactccattcttgcgcacttgttcgacattcttagtgatttgagctccgttctagtgtgaaacttgtgatagtctcttgagctcaagtctgggttgtgtgtgtgcgtatttgctctgatctttgtgtcttgtgtgagttgctcattcctcccttactccgtgcttctttgtgaacatcaaagtgtaagggcaagaggctccaagttgtggagattcctcgcgaacgggatatagaaaagaaaagcaaaacaccgtggtattcaagtgggtctttggaccacttgagaggggttgattgcaaccctcgtccgttgggacgccacaacgtggactaagcaagtgttggacttggccgaaccacgggat

SEQ ID NO: 64232 - DNA, 505 bp, Zea Mays
tttaacactcagctaatggtgctgccaaatgggaaagccccttggcaccagcaatctcccattttgccctttcctcatccacggctctaagactcatagtaacactagggctgcagccatcaaagacacatttgtttctatgttttcacaagatccaagctcccagaatgataagggaatcaagtccttttttggtgagtccattaacaatattccccaccaattcccaccagcccagatatgagccaacatccagttgaggagccaaagaatgcagaccaaatttcctaagcaacaaataccagaattccctggataatgaacaggtaacaaggagatgatcaatagtttcatcctcttgatcacatacggggcacttctcaggatgagtcagccctcttttagcaagcctatctgctgtccagactcttttttgagctaccagccaaatgaagaagcgacattttgggcaaggcccaagttttccaaattctcttgtgatgag

SEQ ID NO: 64233 - DNA, 196 bp, Zea Mays
cctctctctctccctctccttctcccccaagtgattgcagcaccacccctcaaccctagccgccccccctcctcctcctctccatggtgcatcctcctcgcttggtaccccgtcgtgtgggtgcgagtcttccattggagtttggagggaggaagaaggaagaatggaaggaggaaaggaggaacccaaggtgatt

SEQ ID NO: 64234 - DNA, 523 bp, Zea Mays
gttactattgtggtttctacctgcgaggtgtggtaactaggtgtgttgcacgttgtatacgtgctacaccttggtaataagaaggttgtggaatcaggtggtggtaaaacaatgtttttatgtggttgaatagtttgatattattttacttgctgagatgtgtcatctcactcttgcattactcaatgcaggtacttgatacatgttgggaatgaggggagtagcagcacgtccacttacactctcacaataacgctgcccaggcgcagccatgatttaattagaaacttattgtcaaaggaagttgttttttttatatagtcatgcgcactggttaattcagttcaggtcgtacgtttatcttcccttgctagccgattaataatacttagtatgtttttgtcatgatatatgtttataccctgttgcccccttatttatgcaatcttgcaaaggggatgctgccgaaattttatatatggacgtcagaagtgtagttcagtagcattctgggttgtttgtg

SEQ ID NO: 64235 - DNA, 125 bp, Zea Mays
attggttgctggtgtgacttggcctccatccctgccaccgggatagacggtcgagtgggttactgcttccgtaggagaggaccaggaggagtagcgtggccaggcttcgccatgttactcggttt

SEQ ID NO: 64236 - DNA, 3400 bp, Zea Mays
tagcaatgatggtgtaacaccccaggatccacaaacatcctgaaatgctactaaactacacaactaacattcatatataaaattttgacagcatctcctttgaaaatttgcataaacgtggaagcaacagagtataaacagatatcatgataagaaaacatactagacattaataatctgctagcaatgggaagataaccctaacgacatgaattgaattaactagtgtgcatgactagttaaagacaaacatcctttgacaagaagtttctaattaaatcatggctgtgcctgggcagcgttattatgagagtgaaggtggacatgctgctactcccctcattcccaacatgaatcaagtacctgcattgagtaatgcaagagtgagatgaaacatctcagcaagtgaattgtttcgacgagatatttaaacaaaaaaaattgaattcacaattgagatcagaaatacttgtagatatagaactcaatagtcccaaaataaccaatgccatctcatttcctcgaacaaccacaatgggttgtataacactttcctgcatcaacaatacctacaaatatcacttcaatgtatgcatagtaatgcaatgtgtaagtcctctgccttcatacctcttagagtataaaaccacaccatctacaaataccacttcaatgaatgcatatgaatgcaatgcatatgtcctctgccttcatacctctaagggtatgaagccgcatcgtacccctcctcgggcaacgtacgatgctaagttgtaccggtacggtcagaccataggtcacgacaaaacttcagatgcaagtgaatcatgcaatgtatatggcatgctacatttatcaatatatttcacttccttcgcatacaatacaacctcagataatacttcatttaccttcagatacaatacaacctcaaataatacttcatttaccttcaggggtgtgaattaatctcacgagtcatactcgaatcataatcatcatcaatatatgattgagcgtcagtataatgcaagcaagtaaagcatcaccatagagttcaattatgaaagaatccaatacttttgaatattagagtgtaggcaatagaaataacaggtcagaacggaagcaaccactgctacattcacttgccttcatcgaagaagaagaaatgtactaggcatgagctggagtgtagccacctgctagcgggcataaaacttagtacaaatatttcacaaacatttgccatccatcaacaaaacactcctacacttgaaaccaagacccagtggaaagactcccaccctgaaccacatgccatacagcagcaacgctgtctgttaattttgtatctttaagattaaaacagcggtgatatcaaacaaatactctaggagtatctacacaaaatactctacaacttcagtattcaatagataattaaattctgccatctacaagttctaaaacatctgacaagataactgactgaatctgttttaggcagcagtatggttaactttaaaattcgatatctcccaaactactgaaccaaaaattatgcatttctgatggaagtaagaacttgtatccctctacaaaagtctccatagttggaagagccaattcggccatttactagatgaaacccaccagtgaacagacccactcacttttgtcaggttaacaggaacagccacagtaaaacaaacataactggagtttcacaaatcatatgaatgcactctttaacaatctggaaagcttatgaaattatctacaacttcttttaccaactcacagtttaattctgtagataaaattgcctaactcttaagagaacagattctgcacagaattatgagactgaaaaactgctataatcaaactgccataactttctgttctgatgtccgattgaggtgttcttcgcagctacggaaagatctacaaattatctacgactcatatatagactttttatttttttgaggccactaagaccacagaaaactggcatgaacagaaactgtcgaatctgtcattctgcagaaattaaattcgagatcaaaacctaaccccacatctaatccaacctctaattcttcaatccacatgatccacaacctccaaaaacacataattatatggaggaacaaggatcccatccttacctagagtttccccaagaaaatctgtaatagatgggggggggggggtagaacatctccttgatcctctcttcctcttcaatccatcttgctcctcctcttctcgatccttgctgcgtgggggagggggagatctatggaggaggaagaaatggtgggcggctgccatgggaggagaggggacggccaaccaagggaaaaatgggggagggtggcggccaagagagggggtggagggaaaaggggtggccccctagggttttgtgggagaaaagaaccgacgccccagatgacttctgcctttgcatccaacggcccacaaccctttcccacatccacgcaccgaagatcaacttttggtcaacatttttttgggatattacactctatcccccttaaaaagaatttgtcctcgaattcggccactccaagcaaaacacccaaggtaccccatatagcaccaccattcaaaacatgggtccattattggtcttaattaacacaagaacttctaccttggactaattgtctaaggaaactacacaacctgacatcaagcatgaaacaacatgcaatgaagctcaaagcaagtcatagatgcaatcaacactacaatttcacaccatcaaattgggacgcaactatacatcaacatcaatgtcttaagacaacactcttttatgaaggggtaatatgcactaagcacaacccttaccaacttcaataattaattttaattaaatggtgaaacatccacacccgacgaatgtataagaagatcaaacacctcacctcaaagcaccacgaaacaagtagttctattgaaacaaaactcttaatcttcctaaaccttattcttgccatcatgaaaagataatcatgtaatctaatattctttgcaccccgcaaaagggagaaaatctacagaactaatggagcaataaagccaacaagaagcgaataacattctgcgcggcataggtcatcgaagaaatgccaaaagctccacaaagagcactgacagcacaacaacacaatacttggttaaccaatgacactatacttcatccaacaactcaactaagaaaaatatccaaactagtgaggttaacctacacataatataagttttcatctactgtagttcataaacttacatttcattctatcatacgatgcactcaaagtaccagacatacaaagtcaataataaccccctaatcctt

SEQ ID NO: 64237 - DNA, 1360 bp, Zea Mays
aacagatatcatgataagaaaacatactagacattaataatctgctagcaatgggaagataaccctaacgacatgaattgaattaactagtgtgcatgactagttaaagacaaacatcctttgacaagaagtttctaattaaatcatggctgtgcctgggcagcgttattatgagagtgaaggtggacgtgctgctactcccctcattctcaacatgaatcaagtacctgcattgagtaatgcaagagtgagatgaaacatctcagcaagtgaattgtttcgacgagatatttaaaccaaaaaaaattgaattaatcaacattttaaagggatcacaattgagatcagaaatacttgtagatatagaactcaatagtcccaaaataaccaatgccatctcatttcctcgaacaaccacaataggttgtataacactttcctgcatcaaaaatacctgcaaatatcacttcaatgtatgcatagtaatgcaatgtgtaagtcctctgccttcatacctcttagagtataaaaccacaccatctgcaaataccacttcaatgaatgcatatgaatgtaatgcatatgtcctctgccttcatacctctaagggtatgaagccgcatcgtacccctcctcgggcaacgtacgatgctaagttgtaccggtacggtcggaccataggtcacgacaaaacttcagatgcaagtgaatcatgcaatgtatatggcatgctacatttatcaatatatttcacttccttcacatacaatacaacctcagataatacttcatttaccttcagatacaatacaacctcaaataatacttcatttaccttcaggggtgtgaattaatctcacgagtcatacttgaatcataatcatcatcaatatatgattgagcgtcagtataatgcaagcaagtaaagcatcaccatagagttcaattatgaaagaatccaatacttttgaatattagagtgtaggcaatagaaataacaggtcagaacggaagcaaccactgctacattcacttgccttcatcgaagaagaagaaatgtactaggcatgagctggagtgtagccacctgctagcgggcataaaacttagtacaaatatttcacaaacatttgccatcaatcaacaaaacactcctacacttgaaaccaagacccagtggaaagactcccaccctgaaccacatgccatacagcagcaacgctgtttgttaattttgtatctttaaaattaaaacagcggtgatatcaaacaaatactctaggagtatctacacaaaatactctacaacttcagtattcaatagataattaaattctgccatctacaagttctaaaacat

SEQ ID NO: 64238 - DNA, 590 bp, Zea Mays
attatctacgactcatatatagactttttatttttttgaggccagtaagaccacagaaaactggcatgaacagaaactgtcgaatctgccattctgcagaaattaaattcgagatcaaaacctaaccccacatctaatccaacctctaattcttcaatccacatgatccacaacctccaaaaacacataattatatggaggaacaaggatcccatccttacttagagtttccccaagaaaatctgcaatagatggggggggggggggtagaacatctccttgatcctctcttcctcttcaatccatcttgctactcctcttctcgatccttgctgcgtggggggagggggagatctatggaggaggaagaaatggtgggcggctgccatgggaggagaggggacggccaaccaagggaaaaatgggggagggtggcggccaagagagggggtggagggaaaaggggtgaccccctagggttttgtgggagaaaagaaccgacgccccagatgacttctgcctttgcatccaacggcccacaaccctttcccacatccacgcaccgaagatcaacttttggtcaacatttt

SEQ ID NO: 64239 - DNA, 706 bp, Zea Mays
aacaagtgcaaagaaaccgaagtctactgcgtagactatccgtgcagaagacgcctaagggtgcagccggactagcacaacaaaagcaaaaacgacaacaccaaactgtctgcgccaagaccgactatacgcgcaccagcacagcataacaaaacacaccagaccaagtacacaacgccttcgcaggcatagacaaacgagggcgcacaacctcatcaaacaagcctttacacatatacaagcgagggcaccacactctacatcggctcaaccttaggaataattcccatctccctataattaaataacattatcctaagctcctcacccgcaaaaagacttcacagttccccttcacctgtactcacggcggccggcaaagacaacagttcctgccggccagccctgctcacacgaagccaacctccctccgccccactaactctacgcttcgcaaccgccctttgccgccggcgcccggtgctaggaccaggcacatcttctgtgtccgcggcgtgcggtgaagcctccgccgcagccacatccaaggccgcaaagtagtccaagtcctcctccaatgactcctcagtccactcaaccgagctcccagagtcagcaaaatcagaaaactcagatgcagacccatcacattcattaccaccatccacggtcaaagccgccaaaaatttagtagtggcggttgcgt

SEQ ID NO: 64240 - DNA, 529 bp, Zea Mays
cctcatatcaaccttgtaccccaagatagctcatttatgacaacattgagcccatggaacatttctggcacactcacatcttccaacatcttaaatctggcgtacttgtccttaaagatctataacttggtctttttgactgccaatgtgccctcatatgaatcctcaagtcccatccatacatggaatgcaaactcgagatccttgattgattcaaatacattgggatcgagagcctcatatatcacattaagagcttgatcattcaattgcaacttttcttctcttggtcttgagtctttcatgttaagcacactaaagtcatcctccataacaccccatatcttttaactcatttccttgagatggagacacatactcttcttctaatagtcacttttcccatcaaagggaggtggcttgccaacatgatttgtagccattgttacaccataggatgttatgcttcaaaaggatgataaatttgctctaataccacttcataggatcttggtggctagacggggtg

SEQ ID NO: 64241 - DNA, 482 bp, Zea Mays
atcaattctccaaggggtggcagttaactcgccaaaggacatgtcccttggcttgcacccctccctttgtatatatttcttttttctgtttcttttttgttttctttttattttctttttatatttcttttttctgtttcatgtagattttcttattttcattcttctaccttttattttcttttaattttatcaccctaatcaagaatattgtttttttgttttcatgttttgtttttatctttttttattacgcgagaaacatattgttcaactagtatatactagtatgtagcatgtgctatgctacaatcccgagaagtagagaggaggggttgatggaggcggcggcggtgcgaagttggggggaaagggtgaagggggagcctaggggcaaggggctgtggggtcatgggagagagagagggatgagggatgatccaaataatattttctattggatttgcgtgagtgaaggagag

SEQ ID NO: 64242 - DNA, 334 bp, Zea Mays
aaagttagtttttctagtttcacggtttctaccattatcatgcctcccgatatttaaattaaaaaaaccctaaaattattcacgattttcaccatcgtcatgcctttcaacatttaaattataaaaatactaaatttatatacaaatagggattcgacgtccacgctcatatgtcaacagttttatattttatattctatatacttaaacataaatgaaagaatatgtggcgcttccaaatgtgcacattttcaatcgattttctattgtagcctcgtaggaccggtcggccggcgatcgaggcctggactgcgtatgtgccggcaaaaaaaaa

SEQ ID NO: 64243 - DNA, 635 bp, Zea Mays
ccggattcaaacaacgatatctcctgaattataactccgaatcgagcgcataagtacttgttggaaagataacataaagccctacatgattctcatactgattaacactaattactcccgaaaaatccccagaaactgctaatactgctgctgttcatcccctgaaaaatctgtttttttggacagccacatacccggattcaaacggtgataactttcaatttataactccaaattgagcgcataaatactcgttggaaaggtaaggtaaagttctacatgatccccaaactgatttcccttaattcctcacgaaaaaaacacagaaactgctagactactgctgttcacccaccacctaaaattctggacagccccctctacccgatcgcaaacgcaacctctaatcaattaaattgcagcgcaaatgaacaagcgatgaacacaaaaatcaccttggattctccccctttccttcctctcttcttccctccaccaaaatgattgaagactcgcaccacgacgacgatgatctgagcggcaaggattggcaccttgggaggaggggattgaggggggggggggcggctagggtttggtggctgcaagaatggagagaggaggagatgggcagg

SEQ ID NO: 64244 - DNA, 757 bp, Zea Mays
caaaatcccaaatccccaaaacaacaaccggatgaggaaaaaacaaaaagaacaacccccaacttctcttctttgcaaaccgggtatcacactctacccctcttaaaaagaattcgaccttgaattctgacgcttctatcggaacaacaaaagaaaggttaatgaatcaaaaaaactcacacataaagaaaagttcgagtacttctgccgcatcagctcctcaagctcctaggattctaagatacgcaacagacgacactctagagtctgctcttgctacacaggaatcggctcttgctcgatttgatggtctggattccgcaaatacttcctcaacaaaaagacatggaatacttggtgtactctgatcatagattccgacagttacatgtgctaagcccagctgccaactcggccaagatagcagacggtcctatatacctcggaccaagctttcctgacaccaaatcaatcattgacatatgcaagtacttcaaggaatgtatatatgaatgcaaggcatataatgttcctataggctaaaccaaacttagccacacaagagcaacttgaagagagcaacttaatgcttgcatatttctagatagcagcatagcggttaattgttttgctcctaactcacaaaaatatgcatcgaaaattagtaaactaggactttatggaaaacttataaagtctactatacccttggtattatcatcacaacaagatttgacacttagaaaggtcaaacagt

SEQ ID NO: 64245 - DNA, 209 bp, Zea Mays
aaaaactaatgtacttcttgacacagactcatgcaaaagcttcataaatattactttcaacactaaaataataacacgatactatgctcaacatgagtaattggacttcaataagataacccacctaacccaactactttgattaacctcacatacaacaatacctcctattattgcacttgaacaatttgtacctagtgatgtcatag

SEQ ID NO: 64246 - DNA, 206 bp, Zea Mays
cttggattctccccttttccttcctcccttcttccctccaccaaaatgattgaagactcgcaccacgacgacgatgatctgagcggcaaggattggcaccttgggaggaggggattgaggggggggggggctagggtttggtggctgcaagaatggagagaggaggagatgggcaggggggcggcggccaagggggagagaagttg

SEQ ID NO: 64247 - DNA, 769 bp, Zea Mays
ggttatagtgtagaagaacagaagactatagttgcatgtaagaaaaaaactttagtctagacaaaaaaatttgaccctaaaaaaatatcgtggtattgacaaaaccatggtttagaatacagggtttttagacgtgtttccaaacgccttctggtctaaaatatcgtactatgctcaaatatcacgatgttgtcttgtaactaaggaaatattgtgctactgataataaagtttagatattctactagtaccatatttagtatgttcttgtcattagatataggaatatttccaagatctttaaccttgcatttatcattgtcaccaaatatagtattgttaaactcatctttgtcacttgtatcaattgaattaaacatctcttgatttatattcatgtgttgagtgtattcgctgtcaagaatccaataactttcttcgaccttgtattaacatacaaagaaaaccatatttaggtgcataaacttgtttggatcctctaaggttagtgactaggttcgtgggcatccaaattgtctttttctttaggccaacaatagatgaaccaatgaatttagcttttataccattagtacccttagtaagcaaataacaaaaaatcaaatttaatagaggatataacattgttcttgttttttgcattgttgttctaagtatgcaacttgcttgtatcatgatcaataccgaccattacccttcgtaaaattagttttgtgaatagcaaatgttgtcttaccatcttctaggt

SEQ ID NO: 64248 - DNA, 236 bp, Zea Mays
cgaaccgtccgaaatggtcgaatggaaattcggatacatttttccagatatccggacttattttcaaataacaaatacaaatatggatatttatatcgaatatcgaattcgaatataatatagcaaacatccgacggataccaaatatctgatacattttttgaatacatccgaacaggatccgataaatatccgatcaaattttatttatattttttttaaaatacgacatcgag

SEQ ID NO: 64249 - DNA, 816 bp, Zea Mays
cacgatgccaggcagccagccagccaggagcatccgacctgaccggactataaagctatgcgtctggtgctcctctccttcttttccttagaaccctaacctccgccgccttcgtctcgagtccgggcctgaggatctcgcccgagccgccgtcctctgcggtgctgtgggctctaaggatgtgctcgtcgcgctcttccaaccacggtgttggtgccgcgctctcccacctcttgatttcccccggccacatgctccttggccacctctgcgccatcccgctggagactatcgtcgtcaccggtattcgccacgacccagggcagtacctcgacaaagaaccgtgcaccatcgtcgtccggtgtccgccgtttgcggtgagttcccctctccggtccctgctgagcctttgttgtgcgcgcatgtcagtttcctacaccgcgtcagccctcagccgtcagcaccgccgtatacaccgtcgcctgtagcgtgcgtgctcgctcatgtcgcaaggtataagacgccccaggaccgtcgatgtcctgatggacggataggattagcatctgcggttccttcgcgcagacggtacgacgaccgtcgatctaagaatggtcgaaggagattaggcgttagcatacctcttcgtccagcaagatctaggccgtagatttataatccgatgaatgtgaatgaacctcagtaacatagaattcaagccattgatcttgatcctgcggctcagatctatccccgacccagcctccccttgatctattctaggtcgtacagatctaatcctacggtccagccaac

SEQ ID NO: 64250 - DNA, 827 bp, Zea Mays
cctgcctcgcttccttggtagaggtgtatgggattcatgatcccttggcagatgggtaacatgacttgtgggtacagggtacaacctctgcagagtgtaaaactggtatactagtcgagctcacggtcaagagcagctcaggactctcgcatgattaatttatggaacttaaattcaatttgtcatttgcattgcatgggattatttattatggtttggtatttacttacatttagtaattgctaataaaatctgaccaacttattaaaagcaatgctcagctttaacccctattgttgatcagccttacacatcacatgaactcccacctttggtgagttcatgccacattattccccataacttgttgagcgatgaacatgtgtgagctcacccttgctgtctcacaccccccacaggagaagtacaggtggttcaagaggagccacacaacgaggactttgacttgatctaggtggcatctcccaattgactttatggcgctaaggatggactttagttcgatcttttttgtaaagacttccgctatgtaataagtactctgattatattgtgacatttatctttatacactctgttattatatgtgttgtcttctttggcgcatatatgagatgcacccgactttgtcccttaaatccgggtgtgacacccattcatctctaccgaggagatgaggcaagtagcactacgagacctttacaaagttccactagcttcagaaaacccgctacggtttctgagaagggcaatataggaatccctcgtctaaaaagccattgcagcatgatcgacccggaacctcc

SEQ ID NO: 64251 - DNA, 467 bp, Zea Mays
ggtatttcctcttgggggagtacatttgggtaataaccaggtttattactaaaacttggttctactaatagtaataaatacttgaccaactaaaagcaactacttaaccttaactccacatagtccactgtagccaaacgagacatttgctcagtaatttgatgtgtactcacccttgctttaaaaaccaccccaccccaggttttccccactgtattcagtgctcaggaggagatgctggcaacatggaggaccttgaggagttccaggactacgacgagttctagttatcttagtggcaaacccccagtcagctatctgtgaaggccttatctgctaagtttcgtattccgcactttgattatgttaaatgactatgttatagactctatggatgacttggacatcttgatgtaataaaatacctttccgctatttattttgagcaatgtgtgatgatgtccaat

SEQ ID NO: 64252 - DNA, 578 bp, Zea Mays
gtcagtttacctccatctcgtggcggtgttgtgctgtcgtcgagtcccgatatcaatctagttgtcatcgaagtgaagcttagtttaatgctcgccaaagattcgatcaaagattttatttggagactgtcgacgttctcgaagcttgaagtcggacttgctttggatgataaatccctgatattcgagagaggcgaggcctgtaagcgctctcttggaactcaaccaaatatctaaactggaaaaccatcatcaccctcgtggatatcgaatcaaatcagtattggtaagccaatttattatttcggttaatcaaattagattagctagatttattagtcgtaataattctcgtgtttagcaggcgtgtcatgtttgagttagatgtttgctaaaatacctcagcacctccggtaacgtgatcgtgggaaattattgcgtattatgcgtattatggtacaacttaggtctaaaatgcaggatttacgaagagtgtgttagagaaagtataaattaagcgtgtataaattggctcgtcattcgcgaagaatggtcaagttaataatatgagaaaaaat

SEQ ID NO: 64253 - DNA, 643 bp, Zea Mays
gtttgtgttaggtttgtttaatttagagaagcgtaattattgcgcttagtcgtatatcgataactaatattatcgtataaaattgttgtaacatcaaaaatcgtatggtggtaatttagagagagatcttccaaaatacttaagataaaatgactcctaaataatgaattccctctttataaaaatatgtttccttgaaacaaacaacgagtaacattaaaggtttggtaattcaaacatagacccaaagttgaatttaaaaaggtttgaattgaaaatagaaacatcaaatagaggaaggacctttaatctacctaattattcccttaaacacccttcacaaataaatagatacgtttgaatgaaaatagttcatgacacatataatatatatttgttgttttaaaagaaaataattaatgaaaattaaagtatactttccaaatgagtctcttttatatatatatatatatatataggtatgtgctttatattttgaggcatatagataaccaaatattataaataaaatacaatttcgcattttatgctggaatctattttgtttatgcatttgaacttgagtgtggaattcaaaacccaatttaaatttgaataaatagaaaataggaaatagaaatgg

SEQ ID NO: 64254 - DNA, 1201 bp, Zea Mays
ctgggtcttggtttaagtgtaggagtgttttgttgattgatggcaaatgtttgtgaaatatttgtactaagttttatgcccactagcaggtggctacactccagatcatgtctagtacatttcttcttcttcgatgaaggcaagtgaatgtagcggtggttgcttccgttctgacctattatttctatcgcctacactctaatattcagaagtatcagattctttcataattggactctatggtgatgctttacttgcttgcattatactgatgctcaatcatatattgatgatgattatgatttgagtatgactcatgagattaattcacacccctgaaggtaaatgaagtattatttgaggttggtattgtatctgaaggtaaatgaagtattatttgaggtttatgttgtatctgaaggaagtgaagtttattgataaatgtagcatgccatatacattgcatgactcatttgcatatgaagttttgtcgtgacctatggtccgaccgtaccggtacaacttagcatcgtacgttgcccgagaaggggtacgatgcggcttcatacccttagaggtatgaaggcagaggacatatgcattgcattcatatgcattcattgaagtgatatttgcagatgatgtggttttatacccccagaggtatgaagatagagtacctacacattgcattcctatgcatacattgaagtgatatttgcaggtattgttgacgcagggaagtgttatagaacctattgtggttgttcgaggaaatgagatggtattggttatagtgggactactgaattctatatctacaagcatttctgatttttaattgtgactcttttaaaatgttgatgaattcaatttgtggtttaaatatctcgtcataacaattagcttgctgagatgtttcatctcactcttgcattactcaatgcaggtgcttgttgctcatcaaggggagtgggaagtagcagcacatccaccttcattctcataataatgctgcgcagacgcagccaagatttaattagaaacttcttgtcaaaagatgtttgtttttaactagtcgtgcgcactgattaattcagttcatgttgttatggttgtcttcccattgctagcagattattaatgtcttatatgttttcttatcatgatatctatttatactttgttgcttcccccattt

SEQ ID NO: 64255 - DNA, 624 bp, Zea Mays
taattctgtgcagaatctgttctcttaagatttaggcaattttatcaacagaattaaactgtgggttggtaaaagaagttgtagataattttataatctttccagattgttaaagagtgcattcatatgatttgtggaactccagttatgtttgttttactgtggctgttcctgtttacctgacaaaaatgagtgggtctgttcactggtgagtttcatctagtaaatggccgaattggctcttccaactatggagacttttgtagagggataaaagttcttacttcctgcagaatttcataatttttggttcagcagttttggagatatcgaattttaaagttaactatactgctgtctaaaacagattcagtcagttatcttgtcagatgttttagaacttgtagatggcagaatttaattatctattgaatactgaagttgtagagtattttgtgtagatactcatagagtatttgtttgatatcaccgctgtttgaattttaaagatacaaaattaacaaacagcgttgctgctgtatggcatgtggttcagggtgggagtctttccactgggtcttggtttaagtgtaggagtgttttgttgattgatggcaaatgttt

SEQ ID NO: 64256 - DNA, 995 bp, Zea Mays
tcagaagtatcagattctttcataattggactctatggtgatgctttacttgcttgcattatactgatgctcaatcatatattgatgatgattatgatttgagtatgactcatgagattaattcacacccctgaaggtaaatgaagtattatttgaggttggtattgtatctgaaggtaaatgaagtattatttgaggtttatgttgtatctgaaggaagtgaagtttattgataaatgtagcatgccatatacattgcatgactcatttgcatatgaagttttgtcgtgacctatggtccgaccgtaccggtacaacttagcatcgtacgttgcccgagaaggggtacgatgcggcttcatacccttagaggtatgaaggcagaggacatatgcattgcattcatatgcattcattgaagtgatatttgcagatgatgtggttttatacccccagaggtatgaagatagagtacctacacattgcattcatatgcatacattgaagtgatatttgcaggtattgttgacgcagggaagtgttatagaacctattgtggttgttcgaggaaatgagatggtattggttatagtgggactactgagttctatatctacaagcatttctgatttttaattgtgactcttttaaaatgttgatgaattcaatttgtggtttaaatatctcgtcataacaattagcttgctgagatgtttcatctcactcttgcattactcaatgcaggtgcttgttgctcatcaaggggagtgggaagtagcagcacatccaccttcattctcataataatgctgcgcagacgcagccatgatttaattagaaacttcttgtcaaaagatgtttgtttttaactagtcgtgcgcactgattaattcagttcatgttgttatggttgtcttcccattgctagcagattattaatgtcttatatgttttcttatcatgatatctatttatactttgttgcttcccccatt

SEQ ID NO: 64257 - DNA, 300 bp, Zea Mays
agatttttgaatgagctattcaaaaaaatattgaatatacgtgtgattatctatttaaaatatccacataaatggataatagcaaattataatatatacagttcaagctggatctttatgtgttatgcaatcaatttctattttttgtttcaaccatgaatcaaattcgaatttgaaacaaactaagaaaaatatatattagaaaaaataaaaaacagaaaagaaatagaaaataaaaaaaagaaagattatgcgtgcgtctgggccgccagaggtggattttggcccagctcctctccc

SEQ ID NO: 64258 - DNA, 427 bp, Zea Mays
aacattattatgagaatgaaggtggatgtgctgctacttcccactccccttgatgagcaacaagcacctgcattgagtaatgcaagagtgagatgaaacatctcagcaagctaattgttctgacgagatatttaaaccacaaattgaattcatcaacattttaaaagagtcacaattaaaaattagaaatgcttgtagatatagaactcagtagtcccactataaccaataccatctcatttcctcgaacaaccacaataggttctataacacttccctgcgtcaacaatacctgcaaatatcacttcaatgtatgcataggaatgcaatgtgtaggtactctatcttcatacctctgggagtataaaaccacatcatctgcaaatatcacttcaatgaatgcatatgaatgcaatgcatatgtcct

SEQ ID NO: 64259 - DNA, 931 bp, Zea Mays
cacaaacctcaaataatacttcatttaccttcagatacaataccaacctcaaataatacttcatttaccttcaggggtgtgaattaatctcatgagtcatactcaaatcataatcatcatcaatatatgattgagcatcagtataatgcaagcaagtaaagcatcaccatagagtccaattatgaaagaatctgatacttctgaatattagagtgtaggcgatagaaataacaggtcagaacggaagcaaccaccgctacattcacttgccttcatcgaagaagaagaaatgtactagacatgatctggagtgtagccacctgctagtgggcataaaacttagtacaaatatttcacaaacatttgccatcaatcaacaaaatactcctacacttgaaaccaagacccagtggaaagactcccaccctgaaccacatgccatacagcaggaacgctgtttgttaattttgtatctttaaaattaaaacagcggtgatatcaaacaaatactctaggagtatctacacaaaatactctacaacttcagtattcaatagataattaaattctgccatctacaagttctaaaacatctgacaagataactgactgaatctgttttagacagcagtatggttaactttaaaatttgatatctccaaaactgctgaaccaaaaattatgaaattctgctggaagtaagaacttttatccctctacaaaagtctccatagttggaagagccaattcggccatttactagatgaaacccaccagtgaacagacccactcatttttgtcaggtaaacaggaacagccacagtaaaacaaacataactggagtttcacaaatcatatgaatgcactctttaacaatctggaaagcttataaaattatctacaacttcttttaccaacccacagtttaatt

SEQ ID NO: 64260 - DNA, 159 bp, Zea Mays
ctttccttcctccctttttccctccaccgaaaacaatcgaagatttgcaccacgcgacgtagatccgagcggcaacgaaaagcaccttgggaggaggagatgggggggcggctagggtttggtgtgtggctgcaagagtttggaaaaggaggagacgag

SEQ ID NO: 64261 - DNA, 328 bp, Zea Mays
agcatagtggtgtaattgccatattttaaacttggtggtcaaggtttaaatcttgttgatccttattttttgtttgtttttttattttttttcttggcacaccctaaacatagcagctgggtccgccactgcgctcaacgacctcccaagttgcattagacataatagaatccatctcactccttatcgcttccttccaaaagtcagcatcaggagagggatatgcctcttcaatggtacttgaggtgtcatccacaagatatacaatacaatcatcaccaaaggactttgcaatccttggtctcttactctttcgagttgatacatt

SEQ ID NO: 64262 - DNA, 975 bp, Zea Mays
gtgcctccgcaacgccatcgccgccactccccacgcgcggcgtgatcccaatcccagcgccaccaatggcacccgagccccgccaccatttcccaatccctgccccaccatgcctccatcaacgccgcgtgagccatcctcgccccaatcgatggccacctcccacgactcactccccacgtgcggcagaattcaagccatcaccgcgcgtccccaaaccctgcgccaccatcccgccttcgtccacattccccacacgttgtggcgtccgagccatccccgagcatgagatctgctcgccccatggccagtcaagccgggaacccacctgccggacgtcttctcgactcatggcagcagtgatagtgcccccacccccccatggcgagcgcccagctccacccctccctcctctctggtgaatggtgcccccttaacccgtcactctcctccacaccgtgcccccttccctagcccccgtggccagccctaaccttcctaggcgcgaccatcgcgccctaacccaccctacgccatggcgaccatcccgccttctgctcctctcacccccaaccccctgcgagatccaggagcccatggaagacctcctcgctgaggccgagtcgaacccgagcaggatcccatacaacaacatccgagcctggcgggcgagctggctgccgacaccatcatcgaccctgtcatggagtaccatgagctggacgcagaggtggattcgtcgggagatttgtcgaagcggaagcctccctccatggtagacgacactgtcgcagacggacataagtacaaacactcccaacccgcaaattaaatcctctcgtgttcacgttaattaattacccatctcgttcatgttctgatagagtagagtttctaaaatgatcaaataaaaatttctaccaattcataactttggaactgatagtcaggtgtggattcccccgcaagtttttt

SEQ ID NO: 64263 - DNA, 357 bp, Zea Mays
gcctcttgctagaaccatcagcgtcgaggtctactactttctcgatggcttgggcgagcagtgccccagcacctgtcaccgtcaccgacatcagcctcgctgcagacgacaagaccgacgagttgttcgccaaaatctccctcaggctaggccctcgccgcttctcgtctggaccccgataggtgccatttgctgatgcacttcagtttccttcgtgtccaccatactgccttcttcctcgagatctactgatctttgttgctgagtgataaacttgaggcaaaaacaaaaactaattttggtttgggggatggaaattcgttgctattttcaactacatttcctcgctactaacgc

SEQ ID NO: 64264 - DNA, 275 bp, Zea Mays
aaaatttaacacctattatctcataacctgctcaaggggtgctaaaatgagcaaaacatgtttcagggaacctcatttttcactcataccctctaaccccattatttctctccgtatttggggcatgagtgtctttttatttcaatatgctaaactttattagagtggtccaaaaataccctaatgagctaaactttagcaattcaattcatatgactaaaatttagtaagaagctaaagtttatctcgtgagattgaaacgggcctaaactgat

SEQ ID NO: 64265 - DNA, 426 bp, Zea Mays
ccttccggatgaccatcaccgcgccggcgagtgacgccacgagtttgctgacctcgcctggaggttggaaccggttcccagcacacgtacgggtgcgtgtcgcctgtcaacggccgcgcgccgctcaacgcggccggtgacacggactgaatgaactacttccaagcaaccactattggccgcgtggttcttcgtcctcgtgagcgcctgcggggccttgcgggcgtggacatgtacaagtacaacggactccggagtctgcaggggcaagcgcgcgaatcaaccactgggctctatttagctacaagaaactctagccaaatctgaacgcacgtgaactgatagctgaccgaacttttcacattccatatataatgacgtgcagccgtcattagctcctctttcttctcccggtcatagtttcca

SEQ ID NO: 64266 - DNA, 751 bp, Zea Mays
ccacgccgcaatgacgtggaacatttccacgcgtaggcgaggggaagggcgacgcgtgcgacttgtgaggcgacgacggcggtgcggtaagagcgatgcctgtgacctcaccatctgttgttcgtctccattcccttcgatggtcgatttctctccggtaatcacgccctcgtccttttccaatctatttaatgtccatgaatgagaagctgggagtttttggcaggggctgcatcgacctcgctgggcgcgcagatgccggtccacagatgcccatggtgtcggcctcgctggggtgtgctaacgtccaagcgatggccttgcgagaccgcgcggaggctcgaatgaccctcccatggtgtctagattgaaggacaccactactagaaatttgaggtcgtattagtaccccatgaaaagaccacctcaaattacctcggtagctattaggaaggcagcagcggactttctccaaagcattagacgcatttagcagctactagccaatgaagttacctgcaccttagcacaagtattgatgtatagcctcaccgtacaaatgttgttcatagcatgagcacctcacaagccgtcatttctctgttaatacgaatgaaaagaattctggtccaattttggaatgaatgaaaacttgtttaattagagttatatatcgctagtggaaaatcttgttttgtaatggcccaaacagcaaacacatatgtttctctcacttattatgttaatcgcc

SEQ ID NO: 64267 - DNA, 270 bp, Zea Mays
catgggtgctacatattcaaaagcaatttcctatgtagaataataaatgaatggatatatatatataatgaatattgcaccatgttggattctgattgtgcattttgtttgagatagaaaattcaaactcggattcaaaagtgaattcaattggaaatagaaatgggaatagaaaggaaaaaaaaaataaaaagaaagaaaactcgcttgggcccgactccctgcttccggcccacctcctttcctagatcgtacggcccatgagcaccc

SEQ ID NO: 64268 - DNA, 498 bp, Zea Mays
gcatttattaatattaatattaataaagttatattagtgtccaaattggaatttaacctaatttacaatttcgaaattggaaatgacatagaaagggaaagaagaaaatactatacaatacaaaataaatatagtctttccatactggtatgttcaatttgtacatttaatctgagtacaagttcataacaatatttgaattcaaattgacaattcaaaaataaaaaaagaaaacagaaaagaaaaagaaaaagaaaaaaggaagactgctcgtgggccgcgaaccttgcttctggcccactcgcacattcattccacacggcccaatatcgctcatacacacccgccggtgcgcgccgacatgtgagcccctctagccattcacccagtcggattccgcgcgccaaccccctagcactcgctgtccccatgaccccacctgtcatccacttaacgcgagcgactcaattcctctcaccgctgggtgggccctcccca

SEQ ID NO: 64269 - DNA, 1193 bp, Zea Mays
ccgcaccggagggtctcacaacacgtcgtacgccgtgagggcggtactcgtgttctgggacggtcccgttctcgtttcgtggcgaggacgggagtgaggacctgccagtgtgctttggggcggctggcgctcgctggtgcggtgttggtgggcaggtggacgccgccgtcggtgctgagatggtggcagcttgtaacactccaggttccacaaacaacccggtatgctactgtactacacttccgacgtccatatataaaatttcggcagcatcccctttgcaagattgcataaaagagggagcaacagagtataaacatatatcatgactaaaacatactaagtattattactcggctaacaaggaaagataaacatacgacctgaactgaattaaccagtgcgcatgaccataaaaaaaataaacaaacatcctttgacaataagtttctaattaaatcatggctgcgcctgggcagcgttattgtgagagtgaaagtggacgtgctgctactcccctcattcccaacatgtatcaagtacctgcattgagtaatgcaagagtgagataacacatctctgcaagtaaaataatatcaaacagtttaaccacataagaaccttgttttaccaccacttaattccacaaccttcttattacgaaggtgcagcacgtatacaacgtacaacgcacctagttaccacacctcgcaggtagaaaccacaatagtaacatagtaatgtcacacttcatatattcctcatgagtgcaaatgtctgcaaatgcaaggatgacttctgccttcatacctctaaggatatgaagccgcatcgtacccctcctcgggcaacgtacgatgctaaaaaatgtaccggtacggtcggaccataagatcacgacataacttcaaaatgcaagatggatgatgcgatgtgcatgtcatgcctacaacacttcatataacatgattcaaaaagacacttcaacttcatccagatgggaatcaaccacatatatcattaccaaattatgatcatccacaatattagacaattgagaattaatacttccaaacaaataaacttcatcatagaatttaatgattaacataattaaaacttatgcatactcaatgatagggaataggatgcaaaccaaactgtagcaaccaccactgtatttacttgccttt

SEQ ID NO: 64270 - DNA, 1115 bp, Zea Mays
cataaagccctacatgattatcatactgattaacactaattactcccgaaaaatccccagaaactgctaatactgctgctgttcacccacctgaaaatctgtttttttggacaaccacatacccggattcaaacggtgataactttcaatttataactccaaattgagcgcataaatactcgttggaaaggtaaggtaaagttctacatgatccccaaaatgatttcccttaattcctcacgaaaaaaaacagaaactgctagactactgctgttcacccaccacctaaaattctggacagcccccctctaccccaatcgcaaacacaacctctaatcaattaaattgcagcgcaaatgaacaagggatgaacacaaaaatcaccttggattctccccctttccttcctcccttcttccctccaccaaaacgattgaagactcgcaccacgacgacgatgattcgagcggcaaggattggcaccttgggaggaggggattgagagggggggcggctagggtttggtggctgcaagaattgagagaggaggagatgggcagggggggcggcggccaaggggggagagaagtgggggggggcggctgcacatggggggagggggttaggagggaggcggctagggtttgggagggttaatgggccgaaactccaattgcggtccaactaacccacgcgacagctcccgaccgcaacgcaagcgtcaaaccaaataaattctactgccctagttgtgaatgttttccacaaaatcccaaatccccaaaacaacaaccggatgaggaaaaaaacaaaaagaacaacccccaacttctcttctttgcaaaccgggtatcacactctacccctcttaaaaagaattcgacctcgaattctgacgcttctatcggaacaacaaaagaaaggttaacgaatcaacaaaactcacacataaagaaaagttcgagtacttctgccgtatcagctcctcaagctcctaggattctaagatacgcagcagacgacactctagagtctgctcttgctacacaggaatcggctctagctcgatttgatggtctggattccgcaaatacttcctcaacaaaaagacatgg

SEQ ID NO: 64271 - DNA, 542 bp, Zea Mays
cacatggcagcgacacccacggggatgcacacccaggtttggccgacaaacatggcccaccgatcagtgtgtaggtggtgagtggcttattgcgggagaaaaactcggaaatgggccgcgcagggtttgcttctggtgggccgaaataggtatctcgagcccaatacgccatcctctcacttttcttttgtttttctttctttttcttttgtttttttttttagaattcaaagttgaatttgaatttggttatgagattcacctatgagtccattatataaattcaccttattgtaggaataatatatttttttatttactcatttttttccacataatatttgctttcctctctcttctacattctagaattttcctttagatcttaaattccactttggactttaatatttttcttgtcacatttattattttattttgtcaccatgtgcacacaaaagaaaatcccagcatgatgcataattttaatggcatatattctttttattaattatttgcttttgaatatggtgttcacctgg

SEQ ID NO: 64272 - DNA, 389 bp, Zea Mays
ctgctatgtacctatccaattcactcacttctccatcatcatcaaatgactcgttttcaaataagaagtcaagctcagtaactacagtatccacaaattgatcagaagatgttgcatgtgtgttactgctctttgcagatggtggaacttaaagatagcactgaaacatattccttaggacaccattaaatttgtcaagttcagcttgataggaatttctatggaaccttttcaagtaaaattccacaactcttcttttgaacctaggatcaagaacatttgctacagccagtgcaacattagactttctccagtacttatcgaacttgacactcattgcatttgccatttcacaaatggtagtatcactactatgacaccaatctgat

SEQ ID NO: 64273 - DNA, 529 bp, Zea Mays
ttccccaacggcttgttggtggttgagggctataaatacccccaaccaccacaactccaagcatccaagtcttctaaagttttcattcaatacaagagctagtgcattcactactagacacaaatcaaaagatcaaagcctctccaagtcccaaattcactccaaccacctagtgacttgagagagtgtttgttcgtgttcttttgcgctcttgtgcttggatcgctttcttccttcctcattcttgttcccaagtcaattgtaataaaagcaagagacacctaagttgtggtggtccttgcggggtctaagtgacccgtttgattaagaagaaagctcactcgctctaagtgaccgtttgagggagggaaagggttgaaagagacccggtctttgtgaccacctcaacggggattaggttcattggaaccgaacctcggtaaaacaaatcaccgtgttcattcgcttgatttccatttgatttgttttcctctctctcctagacttgatttaagttctaacgctaacc

SEQ ID NO: 64274 - DNA, 1487 bp, Zea Mays
cggaaattctttattacaaaatggttacaagttacaatatttacaagttttaacaagattacaatatatatcatcggagcagattacaaaagaaattgattcaaaaagattacaatttgaatgtataaaacatttataagttttaaaatacatgctagcttaagtgacaatcctcaataaagaagctaaagatgggatacacttatataagaagaccgagcccaccggcacttagcaccattcacaaaagaacaaaattataacatgaaagacaacagggaataaaactctgagtacacaattactcagtaagacttatccgactaaagaaaagactctcaagggtatgctggtttgttgggaatcaaggtgaagcttatcaaatttcaaggactcatttttgcagaaaagcttactagtagtggatccttatgccaaacttttacttcttaagttaaatacttttcctgaatctagatttacttaatctagagcattcacttgtcctacactagcttcattttagcatctttagtttcacttgttatctacgatgagggtcgaagatcaagtattcatatctgagaagtatggcgatccgaattgattaatacccagccggggatctccaaccacacgacatatgtagcacttaacccttacatatgtcaactcacacccgattttctcaagaccagaacggatccctgccaatcgagagctcagtacctcaccatccagcctcttaccaggtggatacacgatactctcgccatctctccattcccattgcagactggcctttctggtattggtccagagggataaacacaaaaagaacaacgggttctcaccggggttcgatgaagttgtgaccgggtctacatagatcgaagtggagctcgctgtagcatatcatcgagcatgctgagggcgcgacccagaggggtttccatggttactcctgctacaaggccagggcaagggaacacacaccggaaagaggacacaagaggagaagcagcaaaggtcgccgaccaccaatgacgaagggagcgactgtggacggaccttggtgttcttgtgcccaccaccgtgcgaccatggctgaacaaggacgaccggtgtgaaggggatgaggaactttggctccatcgccatggacgagctagggctaggcgacctcagtagggaattggacgccaaccaaggagatgaggatgaacttgctaggaaccgagcgccataggaagggaggcgaggtcaccgacgtactgcaggaaggggaggcaccatccccgggagagggtccgcgtagggagggatctagggggagccgccatgggagggagcaagggctggtcagtagagaatgagggagaggctggtgtcgtcctgcaggaaatgaggatagagagaggcggctatagatgaagcagagagggggatcaagacaaacaaggagatggagaaatatctgggcattg

SEQ ID NO: 64275 - DNA, 175 bp, Zea Mays
gcaaattgtaataattacatttacattagaattatgttggatattggaaatctaaaatttaaaacagagatttggaatttgaagtttaaataaaataaaaagaaaacaaaacaaaaaatagaaaaagaaaaagaaaactcaccaatactacctaggtcgatttcttccgtctttg

SEQ ID NO: 64276 - DNA, 1706 bp, Zea Mays
gtgaagttgatgctctcgacgaagttatagctggacatggtgacttttgtgtcttgctagcttctcgaggcatggctgtcgctttcatgaaggctggctgcacacatggaaatattgtaaacagaccaaacttcagcctgtcaccagcagacttggatgatatccccggcctggcctgaagcatcggaaatagattcattgctcaaatctgggcaaagggcgggcgaaacttggctggtgacgaagctcgaagtcaccttaaaccggtaataaactcataccttgtgtttaccttttccttgaaacttgaatttaccttataatactttaatatgtacaggatgatgaagccgaggagcattgagctgaagcttagcagacgatctgaagcttaacagatgatgatgaagccgaaagcctagctgtgaaaaaactctagaaaaactcttgtattatcctttgtaaagaatattgtaatttgagaatcagattctactctgtaaatttgtccataccttgtaatatatttttaccttaccgtcaatgtatgaagtgctttgatgtggacgaaacttgtatatttttttgagccgaaggcgaaaaacaccttcccttcttttcgtacaaaatcgaagcataaatctgcttccgaagttgtatccttagagccaaagcaactgtctgtatctgtatgatatgatgatgatgatcctatgtatgtaacaccccgggatccacaaacaccccagaatgctactaaactacacttctaacattcgtatataaaatttcgacagcatctcctttgaaaattgcataaacggggaagcaacaaagtataaatagatatcatgataagaaaacataatagacattaataatctgctagcaatgggaagacaaccataacagcatgaactaaattaaccagtgcgcacaactagttagaaacaaacattctttgacaagaagcttctaattaaatcatgactgcgcctaagcagcgttattatgagagtgaaggtggatgtgctgctacttctcacttccctggatgagcaacaaggacctgcatagagtaatgcaagagtgagatgaaacatctcagcaagcgaattgttttgacgagatatttaaaccacaaattgaattaatcaacattttaaaagaatcacaattaagatcagaaatacttgtagatatagaactcagtagtcccaatataaccaataccatctcatttcctcgaacaaccacaataggttctataacacttccctgcgtcaacaaaacctgcaaatatcacttcaatgtatgcataggagtgcaaagtgtaggtactctgtcttcatacctctgagggtataaaaccacatcatctgcaaatatcacttcaatgaatgcatatgtcctctgccttcatacctctaagggtatgaagccgcatcgtacccctcctcgggcaacgtacgatgctaagttgtaccggtacggtcggaccataggtcacgacccaacttcatatgcaagtgaatcatgcaatgtatatggcatgctgcatttatcaatatacttcacttccttcacatacaatacaacctcaaataatacttcatttaccttcagatacaataccaacctcaaataatacttcatttaccttcacatacaataccaacctcaaataatacttcatttaccttcag

SEQ ID NO: 64277 - DNA, 291 bp, Zea Mays
tccaattgattgcagcacaaaaacaacaaaagttaatcacaaattcaccttaggttcttcccttcctccttccttcttccttcctccaaactccaattgagatcgcagccacatgacggagaaccacacgggagggctgcaccttggaggagggggagaaatggggggggcggctagggttttgggtggtgagggctgcaaaggtttgaggaggaagaagatgggagagggggggcgtccaagagaaaggggaggggaaggggcggctgcaacaacccaagggggaaaaag

SEQ ID NO: 64278 - DNA, 124 bp, Zea Mays
ccctctcggcctcttccaggctccctcgctaagcacgacggggcctccctctcggcatctcctagtccgtccctctcccagagtcccagtcccagcctccacggtccagcgaccaacagtccag

SEQ ID NO: 64279 - DNA, 211 bp, Zea Mays
agcaagtggctactctccatgagcaatatgtcttatgttttttgagagatgtgagcaaatgagtctttgttgtaatagtgtatgtgtgctaagtgatcctgatgtgagcaagtgactatgaatatgtgttctaaactttatattacgtcatgtgtgctagtagacttatatggcttcttatgttaggcaagacttatatgctacattaaac

SEQ ID NO: 64280 - DNA, 385 bp, Zea Mays
gtcccattaagcaaaccacctatgtttgatggtgaagattataatatgtggagtgataaaatgaggcatcatctaacctcactccacactagcatttgggatgttgttgagattggagtacaggtaccatcaccgggggatgaagactacgattcagacgaggtcgcccaaatccgacacttcaactctcaagccaccactatactcctcgcctctctaagtcgagaggagtataacaaggtgcaaggattaaagagcgccaaggagatttgggacgtactcaagaccgcgcacgaaggagatgaggtgaccaaaatcaccaagcgggaaacgatcgagggggagctcggtcggttccgactcaaccaaggcgaggactctcaag

SEQ ID NO: 64281 - DNA, 4739 bp, Zea Mays
atgcttttatgtataagggtgagacatctagctctaggcaatcaacccgtgcaaaattgcctaaaaagaaaactcctgttgcatcaaataattctaaaattttatttaaaactcttgatgcatcttatgttttaactaacaaatccggcaaagtagttgccaagtatgttgggggcaaacacaagggatcaaagacttgtgtttgggtacccaaagttcttgtatctaatgtcaaaggaccccaaaactatttgggtacctaaaatcaagaactaaatttgttttgtaggtttatgcatctaggggctcaagttggatcatcgatagcgggtgcacaaaccacatgacaggggagaagaagatgttctcctcctacgagaaaaaccaagatccccaacgaactatcaccttcggggatgggaatcaaggtttggtcaaaggattgggtaaaatagctatatcacctgaccattccatttcaaatgtttttcttgtagattctttagattacaacttgctttcagtttcgcaattatgtaaaataggctacaactgtctttttacggatacagatgttactgtctttagaagaagtgatgattcaatagcatttaagggagtgttagagggtcagctatacttagtagattttcatagagctgaactcgacacttgcttaattgctaagactaacatgggctggctcttgcatcgccgactagcacatgttggaatgaagaatcttcataagcttctaaagggagaacatattttgggactaacagatgttcattttgagaaagacagggtttgtagcgcatgtcaggcagggaagcaagttggtgttcatcatccacacaagaacgtcatgacgactgacaggccactcgagctcctacacatggatctattcggcccgatagcttacataagcatcagcgggagtaagtactgtctagttattgtggatgattattctcgcttcacttgggtgttctttttgcaggaaaaatctcatacccaagagaccttaaagggattcttgagatgggctcaaaacgagttcggcttaaggatcaagaaaataagaagcgacaacgggacggagttcaagaactctcaaattgaaggcttccttgaggaggagggcatgaagcatgagttctcttctccctacaccccacaacaaaatggtgtagtggagagaaagaatcgaactctattggacatggcaagaaccatgcttgatgagtacaagacttcgaatcagttttgggtcgaggcggtcaacaccgcttgctacgccatcaaccggttatatctacactgaatcctcaagaagacatcatacgaactcctaaccggtaaaaagcccaatgtttcatattttagagtctttggtagcaaatgctttattcttgttaaaagaggtagaaaatctaaatttgctcctaaagcagtagaaggctttttactaggatatgattcaaacacaagggcatatagagtctttaacaagtcctctggactagttgaagtttcttgtgacgttgtgtttgatgagactaacgactctcaagtagagcaagttgatcttgatgagataggtgatgaagaggctctgtgcgtcgcactaaggaacatgtccattggggacgtgtgtcctaacgaatccgaagagccaccacatgcccaagatcaaccatcttcctccacacaagcatctacaccaactcaagatgaggataagactcaaaatgatgaaggagatcaagaagttgagccacctcaagaggagagcaatgatcaagtgggagatgtccatgatcaagatgaggaagatgaacaagttccaaggccgccacacccaagagtccaccaagcaatacaacgagatcaccccgtgaacaccatcctcggcgatattcaaaagggggtaactactcgatctcgtgttgctcatttttgtgaaaattactcttttgtttcctctattgagccacacagggtagaggaagcactacaagattcggattgggtggtggcgatgcaagaggagctcaacaacttcactaggaatgaggtatggcatttagttccacgtcctaaccaaaatgttgtaggaacaagtgggtcttccgcaacaagcaagatgagcatggtgtggtgacaaggaacaaagcccgacttgtggccaagggatattcacaagtcgaaggtttggatttcggtgaaacctatgcaccagtagctaggcttgagtcaattcgcatattacttgcctatgctacttaccatggctttaagctttatcaaatggacgtgaaaagtgtcttcctcaacggaccaatcaaggaagaggtctatgttgagcaacctcccagctttgaagatagtaagtatcctaatcacgtatataagctctctaaggcgctttatgggctcaagcaagccccaagagcatggtatgaatgcctaagagattttcttatcactaatggcttcaaagtcggaaaggccgatcctactctattcactaaaactcttgacaatgatttgtttgtatgccaaatttatgttgatgatattatatttgggtctactaacgaatctacatgtgaggaatttagtaggatcatgacacaaaaattcgagacgtcgatgatgggggagttgaagtacttcttgggatttcaagtgaagcaactcaaagagggcaccttcattagccaaacgaagtacattcaagacattctaaacaagtttggatgaaggatgccaagcccatcaagacactcatgggaaccaatgggcatctcgacctcgacacgggaggtaaatccgtcgatcaaaaggtatacaggtcgatgataggttctctactctatttatgtgcatctcgaccggacattatgctttccgtatgcatgtgtgcaagattccaagccaaccctaaggaagctcaccttacggccgtaaaacgaatcttgagatatttagttcatactcctaagtttgggctttggtaccctcggggatccacatttgatttaattggttattcagatgccgattgggcggggtgtaaaattaatagaaagagcacatcggggacttgccagttcttgggaagatccttagtgtcttgggcttcaaagaagcaaaattccgtcgctctttctatcgccaaagccgagtatattgccgcaggccattgttacgcgcaattactttggatgaggcaaacccttagggactatggttacaaattaaccaaagttcctcttctatgtgataatgagagtgcaatccgcatggcggataatcccgttgagcatagccgcactaaacacatagccattcggtatcattttctaagggatcaccaacaaaaaggggatatcgagattgcttatattaacaccaaggaacaattagccgatatctttaccaagccactagatgaacaaacttttataaaacttaggcatgagctaaatattcttgattgtaggaatttcttttgatgtcttgcatacatagctcattaatatacctttgatcatgtctcttttatattgctatgactaatgtgttttcaagtatatttcaaaccaagtcatagattgaaagggaattagagcttcggcgaagacaaaggcttccactccactccatcaacatactcatccttcgccgtcgctccgagcaactctccgtctttggtataatcttcactcatatattgtgcgccaaagggggagaaagtagttttaaaaagggcttatatttcaatcaagtatccatttttggcgattcatgccaaagggggagaaagtattagcccaaagcaaaagggccgcaccaccaccgattttcaaaattcgagttaagaaaaggttttgaaatgatgaattttggaattggtatcctattttagatagaatttcaaaatgggtcaccctcttcaaaaactaatatctaaaaccctcttgaatactaagaggaggatttcactaagggggagttttgtttagtcaaaggaaaagcatttgaaacagggggagaaaatttcaaatcttgaaaatgcttctcaaaatcttattcatttacttttgactatttgcaaaaggactttgaaaagaatttgcaaaaacaaaacatgtggtgcaagcgtggtccaaaatgttaaatataaagaaacaatctatgcatatctcatgagtatatattggtttcattccaagcaacctttgcacttacattatacaaactagttcaattatgcacttctatatttgctttggtttgtgttggcatcaatcaccaaaaagggggagattgaaagggaattaggcttacaccttttcctaattaattttggtggttgaattgcccaacacaaattattggactaactagtttgctctagtctataagttttacaggtgccaaaggttcacaataagccaataaaaagaccaagaaagggttcaaacaaagagagcaaaaggcaacccaaaggcaccctggtctggcgcaccagactgtccggtgtgccaccggacagtgtccggtgcaccagggaactcgaagctgaacttgccaccttcgggaaaatgggaggccgctccgctataattcaccggactgtccggtgaagcaccagacagtgtccggtgccacatcgaactgtctggtgtgccagcggagcaacggctacttcgcgccaacggtcg

SEQ ID NO: 64282 - DNA, 406 bp, Zea Mays
ccagaggccccaccagtcagagctccaacggtcgaaccctaacggccggatgacgtggctggcgcaccggacagtgtccggtggcgcaccggactgttcggtgcgccatgcgacagcagtcttccaacggccatattttggtggttggggctataaataccccaaccaccccacattcaatggcatccaagttttccaccttcaacacattacaagagctatagcattcaattctagacactccaaagagatcaaatcctctcctaagtccaaagacaactccaatcaatagtgactagtgagagagtgatatttgtgttcatttaagctcttgtgcttggattgcttcttttctttctcattcttcttgtgatcaaacacaattgtaaccaaggcaagagacacc

SEQ ID NO: 64283 - DNA, 226 bp, Zea Mays
aggcgcagccatgatttaattagaaacttgttgtcaaaagaagtttgtttattttttatatggtcgtgcgcactggttaattcagttcaggtcgtatgtttatctttccttgctagccgattaataatacttagtatgttttagtcatgatatatgtttatactctgttgccccctcttttatgcaatcttgcaaaggggatgctgccgaaattttatatatggac

SEQ ID NO: 64284 - DNA, 487 bp, Zea Mays
aaaaggagcaggcacgcgcgcggagctgaccggttggaccccgattgtcagtgccagcgacgcgcgagggctgcggtaagcgggccgcgcggtggacttcggttttgggccgacgcggtaggaggaggcaaatagaaatgggccgaaatgagggaagttggcccagctgcaggttttctctttttttttttcttttatctttttctttttctttctcttttcttcctttttaggtttaaatttgaatttgaattttgaagtaaaacttgtgctacattaatctttattacttttgtgaagttaggaataccaattctttgaaatataattatattgtttatatttctatatcatttctctccttattttcaaaaccctagctttaatttagggtttgatttacattctagtatttattctcttattattattattattattttatttaatgcacaaacataaaaactccagcatgatgcattttttt

SEQ ID NO: 64285 - DNA, 166 bp, Zea Mays
ctcctttctcaagcacttgcagccacacacctaaccctagtcgccccccccccatctcctcctcccaaggtgccgttcgttgccgctcggatctacgtcgtgtggtgcaaatcttcaactgttttcggtggagggaggaagggaggaaggaaagggggagaaccca

SEQ ID NO: 64286 - DNA, 573 bp, Zea Mays
gtccattcataactttcctaggagcatgaacaatattctttctaggcacatgataaatatttttcctaggcatatctctaccatgcatataggaataactgggagcagacatagcataagaatcataggcatgtgaatcaaaagcattacaactcctatgagactgtcttctatcattgtacataaaagcatggttctttttagtactacttgccataggagccttccctttctccttggtggagatgggagccttatggcttgttaagttcttggcttccctcttgaagccaagcccatccttaattgaggggtgtctaccaatcgtgtaggcatccctagcaaattttagtttatccaaattacttttgctagccttaagttgggcattaagactagccatttcatcatttaactttgcaatagaagctatgtgttcactacaagcatcaatatcaaaatctttacatctattgcaaataacaacattttctacacaagttgttgatttactagctatttctaacttagcattccgatcatcattaatacttattaagctagaaattgtct

SEQ ID NO: 64287 - DNA, 1056 bp, Zea Mays
gatgaatcctccaccgaaccctccaccggctaggacagatccagtagctaccgctcagatgcagctgcttgcagcagatgtcaaatactatgacggaaatgcaatctcagatgcggcaagaacatcaggagatgtgccagatcggcaggaaatgcgatagaagatgagacaagagcggctagaacggtagcaacaaccaccgctacctcctccaccaccaccagctccaccccgggacaagcaccgggaattcatgaatcacaagccacccacattctccagctctccagatcctctacatgttgatgattggctgaagtcagtggagaagatgcttaatattgctcaatgtactgattaggagaaggtgctctatgtgtcgggtcgtctcactggccccgctgctgattggtgggactcctactgtgctgcccatgttgctgccaacactattacctgggcagaattttctacacaatttaggaactatcacattcctgcaggcttgatgaaaattaagaagaaggaattcttgtcacttaagcaaggtaacatgacaattagtgaataccgtgataaattcattcagctatcaaggtatgctccagaggaggttgcagatgacaaaacgaagcaggagcagttcatggagggactcattgggccactccagtatcagctgatatctcacacctttccatctttccagaggcttctagacaaggctacaactgttgaacacaaatgtgttcagctgggcgagatgaagaggaaggctatcacccagggacaggcgagcagtagcatccgacttcgctatgttccaacccagggtacaccagctcatcctggaagagggcagcaatcctaccaatgacctgctcagtatacaccataggcgactccgcagactccacatactcgtcagactgcccccactggcacccccgcgggacctactggacagggtacagtcaccacttgcttcaagtgtggtgaggttgggcactacgctaatgcttgtccgaagaggaaccccaacacccccgcttgaag

SEQ ID NO: 64288 - DNA, 418 bp, Zea Mays
aaaaatctgtttttttggacagccacatacccggattcaaacggtggtaactttcaatttataactccaaattgagcgcataaatactcgttggaaaggtaaggtaaagttctacatgatccccaaactgattttccttaattcctcacgaaaaaaacacagaaactgctagactactgctgttcacccaccacctaaaattctggacagccccctctaccccaatcgcaaacgtaacctctaatcaattaaattgcagcgcaaatgaacaagtgatgaacacaaaaatcaccttggattctccccctttccttcctcccttcttccctccaccaaaacgattgaagactcgcaccacgacgactatgatccgagcggcaaggattggcaccttgggaggaggggattgagagggggg

SEQ ID NO: 64289 - DNA, 212 bp, Zea Mays
ctttctcatattttttagatggccgacggcttagattcttcttttaactttcaaatttcaaatctcttaataattaattcataatatatgcttaaatatttcaaaaactaaaataaatttaaaagataatactttatagataaaaatacctgattttcaagaataaataattttcgtcaaaagtctattatttaaatagattgggctaaaaa

SEQ ID NO: 64290 - DNA, 443 bp, Zea Mays
ctcttttgtgaggccaaatttatataaataatagaaatttgcctaaaaattatttactatgatttttattattagatttataatacttttgtaatatttaaagtatatttattaatgaataacttattgaaaaaaataaaagaaaaaagaatttcgaaattaacaaaaagaaaaaaaaagagaaatgaaaaaaatgaaaaacggccgctcggccaactaacctgggcggacagcttcttgcagtcacgttcctctcccttctttttctctcttacttgtggaccccacacgtcaaggctattttcttctccatcgttgcttccagaatccagaccacacgaacgcgccgccgctcgcatggactcgtcaagcaccacgctggctcatccctgcgtctcctcgactgctcgccttacgtggagcgccttcggctaccgtttctc

SEQ ID NO: 64291 - DNA, 119 bp, Zea Mays
ccaaatctttacacgttttatgttactaggaaccacatgttttctgttatagtcttggatttgatttgactagagactaaccggtgcttttcttgctctgccacccaaattgttcgttc

SEQ ID NO: 64292 - DNA, 752 bp, Zea Mays
ctaaacctaaccttcccattattaattcgaccattcaccggatacgaatcaccgatttaatcttttcgcataacctatgtcgttaaacctaaatttagctacgcagcacgacgatttcgcaatcgtggacataattattatgctacttatagccccgtattttaacatgcctgagctacaagtgggataatggtcgcgacgtacacatctattaattcatccaccaaactagtcaataaaatagtaaattagcttaccgttccaacagctgactcgactccgcgagatcggaaatgattctccgattctgccattatgtcgagcacgtggagcaccatgtgggatttattgctttatatgaattctcgtgatcgcttgacgacgcaagggatcgtagctgcggccacggatgcggacacgaccgccacacaccgcgcgaggacaaggaaatagagcagcaactgcgcagtgaccaagacgctaagcaccggagcttgacgatgtcgcggcgcagcagcaaataacaacgccaccatggctagggaggcaagtccggcgacgacatagacggttagcacggcgagcagggacaactggcgaactctggttcaggcgaacagaacgcgacacagggagcttagggagcttgaggtgcgggttcacacatccatagccgaacggcggagctgaggccaagcgtcggctgtgaagaacgtcggctattacagggagtcgcggacgagggatttcca

SEQ ID NO: 64293 - DNA, 339 bp, Zea Mays
gcgggccccatctgtcggcgcacgcgggcgttgggccgcgtgggagaagacagcagatgggccgaaatggtgttctgagcccagttagagttaggtttgctcttttttttttctttttttttcttttgcttttgttttctttttatttcaaatctataatttgaatcccaactgcacagcaaaatttgtactcaaattagagactcaatatgaacatgtcagtggaatgaattgatttatttataacttccttttgtgttgtgtaatatttccctcttactttcttcatattatttccaattcctagagtgcatttctagggttagaattaattctctt

SEQ ID NO: 64294 - DNA, 2377 bp, Zea Mays
cccgcaccgacggcgcccccgcccgccagccggcctgaaagtcacctagaggggggtggataggcggaaagtgaaatttacaactttaaacacactacaagccggggttagcgttagaataaaatctgagtccgggagagaggggaaaacaaattaaccaagaaaataaagcggatgacacgatgatttgttttaccgaggttcggttctaaagaacctagtccccgttgaggtggtcacaaagaccgggtctctttcaaccctttccctctctcaaatggtcacttagaccgagtgaggcttcttccttaatctcacgggtcacttagaccccgcaaggaccaccacacaattggtgtctcttgcttcgcttacaaagcacttgagagtaagaagtgagaaagaaaagaaagccaaccaagcaacaagagcaacaaagaaacacaagaacgatcctctcataagtcctaaagcactagaattgagttggggactttgattggatcgatggctttgatttgtgtcttggagtgttgcactttgctcttgtattgaatgaggagtgctaaatgcttggatggtcggcccaggcccgtggttgtggggtatttatagccctcaaccttctttgttcaggccgttgggagtggctgttgtcgatgggcgcacaggactgtccggtgcgccagccacgtcacccaaccattagggtttgggcgcagacaaccattggagactttgtcttctagtggcaccggacaggcactgttcactgtccggtgcgcctttgacttctgttctgacttctgctgcgtactgtagcgctgtcagggcactgtgcagtcaaccgttgcgctggagagccgttgctccgctggtgcaccagacagtccggtggcacaccggacaatccggtgaattatagtggagcggcgctgaagaaacccgaaggtggcgagtttggacttgtacggtcctggtgcaccggacagtgtccggtggcacattggacagtccggtgcgccagaccagggcacactttggttcttttgctcctttgcttttgaaccctaactttgatcttttattggtttgtgttgaacctttatgcacctgtggaatatataatctagagaaaactagttagtccaatatttgtgttgggcattcaaccaccaaaattatttataggaaaaggttaaaccctatttccctttcaatctccccctttttggtgattgatgccaacacaaaccaaagcaaatatataagtgtagaattaaactagtttgcataaggtaagtgcataggttacttggaattaaaccaatttttacttttactagatatgcatggtttgctttcttttatttaacattttggaccacacttgcaccacttgttttgtttttgcaaattcttttggaaagtcttttcaaagtctttttgcaaattgaaagtcgcctagaggggggtggataggcgaaatctgaaatttacaaatttaagcacacactacaagtcggggttagcgttagaattaaatccgagtccgaaagagagggaaaacaaatcaaccaagaaaataaaacggatgaacacagtgatttgtttttaccgaggttcggttccaaaagaacctagtcccccattgaggtggtcacaaagaccaggtctctttcaaccctttccctctctcaaacggtcacttagaccgagtgagctttctccttaatcaaacgggtcacttagaccccacaaggaccaccacacacttggtgtctcttgctttgattacaagtcacttgaaaataagaatgggaatagaagaaagcacgattgcaaacaccaagcaacaagagcgacaaataacacagagatcacactctctctcaagtcgctaatcactaataatcacttgtctcaattgtggaacttggagagattggaagctttgattgtgtcttggaatgaattgctagctcttgtattgaatgtaaaaggttggaatgcttgggtgtagtgaatggaggtggttggggttgtatttatagcccccaaccacttcctagccgttgcttcatttctgccaaacgcgtactgtcgcagaacctcctaagttatagggcccacatgcacctgtccttgtcttaaagacctcagacggatatgcatgtgtaccaaacaacttaacaggatctgtccgagtgtcccaaggaccccggataaacgacttaccgccaagatcgcaagattaagtaaacacaaatcacacaccaacatttgcagcggaaataaattctttattacaaaatgattacatgttacaataagtttacattatacaattatcggagtgattacaaaagaaaatgat

SEQ ID NO: 64295 - DNA, 152 bp, Zea Mays
ggggactttgattggatcggtggctttgatttgtgtcttggagtgttgcactttgctcttgtatttaatgaggagtgctaaatgcttggatggttggagtggaggtggttgtggggtatttatagccctcaaccaccaaaacaactgttggg

SEQ ID NO: 64296 - DNA, 281 bp, Zea Mays
ccacaatcacaagacaataagaattaccaccaatacttacaaaagatgtgggcccaaataaatccatgtgaagtaattccaaaggccgatgagtggacatttgacttttatttggatgagtgtttgccacttgcttcccggcttgacatgagctacacaatttgttcttctcaaacttcacatcttttaagccacgaactaagtcatgcttggctaaccgattgagttgcttcattccaacatgaccaagtcttctatgtcataaccaacctagtgaagct

SEQ ID NO: 64297 - DNA, 416 bp, Zea Mays
gaccgacagccgtaccccaacatcggcgacgaggaattgtgcagcgtgtggccacaaccctggcccggctagacatcgatgacgagtggtgtgcgtcgaagatggcacaacgagcagtaaggaaggagctttggcggggggaaaaaggccgcttcggaaatctggagaggagagagaacgcgccgggtcttcacggcgatggtgcccatggttcttatacccggaactgagtccgattttgggggggggattggtcaacggagcgcgccatgcgcgcgagcatccagcggagaggataagtccgtcgcatgctccagctccgattgttatggcggatcccaactgaccggcattatttcagcggatggaacatcgaacgcactggctgggaaaggggatgagtccgacaggctaac

SEQ ID NO: 64298 - DNA, 442 bp, Zea Mays
gttaatcttctcattggtgggcattagaacatcaacatgttaaattttagaattcagaaaaccatgtttatttagaattgaatacatacacagataagttctttcatatcaagttctctatggagtcctgagcatattatgctattgagaaaatcaatatgcagtgtgaacgtctaaatgagtactaatactattgtctgaatttctatgcatatggaacatgtccccaccaacacatcgacaactaaacaacacctaccaatcatgttatctttgtaggcaagacacgaacaagagatgttgcactcaatgctatacaatctcatctacttgatattggtattgaaaggccatagaaaaaaaacttcacacacaatgaagtttgagcatgaagtctcttcttttatatagaacacattagacactaataagtcacttgttt

SEQ ID NO: 64299 - DNA, 839 bp, Zea Mays
cttgaccagcggatggagctcatctgatggaggcggaggcccgcgcagatcaagatcatggggagcccttcattttggggggaatgaagcctggtccgagatctacaccactcgtctccgtccgctcggtctcgatccaagagaggggggaagaggaagaagaagaagaagaagaagagagggatcgagataggagtaggaagcgaagagtagctgctaggagagaagagagactagagaaggaaggagcggcggcggcggccccgagccagacaacattcccctcaaagacgaaaggcttcctgatctatccatattatggagtatagtagagtatgtgtatctccagctagctagcttatccgccttgacctcgcttgcatcttgatggttctaccacctcctgtatctatgtgtctcagctcgctcccggcctacctctcagctttttgggggtacgagatgtggtgcagggaggaggggagatccggaagtgaaggtagaaaggtcggtatgtatggaggagggggaggaagaggagaggtagctggaagcaagaaagcaagctatatgaatggatgggggccggcgagttgaatgggcagggcacacagcaggaggaggacgaaggggaattgaaagggcgccggccccccacgaggcacggctggttccaagggggtgctgtccccgtcccggtcccggcagtgcgcgctagctgtgcatgtgctgctggtgcaatacaatggcgacgacgacgacggtcggaggaacaagcaaggaataggaggaggagcagcaggaggtcttgattattgggggacgcatgcgagttatgg

SEQ ID NO: 64300 - DNA, 177 bp, Zea Mays
ttccgctcgacaaccgtcgctgcctccctcgtcgtggactccaaacgtcgaccttatcccaacctgcagcctcgtcgaatcttcatcctcgttggttgtcgatctccctcagcagctcggctctaattctgccgatgcgtcgtctccatggttgcggacatcatacggtgctggcct

SEQ ID NO: 64301 - DNA, 450 bp, Zea Mays
aactttttgttatgctgatgtcataattaacgatagggtggtcacttggtcactgcgcgtgggccacgaaatttcgtcatgcagatgtaagtgaaaacttcgtcatgtagatgtgagccacgaaacgcgtcgaactcaggtggcgtttggttgagcacttgtaatggtaacattaatgtaaataaataacattggtatctattaccatgggaatgaaaagcgctaattgtttggatagatatggtaacattttctatgggcagtgcgtgcggccgcgcttgacgtttgcgttgtaggccgtgtttgcgttgcgtcgatatgtaggccgtgcgcttgtcgtttgcgttgcaggccgtgtttgcgttgcgtcgatctgcaggttgcgctctcacttccacgtgatctgtagcataactgcataatcatataacacatatttgtatatataag

SEQ ID NO: 64302 - DNA, 242 bp, Zea Mays
ccttcttcgctgcacacagcaggattctgaatgcgtgacaaataaagcgacggagcgagggggaagagagctagctagctttaccctgcaacagcagcacccctaccgcttgcttgcttgcattgttcatgaagcagaaccgcagaagcaggtcaaattttgttgttggccagctgagagggacaggccgggtcaactggtccacacacaaaaaaaaaaaaaaaatcaaacataagcctaac

SEQ ID NO: 64303 - DNA, 187 bp, Zea Mays
gaaggtggtaaactcggggaacgaataccttcctgctggttagtcagtcaaagtcgaccgatttaaaattgcacggatacacacgcagtcacggccatgggaatgaacaatggatgaaattagccgctgttaatgtcctactcatctgaagaaaacgaatgaacaatggatacagtacacacacagc

SEQ ID NO: 64304 - DNA, 1094 bp, Zea Mays
gttagtaattgctacgaagtagcataatttatatggagctaagaagtcacatgaactcaaacttataaaaaagatatatcaaaatatggagtgattgctaaagtcagacatcaataaaaactttctcttaggtctctgtatgatagaattatgttattttataatctatgttcgttcagtcagtcattatgaactctcttctaatcgctcactttattggtcatgttatattggattgagtaaataataacatcagttagccaaattttttaaaaaatattatagtggagacaatcaataaaaaatattaaattttttggtggatactttatatggatattgttgtaagccgtcgcaacgcacgggcaatcgactagtttaaatatatatgccagtgtcatactattttaggctattcccagtccaaaatattatagtccaatatccaataatgccacataggatgaaaagtatgataccgctacaagatacaccttctgtagtgtatagtattatagttatatgttttaattatttaattggtgtgatgttgtgtctatgagaacggaccccaagtattattttttgtgccacaacctaagatatggtgtctgtcggggaggaaatctccccggccgggtggcgaattgcacccgccctaaatcctaaagagaggaggggcctaagcgttttgcttgctacgagactggtggatcaacacacgagagcacgcgagggtttagagtggttcgggccgccggagcgtaataccctactccactgtgtgatgtattgcttaggagcttgtatgaacttgagagtgtctgcctagagttgggtctcgtaacgtcgcatgcatccccttttatagctgaaggggggcatgcacaaaggcactgagccccgaaatgtgggtccagggacatagagaatataacgcttgggactataaatatttgttgtcggggcaatccccttgtgtcctgtcgtccgagatctgtggatcttcggcgtgcaggggaagattcttgtagaagggataacacattgtgctgcttggcacggacgcactgttcgccagcagacccagcagg

SEQ ID NO: 64305 - DNA, 776 bp, Zea Mays
ctcttgttgcgacttgtgtgcgtgttgtcgctctgattttgtgtcttgtgtgcgttgctcatcccttccttactctgtgcttctttgtgaacatcaaagtgtaagggcgagagactccaagttgtggagattcctcgcaagtgggatatagtaaagtgaaagcaaaacaccgtggtattcaagtgggtctttggaccgcttgaaaggggttgattgcaaccctcgtccattgggacgccacaacgtggagtaggcaagtgttggacttggctgaaccacgggataaaccactgtgccacctctgtgttgatctctttgtggttatcgtgttgtgcaagctctcttctctagccacttggcttaattgtgctaactcctaatcaagttttgtggattaagtttcaagttttcataggatcacctattcaccccccctctaggtgctctcaattggtatcggagccattctcttcaagaaagggactaatcgcccgaagagatggatcctaagggcaaggggattgtgatcaatgataaggagaaggagtccttcgtcaacgagccaaaagatgacaagcctaccaactcgggctcgggccacaaacgaaaagatggaaagaagaagaagacgaggcacatcaaggagattgtctactacgacgacagcgacgagtcctcttcttcccaaaaggacgacgacaacgactacgagaaaaagaagacggttaactcaaacttctctttcaattattctcgtattccgcatagctcaaatg

SEQ ID NO: 64306 - DNA, 1173 bp, Zea Mays
cagacgtacaacaggctcaaaactctcgtcaacaagataaggagctatggaagcacgcgatggacggaccatgacgttgtccgcctaatgctaaggtcctttaccgtccttgatccacatcttgtgaacaatattcgtgagaatcctaggtacacgaagatgacgcccgaggagatccttggaaagttcgtaagcggacggatgatgatcaaggaggctagatacgtcgacgatgcattaaatggcccaatccaagagcctcaaactattgctctcaaggcaacaaggagcaaggaggcgctacctaacaaggtggcgcaagttgaggcggtcgggcttaatgatgaagagatggccctcatcatcaagcggttcaagacggcgctaaagggtcgcaaggagcaccccaacaagaacaagacgaaagggaagcgctcctgcttcaaatgtggtaagattggtcattttatctctaattgtcccgataatgatagtgaccaggaaaagaagagtggaaagtgggaaaagaagaagaactacaagaaggcgaaggacgaggcacatcttggaaaggagtgggattcggattgctcctcgtccgactccgacaacgaaggactcaccgccaccgccttcaacaagtcatccctcttccccaacgagcatcatacttgcctcatggcaagggaaaagaaggtaagcactcgtaatactagtacttatgcttcttcaagtgaggatgagtctagtgatgatgatgaaatagattattcatgtttattcaagggcctagatagaactaaggttgataaaattaatgaattaattgatgccttgaatgataagaataggttattagaaaagcaagaggatcttttgtatgaagagcatgataaatttgttagtgcacaaaattctcttgctctagaagttaaaaggaatgaaatgctttcttgtgaattatctacttgtcatgaaaccatttctactttaaaaggtgttaatgatgatttaaatgctaaactagaagtagcaaataaatctaactcttgtgtagaacatgttatgatttgcactaggtgtaaagattttaacgttgatgattgtaatgaacacctagtttcaatttctaaattgaatgatgaagtggctagtcttaatgcccaacttaag

SEQ ID NO: 64307 - DNA, 1376 bp, Zea Mays
aagaaccatgccttcatgtatcatgataggagacattctagaaatgtttatagaagttatgatgcttttaattctcataccatggttgcttctagttcttctattatgcatgatagaaatttagctaggagaaatgttattaatcacatgcctagaagaaatgttgttcatgtttctaggaaaataataaatgaaccttctacaatttatcatgcttgcaatgcttcattcgaaatttgtagaaaggatagaaaagtgattgctaggaaactaggggcaaaatgcaagggtgataaaacttgcatttgggtccctaaggatattgtcactaaccttgtaggacccaacaagagttgggtacctaagacccaagtctaaatttgccttgcaggtttatgcatccgggggatcaagctggattatcgacagcggatgcacaaaccacatgacgggggagaagaagatgtttacctcctacgtcaagaacaaggattcccaagattaaataatatttggtgatgggaatcaaggcaaggtgaaagggttagggaaaattgctatttcatctgagcactctatttctaatgtgtttttagttgagtcgcttggatataatttgttatctgttagtcaattatgcagtatgggatataattgtctattcacaaatgtagatgtgtctgtctttagaagaaggtgatggttcattagcttttaagggtgtattagacgacaaactctatttagttgattttgcaaaagaggaggccggtctagatgcatgcttaattgctaagactagcatgggctggctgtggcatcgccgcttagcacatgtggggatgaagaactttcacaagcttctaaagggagaacacgtgataggtctaactaatgttaccttcgaaaaagatagaccttatgcagcttgtcaagcagggaaacaagtgggaagctctcatcatgccaaaaatgtgatgacaacatcaagacccctggagttacttcatatggacctcttcggacccgtcgccgatctaagcataggaggaagtaagtatggtcttgttatagttgatgatttttcccgcttcacttgggtattctttttgcaggataaatctgaaacccaagggaccctcaagcgcttcctaaggagagctcaaaacgagtttgagctcaaggtgaagaagatcagaagcgacaatgggtccgagttcaagaaccttcaagtggaggagtatcttgaggaggaaggaatcaagcacgagttctccgctccctacacaccacagcaaaatggtgtggtagagaggaagaacaggacacttatagacatggtgaggacgatgcttggagagttcaagacacccgag

SEQ ID NO: 64308 - DNA, 413 bp, Zea Mays
tgggttccaagtgaaacaactcaaggatgggaccttcatctcacaatcgaagtacacgcaagacttgatcaagcgatttgggatgaaggatgccaagcccgcaaagactccaatgggaaccgacggacacaccgacctctacaaaggaggtaagtccgttgatcaaaaggcataccggtctatgatagggtctttactttatttatgtgctagtagactggatattatgcttagtgtatgcatgtgtgctagatttcaatccgatccaagggattgtcacttagtggctgtgaagcgaattcttagatatttagtcgctacgccttgcttcgggatctagtatccaaaggggtctacctttgacttgattggatatttagaccccgactatgctggatgtaaggtcgatagga

SEQ ID NO: 64309 - DNA, 993 bp, Zea Mays
cacaagtccatttgcaagtgatgcacatatttagggggagttgtgctacaacttgaccctttgagactaactgtgtgcttgagtttgcttaatttagtctcaaaggaggttgaaagggaaaaggtggacttggaccatgcaagacctccactgcactccgatgaaagagtaactgattccaagttcatctttgtactcttattgccttttttactcttagttgaagattttggtgaggcaatggggttaaagggccaaaattgatcccgttttggtgcttgatgccaaagggggagaaaataaggccaaagcaaggaaatggatcagctaccacttgagaattttgaaaaagaagagttagagtttttgtttgtcaaaatactcctgtttgtctcttattgtcaaaagttggtctcttgtgggggagaaggcttaattatgggaaaaagggggagtttttgaactctttgatgaatttctcttgaaatatctctctttatgtttcaacaagtgtgtttagaaattgagtttgatttgcaaaaacaaaccaagtggtggcaaagaatgatccatatatgtcaaatctgaatcaaaacaattttgagttcttagttgaattgattttgcacttgttctacttactttatgttgtgttggcataaatcaccaaaaagggggagattgaaagggaaatgtgcccttaggccatttctaagtattttggtgatttagtgtccaacacaagtgcctaagtgttaaatggtggacaaagtacaaatcgagtataaaggtatgtttcttagacttagtacattgttttagagactaatgtattatgtctaagtgctggaaacaggataatcaagttgaaactaaagatggctttgttcagccaaagtcaactctgtctgggtgcaccggactgtccggtggtgcaccggacagtgtccggtgcgccaggctagctcaggcaaacttgctgctctcgggaag

SEQ ID NO: 64310 - DNA, 176 bp, Zea Mays
cttcaaccggtggtaccatattcaagtcaaggaaatgtatatcatccattgtttgctcagcaactgaaagaacagacgtttgtagtactcactggaccgagcaggcggtacagaaatgactgcgtactcctctcactagaaccatctataaatagacgatgcaaaaatggcaaaag

SEQ ID NO: 64311 - DNA, 594 bp, Zea Mays
agaaaatggagggtaacacctaaatttacattgttatttcaaaagaaattttataccccaaaatcagggtgttacaaatctaacccacttaacagaatctcgtcctcgagattcaagaagaagcttgcaagaaaaaaaacaagactgatgcataagttgttcatagtttcttccattcaactttgactctgccatcttaacttgcggactggttgctttgatcttcaaacgctcgagaccaattgatataattcttgaggatcgcttggacctgtgggttaggacccacacacgcttccgctgcgccactctgatcttgtgggttgatgttgatcgcattgtcttcattggggttagcggctaacccccttaacagaagcgttgatatgcacttggtgaagatattgccgactctgatcttgactgattaagaggtgttgtaggatgccaacaggataggtgcaagagggaagggtatagatagaaaaggtaagatagaaaaggtaagatagaaaaggtaagcatagatggcttaaagagagagaagggggaacacccaactacttaactctacggcactcaactagtaaacag

SEQ ID NO: 64312 - DNA, 1343 bp, Zea Mays
ctacccccccatgtgcagccgcccccactcctccttttccccttggccgccgccccccctgcccatctcctcctctctccattgttgcagccaccaaaaccctagcccccccccaatcccctcctcctaaggtgctactccgtgccgctcggatcatcgtctcttggtgcgaatctccaatcgttttggtggagggaagaagggaggaaggaaagggggagaacccaaggtgatttttcttttgtgttcatcccttgttcatttgcgctgcgattcaattgattagatgttgcgtttgcgattagatagaagggggctgtccagaattttgcgtggtggatgaacagcggtagttccagcagtttttaggtttttttcgtgaggatttaatggggatcaatttggggatcttgtagaactttgttttatctttccaacgagtatttatgcgctcaatttggagttataaattaaaagttatcatcgtttgaatccgggtatgtggctgtccaaaaaaacagatttttttcagagtgatgaacagcagcagtgttagcagtttctggggatttttcgggagtaattagtgttaatcagtatgagaatcatgtagggctttttcttatctttccaacaagtacttatgcgctcaaatcggaattatattttagaagttatcgctgtttgaatccgcgtatgtcgctgcccaaatcagaaaaaaacagattgcagggtttattttgtggaccgtttagagctaagtagatgttagaatttaatcatgagttgtatacaagacttgtggggaattttatgtagttgtctctgaagttgttgtttatcatcactgctgtcctaatttttaagttatggaattgttaagcagcgccgctgcagtttggttagtgaggggagaattgttaccgcggcggggtttgagattgcgcgtaggtgcggtgttgtctttgagttttttttatgtgaatttggtgcactaagttgggtgtcaaaaacaggtggtggacttccggatcgttcttagggattttgcccgaacttcggtgaaggcaagtaaaactgtgatggttattccgtctgtcagatgaggagtcttatacttgtttatgttgtgctatcatgttcaaattcatattttctttcgagtaccatcatttgatcatgttcatgtttcatggatttcataagttgagtttgaggttcgattatgttactcaagtggtaattatgtggaatgggcggaagtaaatgcctagcacctttttatttggggagaacttatgatgttgtcatgcataatgcactcatcatccattgcattgaag

SEQ ID NO: 64313 - DNA, 699 bp, Zea Mays
gttgaatctattatgtggatgtggataatttggacttgtgcatggtgattctacttggtgttgagttttttttagttactcgtatacttgctgcaatttactgttcaaaagaaaagaaagaagtcctgaacacgtggttgtgtaagcacagttgatttacaatgtcctatttgctgttgttatgtttacttgctgagatgtgttatctcacatcttgcattgtttgatgcaggcatctaatttctgctttggggaatagagggatgtagcagcacggccactacacctttaataaaggaaccaccatttattaatgttgttaatcagagttggacaagtctagtgaattgctttattcttggttgagcggttattttggggtggactgagttcttatcccatttgttttacttcagttgggtcataattacgttttaccactcttgcattacagtttctactatgtgaattatatgtctttatatcttgtatgtgcgtcatgttttcccctccttgttatgctagttttcaaaggaggtgctgccggattttttcttgctttatgttctttctttattacatctcttgtgtttagtaagtttggtagatgaggtttatggtattatccattttgtgcgaccagtggggtgttacattaggcaaaactagcagggtgtcaaaaaagggagagcagtcaat

SEQ ID NO: 64314 - DNA, 62 bp, Zea Mays
tcgatgatgactgcattcaagatgacttcaacctttgtggcctcagcagccaagttcctgat

SEQ ID NO: 64315 - DNA, 577 bp, Zea Mays
ggtccattcattgtatgtatagaagtgatgtcctcatcatcctcctcctcttgaactagagtcgtcctcgactcgatcttatcttcgtcacccatatatggcttcaaatctaaaatgttaaaggtggaactaacccgaaaatctggaggcaactcaggtggtaatctagggggtatctcagagggaaacacatccatatactcttgcaaaaggttagcaatagccggtgacaaagcaatagacgtatcatcaatggaatagaaaacatttttgcacactaaggcatagcaaagtccaacagaggcatgtaactcaacaagatcagattttgtggctagcaaagtaggagtttttaacttaataggttgctgattttcagagttcaaaacaccttttgcttagcattagtctttttctcatgttcaaagtggaccatttcagtgggagtcataggaagcaacacaattttctttcccttatgcatgaaagtatatttattagatctaccatggtgaatagcatcagtatcaaactcccaaggacgtcccagtaaaagagagtaagcatccatactcac

SEQ ID NO: 64316 - DNA, 840 bp, Zea Mays
ttcgagggctcgaggcgcaacccgccgccgccgtccagatcttcacgtagcaccgctgcattcacacgcacgcgagcggcgcggagctgttgggaagccagttttttcgtctctggctctcaaccctgaaaataactcttgctccacctccggagccgttttccgcatcgcgtttgggagagctccacaaaagagccagagccacctaggagccctcccaaacgggcactaattctaggcggacagacacataacacttgatactgatacaggaatacggggttcattggaacagaaaagacgttatgccaatcaactacagtagaaaaaaaaattccgtgtttatggaatataaataaaacaatagacaaaaactgcagcctcggtaatttctccggtcgccagtatactgtagtattagtgatagataaactgctcgggccaaactgcctgggatagttcaacgagtagaaggcccggacccatactgtacggctccatttcggccgcctgtctcgaataaaataacgcagaccttttggttcctggtacccagtaccacgttcttttttatatactaacaaagcataaaaaaaacaaaagctctgctgtttcctgtttagccgtgctggcgtgctccatgccgtccacaaggcgattctcaaccgagtatttttttttcccgctccaaatgtgctgccccaccccacagacagctgccggttcgggcatcagtgtcggcgaaaatacacacactgctacgaatttggttctttgcaggtcaaggtaggatcgatacgatagtgccagcgacgtggtcaaactgacacgcaaatcgac

SEQ ID NO: 64317 - DNA, 145 bp, Zea Mays
ctgggtaacactaggttagtgttgtttggtgacgtcgatcacttgacgatcatccttggccagatacttgcttcgtctgtccatctccggttccgttcatcagcaccatcttgtggtcgactctgttctggttctccgcatcgcg

SEQ ID NO: 64318 - DNA, 509 bp, Zea Mays
gctcggcacatagggagatgggacgagcggctcatcaccagcggctggatgagcggaggaacgacgcgacggagaggctcgaccatgggggctagggagggagaatacgagctacaggagggagatggcaacggctatagaggaggagtggctgggcaccgatttcagcagaagagcacggcgaggaaaaaatcctggcgacgacatcgatcctcatctaggtgcttgagcggcggtgaaaaaaaaatccggggagggcggcgggacggggataggaaggagacggctgggagattgagatgaaggggatatttttttttatttctctctttttttaacagaaaccgaagatattttggatcccgatatttaacgacgtttacgatgtagatagtaattgtgacacggttttgatttgacgaatactcagaaatcggatgaatgcgtactgttaattcacctttttaaatcaaggcgaaaagcaacggaccgaattaaacatatttcgg

SEQ ID NO: 64319 - DNA, 117 bp, Zea Mays
cagcacaagccttattggtaagctgaaaaacagcttcacaccttcatttcatttcaataatcgtctgcaagactaaaccacttatcttatccttcccttcctgttgtctttgatgca

SEQ ID NO: 64320 - DNA, 87 bp, Zea Mays
gtcatggaatcaatgaaacatgaagttagaagcacactgagatccagtggcttgtgaccccttgaccctttagaggaagcgcgctag

SEQ ID NO: 64321 - DNA, 318 bp, Zea Mays
caaccaaacccccacgagcggtgctcctattttttttcagctttgctcttgaatatgcgctcacttctccctctctctctcttcccttgcgtgatttttgtcaattctctgtgccccttgcttccttcccactcagctctgtggccccccgcctgcactcctgcactgcgagcgacgtgcaatcgcacatgtacagtgctccgcgtgccgcactcggcattcccaagtcccaaaacccctcctgtaggagtggaatatgaacccggtgtcccggtagggaagcacttgtgggaactctgtgttactacagagacagtt

SEQ ID NO: 64322 - DNA, 311 bp, Zea Mays
taaccaaacaggagcttagacagagtcaatgtatatggtggtccaagacaagatgatgcgggtattctatagacagtcctgctactcgctcgctctacccctccagcactttttgacttgaatacaacctggacctgtacggtacctctacctgtagtgattttaaaattttgattagggctacactacgtcagtgggtggaccaacagctgaagactagggatggatccaatttttagtcttatttcttcgattgtgaacaaataacatataaaatttgatatataaatttatattcttatttttagtat

SEQ ID NO: 64323 - DNA, 255 bp, Zea Mays
aaatcatgaaactatttttattaaattctatagaaaattaggaatctagcaaaattggtttggtatttttaccattttctacaattttctagaatttatttagctctggtagaaaaagaaaaagaaaaagaaaaagaaaaagaaaaagaatgaacagtcttgggccaaatccagcccaggcggcccaatcccgggtggaaaacgcgcgcgcgcccatgctggcagacttgcatagaggcccccgctgtttagaat

SEQ ID NO: 64324 - DNA, 1557 bp, Zea Mays
tgacgttcaaatccgacccgttaaagatttatcgggttcgaatcttgcttcaaaaatatcagtgattttcggtaagaaaaagaaagaaatttaaaaaaaatgggaaatatccctcacgaatctctctccccgcagaatttttgtttcagccgccgcgtcagacattctcatcctcccaccgagtctccttgctcctatccacaccgtgggattttttttttttttttgctgttgaagccgctgcagcgcctgcttccctcacgcgcgtctctctatcattctgatttcttcttcagccgccactgctctctctcgtctctatccttcagccaccgctagaatttttttttgccatcttcctgtcgagctccctgcgctcgcccagatcccgcgcgtccctgcgtccagggcttttccagtctgcgcccctactccttgattggtgctcgcgtcctggccatggacatcggcatcggcgagctcaccttgagttccactggcactgaccctgctcttctctccctcctctctgcgactcgacgcgtccttgcttctctgcgccactcggcgtctttgctcacccatggcgtcggccacagctcggaggcttcctcgagctcgaccgcccacctccctgctcgccctctctagcgctggtcactcctcccatgccgcgggcttccctgctccaactcggcatcctctgttcctccactgcgaaaacgccagactgcaccagttcgttgggcgcctgcgccgaactccatccggccgtggtctatggtcccatcgttgaattctgtgatatgttactcgccctcacctcgtccccttcctggcactcgaccgtcgctgctcctgtgtgcgcgcgtgcccaggttccagctcgcgtttaattcccaacgagcagtgcacggctttcatcccgtcgcgtcgatccgtcggccctgctagctccctgttcggccatgaaagccgctctgtcgacccaccttgcggctgccctggtgctctgcttggtaattcgatataggctcatgctcgactgtgggggatcgttgtgtcgcgctgctgtggcgtcccttcctgctctaccgtgcccatgactccctatgccatctctagtccgtcatagtacaacgccgctgttagatccggtctccaacccgtcatggcgtttgtcggacttcgccggtgaagttgtcgtcctcctctggaccgagcccgacccatccatgctgctcaccccgtgtgtcctcgctcctcatccatcgggttggcatgttcacgtttaccatcgagtcgtcgaacccgtcatcccctgcttgacccccacctcaccagctcgctccagacttcaatcgaaggtcgtgtcgtcaagaaatcccaagcatcggatgaagacgaagctagtcgcgtgatatttaccaagtgctcgacagaagacctgagcaagaatcaacaatgtttgcttggaattttaattaaatcggtaaccgttctctagttcgctatttctttaattgattgagtcgatggatggaataaattaatgtg

SEQ ID NO: 64325 - DNA, 434 bp, Zea Mays
gagcctctccttgattcctaaatccaacatatccttgagagtcttttttcttagtcgggtaagacttacgaaagtacacttcgtactcagggctttgtcccattttgttttaggtgaagagcctacgaatctttgccacttttgtgcgaaggtgtttccccagaagaaggaagaaccgaaaatagaagtgtgttgctgtggatggtgctaagtgccggtgggctcgaccttcttataagtctaagtacctcttctatacttcttattgaggatgatcacttaagctagcatatatttcaaaactataaatactttataacagttcaaagttatttctttgaatcaccttgtaatcactccgatcctgtacattgtaaaacttgatgtaacttgtaaaatttggtaataagatttccgctgcaaaattgttggtg

SEQ ID NO: 64326 - DNA, 403 bp, Zea Mays
gtcgccgactcgctcgccgccgcgcgcacggccttcgagagagagagaggacagctagctttgagcctttgacgcgacctggagatcttctgagctcagcaggctgatcgatcggatccccgtccccatgtcgagcaggaaggaggtggtggatccgttccgtgggagatggacctggacgacgggtctcggtggtcgggagcagtgcggtgctgacggcgatgccgtatcctcgtcgcacgacgtctgatgggcgcacagctccacagacagtgacacgtacgcactccggccggagctgcttctcacttggaaatctggcatgcatgcatgcataacatactagcgcgtgcttccgtatttctctgtccatgaaataatcacgctacgtactattctggat

SEQ ID NO: 64327 - DNA, 941 bp, Zea Mays
taactggacatcatcacacagtgctcaaataataacataaaagaggaataatagtcgattacatcatatgtctgagacatccacatagtctttacaataatcaaagtgcgaaaacgaaacgtagatacacacggccttcacaggcagccgactgggggttaccgctaacccacgcctagaactcgtcgtaatcttggaactcctggaagtctccttccacggcttcatcttctcctgagcagtggttgcaatgctgacaacctggggatggggggcggtttggtgtgtagagcaagggtgagtacacatcaacatactcagcaagtatcctgtttggctatagtggactagctttatgtgggggtaagtcaagcagttgcttttagttggtcagattattattactagtagagaaagccaagttttagatttaacccacgttattaacccaaacgtactcctttccaaacggaaagagtaccacttaccattaccagagtcaataccaagaaccatcaacctcattgccacctgaaatccgaacatatctgatcaagtatctctaatcaatggagctcccttggccgctcataaccgcgagcacggctgatatatcagtttcataacactttgcagaggttgcgcactttacccacaagccgtgattccctcttgcctcgggccgatcaaacccttaaacactaccaaggtgaataggcagggtctcactacatagcctttacaaagatttccaggggctatagccgcccgttaggtttcctaaatgcaccgcactcctccccaaggggcgaaccaaccttagcagagcgagccgcatacaccgagccccattaacggcacaacggcaaagcgaactacaccccagttcctctaattactcagctaaaggcgtcccactccaccctcatggttgcactgtt

SEQ ID NO: 64328 - DNA, 577 bp, Zea Mays
atggttagttcatgctagcgctttactttaatcaatgaacatgatgagatacaatgatgatactatgattttgttctggatatgatgatatacttgtgacatttaaggggactcgagctatttctcgagtgcctcttcgtaaggacctgttcgttggatgaacgcccgggaaaacagtgcaaccatgagggtggagtgggacgcccttagctgagtaattagaggaactggggtgtagttcgctttgtcgtcatgccgttaatggggctcggtgtatgcggctcgctctgccaaggttggttcgccccttggggaggagtgcggtgcatttaggaaacctaacgggcggctatagccccaggaaatctttgtaaaggctacgtagtgagaccctgcctattcaccttggtagtgtttaagggtttgatcggcccgaggcaagagggaatcatggcttgtgggtaaagtgcgcaacctctgcagagtgttatgaaactgatatatcagccgtgctcgcggttatgagcggccaagggtgctccattgattagatatacttgatcagagatgttcggat

SEQ ID NO: 64329 - DNA, 161 bp, Zea Mays
caaccatacctttgaccatatacatctacttcttcactcagatgagccagattatctagaagagagatttgcaatttatccttgcattttggtgactctaagaagagtttctcaagctccaggtcaatcaatgtgcagatagagctcaattctggaacctg

SEQ ID NO: 64330 - DNA, 389 bp, Zea Mays
gtatttccgtttaaaatagtacatcgtctcgccgctaggagtttaattcgctatagcgtagtactatttagggttgaaatattcctatttatatgcattcatgttcatcgtgcatctcaattaggtacgataattgatcgcgtgatgcggaagacgagccaagtcgaccccaagcgcgggctactccgcacggtgatgctgatggatagacgaagcaagtatcgggacaaaggatggtcatcaagtgaccgacgcctaacaaacactaacctagtgtttcttccaggcaagccccggtgcatgcaaccccttccttgtgtttttaaataatttttacacactttaagtctagtgaaatgtgcattaagtttataggagttgcttggaac

SEQ ID NO: 64331 - DNA, 651 bp, Zea Mays
aagatacgttgacgatgtgttgaacggcccaatccacgagcctcaaaccgttgctctcaaagcaacgaggagcaaggaagtgctacctagcaaggtggcacaagttgaggcggcgggactcaatgaggaagagatggccctcatcattaagcgtttcaagacgacgctaaggggtcgtaaggagcatcccaacaagaccaagacgaaggggaagcgctcatgcttcaaatgtggtaagattggtcattttatcgctaattgtcccgataatgatagtgaccaggaacaagggaacaagagggaaaagaagaaggcttacaagaaggctaagggcgaggcacgccttggaaaggagtgggactcggattgttcgtcgtccgactccgacaacgaaggactcgccgccgccgccttcaacaagtcggcccttttccccaacgagcatcacacctgcctcatggcaagggaaaagaaggtaagcactcataacactagtacttacgcttcctcaagtgatgaagaatctagcgatgatgaaatagactattcatgtttattcaaggggctagatagaactaaggttgataaaattaatgaattaattgatgcattgaatgataagaataggttattagaaaagcaataggatct

SEQ ID NO: 64332 - DNA, 1166 bp, Zea Mays
tgaacctcctacaatttattatgcttgcaatgcttcctttgctatttgtagaaaggataagaaggtcattgctaggaaattaggggccaaatgtaagggagacaagacttgcatttgggtccctaagactattgtaactaaccttgtaggacccaacatgagttgggtacctaagacccaagcctaaatttgccttgtaggtttatgcatccgggggctcaagctggattatcgacagcggatgcacaaaccacatgacggggaaaaataggatgttctcttcctacgtcaagaacaaggatccccaagattcaatcatattcggtgatgggaaccaaggcaaggtgaaagggttaggaaaaattgctatttcttccgagcactctatatctaatgtgttcttagttgagtcgcttggatataacttgttgtctgtgagtcaactttgtaatatgggatataactgtttattcacaaatgtagatgtgtctatctttagaagaagtgatggttcattagcttttaagggtgtactagacaacaaactttatttagtcgattttgcaaaagaggaggccggtctagatgcatgcttaattgctaagactagcatgggctggctgtggcatcgccgtttagcacatgtggggatgaagaaccttcacaagcttctaaagggagaacacgtgataggtttaactaatgtaactttcgaaaaagatagactttgtgcagcttgtcaagcaggtaaacaggtgggaagctctcatcatgccaaaaatgtgatgacaacatcaatgcccctggagttacttcatatggacctcttcggactcgtcgcctatctaagcataggaggaagtaagtatggtcttgttacagttgataatttttcccgcttcacttgggtattctttttgcaggataaatctgaaacccaagggaccctcaagcgcttcctaaggagagccaaaacgagtttgagctcaaagtgaagaagataaggagcgacaatgggtccgagttcaagaaccttcaagtggaggaatatcttgaggaggaaggaatcaagcacgagtactccgctccctacacaccacagcaaaatggtgtggtagagaggaagaacaggacgctactagacatggcgaggacgatgcttggtg

SEQ ID NO: 64333 - DNA, 50 bp, Zea Mays
aggtggccacgctggagggagagaaagctgacctccggcgccagttggcg

SEQ ID NO: 64334 - DNA, 297 bp, Zea Mays
gagatctatgacaaactcaacttccgtatctggtggcatccctgataactcctctggaaagacatccagaaaatccttaaccacacggatgttgtcaccaacaaacttcccatcgaccaagaatgccgcttgtttggtggcggtagttactgcaattccaactttagatctttctcttttggaactggtgacttctatggttcctttagcacaatgtataaactgcctttgcctttcttaaccatgacataccaaggatcacgtctatagtgctctcttctaacactataggggtag

SEQ ID NO: 64335 - DNA, 479 bp, Zea Mays
aaagggtaagtaataatatgaaatactagagtcatttacatagtaaaatcaaagtacacagaatagaaacatagccaacgtaaataaacccaccacaggcagctgactgggggaggtcgctagcctaatcctcaaactcgtcgaagccctagaacttctggagatccgcctcgatgccttcttctttacctgagcatagattgcaccaaaggcaacctggtgttttgtgaaagcaagggtgagtacacatcaacgtactcaacaaatgtcccgtttggctgtagtggactagctttatatggggttaagctctagcagttgcttttagttggtcaagtatttattattagtggaagccaagttttagtaatagccaacccgtgaaccatttcctcatcgagaaaacatcattatcatcatcgagtcaaaaccatcaatagaaccattgtatctcatatcatatgtatctctaatcaaag

SEQ ID NO: 64336 - DNA, 556 bp, Zea Mays
ttcagtttcgccctattcaccccccctctaggcgactatcacacggtggtcgcaatatttatactggttcgtgcagaacgtccctacttctagccatgacggcttgcgctaccggcaccatcgatgatcaaagctcgtagagagggaggaggtggttacaaagtgtagtcatgtctaagtcttggcttggcatcgaggctccggtctctgggtcctcctccttttcgtcgatccttctaggcgtcttcttgtttggggtctgtcctgcgtccgtcgtgtcttcagggatccaagagtccgtcagccttaagcccttggcagacctcctccttttataggccaaggaggggatccaccaagagtggcttccttaagaaagggccactgggcgacggtgaagtcgagcgttctactatggggtaaagccacacatgctcgtgggtctcgagatcgcctgactgtctcgtattctttatggcgaacgagggcagcgtgagcccgaacgccatcatttgggctatatcgacctctgccctttgtagcccagggctcggca

SEQ ID NO: 64337 - DNA, 99 bp, Zea Mays
cactcttatatacatctatatctatacttatatctacatctataactatactacaagtgattctgtagctcctcactcttatatccatctatatatata

SEQ ID NO: 64338 - DNA, 446 bp, Zea Mays
actaatacattattctactaatactacttctactactatactaacatctaagccagtggtgcctaaccactggccttgccgttgccgccgccgttgccgccgttgcccttgccgtcgcccttgctgccgtcgccaccgccatcgtcgtcgcccccgtcgctgctgtcgccctcaccgccgtcgtcgctgtcgctcccctccttggacgagtcagaggagtccccctcatccgaggagacctccgactcatccgagccctcgagcccagcacgcttgacggcccggatgtatgtccacacctccgccgcaatcctctgggaattgtctgagtcgtcagacgatgccgggggagaggcatagaccgacgacccctcggactcggaggagaactcctcctccgagtactcggaatcgccgaagtcctccgagggaggagtcggctcgtg

SEQ ID NO: 64339 - DNA, 860 bp, Zea Mays
aaggaaaggaagatttctaaaaaatagcatgagatgaagaccttcgagtggattattttcagtaatccactcaaagctcgggggctacacccggtgcacctaatgaaccatcaaccccaaaagacagaatgctgatttctaaagcataagatgaaaataaaacaatgctgatttctaaaagcatgagttgaagataaaaatgatttctgagaagacttgaaatgaagaccttcgagtggattattttcaaaaatccattcgaagctcggggactacacccattgggtgcacctttggtgcacccaatgaatcttgaattccaaagacagaatgctgatctccaaagcataaacccgagacaaagcactaatttttgaggaataaagcgaaggccgatgaataatggtgaaagaaaacaacagaagatcgtttttaccgagtcactcagagttcagaagcaacggcttgacagacttattttcaaggcattccttatcaaaataaaaaactgcaagatggacctagaatctttgggccatttatttcaaaatcgacccaaagattgggggcttgtgggggacagatatcccccgggtccacggaaaggctaaaagacctcgcgaaaggcctgcgagcccaataattcgcaaggtcaccccttcgtgggcctggggaggcacgtccgataaagcggattgacacaagattggattgacgcaggcccagacggtccgatgagtttgaacggcaaccgcaacaaggatccgaccttcccgcgcaggggcctcatacatcggaacagagcggagataggtcgacggaattataggaagataggctcagtcggttcactattactt

SEQ ID NO: 64340 - DNA, 1442 bp, Zea Mays
gacaatttcaaaattagaaatggctctcaggtgagattttgggaagacaactggcttgggaatgggactttaaaacactagtacccagggttatattgcataacaagaagaaaatttataaccattacaaaagttttatcaaccccacaaccaaatatttcctggcggagatctttgataggaccaaaattagtggcgtggaacgaattgtattcacgtatcacgagagtccagttggaccagggtgaagatgagttcacctggggtctaactaagttaggaaaattctcagttaagtcgctctaccaagccttgatcaaaatcaacatcccaaatcataataaagtcatttggaagctaaagcccccctaaaaatcaaagtattcttgtggtatctaaaaaggggagtcatcctaacaaaggataacttagcgaaatgtaactggaaaggtagtctgaaatactgcttctgtcacaaaaacgagacgatcagacatctcctttttgactgtcatttttgcgagacgggtttgggactttatttttctagcttttggtatttctagaccttctaatatccacaatatgtttggtaactggataggaggcttcggaaatgaccataaagatctagctctacttggggcagcaaccgtatgttagtctatctgactaggtagaaatgagttaatttttgaaaacaaaatttctttatctcctttgcaggttatttttactgtagcccagaggcttcgcacatgggctgtgctatagaggcaggactcatgcaattatttggtaatggctacgcaacatttgactcaagtggccaaggagtttttttcccgggagcatggttggtggtctagtcttcggattgatagccactagtgtgtgtttttagattctgttgggatgtgtgctcttatgggcagaggccggaagtgactttcaaggacttgtatcatctcgacgtactgttcttgaatgaataaaaatccttcccttataaaaaaaagaggtcgggagcatatattaaggtctatattttctaaaatcatgttcggaagcactaactaatttatccacatataccactagtaacggctggtaataaaacttgcaataagtttactgtgaatctatgaaacttaaagtcacacacacgcacgcgagcacacgtacgtatatatactagtaaggtgtttatgtattgctataattttcatttatgcttaagtatagaatataaaacataagaacatatatataggtgggtgcgaatataggttttggagccaacaatcatgattgaaatccctcatttttgtataattttaacttttttaccatttaaatatgagaaaaatggtgacacatagacatgagtatggaccatccgactcgaccaatgtaatgaacaagtacgagccatagttttt

SEQ ID NO: 64341 - DNA, 1241 bp, Zea Mays
gtaaaattgtgctttataacagtagagaagagatatgcccgtgcatatgtgcatgcatgctagagaaacctatttgcagcttataaacatgagaaaggtaagtagcaaagctaaattaaaggcgacgtaaagaactaaaggctaagatttcaggcaatatcaaaagggcaaactttatgcttcttttcctactttgatcattgcctggtgtaagtaatcagggataggaagaagactacaaatgaaagaaacttaggacccatttggattccacacgctaaactttagcactctttgtgctaatgggtgctaaaatttagcagtttatttttagtaccttcttctagcacattttagcattcgtgtttggatctccaattggtaaagtttactaaaagtgtagtgttaaactttagcactgtggatccaaacattctcttaaacaactgtaggatcgacaaacatagttcgccaagatatcgctcactagatttcatataatcattccaccttcacctttccatcctccaatttcagttaaatccatgaacatataatttggacacggaaacatacgcatctctctcgtgattcttaggtgcatggtaggctgaaaataaagaagagtgcatttgctattggggcaaaagcatgcatggctttcacattcttgaaagctatagggttatcccaggcatagctagctagagaggaggttgctcaaaggtataaactttaggaaagcacatatctttgtgcaaataaagatgagagaggattaaagcaaaactagcaatgagattcctatgcactaggatccaccaggtgtgctgcatgttctagataatttcttctcgcatgcacggaatcaccaagttaaattgaaatagaggtctttacacatccgtataaaactcaagtgcaagtgaaattgaaacagttcaaacgacctagatggaaactcatcaaggcatcaggtaggggtctatctacgacatgcatggctgtccatgaattgtaaaagaatggttggatgtgcaggatttaaaattgaaataattcacacacccattttaattccgtctttcatgcatatgtgatatgtctggcactctggctagggtaataataatggatcacgatctggatcatgcaaatgtttcttcagattcgtttggtatcttaattaattttagttgaaaaatgaataaaaatagagtcaggtcctaataggatctgat

SEQ ID NO: 64342 - DNA, 422 bp, Zea Mays
taacttttaatttataactccaaattgagcacataaatacttgttggaaaggtaagacaaagttctacatgatccccaaactgatttccattaatttctcacgaaaaacaaccagaaactgctagaactactgctgttcatccaccacctaaaattctggacagccccctctacccaatcgcaaacgcaacctctaatcaattgaattgcagcgcaaatgaacaagggatgaacacaaaaatcaccttggattctccccctttccttcctcccttcttccctccaccaaaacgattgaagattcgcaccacgtgacgatgatccgagcggcgaggattggcaccttgggaggaggagattgggggggggcggctagggtatggtggtgtggctgcaaggattgagagaggaggagatgggag

SEQ ID NO: 64343 - DNA, 233 bp, Zea Mays
cacccctttggccgcccctcccctctctcttccactcttgcagccgccccaatccctctccttcttccccaagtgattgcaacgccacccctcaaccctagcccccccacctcttcctctccaaggtggagcctccccgcttggtgtccgtcgtgtaggtgcgagtcttccatgggagtttcgagggaggaagaaggaagaaaagaaggaggaaaggaggaacccaaggtgat

SEQ ID NO: 64344 - DNA, 241 bp, Zea Mays
gaggggagtagcagcacgtccactttcactctcacaataacgctgcccaggcgtagccatgatttaattagaaacttattgtcaaaggaagtttgtttttttaactagtcgtgcgcactagttaattcacttcatgtcgtatgtttaactcctctttgctagccgattaataatacttagtatgttttttgtcatgatatatgtttatacactgttgccccctcatttatgcaattttgca

SEQ ID NO: 64345 - DNA, 446 bp, Zea Mays
atcactagtttgccttgtttgaagtccagatgagtcttttcgagtgccggttgatctgagccattggatattaggattgtggaagtttccttctatttatacctccctaaccctagaatccacgtcctcccacccctagcagccgtcacccttttgtgccttgccccaagagatgagaggaagaaaaaaagaagagaagagaggggagatgagggcataccgtcgctcatcatcgtcgttcctctccaagaattggttggatttcctttcctctctctcttttctccacttgatgaatgctttctcttgttttggatgagttttaggccctgcaattagtttttttggttggattagatgggagattagattttgatctcgaaattagtttctgcaggatggcagattcaacagtttctgttcatgccagttttccgtgatcttag

SEQ ID NO: 64346 - DNA, 239 bp, Zea Mays
atcaccttgggttcctcctttcctccttcttttcttccttcttcctccctcgaaactcccatggaagactcgcacctacacgacggacaccaagcggggaggctccaccttggagaggaagaggtgggggggggctagggttgaggggtggcgttgcaatcacttggggaagaaggagagggattggggcggctgcaagagtggaagagagaggggaggggcggccaaaggggtggggg

SEQ ID NO: 64347 - DNA, 1318 bp, Zea Mays
ctcactcttgcattactcaatgcaggtacttgatacatgttgggaatgaggggagtagcagcacgtccactttcactctcacaataacgctgcccaggcgcagtcatgatttaattagaaacttattgtcaaaggaagtttgtttatttttattatatggtcgtgcgcactggttaattcagttcaggtcgtatgtttatctttccttgctagccgagtaataatacttagtatgttttagtcatgatatatgtttatactctgttgctccctcttttatgcaatcttgcaaaggggatgctgccaaaattttatatagatgtcagaagtgtagttcagtagcattccagggtgtttgtggaccccggggtgttacacctctactaactcttgagaaactaaggaaggtccctgctggtattaaaaggttgcatgactggtacatgcgtgcatcatcagttggcattgacgccattaatgtgcatataccagaccatccttttattggttcggaccaagaggcctttcttgcattcgaggatatgtggttaatgatgaacctttagaaactcgacgtgcaacttgtgactctgtttgcactgtaagtgtcgctcatatttccacatatatgtgttattattattagtgagccgtataaattgtcaatatctgacacatgcacatgtgacttgtagaatgcaacatgatcaacaagagatcctttaaggtaccaagcccggtgctagtgtcagtaaaaggtttgggtatctgaacccaatactgatatctaaggaaagccacactttcagaatcgacaaagacaatgaagagttaaagggaaagacagacgaagaagttgaggagcgtataaatactatgaagaaggattttgaagcaagatacgccacctacatagaaaatgtaatgcttaaatttcaagacagggaagccataatggccccgtacaactttaagtaagtgtgattttgcataaaaaattaataatttcaatacacaagcatcacaaattaatttgattcgtacagggaccactggatatatttcctcgtttatcctaaggttggaaaggtgctggtgctcgactccatgaactacgacccttcaacctatgcaaaattctttagtatcttagagctgtaagccttttctatgcatgcatacttatatcgatgagaattttaaaataacatggagattctacttgagatcacagagcatttaggttctataagtttaaaggtggaaagtacgacaagtccaaaaaatgtgtggcactagacatccatcatcactggcc

SEQ ID NO: 64348 - DNA, 358 bp, Zea Mays
gaaatccggagaacttgaccaaaggtgcattgtatggtatagttgaagacctatgcacattcatattaaaagaggtcattcctgctgaagggaaatatcacaacgcttccagtacattagctataccagagtttagaatattaacataagttagtagactatctcttaaatgagatagttactagagcataggtgaaaacaattgatgtatagaatgtgtgaagcatatatggttgtaaatagaagaatttgatgtatagaatgtatgatagaatttaatttagttttgtttgaaaatttatggttgtaaacagaagaatatatggttttaaacagaagaatatattgtaaacagaag

SEQ ID NO: 64349 - DNA, 851 bp, Zea Mays
agctcttccaactatagagacttttgtagagggataaacgttcttacttccagtagaatttcataatttttggttgtgcagtttggaagatatggaattttgaaattaactatgctgctgtttgaaacagattcagtcagttatcttgtcagatgttttagaacttatatatggcaaaatttaattatccattgaattccgaagttgtagagtattttgtgtagaaactcctaaagtatttgtttgatatcaccactgttataattttaaagatacaaaattaacaaacagcgctgctgctgtttggcatctggttcagggtgggagtcattccaccgggtcttcgtttcaagtgtaggagcgatttcttgattgttggcaaatgtttgtaaaatatttgtactaagttttatgccccgcagcaggtgtctacactccagatcatgcctagtacatttatcttctttgatgaaggcaagtgaatgtagcggtgattgctaccgttttgacttgttgtttcatcgcctacactctaatattcagaatcgtcgaattctttcataattgaactctatggtgatgctttacttgattgtattatattgatgcttaatcatatattgacgatgatgatgattcgagtatgacccacgagattaattcacacccctgaaggtaaatgaagtattatttgaggtttgtattgtatgtgaaggaagtgaagtattttgataaatgcagcatgccatatacattgcatgattcacttgcatatgaagttttggtcgggacctatggtccgaccgtaccggtacaacttagcatgtacgttgcccgaggaggggtaggat

SEQ ID NO: 64350 - DNA, 393 bp, Zea Mays
gttattttgagactattgagttcatatctacaagtatttctgatctcaattgtgatccctttaaaatgttgattaatctaattttgtttgtttcaatatctcgtcaaaacaatttacttgctgagatgtttcatctcagtcttgcattactcattgcaggtacttgattcatgttgggaaagagggaagtagcagcacgttcaccttcactctcataataacattgcccaggcacagccatgatttaattagaaacttcttgtcaaaggatgtttggttttttaactagtcgtgcacactagttaattcagttcatgtcgttatggttatcttcccattgctagcatattattaatgtctagtatgttttcttatcatgatatctgtttatac

SEQ ID NO: 64351 - DNA, 1813 bp, Zea Mays
caacccctctcaagcagtccaaagacccacttgaataccacagtgttttgcattgcttttcttaatcccgttcgcgaggaatctccacaacttggagcctctcgcccttacacttaaagttcacaaagaagcacggagtaagggagggataagcaacacactcaagacaagaaatcacagcaacaccacgcacacaagtcgcaacaagagctcacaacacaactcaatgagttcacaactcaactagagctctaattgctatcgcaaagaatcaaaggcgcggaatcgatgtcttagtgcttaggaatgctttaagaatgcttggtgttctcctccatgcgcctaggggtcccttttatagccccaaggcagctaggagccgttgagagcattccaggaaggcaattcttgccttctgtcgcctggcacaccggacagtccggtgcacaccggacactgtccggtgcggatttctttccttctgtggcgtactcgaccgttggcgcctgggagccgttggcgcaccggacactgtccggtgcacatcggacagtccggtgccccctcccgaccattggctcgaccacgtgtcttgcgcagattgcgcagccgaccgttggcccggccgaccgttgactcaccggacagtccggtgaattatagccgtacgtcgccgatgaattcccgagagcggccagttcgctcgagccagcctggcgtaccggacactgtccggtgcaccaccggacagtccggggcacccagactgagcagaatcttggctgctcgagccaagacatttccaattgaatttttcctgtttccagcacttagccataatacattagttcataaaataatgtactaagtctagaaacataccttttgacatgatttgcactttgtccaccatattacatagatcaacacaaaagtacttgcgttggcactcaatcaccaaaatacttagaaatggcccaagggcacatttccctttcaatctccccctttttggtgatttatgccaacacaacataagcaactagaacaagtgcaatatcaatgcaaatgaaaactcaaatttgttttgaatcaaatttggcatatatggatcattctttgccaccacttggtttgtttttgcaaatcaaacttaatttcctatctctaagtcaaacacacttgttaagacatgaagcgagtcattccaagataaattgattcaagatttcaaaaactcccctttttcccataatcaacacttctccccacaagaagccaacttttgacaaaaagagccaataagagtattttgacaaaacaaaagctctattctattattttcaaaatttctcaagtggtagctgatccatttattgctttggcctttattttctccccctttggcatcaagcaccaaaacgggattaatcgtggccccagaaccccattgcctcaccaaaatcttcaataagaatataaaggcaataagagtgcatgagatgaacttggaataagttactcgttcatcggagtgcagtggaagtcttgcatggtccaagtccaccttttccctttcaatcctccttcgagactaaatcaagcaaactcaagcacatagttagtctcaaaggttcaagttgtaacacatctccccctagatatgtgcatcacttttgcaacgaacttgagaggtccggggagtgcttgtacaacttgagcaccataattaagcaacaaaatgcataaggaacatgatcaaaggcataaacacatgtatgctataaatcaatccaagttccgcgaatctaag

SEQ ID NO: 64352 - DNA, 1419 bp, Zea Mays
catttcctcgaacaaccacaataggttgtataacacttccctgcattaacaatacctgcaaatatcacttcaatgtatgcataggaatgcaatgtgtaggtcctctatcttcatacctctgagggtataaaaccacatcatctgcaaatatcacttcaatgtatgcatatgaatgcaatgcatatgtcctctgccttcatacctctaagggtatgaagccgcatcgtacccctcctcgggtaacgtacgatgctaagttgtaccggtacggtcggaccataggtcacgacaaaacttcagatgcaaatgagtcatgcaatgtatatagcatgctgcatttatcaataaatttcacttcctttagatacaatacaaacctcaaataatactttatctgccttcagatacaatgcaatcctcaaataatacttcgtatgcctttagatacaatgaaaacctcaaataagacttcatctgccttcaggggtgtgaattaatctcatgggtcatacttgaaccataataatcatcaatatatgatagagcatcaacataatacaatcaagtaaaacatcatcatagagttcatttatgaaagaatccaataattctgcatattagagtgtaggtgatagaaataacaggtcaaaacgatagcaaccaccgctacattcacttgccttcatcgaagaagaaaaatatactaggcatgatctggagtgtagccacctgctagcgggcataaaacttagtacaaatatttcacaaacatttgccaacaatcaacaaaacactcctacacttgaaaccaagacctagtggaaggactcccaccctgaaccacatgctatacagcagcagcgctgtttgttaattttgtatctttaaaattaaaacattggtcatatcaaacaaatactctaagagtatctacacaaaacaatctacaacttcggtattcaatggataattaaattctgccatcaatatattctaaaacatctgacaagataattgactgaatctgttttagacagcagtctagttaacttcaaaattcgatatctcccaaactactaaaccaaaaattatgaaattctgctggcagtaataatttttatccctctacaaaagtctccatagttggaagagccaattcggccatttactagatgaaacccaccagtgaacagacctgctcatttttgtcaggcaaacaggaacagccacagtaaaacaaacataactggagtttgataaatcatatgaatatactctttaacaatctggaaagattatgaaattatctacaacttcttttaccaacccacattttaattctgttgataaaattgcctaactcttaagagaacagattctgcacagaattatgagactgaaaaactgctataatcaaac

SEQ ID NO: 64353 - DNA, 300 bp, Zea Mays
tcttgccttctgtcgaccggcgcaccggacagtgcggtgcaccaccggacactgtccggtgcggatttctttcctgttctggcgcagccgaccgttggcgatttggagccgttggcgcaccgaacactttccggtgcacaccagacagtccggtgcccccttcagaccgttagcccggccacgcgtcacgcgcggattgcgcggccgaccgttggctcaccggacagtccggtgcacaccggacagtctggtgaattttagccgtacgccgccgatgaaatcccgagagcggccttttca

SEQ ID NO: 64354 - DNA, 566 bp, Zea Mays
atgatggtgagactgagacttagacgctcgagcaaccagtcaatgggatgcgaccgtggtgaactacatcaatgagggcaatacacgacaacaatacttcattgcaacatatgcaaggaagtgcgagcgacagacaagtggcactacaacgatgggaaaacgcgacgcgtagcgagatacgtcgagctagcccctttttctttgcaacagtagcttgagcagtttctttcttctttttttctttttcttctcttttttgttttttgttttgtttctttattttaattcataattcaaattcaaattgaaacttaaggttcatttcaaatgtatcactcaaactccagcatggaatgcataactttattttaaaccattatttattaatggatatcaccgtgtcaccttttcttctccaaaaatggtttagttgttcttgagagctttcctatgacttaggcaaacttatttagaccattaccaactggtccaagtcatagattcatacatgtagctcatctccaacatataagtcctattctagctcaaacttagcccaaaatgac

SEQ ID NO: 64355 - DNA, 117 bp, Zea Mays
taaagggtcctagatcagcaggccaacaatcggaacggtccttaatcgacacagacgggcgacctttcctgctcaacgtctggtctcacattaaattatttctgaaaacccggtacc

SEQ ID NO: 64356 - DNA, 2038 bp, Zea Mays
atgttctgtttcgtttgttcatgtatggtaatcatttgttcaacatgtgcagcagcatctacatgtggggcgttggcagcattaagtgaaatcaaatcaataggtgccctagggatgtaaccataaacaatctggaaagggcacatctttgtagaagaatgcgtggcatgattgtaagcaaattcaacatgaggcaagcaatcttcccaacgtctcaaattcttgtctaaaacagccctaagcatggtagataaagttctatttactacctcagtttgtccatcagtctgagggtgacaagtagtgctaaacaacaatttagttcccaatttattccaaagagatctccaaaaatggcttagaaacttagcatcgcgatcagagactattgtttttggaataccatgtaaacgaataatttctctaaagaacaattcagcaacaatgctagcatcatcagttttatgacaaggtataaagtgagccgtttttgagaatctatcaacaaccacaaaaatactatccctccccttcttagttctaggcaagcccaaaacaaagtccatagagatatcaagccaaggagaagaagggacaggcaaaggcatatacaaaccatggttgttcaaccgtgacttagctttctgacaagtagtgcagcgtgcaacaaggcgctccacatcagcgcgcatccgaggccaaaagaaatgggcagccaacacctcatgcgttttgtagacgccaaaatgccccatgagaccgcctccatgcgcttcctgtaacaacaaaagacgaaccgagctagctggaacacacagcttgttagcgcgaaacaggaacccatcctgtatgtgaaatttgccccatggtatcccattaatacaatggccgaaagcatctttaaaatcagcatcgtcaacatattgatccttcacagtgtccaaaccaaagattttaaaatctaattgtgacagcatggtatagcgacgagacaaagcatcagcaataacattgtccttcccgttcttgtgtttaataatgtaaggaaaggactcaatgaattcgacccatttagcatgacgacggttcagatttgtttgagtacgaatatgttttaaagcctcatgatcagaatgaattatgaactcacgatgccaaagatagtgctgccaagtatgcaaagtgcgcactaaagcgtaaagttccttatcataagtagaatatttcagactagcaccgcttaatttttcactaaaataagcaactggttttccttcttgtaacaaaacagcacctagcccaataccgctagcatcgcattcaagctcaaaaactttattaaaatcaggcaattgcaagaggggagcttgggttaacttatctttcaaagtgctgaacgctatctcctgcgaatcactccaagcaaacggcacatctttctttgtaagctcatgtagaggcgctgcaatggagctaaaatcacgaacaaatctgcggtagaaaccggcaagtccaagaaagctccgaatttgtgtgaccgtcgtcggtgtaggccactcccgaatggcagcaatcttgctgctatccacctcaatgccctgcggagtaaccacataaccaagaaacgagacacgttgcgtgcaaaatgtgcacttttccatgttaccaaacaaacgagcagcacgcaaagcgtcaaaaacagcacgcaaatgttctaaatgctcctctatagacttgctgtaaataaggatatcatcgaaataaacaacaacaaacaaacctatgaaggcccgtagaacttcgttcattaaacgcataaaggtgctgggagcattagtcaatccaaatggcataaccaaccattcatataaaccaaatttcgttttaaaagccgttttccattcatcaccgagtttcattctaatctgatggtaaccgctacgcaaatcaaccttagagaaaataacggcaccactaagctcatctagcatatcatcaaggcgtggaataggatatcgataacgaactgtgatgttat

SEQ ID NO: 64357 - DNA, 758 bp, Zea Mays
gaacgagtaaaacaggaaccgagcaagggctaagagactcacgaatgtaacccttatcaagcagcgtctgcacctggcgctggatctccttcgtctcatctggatttgtacggtacggggcgcggtttggaagagaagcgccggggatgagatcgatctgatgctcaatgccacggaggggaggaaagacccggtggtaagtccgtaggataaacatcagcatactcctgcaaaaggttaacaacagcagggggtatatccaaagacggtgcatcatcaagcggaacaagcattcgcgagcatacaagtgcataacagggcatatgagcttcatggagatcatcaaaatcagcacgtgtagcaagtaaaacaggagagtgcaacttgatttcagatttaataggtgcggctgatgtcgatttgacttgttgtgcagttttagcagccctagtaagatcatctttcaaaatttggtcaggggtcattggatgtataattattttctggcctttaaacatgaaagaataatgatttgaacgaccatgatgtaaactatcagtatcatattgccaaggtcgacctaataacaaagagcatgcttccataggaataacatcgcaatcagcataatcagaataagaacccagcgaaaaggggactcgtaccgaacgtgttacctttattttaccaccatcattaagccattgaatgtgatacggatgtggatgtgtgcgagtgggcaaggataatttctctac

SEQ ID NO: 64358 - DNA, 586 bp, Zea Mays
cttaaccctgttttgtgaatactaattatggtaaacctcttttgccaattaaactaatggcattgtgtattatttgcctacatgatttaactgtttaagtttccagtatgcaatgagttgttggatcttattgttattgtttactgaaactattccaatagtttataataccaaaactattctgagttgttgggttagtaagagcaactccaacaacctctctaactcattttccaatggtaaaaaatgaaaatcagtagaagtccgttccaacggtctcggtaaactcctccctcgcaaccccgctcgacattccatcccctcgcctcgcaacctttggcgagctcctccgcctcgcaatactagtgattctatgtatctaaatattttgtcattaaatgtattcttcctcaacattgcatgcagcatatttgattattctcctctgactagcaattcaatatatacagtaatgctgatgggaacccttctctatagtgtgaagtacacacttccagagtatttttgtacctttcttgttgctggcggtgtgtcctcctttgcgttgttgaaggtaagatgatcc

SEQ ID NO: 64359 - DNA, 398 bp, Zea Mays
cgcaaatcgatcctagaagtggactgtgagttagacgagcctaacacgttcgaggacgacccgcaggacacgttcgagcaaggcaagtggattctccctctgcatattctatttgtacccaattaatgcatttaataatatttacttttttgatatattgcataatttgatgggattcgcctaattaaggattttctagatttatcaactgtattccttgattaccatgggaaaataatatgctttgcaaatttgtgctaccgcgcaacctgaaaattttgatgtcactcattatttgatattaatgttccggaaatgaaattggcattatagtgttaacccgatggttaaacaatattatttcatattaattggaacattgagtgaccacccaggac

SEQ ID NO: 64360 - DNA, 442 bp, Zea Mays
gaaacttaaaaaatataaaagatatttaagattatatatataattttaaaacttgaaaatttatatcattataaagtgaattcattatgtgtaaatcataacaaataacaatgtataccacgtgcatatatcacaatcatatctataaaccacatgttggtgtaaatcgtgtctaatcgtgtcggacagttaatcgtgtcatcctcatgctagcttatcgtgtcggggtagcggctcaagcacaacactagattcgtgtcgtactgacactgacactatatgaatcatgttcgtgatgtaccgaaacactatgggccgtgtcatgcttagtgccggcccatttagcacgactcgtttaactatctatctatatgtacagtgagacaatgagtgtggcgaagctggcagcgttgtacatgccatggtgggtggtggtctcgtg

SEQ ID NO: 64361 - DNA, 204 bp, Zea Mays
ggccaatgaaaaggccatggcttgacatcaggatataccatcgtagccggcactaggggaacattataaaaccattagcactcctcgcaacctttgtagtagagaaaacaatcggtcatcatggtaggccgataaaaactagatctccatgatactcacttcatcttcgggttggttcatgtgtatggacttattgaaagggaa

SEQ ID NO: 64362 - DNA, 441 bp, Zea Mays
ggatacatgacaaatagctgcgcttcgttaacttgttattaatcttcacgtagtgcaatggtgtgtcgtctctttgggttgcctggtgtgctgggtttgagtcctctctgtactcgtttgttgccctcgtttttttgtttttttccttcggaagagtttctctttgttggttcgaacattagattttttttgtttttttccttcgaaacgctagagtttctctctgttggttcgaacactagagtttcagattgctatttcaaatatattgacgtccattttccttcttacagtatataccttcaataaaatgtgtaaagtatatgtataggtttctttgcaacacattagtcgtaacactattttatatgtgttacaaaacaccaatatcttcgtaacatttcaggtgtaacactaattttgtgttactgtaattgttac

SEQ ID NO: 64363 - DNA, 1094 bp, Zea Mays
aagacaacatatataatcacagagtgtatagagataaatgtcacaataatcagagcacttattacatagcggaagtcttacaaaataaatgataaatatagcaggatctaaaatccatccttggcgccagaaagtcaactgggagacgccacctagatcgaatcgaactcctcgttatggctcctcttgaaccacctgttcttctcttgtggggggtgtgagacagcaagagtgagctcacatacgttcatcgctcaacaagttgtggggaataatgtgcatgaactcgccaaaggtgagagctcatgaagtgtaaggcttatcaaagaaaatggttaaagctgagcattgcttttaatgttggtcaaacttttattagcaattactaggtgtaagtaaataccaaaccttaataaaagtaatagaacaaaattaataaataatcccatgcaaatgcaaatgacaaattgaatttaggttccataaattaattatgtgagggtccgagccgctcatgaccatgagcacggctagtatactagttttacactctgcagaggttgcgcatctttacccacaagtcgtgttacccacctgccaaggggtcatgagtctcatacacctctaccgaggaggcgaggcagggtaacactacgaggcctttacaaagttccactagcttcagaaatcccgctacagtttataggaagctccaatgcaggaatcccttgcaggaccgccatcgcagcaaaatcctcccgagggcctccctacactgaccactcccctactgcccttgcccctttcgggtaaggaagacctccactagctttcctagttaatcagccaagggcgtcccattaaacccttgtggtagcactgttttcccgggtggtcgctccatgttccaattaacataatgatcttatcatgaacataaataacataacagaataattggaacatggatgtaatgaaatattaacccaaaaaccatataaagcaatagcataactacccaattgattcaggggtaaacaaggtaaacaggataaacaaactagggtaacctattgggtcccatcaaaattaac

SEQ ID NO: 64364 - DNA, 793 bp, Zea Mays
gatggctacaccccgatcacgcgaaccattatgcctatctctaatctcatccgtcgattgcgtatccaatgaacatgttcggcccacgctcctaccgcccccagcaacggcagcacatccccgatttgcagcggcggcatgccccgaccacggtggcaccataatcgacgattctagttcgacgaaattgcacatcaatccgtattacatggagcaggagacttggagcatgtcgaccaggtaacgtaccgaaggtttaggcggccacaaagttgttccacggcggacagcgggtttgcggcggagtaggagcaccggcgagaaatcgcgtgcaccctagctcccaatcgcgccagccgagggagccgtgcgcaccaacgtcgattgcaccagcggcgaacccgaaggtcaccggcgagcttggtcctttctctctctttgatggagttcggtgtgactaccccaatggtggcggtgacgcccagcgcccaagagacggtcgaggcaaagcgagaggtccgatcccagctatttaaaggggaagaatctgttgcggctagcagaggcgagaggaaaacacggtggaaggtgtagccaccatggatttggttgaacggactagtacggaggaatcgaccggaatcacgcgcgagctgttaggatgcagttgggttcttcggatggtggaagaaggcgcgcgcgcgaagataggggagatgatccgggcgaccatgccgtgtggatatatagcggcgcggacgttccccagccggccgaacaccatggaatggtt

SEQ ID NO: 64365 - DNA, 270 bp, Zea Mays
tgacaactgccttcggcaccagtgaaaaacgaaggttaaatcgtgtgatggatgctccgaattttgagtacccatattacgagagacttgacgaaggggccggaggagataaaaggaaaagagttgttagcattctgaatagacaggccatccggtcagtcaaggaagaccagaaggctatgaataagcaaaaaactctattggcgccaaaggattcggctcccaagaaacgaaagctcgtcaggatatctcctatagagacaaaggtac

SEQ ID NO: 64366 - DNA, 372 bp, Zea Mays
gttgaatgttgctttgatttgttaatgcatgactggctaacagaatctgagctttgagtttgccaccagagtacattctagtttgagtccaccataatctcaaagtaacataaataaagggtgtgaggatgtgaaaggccaacatataagttttcctctcctaaatatctatggcatttcattagccaccctaacttgtttggggcttaaaggctttgttgttgttgtattccaggatatgcatagttcctccaagtaaaatcaacacgatgaaagttccaaactatcagtttcaatgtgtttacctgcacattaccgatcagcaatgcaaacagaactaagcctgatatcgagacaaaaactgcgaataaa

SEQ ID NO: 64367 - DNA, 1439 bp, Zea Mays
taaggacaaatctagatgtatcttacatgtgtgtcacaatcaagtctcaaatatatgatgactcagtgtacagaaatcaatatcataatatatactccctctatcccaaaaaataaggcatatatattttttttggaaaagtctttaaagtgaaactttgaccattaatttattttaaaatatgatatcaacaaatacaaattaagcatcatattaaagtatttttaatacaaattcaagtatataacatgcatacactaaaaatatttttttgctgaattgttggtcaaagatttacaatgttgacttttctaaaaacatgtgtgccttattttttttggaatggagggagtattacataatgaattttctgtataaaataactaaataaaataatcatatgatgacaacgatcctctacaatcatagttgactgagagacggtacctgctcttgacctaatgtgattatagtaagagtgagcatccatacggttattgcttagcaagcgtggagaaaagtgtgtatgagctcacttatggttggggctcaagaagtgtaatgtaaggcttaccaagggaaatggctgaggctgagcatagcttttaactttgttggtcaaattttaatagcaattactaagtataagtaaatatcatcccaattaaataaaagatcatggatgaaatacccacaatgaaatgtcgtatgttcggtttaatttaattctatcatttactcatgtgagtgtctgagccgctcttgaccatgaacacgactgatataccagttttacactctagaggttacacatctttacccataagtcgtgttacccatttgtcaagggatcatgacttcccattaatctctaccattaatctctaccaaggagaagaggcagggtcccacacgaggcctttacaaagttccactagcataagaaaatccgctacaaattcaggtagaagcaagtgtaggcctttttccacggtcgtaaccccatcgtagcaattcatacacacaaaaaaatatttgaaaaataatttctagtatataacgttttttgggagatgctttaacctaaatcctttagtgaacacacacgcacacacacaagatctccgtgcgtgtagagtcatggcaatagagatgtagaagtatagacagggggagaagagagaggtctcctagacatgagtacatgtggtgtgacttggtgctatataggcgcactaaacctgaacatgctcttgattggtcttcaatctgcggtataataatcacaacacatcgcatccgatccaattaaaccatctatctgtctcgactcggctatgagcgagcgtgcacatagtcttctttttcaactttactagcatatagcatgtgctaacactacgattctggagagaggaggagaggggtcgacagtggca

SEQ ID NO: 64368 - DNA, 370 bp, Zea Mays
tgtgtaaggaaaatattatatggtgggttagaaagtatgcataatgtgagacatgtggatttaaggtccatttgatagacctagctaataaaatagtttaaattagctatgatcgactagatagttgactaacaaccacttgaagagttagctaaaagaattagtccacttattagctcttcggcctagatacacattgcacttttgctaatttaagctaaaaattagtgtgaacacatggttgatacgtgtccatggtgttcagtgtatgtttgagtggttatcaaggaggtgatcaagggtttgatttagtttaatactaattatggtgtgaacatggtttgtgcaacatgtctcttcgcttattttg

SEQ ID NO: 64369 - DNA, 306 bp, Zea Mays
cgcatatccacagtgcatcgccaaaatgccacccctttcacaaagagttttctgaggtaagcgtcatgctgccctgatgtgatcttgattgcatcagggcagtatggtgttatcaccttactgccaaaagatcttatccaaagtgttgttgttgacaatatatgctagttatcatgtgtagtttcaatctactttttatgtcaagcttcatgttattagattgatctctcgttcggttgctaaactcaatgatatgtgacctcaacatgtgcatgcgataacttaagaggacgatatgtgtctggc

SEQ ID NO: 64370 - DNA, 1002 bp, Zea Mays
gagaaggctcaggataaattccttatcccgctatttaaaacaccatttaaaacgatcaaaatgctttaggggctctatctatctttctctatacctaactcctctaatacactataacaatatattctcttcctaatattaaaggccaaagtatttcttccaaatcaattttattcctataataacaccatcttaccactagtacaacctacgttaagggcatatgcaacccaacgctggttcggttttccaagtacaaaaaacagctaagagactgcatatggtacaaccctgagactttatatcataaatacaattaagagacaacatatatggagagtggtgaagagataggctctttgcggaaagcttgtttcttgaccttttcaaataaccatttagagacacctcaagagacccccatattaaatgggcttgtacatgttcccctgagacttcgttttggttttctaagtacaagagacaactaaaatactgtaagatacaaccctgagactctgaatcataaatgcagttaagagacatcatgtatagagtgtcgtgaagagacatcatgtatatagagatttgtgaggtccggggatgactggtacaacttgagcaccatggttcggtcaagcgtaaaatgcttgcctaatccatgttgtggtgtcgcagtggacgagagttgcactcaacctctctcgagtgatccactgatcaacttgagtaccatgattttctttcttatctcaagattttcccgttgtgaggaatctccacaaattcgagtctctcacgtcttacacagttgatctcaaataaaccacaagagtaaggaggattagaaacacacacacaagagacaaaatcaaagcaacacacgcacacaagtcgagagaggagcataagagacaacacagcggaattacagctcaaacacatgctcgaatctcaaactatcaaagcttcaccatggtcgcagtgtatcagtgtcgtagg

SEQ ID NO: 64371 - DNA, 1675 bp, Zea Mays
gttgttttgcgcagtgtcgcgcgtcctcacacgtcattctcgtgtgccgcacatgccatttttcgcgtgcgtcgcgcatgcccttttcgcgtcgcgcaccttgtcgtgcgtcgccacgcgtcatttgcgcatgacgcacgcgtcgtttttgcgtgtagtgcacattgccgcacgttgttcacgcatgtcacgcgtgtccgtgcgtcgttcgcacgctgtcgtgctgtttcgcgcgtcgtaaatttgcctcacttagattctctcgttttaattaaattatttacttaactgacattggttagtgtagcagattaatcaagctaaatgatagatattatttatatttgataacgtcgaattaaatactatagttaatacttgtttagcgtaaacgcgctaacccctcgaccgtagctcttactttcgtgtttcttatcctcgcataactgtaggagcgctctctattttatattgctcgcttttataacattttatcttgtatggtgtaatgttcttatgcatatgtatatatttgtttgcttgtgcctgttcatcttcgcttcgcgttgcgattagatcgtgattcgtttctgagcttcgaggaatcgacggtcaagcttcaacgaccaaatgacctagttcttcgagttcctcgagattgaagaccctgaacatatgtttggtgaaggcaagtgtcccttgacctatctctgtcctatacattctttaattcacctcccgcattacacagttatacctaaggatttactagcttttgttatccatgtccttgtttacctatctgggttggattattattgtttagctttatgctattgctcagctctaatcaatgaacatgatgagatttatcaatgatacgttgtttccccccctttattatgatgttatacttgtgaccttcaagggggctcgagcggtttctcgagtgcctctccgtaaggacctgttcgttggatgaccgcccagaaaaacagtgcaaccatgagggtggaatgggatgcccttagctaaataattagaggaaccggggtgtagctcgcttagccatcgtgccgtcaatggggctcagtgtatgcggctcgctctgccaagtttgggttcgccccttggggaggagtgcggtgcatttaggaaacctaacgggtggctacagctccggggaatctttgtaaaggctacgtagtgatgccctgctgggtcaccttggtagtgatcaatggagagtcatgatctctgggcagaaagggaatcacgacttgtgggtaaagtgcacaacctctgcagagcgtttgaaaactgatatatcagccgtgctcacggttatgagcggccaagggagctccagtgattagtggtacttgatcagagatgttcggattgcaggtggcaatgagattgatggttcttggtattgacactggtaatggtaagtggtactctttccatttggaaaggagtacgtttgggttaataacgtgggttaaatctaaaacttggctttctctactagtaataataatctgaccaactaaaagcaactgcttgacttacccccacataaaagctagtccactacagccaaacaggatacttgctgagtatgttgatgtgtactcacccttgctctacacaccaaaccccccccatcccc

SEQ ID NO: 64372 - DNA, 277 bp, Zea Mays
gaaatacttaacttgtgaagtaaaagtttggcataaggatccactactagtgagcttttctgcaaaaagagtctttgaaatttgataagctttaccttgattcccaacaagccagcatatccttgagagtcttttctttagtcggataagtcttgctgagtaattgcgtactcagggttttattcccattgttgctgcaagagagactattaacacctttgagttttgttaaactcacactgaaggcttttacttttgtttatgtttattatgtgtg

SEQ ID NO: 64373 - DNA, 865 bp, Zea Mays
cggacactctcctccccctctcctgagctcaatcgagccagcgccaccgcccttccccactctagtgagttctctccccctccctctctaatagcccaacgacaaattaaactatatatctagcaagcttcacaaccttaccactgtctacagatgtgtatgaaagaagtgatgaagattggagaagacaatggataaaagaagccacatatgagtaagcaaaggctagaaagggaagggaggctaccttatcagtttctccggtctatctgaattcaacacatgtttggatctggcgatactagtcatgacgacaggccctctcaccagcctaagttgaatcgagagagtagtacgtatacatgcggatgtggatacaaacatcaaataaatttcatcttccaaaaataaatccagtccaccaaagccaaagactcgtgcgtttacccgagtatggttctctgattgtctccactccaccaaagccaaagtgtgacgcacggacgccgctacttcctgacgtgcgagctgcgtcatgaacagttgaacgtgttcattcttcttggtgcacgtcgctatgccctgtacttttccctttattatttggttaaggacacagatcgagtatcaccgagactagggctatggcggagttccttttgggctatggtggagttccttttggcgccgatggataaaaaggtttggaacggaatctctctggacatctcaactactgctagctagtagctaaagcctaaaaatctagacttcggttaagatgctttagcagacatccaaatccatggacgatcgggaccccaagcacagtttacaaaaccgttttatataataaaaccgctac

SEQ ID NO: 64374 - DNA, 145 bp, Zea Mays
atcgcaggtgttgttattaaattttgttctactacttaattgggttgatattcacttatacttagtaattgctaataattttttgatcaactttaaaagcaatgctcagcttcagccatcctctttggtaagccttacacttcac

SEQ ID NO: 64375 - DNA, 232 bp, Zea Mays
gaaagaggaggaggagcgcgggcgcgagggggaggcggccgcgggtttgggccaggaaccggcccagcagggggagagggtttttcctttttctttttattttctaattcctatttccttttttgtattttttttcttttgaacaaaatattttgtggataatctaggtgctggaaaatagaatctaagtgaggtgcttgtgatcaaccaaggtgtatgcacatgatgaaag

SEQ ID NO: 64376 - DNA, 126 bp, Zea Mays
cccgcgggcgagatggcgtcggacgcggtggcgagactgttcggcatgcgcgggaggctgtggcttccctgggccatgcagaccaccggcgcggcactgtgcgtgttggtcggcaggatgggcgct

SEQ ID NO: 64377 - DNA, 207 bp, Zea Mays
aagggcacaacttgcctggcacttgagaatccaggtaccaacttgctttacagatgacacgtgtcctcgcgctagtcgtagcaatacaaacaaacatggtatagataaaattaacatcacaccaaacataagaacaaactgaataataatgatctacgcgttgctacgagatcgtgggaacgagaaccactaaaatcggagttacgg

SEQ ID NO: 64378 - DNA, 4543 bp, Zea Mays
caacaattcactaaggcataccgacatagctctgaattctgcttctgcagttgagcgggataccactgattgttttttgcttctccatgatacaagatttcctccaacaaaaacacagtaacccgaagtagatctcctgtcatccagacaacttgcccagtctgcatcacagtaaccttccacatctaaatgacaatttcttttgaaccacagtcccttccccggacagctcttcaaatatctcaaaattctatagactgcatctaaatgtccactccttggatcatgcatatacctactcacaacacttactgcataagttatatttggccttgtgtggcataaataaattaaccgtcccacaagcctttgatatctttctttgtcaataggatctccattttgtgcacatattttatgattttgctcaataggactagaagctggacgacatccaagcatacctgtctcatgtagaagatctaatacatacttgcgctgtgagaggataattccattatgagatcttgctatctcaatgccaagaaaataacgtagttgtcctaggtctttaacttcaaatttcttgcttaaatttttctttagttgggagatattcaaaggatcattccctgtgatgatcatgtcatccacatatactgccagaatagtgacactgcctccagaatgataataaaacacagtgtgatcactattgcactgtttatatcccatattacacatagcccgtcgtagtcgatcaaaccaagctctaggtgattgttttaaaccatataacgattttttcagcttcaatacttttcctttggtctgatcagtagcaaatcccggtggaacctccaagtagacttcttcttgaagatccccatgtaaaaaagcattcttaacatccaactgatatagcggccaatcataattagctgcacaagagattaatgttcttacagtactcatttttgcaaccggggaaaatgtctcatcatagtcaattccataggtctgactatatccttttgcaactaatctagctttgtatctttctatttttccatcaggattttgtttcactgtatatatccatttgcaaccaactattttcttacctaatggataaggcacaagatcccaagttttgtttttttctagagcagttagttcttcaagcatggcctctttccattttgggtccaattttgcttccctccaatcttttggaatagtcacagattgtaaggatgccagaaaaacattatattcagaagatagtgaggtataagacacataattgcttatgtcgtgatcaaatccatacctctgaggagggactcctgcaccagttcttggttcctttcgtaacgcaatgggcatatcatctgatggcaggtcctgaacctcaatctctggagctcgagcttcttcaatttcttcctggccactttcttgtataggagttgattgagccatgtcttctgtgtttgttcgagttctgtacttccgtcttgtatacacttttgagattactctgtcatgtatactttctcctctagaattctgggcttgaggtaaaattgattcatcacttacctctcttctttcctgaggaactggactgcttattactccttcatgctttgtttgtcccttgtctacatcatcttgttcattctcattctccccctcagatgtaactccatctccactaggagtatcaagagtagcaaatagatcactcaggtctgatctttctccataaaaaggaatagcttcccgaaaagtgacatctaaactcacaaacatccgtcgttcagatggattccaacacctatatcctttctgcccacaggagtacccaacaaagatacatttaacagctcgagggtctaactttcccactgaaggtctgtgatctctaacaaaacatgtacatccaaaaacctttggtgggacaatgaattcattctttccatagagcaattcacatggagttttcatgccaagtatccttgatggcatacgattaattaaatgagtagcagtcataactgcctcactccatagaaacttaggcacattcattgtatacataagtgagcgagccacctctaatagatgtcgattcttcctctcagctactccattctgtgggggtgtatcagggcatgacgtctgatgtaatatcccttctttagagagaaaagatctaaattctgtgtttacatactctgttccattgtcacttctgataattttcacatgagtattatactggttctttactaatgcacagaaatccttaaagcagtctaacacttcatttttatgcttcataaggtataaccaggtcatacgagaataacaatcaataaaggaaacaaagtatttcaccccgctcactgagacaataggggatgtccatacatctgaatgaacaagcatgaagggactttcacttcgtagtcctcaagtcacataggaggttctagtatgtttcccaaattcacacgcatcacagactaatctatgtttgttcaccttactcatttcataaggaaacattctactcataacatcaaaagatatatgtcccaggcgacagtgtaagagcattacctttgcttcttcttcactggccactgcagatagtgcacgacatactacttcatcagttcttctcttatcaagataccagagtccattatgacgaaccccagttccaagtcttcttccagtcttcctttcctgaattatacaattttcacgatcaagaaatatttgacagtccaattgatcaaccaaagaacttattgaaactaaattgactccaaaggaaggaacatataatactgatgataaggttatagatggtgtgcattttactgtgccaactcctctgatgggttggaatgttccatcagcagtttgaaccgttttcttatatgaacttggatataacttatatgatgcaaattcacttgacctgccagtgacatgtttagatgccccagaatctaatatccagcttgaattggattttctcatggaaattaaagcatggttttttatacctgggtccaaattatcagttgaagttgacactgcaccttgatcatcagacgttgagtcattcttattctccttcaactttctcaactcttttagttctgaagctggaattgtaattagatcttcatctccctcaggtatagcaacattagctctataacctccgctccttcctccacggcttccacttcccctcatagcacgtctatcactgtttcttcctctcccacgataaggccttcgttgttgagggcaatctcgactcagatgaccttgctcaccacaattatagcatgttctagtttcttgtatccttgtcatcacaaaagctggaggaggtggagatgaagtatcaccttttatcagcttcagtctagtctcttcttgtgccattgcagctatggcttcttcgagacttggaagactggattgatgaaacatactagcacgccttgcctcaaaatctggattcaaacctctcaagaattgaagaacccttcttttttctatccatttctttatccacactacacattcagtgtgtggtagctcaataggatcaaaatgatccacatcagcccacagccgcttcaaagctgcaacataatccattaaggagaggtccccctgcttcatagtactaattctgttctcagtctcagctaatagcatcacattaccagctcctgaatacattttcgacaaggcctcccatattccagctgcactcgtgatagtatccacggagcctgctatggtaggagataaagagctcaacaaccatgcagccaccagagagtttatagcctcccatgttttccagtcattgctcgacttgtcttctggctcaattgattctccagtgacaaaaccttcaagtctctttgccttcagtaataacattgctcttcttgaccacgacaagtagtttctaatgccttccaatttaatgtcatttggcattagctcaattttctggacaggttccatatacgatacaatttccttgcttgaagatggagtctcatctttcttcgctgtaagcagttccaccagcttcccaaggacttgttcaatgccttgttgttcccccattctgctcaatcagcagaagctccagtcactttcctgcagctcctccgctgcctgttcttctcctcctttgccttgtgcccagacagcagccaaacctacagagccgccccctttttttccttgctgcactcaccacagacctctctccgttggccgcctgcacggacttggtcgtctccagcggcgccgctcgtcgctaatcaccagcacccgctacagatcttccaacacgagcagatcctgcgaactaaagaccccgactacttcttgccggtgttcttgccgcccttggcgcaggcgcctcccgcggcctgcaccgccttcctggcagccttctcctgcagcgccttggcgtcgtccgttc

SEQ ID NO: 64379 - DNA, 372 bp, Zea Mays
cccctttccctcctttggccgccaccttccccccccatcttccccaagtgctgcagccgctccctccattctcaagtttgtttgcagcagccatctcctcaaccctagccgccaccccccccatctcctcttctccaagtgtcgttcttcctcgtcggatcttcttcgtgtgggtgcaagtttcaattggagaattggtgggaggaaggaaggaggaaaaaggtgaaactcaaggtgatcttaagttatctatgtttttgtgctacaatccaattggttacatgtttacctatgcaatttggtagaggtgctgtccagaaatttagtgggtgaacgaacagcagtagttttatagatttctgggattttttc

SEQ ID NO: 64380 - DNA, 1787 bp, Zea Mays
gtcatccttgcatttgcagacatttgcattcatgaggaatatatgaagtgtgacattactatgttactattgtggtttctacctgcgaggtgtggtaactaggtgtgttgtacgttgtatacgtgctgcaccttcgtaataagaaggttgtggaatcaagtggcggtaaaacaatgttcttatatggttaaactgtttgatattattttacttgctgagatgtgtcatctcactcttgcattacttaatgcaggtactggatacatgttgggaatgaggggagtagcagcacgtccactttcactctcacaataacgctgcccaggcgcagccagtagttaattagaaacttattgtcaaaggaagtttgttttttatatagtcatgcgcactggttaagtcagttcaggtcgtatgttaatctttccttgctagccgattaataatacttagtatgtttttggcatgatatatgtttatacactattgccccctcatttatgcaaacttgcaaaggggatgctgccgaaattttatttatggacgtcagaagtgtagttcagtagcattccaggttgtttgtggaacccggggtgttacagatctattcggtccgatagcttacataagcatcggcgggagtaagtactgtctagtaattgtggatgactattctcgcttcacttgggtattctttttgtagaaaaaatcacaaacccaagagaccttgaagggattcttgagatgggctcaaaatgagttcagattaagaataaaaaagataagaagcgacaacgggacggagttcaaaaactcacaaatagaaggatttcttgaggatgagggcatcaagcatgagttctcttctccctacgcacctcaacaaaatggtgtagtggagaggaagaatagaactctactggacatggcaagaaccatgcttgatgagtacaagactccagaccggttttgggccaaggcaattaacatcgcctgctactccatcatctggctatatcttcaccgaatcctcaagaagacatcttacaaactccttaccggtaaaaagcccaatgtttcatattttagtctttggtagcaaatgttttattcttgttaaaagaggtagaaaatctaaatttgctcctaaggctgtagaaggctttttactaggatatgactcaaacacaagggcatataaagtcttcaataaatccactggattagttgaggtttcttgtgacattgtgtttgatgagactaatggctcccaagtggagcaagttgatcttgatgaattagatgatgaagaggctccatgcgtcgcactaaggaacatgtccataggggatgtgtgtcctaaggaattcgaagagcccactcaagcacaagatcaaccgtcatcttccaaccaagcatccccaccaactcaagatgagaatcaggctcaagacattgaagatgaagatcaagaggatgagccacctcaagaggaggacaataatcaagggggagatgaagttgatcaagacaaggaagatgatcaagagattcagggtcaaagaccgccacacccaagagtccaccaagcaattcaacgagatcaccccttcaactccatcctcggtgacattcataagggggtaaccactagatctcgagttgcacatttctgtgaacattactcttttgtgtactccattgagccatacaggattgaggatgcgctaagatattcagattgggtgctggaaatgcaagaggagctcaacaacttcatgaggaat

SEQ ID NO: 64381 - DNA, 1036 bp, Zea Mays
cgggggccaaaaatcgcaggcgggggcacggtgcggtggtggacgccctccgtccagccttaaggattagtatatatatatatatatatatatattgacacttcatgagatgaatacaactgtcaattcctttctactctcggtgtctcgtttacacttattctaacacgttatcagtattttgcctaccgccgaagtctaatcggccattgcgttgaagaagggcgagcgcccacttactgcagatgtcccccgatgaagaatcaatacaagatgatccattggatagggtaacaatattctgattctaccttccatggatcttgattcattttgcatacttcctggacttctccatgcaaccgctgcatgaccgccgtggtgattgccgcatgatgtgacatgctctcacgttggacatgcataccacgagtggatctttgggtgattggcgacatcgcagggagcatcatagcgactaaccgcaccaagatctggatcccacgccgaggccgcctgccgtcgagccaaggctgcggtcgcgcccgcgctcgcgcgtaccatggccgggcggccgcgcccgcgctgcgccgtgcgcaggggccggaccgccacacccgctctcgcaccggggtcggggctggatccgcagcaccagcgtcgtggctggggctggggacgccgcacctgcgctgtcgaagggctgcgcccgcgcacccgaggggcctagcctgctgccgaggtcgggggcagcgcgccggccaggccacgtccttgtcgcggctgtggctgcgccttgaccgcgccaggcagcacgcagggccgctgccgcgccgggacgcctgtgccgccgtgagtgccacgggcccgcgccagtctgcaccgagccaccgaggggccggagggccacgcgccaccgccggaggctcgcccgcgtgcaccgaggggcttcgccgcccacaccgccgcgggggacgctgactgagtgccgcgcgcgaggctgtgcccgcgccgccgagccgcggccgcgccctca

SEQ ID NO: 64382 - DNA, 449 bp, Zea Mays
  misc_feature (1)..(2): n is a, c, g, or t
nnatcggctgtgcgcccgcgcgagggccgcgctcatgtgccgggccgccggcctacgccgtgccgctggggtcgctccggtgcccaccggccgagcctgcgtgcctgccggtgaagcttgggcttggggccgtgcgccgccgccggggaaggagccggagcaacgccgtgggggccgcgacgacgacgagtctggccacacgctgacgccacgcctggccgaagcgcatcaacgtgaggtcgcgccgtcatggccttgggcgccgccgccaggaagaaatgacgatcggttagggttccaaccctaacagtttgttcatatggactcccataaataggcctcatagaccaccttggtttggctgggcagattaggcaaatgttttatcattttaattgctatttttttgcaattatagaccatgtgtctatttgtatcacaatttgtcg

SEQ ID NO: 64383 - DNA, 889 bp, Zea Mays
cttttagctccgaactccgattctgatgatcttggactttttggaaagcttataaatctatctacatctcagagttgaagccatatcagtttgcgtagatttgattttgtgaaacacttccaattcaatcagcccttcctctcaactttgtcaacttcacttttgttttgtagctttgtatctcacttctacttcttgatgtgttggactctttgcatgtataaagtatcttcaatatgactttgtaatgtcttctatgggtcttataatgtcttctttgaggtgttgcaccctcagagccttagtccaatccacttcgcatcctctgaactacaacaaacaaacacttgggaaatacattagtccacatgttatgttgatcatcaaacaccaaaacctattgagctaaatggcccgagttctgttttccttacaccatgattcgaacaacaaggctcaaaacgttatgttctcgtgtctctcacttgctaagtttgagcaagttggacatttgggtacggctcatgagatctggtccaccttggagaaattctaaaagttgtctagagggggggtgaataggcgaaacctgaaaattataaactttgaacatgtactttacccgatgttagggttagaaataaataatagtgaattcggagtgcggaagatagttcttcttgctatgagttgttcaatcaatgcgaataactttgtaagcaaactcaaaacaatatgagcaagagaactttagagagggaggaaagggaagaaacaaatcgaaaggtgaagatcaacacaagtggacatgaagatttgtttcccgaggttcggttccaaagaacatactccccgttgaggaggccacaaaggttgggtctatttcaac

SEQ ID NO: 64384 - DNA, 753 bp, Zea Mays
ctcttcacatgttgaacatcatcacattgcagaccaagtaagccactatgaatcatctaggcccctaagcgatgttatggtaattaatgataaccatatgtggactaatgaaattttggagaaataagaatgcatgttggaccattgggagaagatctttattgaaagtcttggagacttcaacattggttgtggatcagatgaaggctaagatattatgtaggattttacttttgttggtcacaaggtgtttagagaagagaattgaccggattagtaggctagatagttgtactattaagagggatcaataacaattatctatgtgaaacttagttcctcatagagcatttagatgttgcatttgcatgaggactaacaacgcttccgaatttgagagttaaaatattttcaaaagcatggctaagtattggtggtgcagaccgtctaggccagatggtcggagcatccacgattcactcagagagataacaaaaatggtctatttgggtgtggttgaaaacctttgtactgcgaactatctgggccttgggaccagaccgtctgtggtcctaactagagaagttaccaagttgcacaagtccctgggtgattgtgcggactgttcgacctgggtcggtggaccgtccgtaggtgccaaattcgatttgggtagggatcgtgtgttttggtggattgtactatgcactatacgagatttgagctcggacagcactaactcccatgttgcat

SEQ ID NO: 64385 - DNA, 247 bp, Zea Mays
aaagaatgtatcctccactctctttgatcattgtcatgttcttactcataatgcaaagggtgtccatgctaagtttgttggtactccaattgttggcaacaagaagaaagcaatttgggtccaaagaccttggtctctaacatccaaggacccaaacaagtttgggtacctaaaagagattgatttccttttgtaggtgaactacaaggcgagagggaatcattaggtgttggatagtggatgcact

SEQ ID NO: 64386 - DNA, 413 bp, Zea Mays
tttttccaagaaaaattagttcattttctcttgggaaaataggaattctttgcgaaaatagagttctcaaactagccctcagtgtgatagaaatgcccatttcccaccattctactccttgcaccatatatttactaataatcatgacttcatcattagccaccctgactctaactggatgacaaggacatacaaacaagcccaaatgatccaccatattagcactaataaaaccggtggaactgctagagtcaattaagagttacatgaattttttacagacaatagttcgcacctgcatattatctgcactagagatgtccaaacgggtgggccgtgccgacccggcacgggctcgccttcggcccggcacgttttggcccgttaggttgacgggccgtgccgggctgggc

SEQ ID NO: 64387 - DNA, 516 bp, Zea Mays
aagactaaaaataagctttactaggatttgaaccttggttggagggtttaaaatgcttagctacaccactctagccaactaaaccaaacttattttgtgtctaaactattaaagttgcttctaatatacaaataaatgcactggaaaataaaataaaaaaaccgggccgtgcttgggccggcacggcgtgccacggcagcggcccaagcccggcccgactaacgggtcgtgccgggccgtgccgtgttcgtgacgggccaaaatcgtgtcgtgccacgggccgcccgccgggcacggcccatttggacatctctaatctgcaccatcagagccattcaaagctagtagatacaacgggcagcagacctctttattgccatcttctgtaatacctcattagttaacaccatgttcatatcctcaataaacataatattcaagtgtggagcacttctcttgtggctcaaatttatcatcacatgcataacacaaggcattcacctttctgaacttcct

SEQ ID NO: 64388 - DNA, 909 bp, Zea Mays
ccggacagtccggtgaattttagccgtacgccgtcggcaaaatttccgagagcggcgtcttcgggtcgaggcagcctggcgcaccggacactgtccggtgcaccaccggacagtccggtgccccagaccgaaacagcctgttggctgtatacagccaacattctccttttcttcttctctctgtttctaacacttagacaaatatattagtacacaaaaccaatgtactaaggcttagaaacatacctttacttgtgatttgcactttgttcatccatgggcatatattcatatttaagcacatgtgttgacacttaatcaccaaaatacttagaaatggcccaaaggcacatttccctttcaacttcctgtatggcatgctaagcgagacaatctactgcaaccagactacatggtttgtctaacctggtgtgccgcctgaacaaatctctttacagacttaagaaggcatctcgggcctgatacaattagttcgcctcatattcgctctccctaggatttacttaggtcaagtccgatgcattgttgttcatcttttgctagggcaccaagatggtatacttgttatatgttgataatattgtcctcacaacttctagcaccgagcttttgcaaaataccatttcggctcctcagtgggaatttgccatgaaggacctgagatttctccaccacttcctcagcatctcaatggaatgacaatttagttagttcttcctacatcagtgctctatatgttggatattcttttagcgctctaggatacagactacaaaccctgcatcacgcatgtggatctttaggtaaagcttgctgtcaaactccggtcctcctgtggcatttggagttttgccggcacccttcagtatctaacgttcatcaagtccg

SEQ ID NO: 64389 - DNA, 358 bp, Zea Mays
tcatgtactatgataggagagactctagaaatgcttttagaagtaatgatgtttttgattcacatgcttatgactcttatgctatgactgcttctagttctcatgttatgcatggtagaaatgtgtttagaagaaatgttgttcaccaaatgcctaggagaaatgtagttcataatgctcctaggaaagtagtgaatgaaccttccgaaatttattgtgctctaaacgcttcctttgctatttgtagaaaggataagaaaattgttgctagaaagttaggggcaagatgcaagggagataaaacttgcatttgggtccctaagaatatttgtgctaaccttgtaggacccaacatgag

SEQ ID NO: 64390 - DNA, 1138 bp, Zea Mays
tagattcgcggaacctggattgaattgtagcatacatgtagttatgcttttgatcatgttcctttctgcattttgttgcttattgtggtgctcaagttgtacaaacactccctggacctcacaagtccgttgcaaagtgatgcacatgtttagggggagatgtgttacaacttgaccctttgagactaaccatttgcttgagtttgcttgatttagtctcgaaggtggattgaaagggaaaggtgaacttggaccatgcaagacttccactgcactccgatgagagggtaacttattccaagttcatctctatgattttattgcctttgtactcttaattgaagattttggtgaggcaatggggttaaggggccaagattgatcccgttttggtgcttgatgccaaagggggagaaaataaaggccaaagcaataaatggatcagctaccacttgagagatttgaaaatagtagagtagagcttttggtttgtcaaaactcttttattgtctctcttgtcaaaagttggcttcttgtggggagaagtagcaattatgggaaaaaggggagtttttgaaatctttgatcaatctcttttggaacgactctctttatacttcaacatgtgtgtttgacttagagatagagatttgagtttgattttcaaaaacaaaccaagtggtggcaaaggatgatccatatatgccaaaaatgaatcaaaatagatttgagttctatttcaagtgattttgcacttgttctagttgctttatgttgtgttggcataaatcaccaaaaagggggagattgaaagggaaatgtgcctttgggccatttctaagtattttggtgattaagtgtcaacacatgtgcttaaatatgaatatatgcccatggatgaacaaagtgcaaatcacaagtaaaggtatgtttctaagccttagtacattggttttgtgtactaatatatttgtctaagtgttagaaacagagagaagaagaaaaggagaatgttggctgtatacagccaacaggctgtttcggtctggggcaccggactgtccggtggtgcaccggacagtgtccggtggtgcaccggacagtgtccggtgcgccaggctgcctcgacccgaagacg

SEQ ID NO: 64391 - DNA, 155 bp, Zea Mays
gcggatctcgccgagggtggaaacggcgctgagggtggagacgaagccgagggtgcagctcctccctcgggcgatgcctgattctgccggagcagtttgttttgaacatgtatgtgtctttcgcggccaccgaggcctgaacactttgtcgtcgt

SEQ ID NO: 64392 - DNA, 469 bp, Zea Mays
caatacacagcgaccgctagatcctagattaacggcgggatggatttctacgctactctacactctcggccgtccattcgaggatcaagggccacagtttaacacatcgaatagtacctcaccccaaatcgtggccgccaaagtgaatccaacggccacaacgtccgttgcggcaacagccgccacctccgaccgaggccgagcaggggcatgtgagcaggcttcgacggcgcacttgccggcgaggaatgatctagcgccccaacacccagtcaatcgttgacgcttgcaagatgatgtggaggagatagcgaacgcgcgaagggtgaatttaccggagattatgcagtgacgagatccaatttctttgcccagcggctgagcggtggaatcaaggactcaggcgacgaatttgcttcctctggtctccagcggctgacgaatttgtgacacggcgaagcccctccgg

SEQ ID NO: 64393 - DNA, 459 bp, Zea Mays
ctttttctgccgtcccctcccccacccggcggccggctggtgcaccgcgtcgacattttttctcccagtccccaggtcccagcacatcgacgcccaaccaatggcgaggcctcccgcgctggcacgctcgccgcttctctatccggccggcgggcctgcagtggcccgccaaccgccatggtttggagttggactttggaggcaccagcaatcccatcttccgtccttgctctcctcttcgacatcaggaattcgggattccggacaaccttttgacgtggggtgtgggtgtggactgtggagccgtggatcggagcagcgtccgtccgtccgtccgtgctgcctgtaaagcgcagaggctgttctgtttttcggggtcgctggtgcccgtcgccgcgatggacggatattcggctggtgggcgacagccttttgttgcagattctgctggctactgct

SEQ ID NO: 64394 - DNA, 248 bp, Zea Mays
acggtggacaaatggatagcaattcctagcacataagacgaggatggatgtcgaataacatcacaattaactcgtggttagccagggaatccaagtccaagaaaaatgatagagattcaaggaatgaagggatctgtagatgttgacctcgtgtccaatccattttatcaagcactaagcatggctcggcttgatcacacatgttagaaaatcacatgtgaggcgattgaggcacgactagaactgtg

SEQ ID NO: 64395 - DNA, 340 bp, Zea Mays
ctggtcttgagaaacctgtgggcgagttgacatatgcaagggttaagtgctacatatgtcgtgtggttggagatcctcagctgagtattaatcgattcggatcgccgttacttctcggatatgaagactggatcactgccctgcatcgtagataacaagtgaaactaaagctgctaaaatgaagctagtataggacaagtgaatgctctagattaggcaaatctagattcaggaaaagtacttaacctgtgaagtaaaattttggcataaggatccactactagtaagctcttctgcaaaatgagtctttgaaatttgataagctttaccttgattccca

SEQ ID NO: 64396 - DNA, 580 bp, Zea Mays
gaaaaattcccagaaactgctaatactactgctgttcatccacctgaaaaatctgtttttttggacagcaacatacccggattcaaacaacgatatctcctaaattataactccgaatcgagcgcataagtactcgttggaaaggtatgacaaagctctacatgattatcccactgattcccactaattaccccacgaaaattcccagaaatccctagaactactgctgttcacccactcacaaaattcctggacagcacctctaccgattcgcaaagataaacacataatccaattgattgcagcacaaaaacaacaaaagttaatcacaaattcaccttaggttcctccctttctccttccttcttcctccctccaaactccaattgagatcgcagccacacgacggagaaccacacgggagggctgcaccttggaggatggggagaaatgggggtgcggctagggttttgggtggtgagggctgcaaaggtttgaggaggaagaagatgggagagggggggcgtccaagagaaaggggaggggaaggggcggctgcaacaacccaagggggaaaaag

SEQ ID NO: 64397 - DNA, 321 bp, Zea Mays
ctgaggtgtgggccagtatttgtcagcgggcaaaaaaagggcaaacgctgggaagtgctgggccgcgctggtgtggtgtagatagggccgtggtctgctttaggcccatatgattagttggtctgtgcttttctttttcttttctattttcttttctttttctttttcagattttggctcaaatcaaattcaaataaattaaaatttgagttcccacaaacaaaataaatgcaacaacattaaatatttatatacttatatattactttagttgtttttatttgctaggtaaatgcttccaatgtgaaatgcacacacaag

SEQ ID NO: 64398 - DNA, 498 bp, Zea Mays
gttattgggcccacatgcacctgtccttgtcccaaagacctcagacaatcatgcatgtgcaccagataactcaacaggatctgtccgattgccccaaggacatcggataaaccactttcaaccagaaccgcgggattaagtaacacaaatcacacacaccaatatttttgcagcggaaatcttattaccaaattttacaagttacaaaaattttatattattttatcggagtggttacaaaagtataagtttgaaatatatgctagctcaaatgaccatcctcaataagaagtatagaagaattacttaaacttataagaaggccgagcccaccggcacttaacaccatcacagcagcacaaggttagaacctgaaaaacaacagggaataaaaccctgagtatggaattactcagcaagacttacccgactaaagaaaagactctcaagggtatgctggaattgggaatcaaggagaggctttagcaagaatcaact

SEQ ID NO: 64399 - DNA, 661 bp, Zea Mays
ctccttactagggtctccagctttgctatggaaactttaatccaataccccatgaatcagtcataaatgaattccaaactaggcatcctgctgtaattcggttttcataactgaataaaaattcagttatgtgtccagcctgacagaccaactttagccaacccttttctccaatttttacaaagcaacagaccaagctcacataaccaaagttattccttagatatagctctactactttggtatagtacccctgggttgaaaacatacagaacaatttttatgaagcaccaaaatggagctcaacacactaaaacctagtttcagccttatgcactaagtctgggatccagaaacctgacagcctatatttgagcaaatttcacacctagttccaggcaaccaatagtggtagagttcaagcagtaaatggtgtgagctttactgacctgagatgattacggaacaagcttcatacatgccagcaactccctagaatgggtgtggtgtggtgaacttggtggctgtggtcaccacaaacacaggaagacggcgcacacaactctggacagtgccaacttggtggcagtgggagaggagctttggcttgcaatacccatgaatctctcaccactacaagctttggctagaacaccagggc

SEQ ID NO: 64400 - DNA, 380 bp, Zea Mays
ggttatactcatgtccctttaccgtgaagtttatatttggtacttcttcctcaagcacgtcaatgaacaatgacgactttttgagcatgttgacgtcgttgttcgacctcgccaccaaaaaaacaatgtcaaatccacacaagtattacgaggcaagcgcttcaagcatgatgatcggctatccaatgccccatcttgtaaactatcatctccattcaatgggacattttctccactttcaatatatgcaaactatccttactatcataccaggaaatctactctcctcacccttagttaatagtcgtctaagatcgtcaatagtgggacgatgactatactcttcaccaaaacatgaaataacatctctatgaaaatat

SEQ ID NO: 64401 - DNA, 536 bp, Zea Mays
ctccactgtgttggatgtcgtgtccgtcctaggtacgcccccaccactccccctccctccccctagatgtatcgttcacctagatccggcctcatccctggttttctccgggggcactttgaaaattatgtaatacttccttttgcttactcccaagttgagattaagagaaccataccaaaaggatcagtgtagtctacctctaaggatttcaagactaaaaagatatttgctggtgggcttccctcgacactaacagaaggtaacatcagtatgtcacatgatggatcagctttgttttacattgatttttccttgatgaatgttctatttgttaaccttgatcagaagatttcaatagattctttgcaagatatgggactgtggtagaccactagattatgtttgatcctgaaaccaaacatcctcgagactttggatctatagtttttcaatctgagcaagttgtagatgatttgttacaaatggaaatatgattgaccttgttggttcgaagatagtctacagttccttat

SEQ ID NO: 64402 - DNA, 217 bp, Zea Mays
caaatctggccttgtgtgcactagatatctcaggctaccaactagtcttctatactgagttagatttacctcctttgttgtactttccttgctcagtttcaacctttcttccatgggggtggtggctggattatagtctgccataccaccgagctcaagtatcttcttagcataatgagtctgtttcagagtaatgcttccctctgattgtcttacc

SEQ ID NO: 64403 - DNA, 1527 bp, Zea Mays
ctcccctcatcgcgctagccacctcctaactacccgcgctgatgcgcagcagcgcctcacccttcgactttctcctgtcgccggcgtcgttcacaccccttgccaggtccggcgcaggcccctgcctggctggacccgccccgccgcccaccccttcatcgccttcgttggatccatggctgccgcggccttctcggccggatccacgtagctgcgaccttcccggctcgatccgtcgttcctttggccggatcgcgtcttcccggctggatccgtcgctgtcgtggccttcccggtcggatccgtcgttccccttctattctgccgcgggcacggactctatgaccggtgcagacgcgtacgctgctgtcggcctccctggcggggctcctcgacgtctgtccttcactattctacagaagagaataacaaaaattaacccaaggattgtggacaattactatgcatggatttatagctagaggtcaatgaaagatatacctgccttagcctagaaaatcctcctgagccgaaagagggggagagcctgcttctacaactaacccaacaaaatgaacagtgggcaattgggcctccccatcgtcatcactggctcccacttcatctccatcctgtagtaactctttgatattaaattcatggtgaagaaattacccttctaggtgaatattgtccgggatgtaaaatgctacttctatatccatgtccacatgcagctgctgaacctcctcctcggaaacatgaccaaagcttccttcttcatcgaagatctaaatatcatcattatcttcaggaaaaggagggttataaaagacattatttactgcctgcactaagatttgttgcatcaaattttcttctggtagggggagagtttcttccaagagctcatttagatataaatatcttgtttgttagcttgagcaccatcaacattcccttggtttggtaacaccccttcttgttgttgggtcggggcaacattgttctggttctgaatgggtgcatttccagcctggcccaaaaaatgtaacaaaaaggaaccaccccattctcaggtatttttggtattgagtcttcatcttgggggatttagcccgacatggtatgttgaatgatctcgcattgcactgtccactatcgaccttgaaaacctttacactctgacaccaatatgaactaagggatcaagtttaggtccactactcgaacattcagtaagactactgatgatgtgttgatcaaactcccaactaatcaatctaccaaaaatctaaagggtaaccaagcaacataatctaggcttcttgattaaaataaatcgccctcatattgctatcttcattatgtttaataatcataaagaaaacatctctgtaggcatgaggatttgcaagtattagattatcaatatttctgggatgaacaaagcgaaccagtgcctgaccaagatttgtgtgctggatatctcaaatggtgattcacttgtgacaaaccagaaagtcc

SEQ ID NO: 64404 - DNA, 451 bp, Zea Mays
tatagatataccttcggtttgacggaaagtaagggtacaggcgtgatgcaaaaagtgaatgccaactgttcatctatttataggcaagggacgcagcccatgtaaaattacattcatgtcatttacatttgctaataactctgtagtaattcttcgaggtctgatttgtcttttcatctttaagtcggttcccattttctgctgtcgtgccgaagctatcctgcgcacagcttcgtgatcgccttgtccttcgtcataatcacctttcgacccgctcaagcttcgtcctgaccatgcttttgtatgctcatgacccgattccgaagacacctgtttacatattgcacttggaaaacattgtcaaatcatgtttttgggccaacaccataaaacacactaacagaaaaaggaagacataatgctctaaagtgctacagctattgcagtttgc

SEQ ID NO: 64405 - DNA, 238 bp, Zea Mays
tcggaataagaggatgttcaattgaatatagcgacttagttggctatttgcattttaaaactaaactgtgatgtgatgcctccagataaatgtacgcctgtagatggtgtcaacattgaagtcctcacaggggtgattatgaaggtatgattctaggtttgacagtatcttcatggtttgggtattgaaagattctgcatatgcaatgttgtagtactgttgtcatgagaaacttaac

SEQ ID NO: 64406 - DNA, 824 bp, Zea Mays
aaaatgattgaaacctttttctgcaggtttgattcagttgttgcattggctgaaaaggctaagcttataaatcatgtgaactcagaactgaagtgatcctaaataacttgagattagcgatggctcgagcccaagagaatgactaaagcaggcaagtttgctgatgcatagcctacggtgaatggctgaaatatgagccctcaaatcaactgcaaccggtcatcatatcatgcttgccaaagctgggtcgatgtgcaaaagctgctgaggactgtgatatgtgtgatgttaattagttatgtcatatgaatttgtgtttatatgtattgttagttgaaataatattggattgtctaactctgtatcaaaattatcaaactgcctgtctaaaaatagggataaaaacacaatgatcataatacaacaggggcaaaaatatatggcaaaattgtccagttattcaaaacatcgttaggtgcatttcatacagtagcagtaaagtgtcctttcgttttaaaatcacagaggtaaaatcaccaaactcaaagaagtatgggcaaaattaccgtttcacttaaaaataggggtagaaatgccaaaaggcacaatgtatacatgtgaatactttaaaaagaacccataaataaaatattatgggacatctaatgatttctacggaaataatgcataatacatcataaaacatctcattaattagagagaaaaaaataaaaaataaaaattgaataaataaagtaaattcaaaaattaaaagggaaactaaaagaaataaatccacataaaaaaacaaagagaaagggaaa

SEQ ID NO: 64407 - DNA, 383 bp, Zea Mays
tctgtatgtgactatggagtaactaaaagcctttttttaatctgtgagttgggttaagaaccaattgatgggccgaaaaaacagtagagaatagagcagagagataaaggacgtggacgtgattggtcggcgccgcttccgtcctgaacagaaaggcaatggaaactcctctctcagaaaacaagcaagaaactggctgtcccaccgtgctgaccatggccgtagccgggttcaatgtcggagtgtgtacttttacgatcaagtctggtcggaatcaagtttctgaaacttgtagctgggagaaaaaaaacgtgtcgatgttctttgagtattcgctgattcatcatcatcatgtaacaccctgaatttaaagtataaatttg

SEQ ID NO: 64408 - DNA, 290 bp, Zea Mays
cccgtgcgtcgtacgcgtactgtgcgcgtgcagccgtgctgtttcacgcgttacatatttcgtctcgcgccgctaagtcatctcgcttaaagtcgctagtgttatttaaattactcatctaaatgaaagatgttagcgttatagactaattaaagctatgtgatagctctaattgcattaaataaatgtcgaataatgtgagtatgtcgaattaaatattctaattaatacttgtttagtgtaaacgcgctaacttctcgaccgtagctccaactatcgtgtttcttttc

SEQ ID NO: 64409 - DNA, 723 bp, Zea Mays
cacggtctcgcaagactctcgcccccacttggtacaattacaatggctcgcgcaagagccgaggggttttatgttttttctaaactcactcaactaactaggattcacctagagaaagcacataagttgtctaactaacctaagcactttacaaagcatctacgctaatcaccaagtgattctattaagtacttgggtgtttgagcacatggaaatgtctacaatatgtcttggtatgttgcttgggctcccacaccttcaaatgctcggttggaggggtatatatagcctccccctcgattaaagccgttggacagaaacgttgctgcttctgtcgtcgagcgcatcggatagtccggtgccctggccaagttagccgaccgttgagatatgtagcagtcgatggctggatctgaccgttactcagactgtctggtgcacatcggacaaccagtgctatagcctcgagagtccttggttgcgcgctctctacgcagtctgcccagtgccacaccgaacagtcccgtgcacaccggataggtactgttcattgtccggtgtgccgctagagcgttggttgactgcccacttcatgaatttcttcactgtttttttgggcttcttttgttctttagtcttggacttctacacatcttttaggtcttcttttgaggtgttgcatcctcagagccttagtccaatcctcttcgcatcttgtgagct

SEQ ID NO: 64410 - DNA, 430 bp, Zea Mays
gagagggatgacatgtgggtccgctgtggcagtggcagagaagtctgggccgcgcgggtgtgattcggggttgggccgaattggcgcctggtggcccaattagggttatactctttttctttttttatatatttcctattttcttttctttttttcttctttctccattattacacaaattcaaatttaaatcctaatttaaattcaaacttgtgactaattcattctcaaaccatatttgtgcaattaaaagtattaggtttgagaatatttattcaaatatttcatgttttcatattccttttcttttctagattcaagaatttcttttaggatttaatttcccatttggatatttaacatttttcacgttattatatgttgtcacaaaatgcacacagaataaaatcgagcatgatgcataatttgg

SEQ ID NO: 64411 - DNA, 506 bp, Zea Mays
ctctctataatatactgatttagtcatatcttttatttgtagtaggttgcttttatggcatcttgatccatcaattattaggcttgatctctcggtgatgctcaaggaggtaattagaaggctcttgctttgcctgagaaaggaattatataataggatggaatggcgtaccttaaacactcatatggaataccctatgcttttgcttgcactgagttttgatgtgtcctgaatcctgattttggtcaatgggcttctacacatacttttaatcttgcaaattgaactacaccaaatagaagggtatcctatgggagcaacaagatgtttctagatcttacatataagcagacacatcccttgtaatctatgttgttactggtttcgtaggaacttagaagagtttgaaatcattaaatccctagcatgacaaaaagtcatctgtatatgctatagcatttgtgtcatctgagtttgtggctaagacaatgttgcaaatattttct

SEQ ID NO: 64412 - DNA, 713 bp, Zea Mays
caaatattagcatattttgctcttttgagctcttgtgcttggatcgcttttcttcttccctatttcttgttctcaacacctttgtaatcaaagcaagagacaccaagttgcggtggtccttgtggggtctaagtgacccatttgattgaggagaaaagctcgctggtctttgtgatcggtggagagagagaaagggttgaaagagacccggtctttgtgaccacctcaacggggagtaggtttgcaagaaccgaacctcggtaaaacaaataactgtgtcatccgctctatttctttggttgatttgttttcgccctctctttcggactcgattatatttcaaacgctaacctcggcttgtagttgtgcttaaagtttataaatttcagatttgcatattcacctcccctctaggcgactttcagaaccaagataaaatgtgtgcaaaactatacatgtacacaatagacaaacgatgtgtgtgaaaaatatgtttagtttgttactaccactcataatccaataaccaaactgtttagaaaaattgtgactgaaatatgatataaatgtacttcaacatgtggtacgataaaactctttaacaggggtactgttatctggttattggaaaagaggtggtctgcaaacagacaaaacgtttgtcttatacaacagtagtcccataccaatcctataattgagttagtttgttc

SEQ ID NO: 64413 - DNA, 552 bp, Zea Mays
ctaagcaataataatccaaccggtgatagatttataactcaaatatggacgaagcattggaaatagatttataactcaaatatggacgaagggaggtcgagacttagctggtgatgaagctcgaagttatttcaagccggtatttaaacttgtgcctgtcgcttaccttctcctgagatttctatttaccttatactgctttgttatgtacaggatgacgaagccgaagatcaatgatccgaagcttgacagatattgatgaagctgctgcaaaaagctcttagagaaattttaaattaactttgtaaaagatattgtaatttaggaatcaaacactgctctgtaaatttgttcatactttgtaatatatttttacctttctatccatgtatgaactgctttgatgtggacgaaacttgtattttttgagccaaaggcgaaaaacaccttcccttcttttcgtacacaacgaagcataactttgcttcttgtatgctcatcgaagccttgtcatcagagccgaagcatttgtttgtattctatgttatgatg

SEQ ID NO: 64414 - DNA, 1355 bp, Zea Mays
caaaggtcgggtctctttcaacccttccctctctcaaacggtccctcggaccgagtgagcttatcttctcaaatcacttgggaatcaaacttcccgcaaggaccaccacacaattggtgtctcttgcctcaattacaagtgagtgtttgatcacaagaaagaatgtcaaagaaaagaagcgatccaagcgcaagagctcaaatgaacactacaaatcactctatctagtcactaaggctttgtgtggagttgggagaggatttgatctcttttggtgtgctttgcaatgaatgctagctcttgtatagtggttggaagctggaaaacttggatgacttgaatgtggggtggttgggggtatttatagccccaaccaccaaactagccgtttggtggaggctgtctgttcgatggtgcaccggacagtccggtgcgccagccacgtcactagagccgttacaatttgaccgttggagttctgacttctgggcccgcctggatgtccggtggcgcaccggacatgtactgtagagtgtccgatgcaccagcatgggcgtgcctgacgcctgcgcgctctggcgcgcattaattgctgttgcaggcgaccgttggcgcgaagtagccgttgccccgctgttacaccggacagtccggtgtacaccggacatgtccggtgaattatagcggagcagccgttaggatttcccgaggctgccaagttccagagccgcgtcttcttggagcaccggacactgtccggtgtacaccggacagtccggtgaattatagcgcgccggcttctgaagattcccgaggctgaggagttctgcgcgcggtcccctggtacaccggacactgtccggtgcgccaccggacagtccggtgcgccagaccagggagtctctcgggatgcctttagctctctattttgaacccaactttggtcttttaattggcttgttgtgaacctttgacacctgtataacttattcactagatcaaactagttagtccaattgtttgtgttgggcaattcaaccaccaaaattatttaggaactaggtgtaagcctaattccctttcagtatctataaaggtatggatatcaaggaagacaatgcatcaaagggttccaagtaactcctataaacctaatgcacatttcactagacttaaagtgtgcaaaaattatttaaaaacacaaggaaggggttgcatgcaccggggcttgcctttgttgcagtgaagaggttctagatccctctattaaacccagttagatggctcctccacttgatcagcagccactggagtagattcctcttcagtcaccacttcaggttgaatcttcactc

SEQ ID NO: 64415 - DNA, 116 bp, Zea Mays
tggaaagtggatgattgcaagaggaatacaaagaattaggtgtgtacccttgtttcaatattgacaatctctctccaagtagtgacaaccaatctatgaataagaatagaatatct

SEQ ID NO: 64416 - DNA, 217 bp, Zea Mays
agtacctagagggcggtgaataggtgatcccataaaaaacaacactaaatagcacaaacttggtttttgaaatgttagtggaatcaaaaccaaagggctatgtataaagagaaggagttgacttcttcacttaattgctcttcacaaggtgagtattaaacttagagcaattatcaagtgagtagaagaagagagaatcacacacgaataacaacag

SEQ ID NO: 64417 - DNA, 264 bp, Zea Mays
cttggctagtccgagcaacgggatggtcggtggtgagcacgccgtggtctaggggtcgggttaaagaagaaacagaactagaggggggttttgtaaggtgttagtgagacatgggaatagcaccgtgacccttttccagttaatcaaaatgttaggggtatttctgcaaagccgatagcgtgggcgcgcgcgggcgtgcttctgcctgtagatgggccggctcgggccaatttcagcccagcactgtagagtctttttcttttt

SEQ ID NO: 64418 - DNA, 65 bp, Zea Mays
cagacagggccgagctccataaaaaatacacatgtttctatgcttccaaaggctctaagcacgac

SEQ ID NO: 64419 - DNA, 714 bp, Zea Mays
caattattcaattgaaatatagaccaacctaccaccaaaagtgacactcgcaggtccaatcctgctgtcaaataaatttaaaaaatcatgtcacccatcattgatgtcatacagatcaatcagagggggacttggtagactttcctgccccctcccccggcctattgtcaagcgccccatggaatgttcttgcagtcacacaatcaaaggaaaatgattctcggacttgaagactaggagttactggccacatattccatgccttggctgctctgcacttgtcatggatctgcgacaccgtagacagttcggtgtcttccaaacctctagatcaagtaatatatttgctgctctgagaatggttccactacgagctcagccacaggaattgatgaaaagcgattgctacgtcatttcctcttacaagtcaagcagggaagaagtgatggacaccccctttgtcaaaacgggccacatagtttttcctatctcgagacagatgtgaggacacccgtcattcaacgagacctttctagcggcagcagcaaatctgactgattgattattcaccgtcggagcagttcaagtgataacggaaggacgatgctttgccatacagctgtacagcttatatttcttgacgcaatgttcaggttccataagccacttcctgtgataaattctgtgtaaacttaggacctgttcgtttcttac

SEQ ID NO: 64420 - DNA, 65 bp, Zea Mays
agcggttacccctaaatttctctccctatatcccactcacgtgccacgtcagcgttctcttcccc

SEQ ID NO: 64421 - DNA, 760 bp, Zea Mays
ggtccttttgctttgggctaatactttctccccctttggcatgaatcgccaaaaacggatacttgtgagtgaaatataagccctttcacaaacttttccccctttggtaaataatatagaagtgaagattataccaaattggagagtggtgcggagtgacggcgaaggatgaataattcgatggagtggagtggaagccttgtcttcgccgaagaacttcatttccctttcaatctatgacttatcatgaaatatacttgaagatcacatttgtcatagcaaatgaaagagatatgatcaaaggtataaatgagctatgtgtgcaaagcatcaatcaaagttcctagaatcaagaatgtttagctcatgcctaagtttggtaaatgttttctcatctaatggtttggtaaagatatcggctaattgttctttggtgctaacatatgcaatctcgatatccccctttgttggtgatccctcaaaaagtgataccgaatggctatgtgcttagtgcggctgtgctcaacgggattatccaccatgcggattgcactctcattatcacataggagaggaactttggttaatttgtaaccatattccctaagggtttgcctcatccaaagcaattacgcgcaacaatggcctgcggcaatgtactcggcttcggcggtagaaagagctacagaattttgtttcttagaagcccaagacaccagggatcttcccaagaactgacaagtccctgatgtgcttttcc

SEQ ID NO: 64422 - DNA, 623 bp, Zea Mays
caccactcgacagaaggcaagaattgccttccaagttgatctctaacggctcctagctgccttggtctataaaagggacccctaggcgcatggagcaacacaccaagcattcacaaagcattctaagactcccagactccgcctccacgcatttgattcgttgtgttagtgatttgagctccgtgttcgagttgtgaactccctgtgctgtattttgagctgaagtcttggctagtgtgcgtgtgtgctgctgattcgagtcttgtgtgcgttgctttccctcccttactcttgcgtttctcgttatcaaaactttgtaaggacgagatgctctaacttgtggagattcctcgcaaacgggaaaagatctcaaaggaaaagaccgtggtattcaagttgatcatcgaatcacttaaaaggggttgagtgcaaccctcgtccattgggacgccacaacatggaagtaggcaagtgttgccgaaccacgggataaaaatcgcgtgtctgctgtgttgctcttctctgtgattgtttgtattcgcaagagctcgcttcataaacttgattaactcgcactaacatctttataatcaagtttgtggctatttagtgtttgatttcac

SEQ ID NO: 64423 - DNA, 290 bp, Zea Mays
attatctcctcccctagagccattcgacccactggctgacctagagacaaagaaggcaatagaaattattaatatggccgaagctattgtagacgaagttgtcaccaaattactaaccgaagctccagaaaaaagtcctagaggaagaagaatagctatttgtaaaaacattgctagaaaattaatgtaacatttgctggaatatgcttgtaatattcggtgctcataggttttgaatgtaatatatgaatggttttgtaattcatttctttgcgatgcatgaaactttt

SEQ ID NO: 64424 - DNA, 809 bp, Zea Mays
cttttcaacaccatctttcggacaaacagaatgcccgacgagtggcggcggagtacattagtaccaatcttcaagaacaaaggagatgttcaaagttgtactaattaccgtggaattaagctcatgagccatacaatgaagctatgggagagagtcattgaacaccgcctgcgaaagatgacgagcgtgacccaaaatcagtttggtttcatgcccgggagatcaactatggaggccattttcttactaagacaacttatggagagattcagagaacaaaagaaagacctgcatatggtctttatagacttggagaaggcttatgacaaagtacctaggagtgtaatgtggtgggccttggaaaaacacaaagtagcaacaaagtacattaatcttattaaggatatgtacactaatgttgtgacaagtgtccgaacaagtgatggggacaccgatgactttccaattaacataggactacatcaagggtcggctttgagcccttatcttttcgctttggtgatagatgaggtcacaagggacatacaaggagatataccgtggtgtatgctttttgccgatgatgtggtacttattgaggagagtaggagtggtgtttcgcaaaagttggaattgtggaggcagacgctggaagcaaaaggttttaggcttagtaggtctaaaacggaatatatgaagtgtgatttcagtgccacggggtatgaagatggcgatgttagtcttgatgggcaagtggtacccaaaaaagacactttccgttacttaggatcaatgcttcagaaggatgg

SEQ ID NO: 64425 - DNA, 326 bp, Zea Mays
tgaaaatatatattttttgttagatttatggccatacaagaagggattaagtcaagaacgatgatatatgtgataggtagagatagcaccaacgaaagaaaaacggttgagatggtttggatatgtccaacggagacctccagaggatccaaagacgtaatagtaatgagaaaagaggcaggggcataccgaagttgacatgaaaagaggcactaaaaggagacttagaaggatagaatataccaaaaaattagcgttgaataggagtacatggaaaaacaactatcaaagtgccttaactttgacttgaaacttctttgtgtttt

SEQ ID NO: 64426 - DNA, 707 bp, Zea Mays
atgcgtcttcgtgaagaaattagccaactgaagctataaagacacataacgaagatcaatcatatcatcctgagcctgtgcatgtatgcatataataggcatcaccacctatatgcttagtaagctcatgcttgactggatcacgagaaattctaatagcatctgtacatactgtcacacaaaagagtagctgacttagaaacagaaacaacaaaatcctcaagagacaaccataaccaagtaacctccgtagtcaaaagagccatagcatgcaattcaacctccgcactcgaatgagaaactgctaaccgcttcttagtcttccaagcaataagggaactaccaagaaaaacacaatagatagaaagagatcgataatcagagaaatcactaacctaggtagcatcacaataagtctgaagctgaaagagctagagcgtgaaaagaataagtgtctagatataatcccatgaagatatcgtaggacatgaaggaagtgattatagtggagttgggtgggagcagaaacaaactgactcaaaatatgtatagaatatgaaatgtcaggacaaatgataccaaggtaaacaagactccatacaatatgttgacaacgtgtaggatccttaggaggttcaccatctgtatcacgaagggggatcgacttggttcaattgtccacacagatcaacacctaacgatcaaag

SEQ ID NO: 64427 - DNA, 322 bp, Zea Mays
gttacaacctgaagcaaccaagatccaatttatgttattttattgagctgcaggattttaagatagaggttttgtggtcttagttgccagaattgaacctatagccatctacagtgattcagatcacatgacattcaggttaattgtgaaagtgtaaaataagtattgtccaacatatgtatattaacttattgataaatatggtctaattgtttgtcttccaatggtctaaatatgcaccagcaatattgaattttgaatgaattaaattgactatctcattacaaaacatttgcaattagtttttcggtgtaaattccat

SEQ ID NO: 64428 - DNA, 765 bp, Zea Mays
gaaaaactgatttttcacatgtaactttgagcgaaaaactgatttggagcactgtagataaactgtggtacagtgatgtgaatacttttgatgaacacctctccatgtttaaagttttatatagatgagctcccatattggttttaagtttagtgttgctttattcggttaattagggtatttttgatagtttttgttagctgtaaacctcctccttggaatgtcgagtatgactgatgtatataatacaataataacaacaaagagttgactagggttaaacctaatagaagccttaagtcaaggttaaggcatgtgcatagttgtttttcacgcacttatattcaaggctaaatctttggatatattttattatttcatgtttcatgttattgtcttttttcatgtcaacttaagtctacctttatctctctttctattactattgccatggttgtcatggcgtcatggcgaggcaagttgctagctaggtgcctgggtgcctaggcatccatttgtcaagccgcaagattataacatatatcaagcaataccaacttaggcaatttaggaaggcaagacattacaataccagcaactcagcaaggaagagcatatcagcacataaggagaggagacaataccaacagcacagaagggcgatcgacgtgtggtgtggtgggcatggtgtgagtgcagagcaggtggttgacgtgggcgcgacaggcgccggttagcgatggcagcctggggagcaatgagtct

SEQ ID NO: 64429 - DNA, 946 bp, Zea Mays
gagaataaccgtagggttgagtagtaccgtcaacactgagctggaccactctctagacaagctgatcagggctcgtgtggagatcacggagtatcgtgctgagcatgcaaagcgcctccatcaggagaatggttccctcactcttgtggggactcaacaccctttacctctcgccgccccgtgatcaccactcctatggttgccccgtctgcaagaccaagatagatctagatccttagattgttagcgtcgaaatctataataaattattaagtcatgagtcttagtcagtcagattagtctgctttgcttgttagatgatgtaatgcttgttatgatgaacctatgttggatttgaatatttgtaatgattgccgctagaatgtgggtttcccctatagtagctagtgatgtcaataaagtcagtgattagttgggaaaccatttacttccactttccactttatctgagaagatgtgtggatcatgttgaaatcagtgaaaattcagttcacccggtgttatgaagaatccaatgttgatgagtatgtgtcttctatagatgtctgacaacaggcaccgacaaggtaggcgtaaccaacaggaacagcgagtccagcaagaggaggagccctagccactacctcccccaccattcccgatgacagtggagcaaatgttcttcatgcaaacctaagcagtgcaggcaatcaggcagactctagcagctgtgcagcaagctcaacaacaacccagcctcagccatagatgcagatgccacaatgccaagggataaacgtgtcgagttcatgagtggtcaccccctatctctacccactctgtcgaccgcatggatctagaggactggttgcacgtggtggaaagggaaatgcacaccgtccaatgatgacaaggagaaggttctgtacggtccacgactgctaag

SEQ ID NO: 64430 - DNA, 782 bp, Zea Mays
cgcggatctagctcagccaaaaaaaaaagaaatccaaaaggggtagaacgaggagttgaactgaacaccatcttctgcttcaaaaacgtggtcataaccacacaagcttcaaatagtgatttctattaccacacgactgtatttaatatgggcaaaacagaaaaaatgcacctaaattaatggcttcttggtatgtgagaacatatctaaaatttcaaaaaaaaatagacctagagggagtaaggctatagaactttttttaaacaaaacaaaacaatctaattgatgttactggttgagtggttggtacttctagcaaataaatgatcaaactagaataccaaataatattgcattattacctagcacagtacagtagcacatagtagacgacacgcacggttcacggcttcacctggtcgatgaggtgagcccgcaccggagccggcgagcaacggtccgcgcctccgcggagctcgtggcggcgtgctgcggcctgcgaggctgtgtacgagtgagggagagggaatgtgaggcgacggaggcggcgggcggcgacccgacgtggtgctgtggcggaggcgcggagccgaggggcgcaggcgcgcagcgcgtgcggagagggcctgccgctgccggcggctaggcacttttttcaggtttcgtgggcttaatttaagctatgcctactacttttgctgggccgtgacagggactacaatccagacagccctggctgcagatccactactgccttgatattaattttggctcaagatttg

SEQ ID NO: 64431 - DNA, 143 bp, Zea Mays
gccaagtcccaaccgttagttgtcgaccgcttttaaaaacggctctcgcggtggcagacctccctccgctggccgctgcactcctcctgttcctgcatggagcctaagctgacgatgtcttgatgggcgggcacgggcgcacg

SEQ ID NO: 64432 - DNA, 309 bp, Zea Mays
ctgcctccgacggtcgtacagccaagcgccaaaaaatcatcttgttgcggcaccagagacgttagtctaagcaacaaacaccacacaccaacgtgtctgagcaacaaacaacacacaccaacgcttataagtcacgtttcgacgctctgggtggccggtatggcactaatcaaataacatcatagcagtatctgtagcggtgtatgcggcccaacgattggtgcggcccattaagcccatcctgtgagccgctgcaacagctcctgaccgagcccgtgtggtgtcgcgagatcctggacgcccgcagcc

SEQ ID NO: 64433 - DNA, 342 bp, Zea Mays
agtttcttttatatcttccaagttgggttgatcaaagcttattctgaaaccagtttaccaaaaaaaattgtttgtatgagcagtaaaaagaggcccattgcacaaatgcttagattagttttggttggggtgcgccaggcttaggcggtagtgcaacacctaagcgacgctctaggcggtagtgcaacacctaagcgacgctcgagagctccagtagcaagctactgttgcgagctctaccccacaaaaaataaatttaatatcgaaatagacatatagtctacatatcagatattaaactgataagaacagatactacacttgatcttagccaaaaggccg

SEQ ID NO: 64434 - DNA, 450 bp, Zea Mays
ctgatctattccaatgatgatggagaacatgtggagcacctaaggctagtactgcagaagttgagggataaccatctttatgccaaattcagtaaatgtgaattctagttggatgaaataccttttcttgggcatattatctccaatggaggaatcacagttgatccagccaaggtaaaagaaatagtgggatggaagatacctaaatcggttactggaatccagagtttcttgggactagtaggatattaccgacacttcatcgaggggttttccaaaatagcaaagttgatgtcctcgttgttagagaaggtaagggaaattaagtggactccagcctgccaagatagttttaatctgctgaagttgaagttgatgtcacccccagtattggtcatgttgaatttgcaaaaaggatttgatatatattgtgatgcatctcgtcaggga

SEQ ID NO: 64435 - DNA, 290 bp, Zea Mays
agaatgagaaaaggtctcgcgagagttaaagcttatgcccaagacgcgctacgggttggtgaataactagacgtcacatgctctagtttttaattggttctaacaaaagaattagctacatgcattaatggaaacctagtcatttttagttgatcaacattgaactggataaacaattgattatatgaatcaactagcgtaacagaattctaaattaagtttcctatttcaataacatgaacaatgattaacctgcctagaataaaataaataacagtaatgaaagaaaa

SEQ ID NO: 64436 - DNA, 358 bp, Zea Mays
ggatagtcggatttgtcccttattaacggctctagcactcctctagattcgcgaacgaaaccagtcactgctaatcatcccgcacaaccacaacgaccgacgatggcgttgccgcaattatccccgatctccaagggcgctaattaggacaccccgacgcttgccaggctgcacatggctggcattgcattacattacccccacccgtcacctgatctccaccgtcattccactccatcagtgggcagcgctctgctctcctccactcacgaactcactcactcactccccttgcccccatccatccgctagccactagctccagcaggctcgccgccgacactccactagtgctaac

SEQ ID NO: 64437 - DNA, 369 bp, Zea Mays
aaatgattttggtggttgaattgtccaacacaaacaattggactaactagtttgctctagatcatacattctacaggtgccaaaggttcaactcaaaaccaatacaaagattaaaaagggttcaaaaagaaaggagcaaaggaaaccgaagtgctccctggtctggcacaccggactgtccggtgtgccaccggactgtgtccggtgcaccagggtgaatcagctcaaactctttggcttcgggatttccaggcgcagctccgctataattcactggactgtccggtgttgcatcggacagtgtcccgtggcacaccggactgtccggtgcaccagcggagcaacggctatctgcgcgcaacggtcgac

SEQ ID NO: 64438 - DNA, 204 bp, Zea Mays
ctaaagtagcatatttactggattctcctattctaatacatatgttgttcttttgatcacatttgttatttgtttgatcattgaataacttcaattaaccttataattcttagtgtcgcatatactatcaatcgatatctctcttgatgtgcactaagttaaaaggataattcatgatacaattatgcaccctgtgatccattt

SEQ ID NO: 64439 - DNA, 743 bp, Zea Mays
cttgaaaatgcttctcaaaattctactcatttacctttgaccatttgcaaaaggactttggaaagaatttacaaaagaatttgcaaaaacaaaacatgtggtgcaagcgtggtccaaaatgataaaaataaagaaatcaatccatgcatatcttatgaaatgaatattggttcaattctaagtaaccttttgcacttaccttaagaaaactagttcaatttcgcacttatatagttgctttggtttgtgttggcatcaatcaccaaaaagggggagattgaaagggaaatagggtcaaacattttcctaaatgattttggtggttgaattgcccaacacaaacaattggactaactagtttgctctagatcatacattctacaggtgccaatggttcaactcaaaaccaatacaaagattaaaaagggttcaaaaagaaaggagcaaaggaaaccgaagtgctccctggtctggcacaccggactgtccggtgtgccaccggacagtgtccggtgcaccagggtgaatcagctcaaactcttcggcttcgggatttccaggcgcaactccgctataattcaccggactgtccggtgttgcaccggactgtccggtgttgcaccgaacagtgtccggtggcgcaccagactgtccggtgcaccagcggagcaacgactatctgcgtgcaacggtcgactctgcaaaatgaataatgcaattcagaatgtcagagcagaagtcag

SEQ ID NO: 64440 - DNA, 777 bp, Zea Mays
agtgccttgtgagaattattgagagttagtgagcactacatcttgtgttcatttgtgcgtggagttttgaatcccattgaactttctccaaagttttggaggcttgtaaagctagcaagagacaccaaagagtgtggtggtccttgcggggacttaagtgatccttgagaagaagaagagttcgccggtctttggtgatcggtggagagagggaaagggttgaaaaagacccgtccttagtggactcctcaaaggggactaggccttcgagggccgaacctcggtaaaacaaatcacccgtgtctcgtgtgcttattgcttgtgatttgtttgttctttccctttctaagttttcctgcactattctttgctaatattatttggtgttgctttaagttaaaatctcatagagtgaagcaacacatcgcaagaaagaacttgtgtcattgctcttcttatccaagcccccatgctttattctcatagacctattagttgtattgttttatcaattccgcattattagaaagcaatactctttacaagcaaggacttagtttttatactccgataattgtatatcttgttctaaccactaatcaagggatcaagttgggggataaagttttaattttcaggtttcgcctatccacccccctctaggcgactttcagccagcgcccccctcatcgtcgtccgtcggaacggatgactcgatggggctctctgtggcggagagggcttacgtcggggtcatcaagcgagcagggctcgaag

SEQ ID NO: 64441 - DNA, 358 bp, Zea Mays
ccgaccattgcatctcgcggcacaggcgtttccttctccgagcacgggcgaccttcgggagctggcagcgacgtgatggagcgagcgacaacggtgtcgagggtggtgcgcgggtcgaaagagttgtggggcccagtcgtgtactctgccgatgtctgtacaaccgacggtggtggaggtaggcgtcgtcgagtcaatcggttcgggcatgtcaacggcagtaagccctcctccgcgacgaaggcggcatcggcgaccagcttctacaaccgcggcgaccaaccggaggtgtcgttcgaacggatccgcacgacaactaggtgtgggtgtttgggttacccgaaattttcgggtcggg

SEQ ID NO: 64442 - DNA, 231 bp, Zea Mays
aatttttaagtattttatttcttatttttggctgttgttatttaggtgccgtctaaattattatatatttgtaattgtgtttgtttgattactgtttgtgattcgtatttattttttaatttgattactattatattattagctttaatagtatatcatattgtttgattactattatattattaatatgcaagtatattattagtatgcaagtattttacagtatattat

SEQ ID NO: 64443 - DNA, 3351 bp, Zea Mays
agaggatccggggtgtagatcacttagccgccgtgccgtcaatggggctcggtgtatgcggctcgctctgccaagtttgggttcgccccttggggaggagtgcagtgcatttaggaaacctaacgggtggctatagccccggggaatctttgtaaaggctacgtagtgatgccctgctgggtcaccttggtagtgatcaatggagagtcatgatctccgggcagaaagggaatcacggcttgtgggtaaagtgcacaacctctgcaaagtgtttgaaaaactgatatatcagccgtgctcgcggttatgagcggccaagggagctccagtgattagtggtacttgatcagagacattatggtacaggtggctatgagatcgatggttttggttatgattatggtgctggtaagtggtattctttccgtttggaaagggtacatcgggctaataacttgggttaatgctaaaacctggctttctattagtaaataataatcggaccaactaaaagcaactgcttgacttacccccacataaagctagtccactacagccaaacaggatacttgctgagtatgttgatgtgtactcacccttgctctacacaccaaaccccccatccccaggttgtcagcattgcaaccactgcttaggagaagatgaagctgtggaaggagacttccaggagttccaagactacgacgagttctaggcgtgggttagcggcaacccccagtcggctgcctgtgaaggccgctgttatctacatttcgttttcgcactttgatttattgtaaggactatatggacgtctcagacgtatgatgtaatcgactattacttcccttttaataccattttgagcactgtgtgatgatgtccatgttatgtaactgctgtgtacgtgaataactgatcctggcacgtacatggttcgcattcggtttaccttctaaaaccgggtgtgacaaatgcctagaccaaggtatgttgtgatcgcctctagttctaaggatgctagaatgtgcatggtgaagtcattcaaagacttgatgcacaagtttagggggagcacacataactagtgtcttttgagactaactatttcttgagtgatcctatatagtctcaaggtggaaaaggaaaagtgagcaagaaatggagcaatcagcacttgggtacctctacaagtcgtgtaattggtatctaaagttgataaaggattgggcacaagtgtggaggagctccctagagataaagttgtcaaggtggaaatcttaaattgatgacatatatagggaactctgtcaacttagatggaaagtacaccatcacatggtaaaggtaaaaaaggaggtattgacttttgttttttgcgtatttgtaccttaatttccctcctgtcggtgtttagggtccgaccgcacacccggggttgcccctcaaggtgtttttaggagtaggacggtgtcgccgactgtagctaaatggttcgtgccggatgcacgaggagcgagggacaatgtttacaggttcgggccgctttgagatgcgtaacaccctacgtcctggtgagtatgctttaggtggtagattacaaggaggttctctagtattggaaacgtagagagctggagttggtggctaagtaatgagatcgatcgttctgaaggggtgccccctaggccttatatattcgaccgtggggcaatacatgcagatatgataacaacgcgcacctaaaagatagtgaactgatcgagtctatcttactataattcggccgacttatcctcgcctggttccatcgtacagggcgcaggaaagtcgggtctctgttgtggttgcttgctcaatgttattggagccatccaggctcgcgccgattcggccttacatcgatctgctttgctggtcgttcttccccaggcccacgaaaggatgaccttatgatttattgggcccctgggcctttcgtgaggtcttttatccttccagtggacccgggggatatctgtccccacatgcccccaatctttgggttgattttgagataatcggcccaaagatcctaggtccagcttgcggtcttcattttatgacaagggatactttccgggtagtttggtaaaaacaatttcttactatctccttctgctcgaaaactggcgttctgtctcaaactcgtgctttggaggtcagcatttcatatttgtaggatcctgaacttcactgggtgcaccggaggtgcacccaatgggtgtagcccccgagcttcgagtggatttttgaaaataatccactcgaaggtcctcataaaaaatcatcttattttccgcttgcactttgttggaggtcagccttgcttttgatcttgccatatgctttagaagttagcattgtcttgacttgaaatggcgattcatggggtgcaccggaggtgcacccaatgggtgtagcccccgagcttcgagtggattttttgaaaataatccactcgaaggtcttcattttgtgtccttttgctgagagtcatctttttttttcttccgaatgcctcagaggtcagcattatgtcatcgatattatgcttcagaggtcagcatttattttgtctttggagccgagttcgtgatctgcccatatcttgctaggtggtgcgatttatttgatctgcaactgattggacattcgatggacgtccactggctagtcttcatgtcgcttctgtcagtcagactttatactttaccgactatatttggctttcctttgatccttactgatatctcatttttgtcttgaggtattcattgcatgccttgcacggacgtgacagttttcaaaaatatactgataattcctgggcgtccccccccaatgggtgtgggcaagggacggcttggtacgctgagtgttttagccggccgcttctgagtagtaatgtgatgtgacggcgggtgtaatcatatcgcccgtgcagttgactggagtcctaatgggtgttgcattgcatgaaacagcgtcagccgcctgacgtatcttcagacgggttgaagtgtatattgaatattttgcgactgttcggcgaccgtggtaggaggtgagcggttgccttcttcttatataaatagtgcctttgcctctccggtttcttcgcacctctttgctgttctccactgcttgctttcttcttctcccctcgtttccaccatgggcaagagtaacaaacgcaagcgcgagccaactcctccgtcagaggacttcggcgattcggaatactcggaggagttctcctccgagtccgaggggtctccaactcccatctctcccccggcgtcgtctgac

SEQ ID NO: 64444 - DNA, 604 bp, Zea Mays
agcggaggcagcaagggcggcagcggcaggggcagcaacggcggcggcagcagcaaaggcaacaacaaggccagtggctagatgccactggtttttagatgttagtatagattagaagtagtatagtgaaataatgtagtagtagtagttagtagtgtagagtagtagaatgtagtatagtagtagaatgtagtgtagtagtaacaatagggaagtatcaactcataatgagttgatttgtaagttctgaaacttcccttaatgaagaatgatgttctctgtctgttatgtttgtgtcacagcttgggattttcaagtcatttcttcgtttgctttgtctgtgaaatcaatccctctagagtagtagttgagtcattcgggcatcatatcattgcttttagggtgatgaccgagttattattgtcaacatttacacctttgaagtggcatccgagtgatgacaaagccacatcagcgttggaacgactgatgaccatgtcggtgcttttagaggtaatagccgagtggcttatgatgacgttggcgttttagagttaactgccgagtgactggagacgacgtcggtgttttagagataactgcc

SEQ ID NO: 64445 - DNA, 2328 bp, Zea Mays
agagataactgccgagtgactggagacgacgtcggcgttttagagataactgccgagtgaccgaagacgacgtcggcgttttagagataactgccgagtgaccgaagacgacgtcggcgttttagagataactgccgagtgaccgaagacgacatcggccactttgaaggtaatagccgagtgatgatgtggcgcaccagtgcttttagaaataaccgccgggtgatgactagacgctttttggaaacggtatctggcccgggaagatcccatatgcgttgtgctttcagtcgcctctgctttccgtgccctagttcttgctttcctgcctctagatcctctctgtccttttgaaattcgactcccgttctgttcgccggtgaaattgagatggcgcccaagcgaaaggcctcgagttcatccgctgcggtgattccccctatcgaccccaacagctagttgcctttcgcaggtaaccacatgtctatcgtttctgagctcgaccttctccaccttgtgtccatcggggttcttccttcgaaggagctctgttcttggcggatttgccacggggtcactatcccaacagaggatacccacgaatccgtgatttatgttcctttccttctccgcggtctcgctcttcctatttctccctttttctgcggtctccttgatttctatcgccttaacttgacccatctaaatcccaattccattctgcaaatttccatttacgttcatttatgtgaggcttttcttggcgtcctgccacattttggactgtggaagtacttgtatcactgtcgccctgggatggccggggggcagcatcagctagtggagggtgcgagtttagagatgcgccgtgggaggaagactgactaccttgaaatcccactcaaggatagtatcaaaggatggcgcttggaatggtttattgttgagaaccacggaaaatctctccccccacggtcagggagacagccggatgttcgcaccccaagttggaccgagtctcctacagaccaggaggtggctgaggcaggggctttgctggctgaggttgggctgctgaaggagaggggtttgactgcagaggctgtggttgctgattttgttttcaagaacatccagccgttgaaggatagggcatactcagcctacttgtaccaaggtttagctgactcaacccgggtcaccaatagaagaattcccgctgtagacttggtgaaccggcttgaaatgatacttagaggcaaggtgtccaatgttggtgcccctatcgcatactcggcctagaacctgcctccttccaaggcttttacccattttgtgtcgaatcctcctgttgctgactgcggtttggtccttagagtacgaccctctaccgaagaagttagtgccttggttgcttcgattggagaaattcccgatgatgaatggcaactccactttgaggtgcctttggatcataatgatgcagaaataaatgctatgcttgatatgctggctgaagactcttctaatgctgctcctgctgggacattggcggtggtgcctctcccggaagctggtacaaccttggatgttcagaagcctatcagtgttcgcccgaaacgcccttgccgagcccatcaacctgattctcctgctgatgagcagaaaaagaaaaggagacgtttgcggcgagtacgtagtttggatcgggaagttggtccttcggttcctgccgctgaggaagtgcatgtgcctgaatctaccgacattgatcccaatgggtgtgctccatctgtcgctgatcccaatgggtgtgctccatctgtcgctgatcccaatgggggtgctgtctgtgttgctgacaaaatcgtggggggaagaagatgagatccctttgactcggaaaaacagtcggcaatatattgctagtggggaaagtagtggggttccttctcctgctctgtcagccctcatcggtctacaggaattatctctggtgaactttgatcagactctagaagatatggttccagaggacctgttatcagagccagcggatggtgacgcgatggatgtttgtgctgatgtgttcgacgccgggttggggtcatcccgggtagcgtcccgcgcctcatcgaccttagagcgcggtcttgagggccaggaaactgactttgatcgtcttgctcttatggaagtaactgaggggccttcagccttagaggcggctgccgcagagaacttgaccctcagggatggtgttgacgcttacccagccccgagggtgttgccggggatgattcggctcgaatgggaagcgtaagtcac

SEQ ID NO: 64446 - DNA, 3099 bp, Zea Mays
gaatctcgccctcgagattcaagaagaggctagcaagaaaatgagattggttcattggttgatcatgaccttcttgagttggctttcactctgcaaccttaacttgcggacttgttgcttcgactttcagatgctcgagaccaattgatgcagttcttgaggatctcctggacctgtgggttaggacccccacatgcttccgttgcgccactccgatcttgttggttgatgttgatcgcattgccttcattggggttagtggctaacccccttaacagaagcattgtacgcacttggtgaagatgctgccaactctgatcttgactgattaagagaggttggaggttgccaaatggacaggtgtgagaggaaagaatagcgagaaaacgtaagtatagaccgattagagagagcagggggagaacccaactacttaactctatggcactcaactagtaaactgatgtcattgcggaccaagggccacaacacatcaacactcatcacaaagaagcaaatcagtcatcacacaaagacaaacaacacaagcatacaacaacaaacatctcgttgctatacgtaacttttaattaaatggtggtccttccttaccaagggaaaactattctaaggccatcgaaaggcaaggggaataataagacatacagaataagggcatgagcactataaaggatggagctaaagcaaggattgtaaccgacaggggagagaatgcaaccaaagtcaagataggtaaaacatcattctcaaatcaaaataggaaagatgatatttcaaaaggtaggcatagggtaagcatcatggaaagatctagatattaggaaggtaagggtgatatcgagcaaaagctaagacttgcaatgcgacagaggaaaagggaacggacaagagcgagatgggcaagacctcactcttggaatgaaatgggagaggtggctttaaaatgcgggcaagcatcaaggtaaggatcgagggacgacaagggttaaggtgataatggtcgaacacacaacaaaggaatttttttgacagaactggtaaggtgtcaaagaagggggagcagtcaatgatgaaatagatgaggcattatccccgaacagggatggaaaagaggaggctcaaaggggtaggttcaatgtaagcatgtgggcaagggcataggtatcacgagggtttaaaggtgataacggacgaggatgtaggagaggaagtaaatgtgcataagaaccaagaatataagtaccacaaaggatggagttaagacaagacctacaaacggaaaaggagagggtacgtccaagggccagataggtaaactgccactcttgaacggagatggaagattggagattttagataacaggcatggagtaattaccaaggtaagatcaagagagaaaggtggaggcaataacaaacaaaagcacaacaaaggatgaagttacaaactcgcaagccaaagaagaggatacgaccaaggtaaagataggtaaagtgtagctctcagaatgagacggaagagaggtgattttaaagggcaggtatgagacaaacatcaaacaagatataaaggtgtccaaggtgaaggtgattataacaaaaggcatgacaaaggataaagttaaggcaagactcatgacgtggcgaagtggagaaaacaatcaacggtaagataggtgagggtgcaatagaatggttgaagtaagaattcattatcgatagaagttataaaggaacaacgagatcaccaaggatgggcaacataaaatgatcgctcatggaccgttgagaaataggggtggtcaaggacatgttaactgaaatgtcctgaacagttattgggatataaaggtaggcataaaaagataagagtatgagagatttcaaggagatgagcataccaataccaagagtaaagaaattgtcgaaagatagcgacttaacaacagaaaaggaaaaggtctcaaaaggcataaaggtcatgaacatataaactgaaatgttttaagtaggcaatagaaatttagaggcaagtatttgaaacaagagtattaaagggatacaagcatgtcaataccaaaggactagagttcgccagatggtagcaatttgatgatgaaagaggaaagaatcccaaaaagataagaagattatggtcagggggcatctacaaaggtgtctcaagcaaaagggtgagaatagaactagtatgaccagcaagtaataaaccataaataaatgaaggattagaataaaacacaattttcagcaaggtataatatatagtagaacataggtttggtcgatatgaccaacttttgaagggataccaaagtcaaggcaaggacagaggtctataatccttagaacgaccattctattctaggttagcggtcctacagtcagcacggctttgataccacttatgtcacacccagttttagaaggtaaaccgaatgcgaaccatgtacgtgtcaggatcagttattcacgtacacagcagttacataacatggacatcatcacacagtgctcaaaatggtattaaaagggaaataatagtcgattacatcatacgtctgagacgtccatatagtccttacaataaatcaaagtgcgaaaacgaaacgtagataaccgcggccgtcacaggcagccgactgggggttgccgctaacccacgcctagaactcgtcgtagtcttggaactcctggaagtctccttccacagcttcatcttctcttgagcagtggttgcaatgctgacaacctggggatgaggggtttggtgtgtagagcaagggtgagtacacatcaacatactcagcaagtatcctgtttggctgtagtggactagctttatgtgggggtaagtcaagcagttgcttttagttggtccgattattatttactaataaaaagccaggttttagcattaacccaagttattagcccgatgtaccacttaccagcaccataatcataaccaaaaccatcgatctcatagccacatgtaccataatgtctctgatcaagtaccactaatcactggagctcccttggccgctcataaccgcg

SEQ ID NO: 64447 - DNA, 288 bp, Zea Mays
ttgggccgcctgggccggggagtgaggaggggaaacacgggcgcgcgcgggttgggccggaattcggcccagccgagggagggggagtttttctttttctttttctttttctttttctaattctaattcctttcttctcttttttctatttttgtttcttttttattctttttctttggagaccaaaaatattttctaagtgatcttgagtgagaaacatagtctatgtgaggtgctctaattatttcaagtgtatgcacatgagaaggggttctaagggtagggtta

SEQ ID NO: 64448 - DNA, 1182 bp, Zea Mays
gcatttgagagaaaccctaggtgacactggggtgtcacagatgcaccatcgttgaggaagaaggttgatcttgctcttgttgttcttgtggtcgcacatctccaatcgccatggtgcgtattgcggtcgttggaatataatcttcatctatgtcatcaagatcaacttgctctcttggagagctgaaagggaaatgtgcccctaggccatttttataagattttggtgattaagtgcccaacacacattaagggaatgagtatatgccaaaggggtggacaaagtgcaaatcaatacaaaggtatgattctagacttagtacattggtttttgtgtactaacatatttgtctaagtgctagaattagagaaaagacaattggaaaagacttggctcgagcagccaagactctgctcagtctgggtgcaccggactgtccggtggtgcactggacagtgtccggtgcgccaggctggctctggtgaaaaggccactctcgggaattcatcggcggcgtacgactaaaattcaccggattgtccggtgtgcaccggactgtccggtgagccaacggtcggccgcgcaatccgcgcgtgacgcgtggccgggccaacggtctgaagggggcaccagactatccggtgtgcaccggacagtgtccggtgcgccaatggctccaaatcgccaacggtcggctgcgccagaataggaaagaaatccgcaccggacagtgtccggtggtgcaccggactgtccggtgcgccagtcgacagaaggcaagaattgccttcctggaatgctctcaacgactcctaggtgccttggggctataaaagggacccctaggcgcatggaggactacaccaagcatcctttgagcattgttgatcattcacactccattcttgcgcacttgttcggcattcttagtgatttgagctccgttctagtgagaatctcgtgatattcttttgagctcaagtcttggccttgtgtgtgcgtatttgctgtgaatttgagtgtgttgcttccctcccttactttattgcttcattttgattcttattgtaagggcgagagactccaagttgtggagattcctcgcaaacgggaaagagtaaagtaaagaagaacaccgtggtattcaagttgatcattggatcacttgacaggagttgagtg

SEQ ID NO: 64449 - DNA, 448 bp, Zea Mays
gttgggccgaaaacgaactatggcggcccatgaggcattttatccttttctttttatttttctttctattttcttcattttcaaatccaatttgaatccaagtttaaatccaaacttttatggcttatcatttacactatgtttgtatagttaacagtaataagtttaggaatatctatttttttatacttttatatcatttctttttttctttttttttccaaaccttgatttccatttagggtttaatccaacctctagtaattactatcttattactattatgcttattattttatttaatgcacaaacatataaaactccaacaaaatgcactttcttttattttagtatcatttattttaattaatcactcttaattagatgtgtgctcttttttttatgatgcaaataaggcacataaaatgagaagatctctctatattct

SEQ ID NO: 64450 - DNA, 279 bp, Zea Mays
ccgcgtttcatgcgtcttccttcctccggaccggacgggtgtgccggataagacacggcagagcaagcgatgacgctggaaacgggcgcaccccggcccggccgtcagattcgatcgagtgattcgacgtgcggcccgttgaggaagcggcagctgctaactggtcgctcggtgctgtgcgtcagctctttcagcgtcttggtctccgcccggccgggtccggggccagctagctggtgccaggtggtgctagcgtagtgcagccttccttttcgcaaa

SEQ ID NO: 64451 - DNA, 262 bp, Zea Mays
tctccttagtttgcaaacctagtatagctcaacataggctagagaatttatatctcttgtcgtattgattaaatttctctagtgtttgtgtttttagtcaaaaccgtctattcacccccccccctagccggtgtcctagatcttacaggttgtatcggagccgaggactccattatttgtggatctaaccatcccggagttggacaaaatggctcgtggaagcaatatgcatattgggaaaccaccgcattttaatgaaaat

SEQ ID NO: 64452 - DNA, 334 bp, Zea Mays
cttgatagtcctacaagtgaaccacattttactaacactctttgtagtaaatgcaatatttctctcatgaatgataatgttgtttgtgatgaatcacaaattattgttgagaatgaggtgttagtaagaaaggtcaatgctctaactaaagatttgaaggtgacacaatgttttcaagtcgggcgacttgctggtcgttctggctaaccgacttggacaattaatcgtgattaatcacgattagtcggaggacttgggcaattaatcgtgattggtccaaactgacttggacaattaatcgcgattaatcggacgacttgaaaacattgaaggt

SEQ ID NO: 64453 - DNA, 449 bp, Zea Mays
gggacatatcaagaaggattgacctaagtacaagaatgtatcctccactcgctttgatcattgctatattcttactcataatgctaagggtgttcatgcgaagtttgttggtactccaattgttggcaacaagaagaagccatttgggtgccaaagaccttggtcactaacatccaagaacccaaacaagtttgggtacctaaaagagattgatttccttttgtgggtgaactacaaggcgggagggaattattgagtgttggatagtggatgcactcaactcatgaccggggatataaggatgtccacccagataagtgaggacgattgcacaagttacgatacaatcacttttggagacaatagcaaataaaaggtttgggtagaattactattttcaattatcattctatctcaaacgtgcttttggttgattcattaaatttcat

SEQ ID NO: 64454 - DNA, 661 bp, Zea Mays
gggaaggttgacactacattgttcactagaagaattgataaagacgtatttatttgtcaaatttatgttgatgacatcatttttgggtctactaatgagttgtttcaccaggaatttagcaaaatgatgtcaaaagagtttgaaatgttaatgatagaagaatttagttttttttcttggccttcaaattaaacaattcaaagatggtatttttgtgagtcaatctaaatatttgaaggacatgctaaagaaatttgggctagaagataccaaaccgatcaagactcacatggctacaaatggtcatcttgacttagatgagggaggtacaattgttgatcaaaagctttttcgctctattattagtagtttgctttacattaccgcatataggcccgatatcatgtttagtgtttgcatgtgtactcgatttcaagcttcgcatagagaagctcatttgaaagccggaaagagaattctaagatatttgaaacatatatccaatgttggtttatggtattcaagggtactcaatttgaattaattggatattcggattccgactatgtgggatgcaaggttgatacaaagagcacctccggttgttgtcaatttcttggaaggtctctagtctaatggtcatttaagaggcaaaactcgg

SEQ ID NO: 64455 - DNA, 371 bp, Zea Mays
ctttattgtactatgggatttctttcaaaaatgtgccacttatttgtgacaatgagagtgtcgtgaagttggctacaaatccagttcaacactcaagaacaaagcatattgatataaggcatcatttcttaaggcatcatgttggtaaaagggatatctcatatgttctattggattcgatgatcaatcagcgaacatattcacaaaacctttggatgaatcaaggttttgcaaataagaagcgagatgaatgtgattgatttctcaaatgtagcttaagtcattttattgcctatttttcaagaattttttttctaatatgatcttagtgctttcatgtcaaaatcttgtatattttagtttaatatgtg

SEQ ID NO: 64456 - DNA, 391 bp, Zea Mays
taatttccaaattcaaggcatgatggctatatgagtttatgggacagaagactgcctacaatgggatggcggtcagacagttccttgccactacagagatttgacattgaggagaagacaattatctgtatgacagggtttaagaggtttgatgcaacctttgttgagtttgttgctgcaaacagtttggagtatgacttggtctcggctggtattgatctttatactaaagaaaactttgagaattatgtgcaatactatgagcctgcaaggttggagattgccaggaggtttggagaaacctcaggagtcaggcaccatccagcagtgatcaacaagattgctagactcactatcctttccaagagtggggacaagagtaacattagag

SEQ ID NO: 64457 - DNA, 130 bp, Zea Mays
gtggctctttgagttggatctgttggtgtggtgttgtcatgacaggccgtcatcctcgtgatgtaggctgggaacactctatcccattatctaaaaaaatcaatagtaatatatacaaatgtcgacaaag

SEQ ID NO: 64458 - DNA, 1137 bp, Zea Mays
atttgtttggaagtattaattctcaattgtctaatattgtggatgatcataatttggtaatgatatatgtggttgattcccatctggatgaagttgaagtgtctttttgaatcatgttatacgaagtgttgtaggcatgacatgcacatcacatcatccatcttgcattttgaagttatgtcgtgatcttatggtccgaccgtaccggtacatttttagcatcgtacgttgcccgaggaggggtacgatgcggcttcatatccttagaggtatgaaggcagaagtcatccttgcatttgcagacatttgcactcatgaggaatatatgaagtgtgactttactatgttactattgtggtttctacctgcgaggtgtggtaactaggtgcgttgtacgttgtatacgtgctgcaccttcgtaataagaaggttgtggaatcaagtggtggtaaaacaatgttcttatgtggttaaactgtttgatattattttacttgctgagatgtgtcatctcactcttgcattactcaatgcaggtacatgatacatgttgggaatgaggggagtagcagcacgtccactttcactctcacaataacgctgcccaggcacagccatgatttaattagaaacatattgtcaaaggaagtttgtttatttttttatatggtcgtgcgcactggttaattcagttcaggtcgtatgtttatctttccttgctagccgagtaataatacttagtatgttttagtcatgatatatgtttatactctgttgctccctcttttatgcaatcttgcaaaggggatgctgccgaaattttatatatggacgtcggaagtgtagtacagtagcattccgggttgtttgtggaacctggagtgttacaaggatacaaagaatataaagggtagaaattatgattaagcaagatttgaacacactatcatgaaaagggtccttatatggcacaaaggtaatggagaagtgtcataagtgatgtacctttgcgttttaccttttcaaaggggtgttccacacttgtgttgtatttagagttcattttgcaatctcttgttggcataattgtgacataggtccaagatatcaaatgaatattgtcatactaattgaaag

SEQ ID NO: 64459 - DNA, 337 bp, Zea Mays
atttttgattgcgcatgattgattttcgaatatttaatagcatttcgtcttaaatgaaaatcctagtaaacaatatataaaataatattagtccaaaaataaactttttatttataaataatttaggtttaattattataatttttagagttatttaaaaatgtatttcgaatttagaaaagggaacaaaaaaagaaaaaagaagaaagaaacgcaaaacctaacctagccggcccaccaggcccaacatccccagctcgcccctccctctggccgccgctccctggctgccctagccgccaccctgctctctcccaccctctctcctgctcttccc

SEQ ID NO: 64460 - DNA, 398 bp, Zea Mays
gccggggctcggaaccgatccctcgacaacctccatgattatccgcctactacggttgttagccatggcgatctcggccttgtctttgcctttggacagcacaagagtcgttgacgaagagatcgacgatgaagaggaacgagtgctctccttctcctcggcatgcatcatcgtcgtccttgcgtgcacgagagacagtcctgatgccaacagaagcaaggataggacgacgatcactacggcagcgcgtgatgaggtggccatatatctatatggtttaggtcacaggttgaaatgcgattattggtattcaggctaaatggtagaggctacagcaagaagagatcagcctactagctgttgattgcttgtgatcagagacgatgagcttgctgaat

SEQ ID NO: 64461 - DNA, 424 bp, Zea Mays
ccgatttttcacggacggcgtaagcatgttgtgtccgaagtctctcgacttcggcagacacaactgccgtgagggcccccgacgctgtgcggttggcgaagtcagccacctgcagaacacacgtaagaccgcggccccagcaagctgaccaaaaaaaaagaaaaaaaaagaaaaaaacgaagtccagctcagcagacctgacttagcgcctccgtcacctccttcagccggcgggacgcagcgcccgcctcatccctgacggccgcgagtgccgacatctcgcctccggcgctaagagccccgcccttcgccttcggcactacggtagctgccgcggtcgccgcggcaggcgcaactatagcaagttggccttcgtccgaccctgcgacgcatcaacgaattaaataacaaaaaacaaaaaaaa

SEQ ID NO: 64462 - DNA, 365 bp, Zea Mays
ggtaggtttgtaacatcccgaatttgattccaaggttagaaaccctaaaactcctaaacccccccttatttatctcctaagcccccacctcataagacatttcatttatcatatgcatacaccatggttgttagtagcacctcacatagaatatttttgacacccaagaaatatagatgaatatttgttcaaaagaaaaaaaagagattaaagagaaatagaaatagaaatagaaaaagaaaaagaaaaaaaaaagaaaatctctccccccctcctcggctgggccgaatccggcccaaccttgtctcctctcccccgcgtgccacgttccctgctcggcccacgcggcccatctcccgcgcgcc

SEQ ID NO: 64463 - DNA, 531 bp, Zea Mays
aaacgcaaggggaaacatatctcttccaccgatggttatgaaaaatcgttcagcttctcggctgtgacggcgctgccgccgtccaggatcgtaggcactgctaaaggaggaccaccggtccaccgccatgggccgatggcagcggcagggaggaggaggcagcctgttcgcgcacggttgctggcatagggtgcgtttgcccctgcttgccgcgggagcctctccgtcgggcgtcggcattcgcgcgagcactgccaggcagcctcgtggctagcgggcgggcgccgctgttggcctgccgcgcgagcactgctgaccttgtggctagcgggcggtcggcggtctgccgcgctagggcctgccgcacaggagcaaccgccgccgcgctggtcggtagaccgggcaccgccctggcctggcgagcgaggtctggacggccggtcgggcatgccgcgtgcgtgccctgcctccgcaagccttccacgcaggtgcgaggtagccgctgccagcctgccaccgggagtacgccgg

SEQ ID NO: 64464 - DNA, 366 bp, Zea Mays
agccaatcggcgttgtcctcgtgcgcacgtacgcctcattctttgctcaagctcggcgtccgcgacctacgcctgcgcgccaccgcaccgtccttgcaaccatgacgtgttgcgtgttgccaccagctttttatagttctctatggccccactagctcagacggtagagtggaggcgatggactttcttacctgttcggttagaccgattcagaattaattaggatgatatttaatctgtttcaatctccttcgatccacatcttcacaatgatgcacttttttaccaaaaaaaaaaaaaaatcaaccctcgaagccgaagcccaggcatgcatgatgcatcttgcttcagtgggactgagccgag

SEQ ID NO: 64465 - DNA, 541 bp, Zea Mays
actcagtcttagtagctccaacaagagtagcaccatgcttaaaaacagagatgtcattaggcaatggcatctctgtaccactatcatcatcctggttaaatctagtgtcaacatccttcatgtacctagaacaaaatgtcaaggtatcacttgccatatatgcctcagcaattgatccttccggcctagccctgttccttacaaaatttttcaaagtgcctagtcgcctttctattgggtacatccatccatactgaacaggtcctctaagcagtgcctcatcgggaagatggacacacaagtgcaccatgacatcaaagaaggcaggtggaaagattttctcaagcttgcataggatcaatggaatttctcctttcagccgtttcacaacatctatccgtagatttctactgcatagtttcctgaagaaggtccccagctctgcaattgcttcatatacatccttcctcaccagtcctctaaggccagcgggtatgattctctgtaggagtatgtggcaagaatgtgttttcagttttcc

SEQ ID NO: 64466 - DNA, 532 bp, Zea Mays
ctcctcacaaccaacttttctaggaattcagcttctcagggaaaaaaaactgtcctaaacaggcccgtgagctctcagcgtaaatctgaagattgtcggttgtatctggtggaagtaatgcactaagcacagttttttgtgattaaatgagctctagactcatgtactatctccgttctcgaatagttatcatccgctagtttattttaaaactaaactgcaataaataaagaagaatggatggagtattttgtaaaccttaagatgactgcatgcgccgccccactcaagatagaagagcagaagctttctggagacattgacatgcggagactgtcttaaagttaaatttatcaattctaaataaaagatcttcttgagacattgacatgccgagactaccttaaagataaatttatcaattctaaacaaaaggttcttgttgtatcaaaagctggatgtgtagcaaaatagttccatagtagattcactagtatatctagattcaattttttattcgtggagttatttc

SEQ ID NO: 64467 - DNA, 565 bp, Zea Mays
ctggcatcaaacacattactgttttctccttcgttccgccctattctcacagcttcgccctcttcgttttacgacatgctggccgctcacatcaattcacgtgtcctagaatccttctcttgttcatagccatccatgtggttgcttttctgccactaccggattgcccgcttcatttggcgatagagtagatggaagcacaggagaggagaggagatgaggaagagtgatgcaacgatggcgaagacgaggaacatgacgacaatagcagtgatgctggccacgaagacgaagacgaacaccaccatgacaacaacctgctgcaaaaagtctcaaactgaagtgtggcttataattcagcgcgctcttcgaatgatgaggacagatgcgtgaagaacacagtaattaaggatgatgaggatccccatcgaggaacacgaggtttagaatccaacgtagattgtggtggtggaggatatgaggtaataagctctgtgccttctctcctcgatattaacagcagcaacgacgacgtggcgttcgtttaggaacacgtatagatgca

SEQ ID NO: 64468 - DNA, 499 bp, Zea Mays
aatttgcataaccgattctatattttatttattcacaatcaaagaaaaaagacaaaaaactggtatccgaataagtatctgttttcatccctagtgatgatgttgcaccaatgacttcatcaacatgggatcagaaaagatcatgatctccaggatgaacttcttcattgttagttgctatttgaacccattcgttgtcccattgaaacacttctaagatcaaagggttcagattttttatttccacacggcttctttttgaatctttctattattttcttgttgtattggatataaaccaaatcattcaacatttgatgccccaatctattccttttctttgtacggatctaaaaaagaaaccactacccatttagtaacctagtaaccaactacgaagggaaagaataaaaatttcagtaagtagataatgtgaatgtcttacaaattcaaagatactccattcgcgttcacaaccggaggccgagcaacaaagtat

SEQ ID NO: 64469 - DNA, 508 bp, Zea Mays
cagaagtaaagctctgtaaagttcagtggagcagagaaggagaagaggaagccacctgggagagtgaggacttcttgaggagggaatacccttaccttttcccaaatccagtctaaatctcgagggcgagattcctttaagtggggtaggtttgtaacatcccaaaatcccaacccaggtttgaaaccctaacccccccccctaatctccccctggttttattcttctccctaaccctacccctaggtcacccaatcatttgcatatacttaaaatgatttgaagcacctcacatagaccacatttatcaccaagttcatttagagaatttttgttaagagaaaaagaaacaaaatgacacaaaagtaaaaaaagaaaaaaaggaaagaattagaaaaagaaaagaaaaaggaaattcctctcccctctcgcggctgggccgacttccagcccagctcgtgcgcgcccgcctccctcccctctctttccggcccaggcggcccacacc

SEQ ID NO: 64470 - DNA, 307 bp, Zea Mays
tggcagtccaaagtatgtaaaaagatcaatttttttgtctggcactctggcttgtcttcagagatagaatcaactcgaagaacttgctcaagagaaaaggcttcctaaatgcggctagtgatctgcgctgtgttctttgtgactctaactgcgaagagacaaccttccatctgctgtttgagtgacctttcagcttggaatgttggcagtatgtgggtattcaatggaatcttgagcttgacttctttataatgtttgaagatgcaaagaatgcttttgaccgacgcttcttcatggaaattgtggt

SEQ ID NO: 64471 - DNA, 313 bp, Zea Mays
ctcgtgtaaccaactctgcgttattatctgaaacagactcatgattatccaaatgtaaaccacggcaatggttgttattgcccatatataaacatgcagcacaccggccaggggcatcacggtgttttccaatctcttccagcgcctctgatattctttaaagattacacgcttaaatactgaccgagtcatatgcttgactagttcttccttttcttttcattctagtgagagttctagactaatttcttattccttactgaacgcttggttcttctaattgatgggttcataaaggaaatcgtggaactcg

SEQ ID NO: 64472 - DNA, 1821 bp, Zea Mays
agcattattatgagaatgaaggtggatgtgctgctacttcccactccccttgatgagcaacaagcacctgcattgagtaatgcaagagtgagatgaaacatctcagcaagctaattgttctgacgagatatttaaaccacaaattgaattcatcaacattttaaaagagtcacaattaaaaatcagaaatgcttgtagatatagaactcagtagtcccactataaccaataccatctcatttcctcgaacaaccacaataggttctataacacttccctgcgtcaacaatacctgcaaatatcacttcaatgtatgcatatgaatgcaatgtgtaggtactctatcttcatacctctgggggtataaaaccacatcatctacaaatatcacttcaatgaatgcatatgaatgcaatgcatatgtcctctgccttcatacctctaagggtatgaagccgcatcgtaccccttctcgggcaacgtacgatgctaagttgtaccggtacggtcggaccataggtcacgacaaaacttcatatgcaaatgagtcatgcaatgtatatggcatgctacatttatcaataaacttcacttccttcagatacaacacaaacctcaaataatacttcatttaccttcagatacaataccaacctcaaataatacttcatttaccttcaggggtgtgaattaatctcatgagtcatactcaaatcataatcatcatcaatatatgattgagcatcagtataatgcaagcaagtaaagcatcaccatagagtccaattatgaaagaatctgatacttctgaatattagagtgtaggcgatagaaataacaggtcagaacggaagcaaccaccgctacattcacttgccttcatcaaagaagaagaaatgtactagacatgatctggagtgtagtcacctgctagtgggcataaaacttagtacaaatatttcacaaacatttgccatcaatcaacaaaacactcctacacttgaaaccaagacccagtggaaagactcccaccctgaaccacatgccatacagcagcaacgctgtttgttaattttgtatctttaaaattaaaacagcggtgatatcaaacaaatactctaggagtatctacacaaaatactctacaacttcagtattcaatagataattaaattctgccatctacaagttctaaaacatctgacaagataactgactgaatctgttttagacagcagtatggttaactttaaaattcgatatctccaaaactgctgaaccaaaaattatgaaattcttctggaagtaagaacttttatccctctacaaaagtctccatagttggaagagccaattcggccatttactagatgaaacccaccagtgaacagacccacttatttttgtcaggtaaacaggaacagccacagtaaaacaaacataactggagtttcacaaatcatatgaatgcactctttaacaatttggaaagcttataaaattatctacaacttattttaccaacccatagtttaattctgttgataaaattgcctaaatcttaagagaacagattctgcacagaattatgagactgaaaaactgctatagtaaaactgcaataactttctggtcggatgtccgattgaggtgttcttcgcggccacggaaagatctacaaattatctacgactcatacatagactttttattttttttgaggccactaagaccacggaaaactggcatgaacagaaactgtcgaatctgccattctgcagaaaactaaattcgagatcaaaacctaaccccacatcaaat

SEQ ID NO: 64473 - DNA, 347 bp, Zea Mays
aaactgacgaagtccaagacgacttacatgttcagctgctgcgcaacagaacccgtcgcgtctttaacggggcggctgaagtaatctcgccactggcgcaaaacttggaccatgggtcctgcgaagcaccctttgccttggtcgccgccgcagtcggcgcggctggcactagagctgggacaacagccagttgcccagcatccgaccctgcatcacaatcttgtccaagacccagtccccgtgaaaaaaataaaaaaaataaaaaaataataataataaacaaaaactcaccaacaagtcctcggcccgtgcgggcatcgaacatcatgacaccacccatgcggtag

SEQ ID NO: 64474 - DNA, 402 bp, Zea Mays
gcgagtagacacggtgatttgttttaccgaggttcggttttaaagaacctagtccccgttgaggaggccacaaaggccgggtctatttcaaccctttccctctctctcaaacggtcacttagactgagtgagccttcccttaatcacacgggtcactaaaaccccgcaaggaccaccacacacttggtgtctcttgcttagctttacaaagcactcaagaattagaatgagaaaggaagaaggcaatccaagcgacaagagcaacaaaagaacacaaatgatcctctcacaagcccttaagcactagcgttgatttcgggaactttgagtggattgattgctttgattgtgtcttggagtgttgcactttgctcttgcaatgaatgagaaactcagaatgct

SEQ ID NO: 64475 - DNA, 756 bp, Zea Mays
cgataagacaaatcatcatagtggggaagagaggaaaacactggtgaataattaggggtgaaaggcttcaattgagagacgtggaacactgggtgtatctgggcatcagcaggtaacgccagacgatatgcgacctcgcccaccttctccaaaaccttgtaaggcccaaaaaatttgaaggctaacttggggcacggtcgattcacaaccgaagactggacatacggttgaagtctgagcaacaccatctcccccacttggaattttctttcagtgcgtgcacgatcagcttgcattttcatcctgtttctggcagcagccaagtgctcttgcagcatactagaaaaggcactcctgtcagcaagcaactgagccacatcctggtttgtatccacagagagcactggtgctgcagcaaaaggaggttcatatccatataaagctttgaaaggagaacaccccaatgcagtgtgaaaggatgtgttgtaccagaactctgccaacggaagccaagctttccatttttttggttgagcatgtactgcacagcgtagatacatttcgacacactggtttactctttcactctggccatccgtttgtgggtgataggccgtactcagattcaacttggtgcccaaaagcttgaacagatgagtccaaaaggtgctagtaaaaatcttatcacgatcactaaccatggactggggcaacccatgaagcttaatcacatgatctaacaggagctgagctact

SEQ ID NO: 64476 - DNA, 916 bp, Zea Mays
agcacttcctgcatccatagaggctgcacctcactaattaaagtcatgaccagcaagggtccccactctggaaagtgcatcagccacaatattttctttgccttgcttataaactaccttgaattgcatgcccatcatcttagccattgccttcctttgaagttcagaatgtaactcctgctgacccaagaaactcaaggctctgtggtctgtgtgaatctcaaactcacttctctgaaggtaatggcgccacttatccacagccataataagagctagaaactccttttcataaatggacaactgcttgttttttactcccagtgccttgctcaaatacgccaagggtcgtccttgctgtagcagcactgctcccagaccgtgctcactagcatctgtctcaactacaaaagtcttctgaaaatcaggtagtgccagcacaggtgtagtgcacattgcttgtttcagagcttggaatgccccagttgccagttcagtccacacaaattgtcccttctgtaacagctgagtaagaggcttagcaatagtgccataattcttgacaaagcgtctgtaataaccagttaaaccgagaaaacccctgagctcagtaacattgctaggttgtggccattgcagcatcgcagtagtcttggctgggtctgttgccacccctttagcagatatgacatggcccaaatagatcagttcctgtcggccaaaaacacatttcttttgttttaaatagaactgatgcgatttcattgcttcaaacaccaacctgagatggtctaagtgggactgccaggaaggattgtacacaaggatatcatctatgaataccatcacaaagtgtctgagatatggagctaataccatgttcatggcacattgaaaggtggcaggtgcattggtt

SEQ ID NO: 64477 - DNA, 268 bp, Zea Mays
ctgaaaaactgatcaccttctcctcccaatcacagtgcattggactgtgttgcttcaaccagtcataacctaaaatagcatcatacgcccctaactccaagactctcatgttagtcctgaaagtgtgtccatctgcccaccattccagtgaatgcaccatttggtcacttctgagagtttcaccattagctaccttcacaatagccggagaacacttggatgtaacgagaccaagtctgtccaccattagcctattaatgaaactggc

SEQ ID NO: 64478 - DNA, 319 bp, Zea Mays
aaataaatttataaataaataaaatcatcccaaaatggtatgtttaaattaaacatccaatcagagtacaaaatatcccacaaaaattagaattccaaatttgaaatttaaaagaaaagaaaaaaacaaaaaaaaaaagagaaccactcattttgggccaaaaccactcacttggcccactctacccctcaccagccgacccaactcccatggtagcctaacctgcgccagcccatcacaaccacgctctgctccctttctctgggtcaatgacgcgcgggcccgcctcggtcagctccttctccgcgggcggattgca

SEQ ID NO: 64479 - DNA, 414 bp, Zea Mays
attttgaaatgccctagggggccacacaattaaagttttgcaaaacacgagtctacatgattacctctcatacatgcagggctctagccaaagtgaagaaaaacttcagtacccaatgcatgtagaggactgggcataactaactcagaccaggcagcttctcttctggcaaggctggcacacaacttcaatatgagacatctcctggatgggtcaagagggagctgatgttgatgacttcttctggcatcgactgatatggcagaacgggattgaactcttcttcaagcgggactggttcttgtagctcctcaaagggcggcggtgctggtggggtgcttgcagcttcttccttgacctcacaggacgatgctggaatcttcttcatggtgagggacttcaaacaactctgac

SEQ ID NO: 64480 - DNA, 358 bp, Zea Mays
gttttgagttgttgttcctagtggtattggagctttctgactttgggtctttgggtttacaccctttcaggagtttctacacaaaatccctgacatgtcagcactcttgtgttgtatgttggctatatggatggtatatgcatctcccctccttgatgctttggaacttgttgaagcccacctccttgatggttgcattacctcggcgttgtcgagttccccacttgaccatgttgacttgacgatcggatctacgcttctgggctttcttctaattgaccttatggttggctttgactttatccttttgtgatgaggtcatactatgcatcacttctttgcctagagcatatttatg

SEQ ID NO: 64481 - DNA, 223 bp, Zea Mays
aatatataaactacccacaggtgaagatcaggtggtccaagaggagccctacaacgagaaatatgagcttatctaggtggcgtctcccagtcagcttgatggcgccaaggaataatatttagttcgttttattgttatcattttttttgtaagacttctgctatgtaacaatgatacttgtgacatttacctctatacactttgttattatatgtgatgttct

SEQ ID NO: 64482 - DNA, 177 bp, Zea Mays
aagccctttacatttgctaataactttaaggtaaatcactagggtctaaatagccttttcccttttagctcggttcccttttctgttgttacgccgaagcttccttgcacgtagcttcggtgctgcgtcaaccttcgtattattcgtgcttttcacattgcgtgattctgatccgag

SEQ ID NO: 64483 - DNA, 442 bp, Zea Mays
gtccattttccttacacactccatttctaatgtgtttttagttgagtcgctcgggtataacttgttgtccgttagtcaactttgtaatatgggttataattgcttattcacaaatgtagatgtgtctatctttagaagaagtgatggttcattagcttttaagggtgtactagacgacaaactatatttagttgattttgcaaaagaggaggccagtctatatgcatgcttaattgctaagaccaacatgggctggctgtggcatcgtcgtttagcacatgtggggatgaagaaccttcacaaacttctaaagggagaacatgtgttaggtctaacaaatgtaaatttcgaaaaagatagaccttgtgtagcttgtcaagcaggtaaacaggtgggaagctctcatcatatcaaaaatgtgatgaccacgtcaagacctttg

SEQ ID NO: 64484 - DNA, 630 bp, Zea Mays
cacaattcgaacaaaataaatcggggctaaaacaaataagatatgggttttataagtttttatgcatttttatataaattttacgcttaaatatagtgctcgggatgtttctacaaagtcatcatttatttatatttcttttgacttaaaaatggacacgcgttatttctctgagagtccaggggctcttttagaaaacttgataggcgcactcttttgggccatccattcgtgggtcaacggcccagatcagaccacaaagcggtatgcgtatattctaatcacatttgtccatcctagatcgacggctaggaggccatctcctttcccccgaccgatggagcggtggcgcggtttgccagcgaaacccatttctggcccagatgccccgaactcgaatcagaccggtgctacatgaaatagattcaatggtgaatcgatgggtgaagttcttactgggaatcggatgctggtgtgtgccgtccacgacgcggggtggacgggtgatgcttgttgaactttggcgagcaattcgcatcttcaccgccaccatccgagcgtgcctccgccacaaagatgctcggttcgatcctacgatgctcctaagccacatgtccctgcagaatcgat

SEQ ID NO: 64485 - DNA, 668 bp, Zea Mays
ctttgccttgcctgccgctgagtcagcacggcccggcgtggggcgagcgatggcaataatattgctgggggaagagaacacgaccggttttgtggtgtgggcggcccacggcctgtggtcggcaggaaagcgagagagctgcctgcggggccgaaagggacgcgtggtccggcccaaaaaacgaccgaccagcgtgcggccgctccactccatcaccatccccatcaccatccattatcccagtccagtccagccacgtgcagagaggcaaccatcaacgacggacgggggtctgcctgcgtgcggtgcggatgcggatgcggatgcggtgaaagttggcagttgcgccgacgacgacgaagacctcgtgctctgctgctccgcatcttcgcgttttgttttggtcggtggggtgatcaccccgtcggtggcccgccactgccgcgtgttcctgggaaggtcgacggcggcgtagcaaaaaagaaagaacaaagaaagccagccctgcggcggggcggaccatcagcggcgtacgtacctttatggaatggacggaccagctttcttttacgtctcattttcgccgtaaaaatgataaaatgtacggaccagctttcttttgcggctccatgcctgaaaagataaatgaaaaaaaatgtaaagaacgt

SEQ ID NO: 64486 - DNA, 178 bp, Zea Mays
caacggagcaacgcccaggcacacacgatacgaactagccaaccagctgccgagggaggaatcctagcggaacactgtccaggtgacggcggcgcgctaccggtgacgggggatacggcggcatcgtcccctcctccatccccggcgcggcggcgccagcagccggcctgcaggtacg

SEQ ID NO: 64487 - DNA, 684 bp, Zea Mays
gtcgtcccttggcgaagaagaggaggcgtcgctgtcatagtagatgatcttcttgatgcaccttttcttcttctcgtccttcctcttgtttttcaagcctgagtcggtgatcttgtcaccttttggctcgtcaacgttgatgatctccttctctttgtcgttgatcactatccccttgcccttaagatccatatctttgggcggttagtcccttgatgaagagaacggatctgataccaattgagagcacctagagggggtgagtaggtgtgatacacccagcccaggtggggttggccgaggcccaacaaattagggttgcccggagcccaacagttcattaagcacacccaactcagggagaggcccaatcgccccaaaagactagcccaatgggggaagggtggctctcccttttaaagtggcttcctcctcccaagttaagcgaggtgggataattctgaggctcacacggtcgccgtccgactacaattgggccaactgggccagttgcgtctttgccaacgggtaatagtggaggatgtcctcatcattcccaccttcttaaaatgggcccaagttctgataccagatgatacacccagcccaggtggggttggccgaggcccaacaaattagggttgcccggagcccaacagttcattaagcacacccaactcaggg

SEQ ID NO: 64488 - DNA, 362 bp, Zea Mays
cgttatgagatcttcggtcctgaaaacaaggacctgttcaccatttttgagggcctaataagtcgcaatattcgctagtctcattacccatcgttactagtgattcaagttttaccggtatattgttattacgatattcatcactgtttgtatttgaagtctgtggtctgttacggattcttggtatatagtagttctatggttcatcttttcatgcttatgtccatgtagaatgggtttgtctggaagctacaatttatattccaatacaaatggaagctaaaattgtacgtaccaacttgcatgtttctacattatttattatttttcttcttttatctacacatatttgatgatttata

SEQ ID NO: 64489 - DNA, 153 bp, Zea Mays
ttgcactcaacccctttcaagtgatccaatgatcaacttgaataccatgacttttcttgcttttctctttttcctgtttgcgaggaatctccacaagttggagtctctcgcccttacaacaaagatcacaatgaaaacacaagagtaaggttg

SEQ ID NO: 64490 - DNA, 105 bp, Zea Mays
gaccctttgggcttccacccaggggaccaagcttcaatagaccagctggacccactccgtcacgctacagtcagcagagtcagagctcccttcaggccccctctg

SEQ ID NO: 64491 - DNA, 477 bp, Zea Mays
gttttttgtttggttgcagagtgaacggaacgaaacgtgactgtgacagcgggatgggaacggagcgactccgtccggttgattttttggagcggaatggttccggacctgaggagaatatttcctaattggagtcattccgttctagttactttgtaaccaaacagcaacaaaactgggatagaacggctccgttctacttggttcttcaaccaaacactacctaaataaatccacttggttaaagagaacatatagtgtgtgtgtgagcgcgagtactccttccatcctataataattaagctatatacaacacaattaaacaagggatctttaaaggctaagtgaaaaaaaataaaagatatgatctacactactctttatacatgttgtgtcttaactgtatttatatctaaaggcttatggtcgtatcatgtaatatcttggttgtctcttatatttaaaaaataatttcaa

SEQ ID NO: 64492 - DNA, 173 bp, Zea Mays
agcgaggtgcccgtgtataaaatgtcagaactcggttcagttgaaaaaagtggagctctcgtatcatgttttcaaacatggctttatgccgaactatctggtatggcatgagcatggagaggtggaccatactattgagtcggatgtggaccaggatgtagaccgaatggaag

SEQ ID NO: 64493 - DNA, 343 bp, Zea Mays
tctctagtctctactacccaacgcgtctatcatatattgtagccagtgtaaaagctaaacaagagctaagatgtccgtggtggtgcatcaaacgatttctgcgaccggttcgcaacgatcgggttcaacgccaacctgatcacctacctgacgcagcagctgcagttgacgctcgtcgacgcctccaacacgctcaacaacttccatggcttctcccaacctcacccctataattggcggcctcgtcgccgactccttcgccggccgcttctggactatcgtggcgggctccgtcatctaccagctcggcatggtcagcctgaccgtctccgcgctgctcccg

SEQ ID NO: 64494 - DNA, 547 bp, Zea Mays
ctaaattatagaaatcagcctggaaaagattccagaaccgagggtcctagacaccaggatgacgaggtgtgagagtagggtagtgaaccttagacgttgaaggatgtacactccctttagagagaagtcgactgaaggttcattaggtcctcgtgaaacattcgccggatgcatgtgcaggccggtgatgtagagagcgtcagacgacggaaggtcgacgacgtcgtcgaacgctccatcctcctcctagcaaggagcgtatcctgaggaggaggtgctgcgacgaggatgagtggcgccaaccttttggtgcctcccgcgagcaggctgcgagggcatcgaggatccctctccttccattcggccagagtcgtgtcctctcttggagagggaacggcgaggcggaggagagggaaccggtgattcctcccgaatctcgtcagagtcgctgttgaactctaccaccgatgggttgcggcgacacaccattttggagaggctttggggagatgaccggttgaagtgtgagtgtgtgaggaggctcaag

SEQ ID NO: 64495 - DNA, 315 bp, Zea Mays
tgacggtctgaccctttccagcaagggcacaagtgttttttttttcatctctactgcttgtttggcgtggtgttcctccaactcttgattttttttcttttttttttaaaacagatgtacaagtacaaacatctggcttcgtctctcgtgaccaagagaataagactgtcatataaaacgtttttgataaactgtcatataaaacgtttttcctttctttctttttaatcagagattcattggcatttaataaactgtcatataaaacgtttttgatgatgtttttaaaaagaaagaaagaaaaatgagttttac

SEQ ID NO: 64496 - DNA, 754 bp, Zea Mays
cgatcaagcaatctacggtcacgctttaatgcgtgaaggggtacgcagcgttttaatcccaagcgtccaatctagcatcgaacggtcgcggcttagtgactcagggctctcatcatgagtcatgactgtccatccatgaatggacggcgcgggggcttctcccacctccgaaccaaacagcggcggcgccaaaccaaacaacgacgtgcgccatggccgcagaacaacaaacttgtacccacttgcccaacacttacaccggatgtgcactacatgtagcggggcaaagacgaaccagggtggcttgtgattaccaggacccaaagcgccgcagttgacccacacgtccgcgaggtaaccacgacgactacacagcgccggcgaggaaattctccgcgtcccgagattcttgactcatcccgagggtacggacggattcgccgtgcctagaggattccccttggaactgcgccgaggacgggatgtcggcacggcagggatcccccagcggcggccattttcttctctctctcggtttctgtccatggtgggatgcagggcggtattacggcaccttgctcatatatagcccaggggttccatggccccgagaagcgcgcgaatctgtagcacccgatcatcggcggcagtctcgaggggcccgttgggttcccctggtccaaagctgggagcaagatttcctcgcgtacacgcgaagtccgccatggtttgttaaggggggagatgattctgg

SEQ ID NO: 64497 - DNA, 225 bp, Zea Mays
gcaagttgaaaccgtggggatgtgcatgcatgcgtgcgtgcgtgacgcgcgagggagggagagccgagatgcatggatcaggctcaataatgggcacatgccacgagactgaatggggaacgcacgctgggggagtaaaaaataactggtcgcgattataggtgtacatgcaagcaaaaaaaaaaaaaaaaaagccgacctaaagacagacaccaccctaaatat

SEQ ID NO: 64498 - DNA, 593 bp, Zea Mays
aaacagctgtctttattttgaagggaacaaaacccactgtaagtgtggcactggctgacccagccgaagaatggaggttgggcaaacttggactgcaaaatttggacgaaacaacgacaacaagcaccgaacgcagactacacgggctagctatgcggtaaaaccaaatttgctaactgatcaggagccgctggccatgcaggcgccaggtgcagagcggctgaggcaagtgcagcgaggcgagaggccggagatgggagggccggagggggatccggcgagccgtcgacgccgaccaccgccgccgcctgcgtacgtgccaaataccaagtgagtgagtggaggatatccatgtccctgtggtcccttgccgtaaggccatcgcggcccagtcaggagtccccaaaggcccaccactcaacgtctccactctccaccagaaggcagaactagaagctctcgtcaagacgtcttcttcatcaacctcgctcgcgctcagccgctcgccggtccgccgtccgcgctcggcgctccgaggctggagattctgctgcactaggggaggtagggcggccggccgccctcaccttgcg

SEQ ID NO: 64499 - DNA, 782 bp, Zea Mays
gttgtgataggcagcgcacaataatgggatgcgatggcccttcttatatagatgatcaccgtgtacaacgatagtaacagcatgagataattgaggagagaataaaggagacgcagctcctaggatggaaagggttctatcctaaccatatatacgagatacatgctatacatctaacaatgtgcaccgacggatccagtaacggatcatgatggagctactaaactaaggctataaaattctttaaaacagaagaaaacaatctaattgatgttaggaacaattagtactcaagaaacatgtagtctaaaaaagtcgatacgaattctacaaatacaataataaataatcaatacataccgttctgattcttgataaggaatccatccattctatctctataaacataaaatttaattttatcaactaacctactaacctagcaaataattgattaagccaaaataccaaataatcttactttttacctagcaaagtagcactagcagccacacacacataacagactaacacgcacatagcagactagcagccacacgctgctcaggattccttcctccatggtggtcggtcggagcagtaaacgcaggagctagcgagggcgagctgctcacgggaaagcgggaggccgagcgcgtgccggtgccacgcccgcgaggctgcgatggagcgccgccgcgccggcgcccgacgatggacatccctgtgcccctgtgggagtgttggctgtcgcggtgtctctaagactagagagagcggcg

SEQ ID NO: 64500 - DNA, 325 bp, Zea Mays
aactagtggaggtatacatggggccacgacacaccctaagatcatataaagttagttagcatagtggtgtaagtactattttttgaacttaacggttaaggtttgaattttattgatcactatttttttgtttttttatatttttttctgatacaccctaagcgtagatatgtccgctactgcattttagcgttgcaacactatggcagctataattaaacatttatcaaggcatgttggccaacaccttcttaagttttttttcccgctacctgtagcattctcattctagcctttttctgaactaagggtctgtttggttcgt

SEQ ID NO: 64501 - DNA, 137 bp, Zea Mays
gggcccccgggctttggccgccggcgcgggcgacaacggtccacgccccgagccgatcggcggaccagcagggagccgttccgcatacgggccggtgcgcgtcgccagcccccatccgcttccctcccggcaatttc

SEQ ID NO: 64502 - DNA, 371 bp, Zea Mays
taaaaggaatctcgtcctcgagattcggtttagaagggttatgggtatagctttacttcagctacatatcttcactttgcaactcttcgaggagatggaacttcaacaaaatctggcccttgcggagcatccggctgctaattgcaaacgctggctactcaagatcatcttcaagcttctggctttcgcttggcaactagcttattgaagaagtatcgatgccaacacacaaacctttctcttgcaaactcccacatggattccttacttgattggtcttttggtgcttcattaacggaacttgggtgaccccctcttatccagaaacttatatactttgatgatctggtgctccacaagcttgctacaag

SEQ ID NO: 64503 - DNA, 1025 bp, Zea Mays
agagaacatattgttctcaattgttggcacatgtttggtgataactttgttctaaatgagtgatacgactaatctgctacatcttatgtagtagattccagaactggtacacagacataaaagttataaatcatatcataggagaatttgataagttaggggtccaagataaatacaaagggactaagccatatccacgcgataagtggtacatgtatgaagattagccatattggacactcatatgtttaaactctaagccataatatttccttaaataatactcattgtgttcctaacgttagtaaagtcttattttatcattgccttgctaaggacaattttgtatatcttgaatttcaacattatgccttcttataaaaggatcaaaccatgaggagaactcttcttaaaagttactgtcaccaaggactatatcctctttcatcctcaccatccaccaagaaatatttccatacaacaaaactacttccatccctaccatccatcaaacaatcttccatacaataaaccaagtttcgccaggtggcatagtagtttaggtcatgctttggtttttgtaattgaaaaatcattggtagattcaatattctatgtttggttgagttccatcaataatcagcatgtgatacttgctaagagcaaaaaaacacgccttataatgaatctaatagtgtgtcttatcatccgtttgagtttgccttctctaatgtttgatgttcttccccaacttagttactggatacaaatattatttgtcatttattaatgattatagtaaattcacatggatctgtcttctaaagtatgagccccaagtctttcagatatttcaagtactctaagacctaattgagcattaatttgttagaaaaattcttaccatacatattgattggggagtcaaatattagaaacacaaattctatattgtgctagctagcatatcaaatcatatctcatgtccctacgctcaccaacaaaatggctaagccggacgcaag

SEQ ID NO: 64504 - DNA, 308 bp, Zea Mays
ctaatttatttttttgttgtctatattttcgtttatgtcgctcatttgtccgcccagatttatttctcatctagattttttatttttgtgactgatttgtttattcatctagatattttttgtttttgtttattttttgtttttgtttaacgcaatggctatatatatatatatatcacaccgccaaattaaaggaaatcaaaggagttcagctaatttttttattttcttgtaaaatcatctgaacacaatagggaccatcgctaaatccggttcttgctgactgatccggttctgtttcgttgctt

SEQ ID NO: 64505 - DNA, 287 bp, Zea Mays
ccagagttaagtgctacatatattgtgtggttagagattctcagcagagtaaatggattcggatcgccgttatatccccggacagtggagacttggtcactgacctgcaactaagtcaggatgtgaacattatgaataaaaatgatgttgtattgatgagatggtgaatttagactagatgcaaatagagtctattaatatttaatctggcgttagaatattgaaagtaaagactcactttagtaagctatttctgcaaaagtatttaatttgattcttgctaaaac

SEQ ID NO: 64506 - DNA, 1332 bp, Zea Mays
gttgcatctagtctaatttcaccatctcatcaatacaacatcatttttattcataatgttcacatcctgacttaggttgcagggcagcgatcaagtctccactctccgaggatataacgacgatccgaatcgatttactcagctgaggatctctaaccacacgacatatatttctcgtaactcttgcatatgtctaccattcccacggatcctccactgcatgaacaggttcgcgccacccgagagcacaccaccccttttaggcggtccgttgctaggagggtacgtgtcactctcgccatctctccactcccagtgcgcgattgtcttttcatgtatggaatagacgggttcaagcttaccctgtcccatatccagggcatgtggctagttaagatagtccttgatcatacaggcctacatacacatccaatccttaattaacctgggtagaacatcacctgttcctagcccaagtctcgagttaagtacttccacccttaggattgttttgtgttccttaggatgaaaagagcattatagggaactttgcagtaagatcccaccatatgctcccgatgaaaatattcttgcaggtagaagccatctttcctcaggataacccctgagctaggcattaatgcaaaagacaacctctatccacaagatctaagtagagctaagcatttttgtaaacaatagttgatacttccaaagaagtacctataacaggaatggatatcaaggtagtcaatgcagcaaatggtttccaagcaactcctataaacctagtgcacatatcactagacttaaagtgtgtaaaaatcatttaaaacacaaggaaggggttgcatgcaccggggcttgtctttgttgcagagaagaggctctagatccttctacccaatctttagttagatagctctatccacttgatgagcaggcactggagtagactccttcaaacaccacttcttctaggtgttctacaagtcaattacaaatacatgtatgcttatgttatgatatgaaatgcaaactctcacaaggagaggtggggaaacataaatactcctaaataagtacatgacaagtatacacatacttctacacaacctagtacttcataaaagtgaccaatttgaattcacttaggtaaaccagggaattaatccaacttatatctcctccaaaagcttaaaacttcttaagcaacttcatctcttccctagataaacttatctcctttccaaagcactaacccacactgaaatgctatttcagctaactgaataaaattcagtcacagtcactctgacagtccaattttgg

SEQ ID NO: 64507 - DNA, 495 bp, Zea Mays
tttaccaaacttaggcatgagctaaacattcttgattccaggaatttttgattgactctttgcacacattgctcatttatataccgttgatcatatctcttttatgtctatgactaatgtgctttcaagtatattattatgcttagtcataggtattgaaagggaaatgaagtattcggcaaagaaggcgcttccactcaactccaattgtatttgccgatactccacattgttctccactttggtataatcttcacttttatttatgtgtttgccaaaggaggagaaagtttgaacaacgacttatatttcattcacaagtatccgtttttggcgattcatgccaaaggggagaaagtatgagcccaaagcaaatggaccgcaccaccaccaaatttaaatgaagttttcaatttgatatcttattgtgttcaaaagggggagaaagtagtatcttcaaaaattgcaaaaccctcttgaacactaagaggagaa

SEQ ID NO: 64508 - DNA, 2038 bp, Zea Mays
gtgcgcccacatataggaagtttttgggactttcatatggaggaggcaacggctcctaggccccttgaggctataaaatagacccctaagagcctccaactgatactcaagcactccaagagctacacaacactgacacgctacgaccatgcctgctagttattttttattgagatctgagcatgagttctgtgatgtttcagtgatcttgtgtccatgcgcttatttctttgtgattcttgcatgtgttgctgcattatgctcttgtgtgtgtactctatctccctcccttactttgagttgtgattttgatcatttgtaaggttgtgaaagactccaacttgtggagattcctcacaaacctgaatacgtgatataaggaagaactgtggcactcaagtttgatctttggatcacttgagaggacttgattgcaacccttgcccaaaggaggacaccacaacgtggaggtaggatttggtcgaaccacgagataaaaatcattgtctcttgtctcatttactttattgtgatttcttcttcttcctaagttctcttgagtcacttggaatattgctcttagaatcttccataccttggaagagcgatcaagtaaaggaaacttttctatcatcttctccattcaaacttggttttagcttactctaactttgtttttagaccaagtttaagttattttaagctatcggtgctggatcacctattcacctcctaggtgctctcaatgacaatatcatcgactttagaggaactattctctaagaaaatgagttgcatgtataactcctatagaatgatttatcggatatctctcaagtgaccatgactataagtcaatactttcctatgttaaatttatttcccaagagaaatgttagctggagcaagaggaaatgatcaatgatagccttaaacctgaatataatgggtttgttgttggtgtgagtggttgcccaactcaaccacctttagtcgagttggagaatttattagttaaccaagaggagttagccaaggaaatgggcaacatcatagtaaagaaagaatataagacctcataataaaggaagagtcatttaggagacagcaaatacccaagccaaaataggtagaaggtgacaagtatcatacaaaacaaaaagtccttcaggggagcaagagaaagagttgaataaaaaaactatgtggtaagaatggtcattttgctcaagaatgttgacttccaaaagtgaattttgaaggaaattttgaaaaaaacatctaataataaaagcgattgggatactggatcttggttttctcaagagtataagcaaatgacttagaataggatatagaggtcccttcttttgcagcaataaatggtccaaaaattaactacaacgaaaattggattatttattctatcagctctaatcacatgaccaattatgacaagaatttggaggagatgaccgactataagggaaaggaaaactattgatgatcgacaattcaagattatttattctcgtgttggaaaggtaatcattccaaaatatggtttccatcgaatcaaattcgataaagtatatcatgtattcaaattgaagaaaaatcttctatcagtctctcaattgatagagaaatgaaaatatgttatattcagattataaggtgtgttatatttgagagagttaagtatcttggaagaaaagaagagacaattagtttatgtactctctgttgagcctccttttgtgagaccatggacctttagcatgtctgctttggacttgtcaattatagctagttgaagaaaatggtgcaaaagcaagtattgaagtggttttctcaaattgacttccaaattgatcagctagtgctagttgtcatgtgttagtatggtaaggctcattagttaccatataaggagtcattgtatcaacccgagacattggtagatttatacacatgtcttttgtcctagtaaagcaaatatctcttgaaggtatgaggtatatggtgacttttatgg

SEQ ID NO: 64509 - DNA, 1018 bp, Zea Mays
gcaaaatttacatttaaaatttaaaaaaaatagatgcaatttttagagccgaaatgatttcaaataaaaagttgtcagctacaaaatttcataacttttagagatctataacttttatgttggtggttttttcatacaaggtcatttgaaaaactcaaaaaaaataggataaaatgatctctagtagcggtttcttaagaaaaccgcaactagaagtcgagttaaaatgatctctcgtagcggtttcttaagtaaccaccactagaaatatgatttctagtgtgacaccactaaaaattgcactgccttggtaattgaacccgtctgtaaaaattaaaccatactgcatggtttaagctcttttctcctagtgtaatctttgaaaaaaaaacttggaccccttgttgcttgggccctaggtggtagggccagagccggccctggtcctaacccttaaactagtgtggtttctttatgtattaattatagtgtcaaataagtaaagtgatggtgtggtattggaactaagaagagagaaaaaaagtttcttaggccatagataaatgataagagagtagacatgtgattcgaaaattttctactttaaagaaattatcatcaagaccatgatttcttgtatagtttttactccctccatcctcaaatatagggggatcaatgtttgttctaattcaaagtatgttttgacaaaaaaaaatatgggaaaagtttatggccatcggatatattatcaaatatgttttcataatttatatattttaatgtgatgtatatggtaatactcttttctataatttggccagatttcacctatatatagtttctctagattaatcatatccgaccgggttaggcttcagactagtcatatatatccggcgaaacgtcttttttttaaaaaaaaatctcggctcggcctgagtcttttcttgtatctcaaatcaaagtcatccagcaatttaattaaactgagcaagtgttgcccgtgaaaaaaatt

SEQ ID NO: 64510 - DNA, 2101 bp, Zea Mays
ctcgtgcttattggacatctctaaacctaatgcacattcactagacttaaagtgtataaaaataatttaaaaacacaaggaaagggttgcatgcaccggggcttgcctgaataacactaggttagtgttgttagacgatgtccacttgacgatcatccttgtcttcgcattgttccgattatccatcttcaggttaatcaccttgcgaattagtccacacttggggtcgacttgactcatcttccgcttcacgcgattatttatcgtacctcatgagatgcatgatgcacatgtatgagcacgagtataacgagtataatataaataatctacctaaaaaggatgaaacacttaaaaccaaacattaagcatcatggatatcacaatagggcatcgactacatccattaaccaaattgacatattacactagaaaatatatttttattcctagctttttattaactctttaaactatgtatcttaattacttgattaccgatttatctaaatcgatcatctagacctagttaacgggaatacgaatcaacttaccctgactaattcgacgcgatagtcacaagcacgactacgggttccggttgatgtaattgaggggccttcttttcttcggtaatcaattgctgcagatcttttcctcgactgaataattttgacgaaccgaacttgagtcgcgcaggatgtccgagcttttattgcgcacttggtgaataccacgctgctggctttgtcttcacccgattcttgcgatttcttgctgacacgcggaacgacgacgacacaggagggtgacgtatatagagctacacacgcgacgcgacgacgaacgacgctaactggcggaatcgacgacgcgattgggaattaaagtcgagcgagccgagagggcgcgctggcgagcagaaaacaggacgcgcggcgaggctgagcgtctgtaagaaaaacgtgatggccagagaactcagcacgggcgcgatgatttggcagatcaagaaaacatgacgacaagaggcaagatttgcagatgcctcgacgggactggccagacacaaagacacacaaagacgacgacgtggggcgagtagcgcacacgcacgtcgcaacaaaacgatgactgttcagcgcttgatatttcttggagcagagcaagaacgctgggagttcgcagcggtgctccacaacggccatcaccggcgtcgagcaagaggcgatttagtgaggttgacctcaaacaacgcgacgacgagctggaataccagggtgaccgcggcgtgggaggaacggcgaactcacaatgggagggacttcgagctgtggccggcgggcaggaagcgggacgcggcaaaggaagagcgccggcgcgcggccatggctgaacagagaaacgcgcgggccgcgaggagcagggactggccgccagcagagcgcagaaggcgagcagggagctccggcagaggaccgcgcacgcaggggcttgacgacggacggtggccatgggcgagacgcgcgatcggagcataggagcgcgtgccaggaagaaccgagcgggcgctgggcacggccaccggcgggaaaggccgccgcgcagagaaggaagacgagcgcgcggccagccaggcgaacaggagatctgggaaccgcgaccgagggagatggagaggaggagacgagctcggttggctgggtttggggctcggcaggggagccgccatgggaggaggcaaaagggcgagcaggggcgcgcgcgtgccgtggtgtccagtcgcgacgtccgctcggtggtcggcctcggtgaagaagagaggagacgtgagggagcgacgcggcagaggaatccacatccgaccagcaggcgccatggctgggagcttctgcaagctggagggagcagaggaggcgccgagctgaagaagcacgaggaggaagaagaccacggcgcgcagcagcggagcgcgcgacgcagagacccgaagggcgcgcaggcatggaggagcgcgcggcttagaggagccaccatggagagaaccttggctggctgggactgggatgagccggccggacccgagggagataagggagag

SEQ ID NO: 64511 - DNA, 923 bp, Zea Mays
gccttttgtgttgggtcaggcgggcgccctttccagttttcacccagccgtgaccgtgaaccgagcgcagtatcttcctcgccgaccgcagcagaacgggaatcaaaggccggcacgccgtcaccggttcaccactcaacgttgcccacgcacggccgcatctactcctcccccaacacgcgcggacgtactcagtaagtactacgtggtcgcccccgcatcccagcacctctgcaggagcatccaatgccgcagccccagccttggacgagcgctgacacgcaggcggcggcacgagccgcatgcacggcatggctcggcgtcgcctactcgcggaaaggcgagcgagcacgtgtggggggacgacaccatcaccgcgcgaacgtgcgcgcgcgcaagggtgggggtggggggacgcccatcccagccagtcccgggatggcgttggtctcgctcgctgggaaagaaaacaaatcccggcaccggcagcaggcagcacatgtgcgtgtcccccgtttccggtgtacggtcaccgttttagaaaatcggcgaggggtcagagggagggaggggggtggcaggcgattgtcatggcgccttgtccatcgccgccgcacgtgttcatggggcgcgcgcgggtgcgccgattctgcccctgcccctgccctctcgcctccacgagtccacggtttggttttaaactatccgcaccctctgttttagatacatagctttttgctatacatctaaataaatatacagcatttctgtcttttccaaagttgttccatgtatgtgggtaagaatgatatatcttatttaccatgcatgctttctttcttatagtttgtatgcttatattttttttttacttttgacttttgagcatatctttttggggaatgatgtatcttatgcttcta

SEQ ID NO: 64512 - DNA, 723 bp, Zea Mays
ggcgcgtcgacctctctcggtcgctttttttcatacaccgccttcagctacgctgtaattgtaatgatatccttgtgatgggttcttgcttggatgctgccttgagccacgtcgtccaaccaaccaacgcccgctagcgtgttgtttagaggagcaagcagtagcttacgttatcattaacctatccatacttgaaggatcggaattcggatccatgcgcggcagtccggctgacttttttttttttttttttttgctgacggcggcagctgattgagaattactccatgtgtctcaaaaccgaatgcaactttgataaccgcgtgaataatagtgcggggaggccggagagtctagcttcgttttaatagaagtttcctagaatatatcaggccggagagtctaactttgatacaggggctgcaggttgacaacgaaagttgtcaatattaaagttgttcaggttatacatccgcagtactataacacaagaaagactcggtgtatgtttggttcagtttttttttttttttgacctgcctctacttcggaaaacgaatgagttaaatcaaagtgggttcgactttttcagccttttctctagtacaaatttggaatcagtttggaccctacttttgctgcttatccacgctcgttatgtataataaagagatgtggcaaatagaaaatgaataattaggtgttctaataaatgaaataaaa

SEQ ID NO: 64513 - DNA, 182 bp, Zea Mays
ttttaatctgggtcgtagcacaagtcaacaaccttctggacaagtatcctgtggtgggtaggatctctagaatttgtgcgagatacctctaggacaagcattcaagaaagtcctacaaatatcccatcaaatgtaccaactgtcagcactggggactgggggcacacagtagttaattgccc

SEQ ID NO: 64514 - DNA, 293 bp, Zea Mays
cacctgtccatttggcaacctccaactcctccaaatcggtcaaggtcagagtcggcaacatcttcaccaagtgcatatcaacgctcctgttaagggggttagccgctaaccccaaggaagacaatgtgatcaacatcaaccaacaagatcagagtggcgtagcgaaagcgtgtgtgggcccataacccacaggtccaagagatcctcaagaattgcatcgatcggtttcaagcatttgaagaccaaagcaaccagtccacaagttaagcttgtagagtcaaagtcaactcaag

SEQ ID NO: 64515 - DNA, 214 bp, Zea Mays
gggctatgatatacaggcgcaatatacgtggcgtcacccaccaccaccagccccgcctcaggtcaaagatactgcagcgctatgcatgcgtccatggatgatggatttgggtctacgtgcaagctgccattgctcatactcatatatacatacctcgagtgtggactccattctctccctctctcttcgttcctgcggtgacaaaaacaaaaac

SEQ ID NO: 64516 - DNA, 1450 bp, Zea Mays
caggaacttcgcgcacacacacctacagcgcatggacgctgcgttttctatttccttgccacactttttaactgagcagtacatgtgcctttatagactgaatatacagagagctacgaactccactagtccactacccagccttcacgccatgagccacataactcatgttgctttgcatgcaagcaacctcctcacacacacgaacaagtcactaggcgctagcttctcggccactccttccagcatgcaagcacgcacgcaactaacgcacgcactacaccactcaactagctagtgaccagcaccatgcgcacacacccacggagctagcagttgcactgcatgcacacacatgcacaactgccatgactcgtacacacatgcgctgggattattctaacaaactctccctaatcctagcgccgcgtcccgcactcacaggagcgtcgcttcttcatcggccctggctagcagcgcctcctcctccttcttcttacggcaatcccgcgcgaagtggccgcggttaccgcagttgaagcacttgccgatcgtcgacttcttcttttttcgagctttccactcggcctccgtgaggaggagttggtcgtcgcgtcgttcgccgccggcatgagtacgccgccgagaacgctcatcgaacgccttgagacgtccgagcgcctcctcaaatggcatcgtctcaacgtcgcagaactgctcgatgcccgcgacgacggggaagagccgatccgggacggtgtcgaggagcttttttaccatggcagcgtcgtcgagtgtcgcgccaagcccggcgtaacgcgccgccataccgctgattttgccggcgtagtcgtccaatgcctccccgtcctccatgtacagcttgtcgaactcccccttgagcgtggctaggcgcgccgtcttgacccgatccgccccgacgaaacgagtcttgagactcgcccacacctccgccgccgttttcttggtggagacctgcatcaagatgtcatcgggcagagcttggagaagttgtgcccgcgccgtcttgttcttcaccgcgttcacctcgccaccatctggtggagacacggcctcccagagaccttgcgcgtcgaggatcgactccaccttgatcgcccacgccgtgtagctcgccggcgacagcaccgggtacgacatggagaccgaactccccccggcgccgtgcggaaccatcgccatagcttcggactcgaggtagtagcgcaggatcttgggcataaactgcctctgataccaaatgttggaatctactagcgctacacactcgatggaacgccaagaacagagatagacagagatgaacagtagctgtacacaagacaatggacacaggaacttggcgcacacacacctacagcgcacggacgctgcgttttctatttccttgccacacttttcaactgag

SEQ ID NO: 64517 - DNA, 509 bp, Zea Mays
tgcttctttatctttaggtcaggacaatatgcgagtcaccttagtattacattggccttagtaccttatttactaatatagagccaggatcaaaaatcacatttactgataggttgcatatattgtcggaactgtattgtgatgtttgttaccaatatgcaccattatgagtgaaatctgcatctaagctttagatcaggtattcttaatcagaacaaaaacattagtgaaacaacatctttcggtttgaaatgctttgtgacaagatctttcggtttgaagtccagtgcagcgaagttgaaaaatacttctgattcttacagatttggcaaaggaggtaattggcaattaatttagttggttattcattggtccactacatgatgtatagtgattacaattttgttttgtgcattgaatttacgtgttgcattaaagagttgaatctatgtttataatattttgtgacaggatctttcagtttcaagcccggttcagcgaagtttgga

SEQ ID NO: 64518 - DNA, 170 bp, Zea Mays
ctcctcctcaaggaagccttcgatttgagagttcttgaactccgtcccgttgtcacttcttattttcttgatccttaagccgaactcattttgagctcgtctcaagaatccctttaaggtttcttgggtttgagatttttcctgcaaaaagaacacccaagtgaagcgag

SEQ ID NO: 64519 - DNA, 328 bp, Zea Mays
ctttaacatgtttcttgttttccttaattagaaagtcctcttgggaatccaaaaggtcatccttttcatgaatagcactaattaatttatttaatttttctttttgttccatgttaaggttggcaaaaagagtacgcaaattatctttctcaccactagcattatcatcactagaagattcatatttagtggaggattttgatttaaccttcttctttttgccgtcctttgccatgaggcacttgtggccgacgttggggaagaggagtccctttgtgatggcgatgttggcagcgtcctcgtcgtcggaggagtcgctagagctttc

SEQ ID NO: 64520 - DNA, 499 bp, Zea Mays
ccaaggtcttgagccggttgtacatattttgtggctcctcccctttgcgaagccggaaccgaccgagctccccctcgatcgtctctcgcttggtgatctttgtgagctcatcgccttcgtgtgcggttttgagcacatcccaaacctccttggcgctctacaacccttgcactttgttatactcctctctacttaaagaagcgaggagtattgttgttgcttgagagttgaagtgctcgatttgggcaacctcatcctcatcataatcttcatcctctacggatggtacctgtgcaccaaactcaacaacatcctatatacttttgtggagtgaggttagatgaaatcgcattaaatcactccacctagcataatcttcaccatcgaatgttggtggtttacctaatgggacggaaagtaaaggtgtatatttagaaatgcgagggtagcgtaggggaatcttactatacttcttgcgctcttggcgcttagaagtgac

SEQ ID NO: 64521 - DNA, 522 bp, Zea Mays
ttttaagcaattcctatgaacctaatgcacatttcactagacttaagtgtgcgaaaagtatttaaaaacgcaaggaaaggggttgcatgcaccgaggcttgcctttgttcacaggtgagtcagtctcaggcccgcagatgtcaaagtagagataagaccctgcctgagactccaaaggtggtgttgtcttctcttcagtgacttccacttcttcttcgcgttctaacataaccatatttatacatatataagaatgaatgccatgtaatgcaaactctcacaaggagaggtggagaacagaaacactacaactaaagcacataacaagaatacacctatttcttatcgctcgattaaagtgaccaaaatgaaatcacttgggtaaaccagggaattaccccaaccaaggtctcaagcaaaagcttaaaactccttaagtaactttatccaagggtcaagctcttactagatcaacatgcatctgccccaaaagcacttagttccataattaagtaaggattt

SEQ ID NO: 64522 - DNA, 602 bp, Zea Mays
ctcgggttttgattctttcacaaacgcttgtccccgacatgacacggtcagccgccggccacactgcccctcgcttggactcaccgacggtggcgaagaatagcaaaaccgagcatcttcccaccattgttgagccaagacgacgctatcccatgtattgattaaacgatcacacaccggaaatccctctgaccacgggaatggcggaaccaagactccgacgagcctgttccgaacacgacaacgcggtagagttcaaattgaaggcatggtaagcataagtgactcaccaggacaccgtaacaaagggcgagaggtcgaaggggtcagacagagtagcgggtcgacgtgcaggcggtctgcggcggtgctcttcagagcaagcatacgttctggtgaaaggcttcggtcgcagttcgattgattgatactgggggcaataggaggctaacagcaagcaaaaacatggaacaatgaataggtactcacccggggacggctggccacggggggtttcttcgcggcggagcaagaacagaggagagggagatttgggaattaagtgggttttccggtgagctcgagtcaagtgcttagttgct

SEQ ID NO: 64523 - DNA, 729 bp, Zea Mays
cttcgtgctcctggataaacaaacaggaggccaagggtccatggacgactaactgcaatattctccggccggccaacttgagcttgagcagtgctgtcgaacaaaagctcggcgccgcgcgcgccggtgagcgacagcgaccacctgaggtcggcacggaattccaagctcggaagctagcgagggccttcgactgtggaagaaagggctccgagctaacaaaagcatgagctacttagtgcacagcatctacaattctactgatagaagagaatgaagctactagtgccgaaacatcgtttctatcatcggctcggcggccggcagagcagctgggctggaactggaagcagagagagagagagagaaagaagagagagagagagagaggtgttggcttctctcccgagaactgcatgcctccgtggaccatcccagcccgataacccgccacctcatcactgctacctcaggacggacgacatgcgcggcggcgtcgcgcacggcgatatctatcttggcctttttttttaaaaaaaaaagtcgatcaataatgtccagctagctagcgcccagctgtctcgagagaaagctgcaatgcaaatacgagcttgcttgtgtcccggcctgcatgctagcagcgtacgtgactatcatatcatttcgtatatcgtgcgacacattatgtgcgtgcatgtacttcctttctttccgatgattccctattcc

SEQ ID NO: 64524 - DNA, 972 bp, Zea Mays
cttttatgtcaaaggaggtacgtgaatttgctgaattatacagaattaagctgcttaattcgtctccatattatgctcaggccaatggacaggtcgagtctagtaataggacattgattaatttgataaaaaaaaggtatctgataatcctaaacattggcataagattttgtctgaagctttatgggctcatagaatatctaaacatagtgctactaaagtatctccttttgagcttgtctatgggctggaagcagtgttacctgtggaaataagtttgaatgctgtcaggtttgccagacaaaatgatctaactgctactgattattataattcaatgatggataatattgatgaggtgactggcaagaggatgaaagctttgggagcaatagaaaaggacaagatcatggtagccagggcctacaacaagaaggtcaaagcaaaatcatttcaagtaggagacttggtgtggaagaccattctgcctctaaggaataaagaccgaaagttcgggaaatggtcgccaagctgggagggtccttataaagtgaaacaggtgatgtctggtaacacctatttgctacaaacattacaaggcaaagattttgcctaagactttgaatggacgtttcctcaagcagtatcatcccagtatgtggcaaaatgtttaggaaaaccgatgtaatcacatcgtgttaagatgcttttggttcgctcagctccaccaaaaggcaggggggcatatgttggagcccattttgagcagggcggacggtccggccctgaggccggacggtccgcggtccggacggtccgcgcctgggggccggacggtccgcgcgtgcgcagagcagtttagggttccgagttttgtgctacggttgttagctagattcgcgggattcactcgaaaatttgtttgtaacgggtccagccctcctcctctataaatagagaggtctacggccg

SEQ ID NO: 64525 - DNA, 1998 bp, Zea Mays
tttatctcaatcccgtttgcgaggaatctccacaacttggagcctctcacccttacacttgaaattcacaaagaacacggagcaagggagggattagcaacgcacacaagacacacaaatcagaatgtcaatacgcacacaagtcgcaactagagctcgcaacacaactcaatgagttcacaactccactagagctctatatgctatcacaatgaaacgaatgcgcggaatcgatgtcttggtgcttaagaatgttgtaggaatgcttggtgtactcctccatgcgcctaggggtcccttttatagccccaaggcagctaggagccgttgagagcaatcaaggaaggctgatcttgccttctgtcgactggcacaccggacagtccggtgcacaccggacactgtccggtgcccgatttccttccaaatatggcacagtcgaccgttggcagcctgagagccgttggcgcaccggacatgtccggtgcacaccggacagtccggtgcccccttctagccgttggctcggccacgtgccccgcgcagattgcgcggccgaccgttggccctgccgaccgttggctcatcggacagtccggtgcacactggacagtccggtgaattatagtcgtacgtcgacgatgaattcccgagagcgacgagttcgcctgtgaacggcccaccggacagtccggtgcaccaccggacagtccggtgaattatagccgtacaccgccgtcgaagtcccgagagcaaccttttccctcgagccagcctggcataccggacactgtccggtgcaccaccggacagtccggtgcacccagactgagcagactttggctgctcgagccatctcttctccaacttgattttttctgtttccagcacttagacacaatacattagtccataaaacaatgtactaagtctgagaaacatacctttatccttgatctgtactttgtccacctttttacaattaggcacttgtgttggacactaaatcaccaaaatacttagaaatggcccaagggcacatttccctttcaatctccccctttttggtgatttatgccaacacaacataaagcaagtaggacaagtacaaaatcacttcaaataagaactcaatttattttgattcaaatttgacatatatggatcactcaatgccaccacttggtttgtttttgcaaatcaaactcaaattcctatctctaagtcaaatctccttgtagagacataaagagaggttttccaaagaaatttgatcaaggatttcaaaaactcccccctttttcccataatcaacacttctccccacaagaggccaacttttgacataagagataataaaaagagttttgacacccaaaagctctaatctactattttcaaaattttgacacccaaaagctctaatctactattttcaaaatttctcacccaaaagctctaatctactattttcaaaatttctcaagtggtagctgatccatctattgctttggcctttattttctccccctttggcatcaagcaccaaaacgggatcaatcttggccctttaaccccattgcctcaccaaaatcttcaaataagaacgcaaaggcaataagagtacatgagatgaacttggaataagttaccatctcatcggagtgcagtggaagtctttcatggtccaagtccaccttttccctttcaaacctcctttgagactaaaacaagcaaactcaagcatatggttagtcttaaagggtcaagttgtaacacaactccccctaaatatgtgcatcacttgcacaaggacttgtgaggtccgggaagtgtttgtacaacttgagcaccatagtaaacaacaaaatgcataaggaacatgatcaaaggcataaacacatgtatgctacaattaaatccaagttccgcgaatctaagatattgagctcactatgcagcctgcaaaaggtcttctcatctagaggcttggtaaag

SEQ ID NO: 64526 - DNA, 288 bp, Zea Mays
actcagactcaaactcgccacctttgggaatttccagggcgacttggctataattcaccggactgtccggtgtacaccggacagtgtccggtgcgccaagggagatcggcctccggaactcgccagcttcaggaaacgccaacggctagtccgctataattcaccggactgtccggtgtgcaccggactgtccggtgcgactccggagcaacggtcatctctgcgccaacggctctctgccgcgtatttaatgcgcgctctgcgcgcgcaggagtcagaatcgcccat

SEQ ID NO: 64527 - DNA, 814 bp, Zea Mays
gccacgggtcagggtccgcgcggccagcgagaccagggaagggacatgctttctcgtgctcgccgccgcatgcatggtcgtgcgcgcccccgtggctccattgccagatgcgcttaaccctgaaaaccccaaccaaatacagctgctgcaacgtgatgcaggcatgcatgtagctagcctagccatcgaacaaatgggtcggaaaagccctgggcggcctaccccgtcccttgtgcggcgcacgtagccatcgcgagatgggatttcagtccctgtgtctccatctccacggccttcgtcctgcccgggaataaagcgccaaggatgagaacgaacgagaaaagagaactgcacgagcgcaaaagaggaggttccagatcagagtgcatatcagatgcgtgtctctgggtctcgccatcgatcattttcgttcgatgtcgatgtcggaggaggaggtggaacttggaagggaggccggacaacatatccatgagctcactcggctcatggtttgcttaactcagttcgactcgtctcagctcgtggtttgcttaactcagttcgactcatctcgtttcgattttgcttggttagcgagataactcgctaactcgaacaagcaatcatttatcaccaaaataaagtatagagttgtgtttgatgaactaataagtgattaactatattaatttgatgttagattgatatggtgtacgaaattatgggtattatttattcttttctagtgttatccgtctagaattaactagtgattgaatatatcgttgtatgtatgtttttttgttgtatctcg

SEQ ID NO: 64528 - DNA, 603 bp, Zea Mays
gtgaacgttaagaattcgttgcgatactccattcaagaaatgaggaggcaatgtaccctgttgcaatctgttaaaaaactgtgttccactatcccagaagttgaaggtgccaagataggaaaggtttgcggctatctggaacatgtgtgcaagatgctagaggaaacttcaattgtctgtgaacaagatttggaaacaaagaatcctacttgggacctttatgacaacccttccgtagatgatgaacatcctttagaagatgatgaaattggtgatggctacagtacagaagatcctgagctatgggaaatggttttcgatgacctgaagtgggaagaggccaaagctaatgtttcatttgaagagcactatcgtgtcataaactacaggttcgaagagatcaatgatcgtaacatgtagttatgagctcgtgtttggtttggatgcctccattttgtatgtaatgctccaaatgtactatgtagaaccttagtttctgtttgttgtcatgaaacattagtgtcatctgtgtggagcagtaggcatttgttggatgaaggtattttgtatgctactatgtctgttctatgaagcagttccaat

SEQ ID NO: 64529 - DNA, 266 bp, Zea Mays
caccctgccgccctcacacttctgcgaggaagtgacaaaatttttttttcttgctgcgtgggcgacacagcttttgcagaagcgaccggtcacaaaaaagttactgcgcgagctgtcaaaactgagcagacagcgaccggacacaaaaacaaaaagctgcgcgcacgacactagagtgtggctgtgaccggtcagaaagaaagaaagaaaaaaataactctgcatggcgccctgacaggcttgcacgacagtgaggaggaaaaaac

SEQ ID NO: 64530 - DNA, 1913 bp, Zea Mays
ctaacttcggaattgggcacagtatcaaagatcttttagaagcacatactcctccggggggtcgattaggacgtgggcataaaggcctttatgatacaatcaataattcgattcattttcaattaggccttgctctagcttccttaggggttattacttccttagtagctcaacatatgtactctttacctgcttatgcattcatagcacaagactttactactcaagctgctttatatactcatcaccaatacattgcagggttcatcatgacaggggcttttgctcatggagctatttttttcattagggattacaatccggaacagaatgaagataatgtattggcaagaatgttagaccataaggaagctatcatatctcatttaagttgggctagcctcttcctaggattccataccttgggcctttatgttcataacgacgttatgcttgcttttggtactccagaaaagcaaatcttgattgaacctatatttgcccaatggatacaatctgctcatggtaagacgacatatgggttcgatatactcttatcttcaacgaatggccccgctttcaatgcaggtcgaaacatatggttgcccggatggttgaatgctgttaatgagaatagtaattcgcttttcttaacaataggacctggggatttcttggttcatcatgctattgctctaggtttgcatacaactacattgattttagtaaagggtgctttagatgcacgcggttccaaattaatgccggataaaaaggatttcgggtatagttttccttgcgacggcccagggcgcggcggtacttgtgatatttctgcttgggacgcgttttatttggcagttttctggatgttaaataccattggatgggttactttttattggcattggaaacacattacattatggcagggcaacgtttcacaatttaatgaatcctccacttatttgatgggatggttaagagattacctatggttaaactcttcacaacttattaatggatataatccttttgggatgaatagtttatcagtatgggcttggatgttcttatttggacatcttgtttgggctacaggatttatgttcttaatttcctggcgtggatattggcaggaattaattgagactttagcatgggctcatgaacggacacctttggctaatttaattcgctggagagataagcccgtggctctttccattgtgcaagcaagattggtcggattagcccacttttccgtgggttatatattcacttatgcagctttcttgattgcctcaacatcaggcaagtttggttaatttagttatttttttttgtactgtatcagaacccagttcattactcttgatggagagggaggatccgcctttttagatttttgctatttatttttctatctaggattagaaccatatacttggtaataataggaacggcacattatggcaaaaaaaagtttgattcagagggagaagaagcggcagaaattagaacaaaaatatcatttgattcgtcgatcctcaaaaaaaaagataagaagcaaagtttcccctttgagtttgagcgaaaaaacaaaaatgcaagaaaaattgcaatccctaccacgtaatagtgcacctacacgccttcatcgacgttgttttttaaccggaagacctagagctaactatcgagactttgggctatccggacacatacttcgagaaatggtttatgcatgtttgttaccgggtgcaacaagatccagttggtaaggataaaataccctttctttcatatttgtatggttttctcgaattgatgatcgtagaagagccctctttaccattctgtataaatggactattctatttgtatagatatggtagaggggcctatccaac

SEQ ID NO: 64531 - DNA, 313 bp, Zea Mays
caacgggccccacaggttggcgatagctaaaaacatcagtgggcgcggttgtaggccaggaatggaaaagaattgggccgcggcagagggaatcggcccagttggatgtttcttttttttattttgtttttttcttttgctcttttgtatttcaattcatggattttaaactagattcaaaaccagttcaaactttgacttagttttaaatgtgcactttaaaaccacaatatgaaatgtaagtttagtttattttatttattatactatttaaacaaatgattttaaatatgaaattcatacacactaaaat

SEQ ID NO: 64532 - DNA, 395 bp, Zea Mays
acgaccaggatgcgcatgcgtgcttggcgcacggctgtccgatcgggtgggaggcgcggcgcgggccccgcgcaccgtccgctgcggccgcacctggggcccgtcggccgtcgcgcaccatcgctctcaggttgcttctgcttggcacaatggcaccagcacagcacgggacgcgggggcggtcatccatccgacgaccatcactgcgtcaggcacacgctgacgcgaactaccggccgtccacggagacgtttcttcgtttgaggtgcacatatgatagatcgtacagtgcgtcaaaaccgacgtgcggtgccggtgcggccgtgcgggcttggagtcatagttctaaccaggatttccacaagtcctttcggttactcttgtgggtctaaatc

SEQ ID NO: 64533 - DNA, 2249 bp, Zea Mays
ctaatttttagtctctacattttatttcattttagttccaaaattgctaaatatggaaactaaaactctattttaatttctatatttgacaatttatatactaaaatggaataaaatgaagggactaaggccccgtttcaatctcacgggataaactttagcttcctgctaaactttagctatatgaattgaagtgctaaagtttagtttcaattaccaccattagctctcttgtttagattataaatggctaaaagtagctaaaaaaagctgctaaagtttatctcgcgagattggaacagggcctaaacattagtcccttgaaaccaaacacccctaaatcttataaatagcatgtctaaattccggattcgatcatcctcgacgatgaattttatattgaattaaaaaaatcttctcactgtgctccgcccactcttggttaagttctgcgcgctaccctttgactgggccgccacagagtgggcagtgactagacctaacctgcccgaaaaaacccgttccgacacaacacgaccaatgcaacaggctgctaaaccctaaaccctaaaacttgacccaaagccaaaaacctagcccaacccgaaaaaatctaacctgacccgacattaggcacgggtcatgtacgtgcatgctaaatagttcagaacccgactttaacccgacccggaccgacgtttgaacaggtctagcggtaacaacccgctagtgatgggggcccagggttcagggattttctcggcttggaccttatttcggtctcttcttaatataataccgagaggacggtctttctctctccaaccatttttttatttggggaacagactgagttcagtgtatttgttttccattttttttacaacggactccatatatataactatatatttggtaggtatattagaagccttgagcttcaaatagttagagaaagcccagtccgatcacctctgcaatatggtccagcccagcgcgcccatccaccctcaagctaggctgtcgggtgcgcacttgacccaacatctgatcgcgcacaaaagagaatgcatgcatgagtcaaacatgttttcctgcatgcgcgtaaatttaggaaagagatgtgtgacaatttctatttttaaatgttttatttcctccataaatatatgatccctgcaacagctatgcagccaggctcgccaggaccagtttatgatatatactgatactaaatatgctatacgatgcaaatatttatgcaattcagtatactgtgtaaaaatctgttacctgctgcatgtgcacaaaattagtatgacaaaaatgtactatgaaagaaaattaattggcatgtatggaaacaaaaaattatatttaatgatttatttcctctataaatatatgatagctccaatagccatgcagctaacctcgttataactaatttatgatatatattgatactaattatgcaaaaagttgtatgcatttatgcaattcggtacactacgtaaaaatctcttttctgttacatgcgcacaaatttaggatgataagagcaagtccaatagactggctaaataagccgcgctctgtaaaataaagaaaattctcatgaaaacggcttccaacagactctgttttaacctcaccattttatctcgctcggtatcgtctcatcgtcgctagccatctttggatagccctccgagctcgccatctcctagctatcctgctcccttctgtgctctacaacttttgtttcccgcgctcatgccttcacgctttggtacgcgcctgttgggggccttcgtcttccgaaggtcctcaaaaacatgatttaacaatgttttccaagtgtaacacatgaacaggtaccttcggactcgggttaaaaccatatacgatgtgaaaagcatgggcgagacgaaggctgatgttgctccgaagctacgcgcaaggaagcttcgacgcaatggcggaaaaaggaaccgacttaaaggggaaaagactatctagtccccattgggttgcccataagtcaatactaaatatgaagggcatgaatgtaaatttacacaggctgcgtcctgtgcctataaatagatgaacagtacccccgtactgttcacgccgacttgtattcattcatgcgtcacgcttggacttttaccttctatcaagccgaaggtagaaatgtaattcgatattgtttctgtttatccatgttaatatgaaaaagatat

SEQ ID NO: 64534 - DNA, 3332 bp, Zea Mays
gttgctaataaattatgcatcatgctgagattttttttgtgcacatgtgttgatacaatatgagtatacaccctttccttacaaaatctcgaggacgagatttctgttaaggggggtaggatttgtaaggcccaaaatgtgtataagaaaataataataataacaataaaataaatatatgaagagataaaatagtaaattcagaaatctcgaaattaaacgtgagtactgaaaatcgagaaagagtatgaaatataagagaaaatgtatatatatcttcataaacagtacttttaaattgtgcgatatagttggttggcattttgcgaatcaaatttgaatgcaaatgctagatttgaaattaatgaaagatattcaaataaaaacaaatagaaaagaaaaaaagggaaaagagaataaaaacaaaaaaaagaacagcctcggtttgggccgagctcctcccaccttccggcccactccctcgcctgctcactcgcctgcctgcgcactgatgttcggtcaccgccacgtgggcccgctcagctggcttccctgtccacggctctgactcgctgacagcatgggaccctaacgtcggtttcatcctcttccccaaatcctctgctcgctgcaacagaccgcaccgcaggacccagattccaccggtgaattcgctcgccttgttgtaaccacttggatgcgtggtgtgcctgccgaccttttcccctagcggagacctcttcttccccgcggactcgtcacgccgaaccggccgccgtgtggggcgcctggaattccggatcggtggttgggatccgaagctcgtggcagccgcgatctctggccctatagaacctggccgggtgcgccgtcgatacacaagaccgggcgtcatctcctccatccgtctcgccgcaagcctagaacagaaccgcgcggcgcccgggtccccagatccccttcacatcggtctctcgcctgcgtataaacttggtttcgcaaccactgccgctcacctccccaacgccataaccaagcaccgtagttgtcgttgtgcagaacctcatcgcgagctgagcgaagccgccatcgatgccccgtgctctgggcgctaatcgtgttccaggggatagacagagagggagtgtcaggtggccgccgtcggccacatcacgcgatgtcgcgggatagtccttggagtgctgttcggcgtgttcaccggagcactccgcacgtcctcagcacttacacgggcgacgccggtggccggagttgggttgattcctcgccgaagtcatgggtcgccgcaacttcgccctgcttcgtgggggcatgctcctgcagcataatcgctgcctcgctggtaacgactctcccttttgattcgtagtaatccctgggatgcgtagcaccgctcgaatggttgtttgaggccctcggccgggtttggacgttttcctgtaatgttcgccgccgcggtgccgcaactctgcgtgggtcgggatctccacgcccgggatctaggtgtgagcccttccgtcagtttcgccatcttctccgctgggtgcagcacgtagcctatcggagttcgagcgggggagcagagaaatcgtgagtcctagtcgtgcgccgccggctgtgcttggacgctgccgcgcgtggccggtgaagtggggaagatagccgcgcgccgtttgatccgtagtcgacgactgagattagcagcaggttacccattggcggccattgaatcgtggccgttagttggatatcgtgggaatcatagggatctggacatggggaatttggaacgtagattgcgtatcggaccgtcgggatcaagtagcgatccgtttatgtggtcgatctaatcggcgtcgttgatttctaatctgacgtctgatattcttggataccccttcggccaccacgttttgcataagagtccctgccctttttatgaataaacccgcagtgcaactctgggtcttggcaagatttacacgaaggcccatgtactctctgctattagtgcgcgcagtccaggagataaaaaaataaggaaaaggaattttagaaattgattttgggtttaaaaataattgcagaaactcatttaatccatagaaaattcatataatgtccaaattagtccattccaattgctataattttgtaatattattgtttataatttagtaccattgttttgacatgaaagtcacattaaaatttatatcctatttaatcttgtacaaaacacataaaatcattagaaattcataacttcttcgttttaattccgatttaacccgttccagttgtgttagcttcgtataagtatttactacgcaatagaaacattgattataccatgtctcattctctcataaatatatttttatttaatttatgttggttagtcttgttaatgtgttcatcattatctactagaatatgatctatgatcaatttataacttaaattaaagttgagataactatttatagaataacctcttatatgattggtattaaccaatttatgatatagtttaatagtttaatcacataaatcctctataaaatcataactccttaaccgtagctccgaatttagtggttcttgttcccacgatctcgtagcgacgcatagattattattatgcagtttatccttatgtttggtgtaatgttaatttttgcctatacactgtttgtttgtaatgctacgactagcgtgaggacacgtgtcatcagaagagcaagttggtacctggaatctcaagtgccaggcaagttgtgcccttgattcacttttgttacccaataatgttctttattatcacttattcatgcataggtttaattttgatgggacccaatatgtcaccctagactgtttatccttttaccttgtttacccctgaatcattgggtagtcatgctattgctctatatggttttgggataatatttcattacatccatgttccaattattttgttatgttatttatgttcatgataagatcattatgttaattggaacatggagcgaccatccgggaaaacagtgctaccacaagggtttaatgggacacccttggctgattaactaggaaagctagtggaggtcttccttacccgaaaggggcaagggcagtaggggagtggtcagtgtagggaggccctcgggaggattttgctgcgatggcggtcctgcaagggattcctgcattggagcttcctataaactgtagcgggatttctgaagctagtggaactttgtaaaggcctcgtagtgttaccctgcctcgcctcctcggtagag

SEQ ID NO: 64535 - DNA, 373 bp, Zea Mays
cagattacgagcgattgagcaagggcgccgaagggcaaaaaagaaaaagagttatcagtgttgtgggcaggcaggccgctagaatggtaaaagaagatgaagaaaaactaaagaggagaagactgagccctgagccgaaggcaatcgccccgaagaagaggaaggctacggtcccgaagcaaaaggcagctgataaggaagaagagactgcctcaacaccttctgctgccgacatagaagaaattctaaaggtaatgactgaatccctgcccatcaagctaagtccactggggccgcatctgacgaagcttttacagaagaaggaggagcctttggcaacgaagaagtttgctgggccgaaaaaacgaagaat

SEQ ID NO: 64536 - DNA, 414 bp, Zea Mays
atccctcttacctaaaactgaaggttgggtcctcaaattttctagagagactttagtgtgatatctgtagtccagttaacactttttttggtctcttaagatattttatgattcttatagatgcttatactaaattgagcatgtgtgcttattgtccacatggaaccatacatttctgcaaaatttgttgttcggattatccatttatttgcaagctttctagagaactacacatattcaagtagaatggataatacagagagtttacctccaaggctctaaatgactattaattatatttctctaggcataaacatagagcaccctatacctaatgtgcatacacataatggactcatcgagtccttgatcaaaataataaaattcatttttggaccacctgtccaagataac

SEQ ID NO: 64537 - DNA, 585 bp, Zea Mays
ggtatcacgtcgtcttcgtcgagcagcggctcggtgtggatgccggtctctagcgggcgttgacgtgcagctgcctgtgcctcgtatgcagcaggacgttctgcctcccatgtgtgcagttggaccatctacagcaggactcagctcgtcgcgatcgacgcgggacacgtttgagaacatggcccaggacgacgacgacgacgacgacgacgacgacgacgctggcgctggcgctggcgccgcaggtcaggtggagattggaccgtctcagttgcaggatgctcctacaactcagccatcacagctgacaccacgtagaaggcgtccacgagacccttacactccaggcaccgacgctcttggggccaagggcaagggtaagactaggaggaaatgaatacttttgtgatatggactgtgtgatttggacttatgctggagacgttgtaatatgaactatgttatgtgttttggacaatgtgttggggaacttgtattttggactttgtttgtggacattatatgaagaactatgttctgtggatgtttttatattcgatgttattttgtgatgtattatatgtt

SEQ ID NO: 64538 - DNA, 344 bp, Zea Mays
agcagtggtcgctcttggcgtagccgatgacggccccgtcctcgtcctcctgcgaggcgccgaggcccgcgcaggtgagtgagagcaccgccgagtccatggcggcgcacggtagggtttagccgcctggccggtgcgcgcagttgaagctgaccacggtcggacggatgcggagcgaaggcgacggaggggaagttagaaggatagatgcgcaacggaggatcggagcagagagtgacccgagtggggaacagggagaggcagcgagatcggttgctgggtgcagatgagaatggggaattttcccgccgccgcgcgctatttcggggaggattttcccgcgc

SEQ ID NO: 64539 - DNA, 593 bp, Zea Mays
ctctcagcttcctctccggccgccattcgcgtgcttcccctccgacctctattccttagccctccaaccaccactcacggcttcccctcccattcgtgactggtgatttccccgccaggaagctgaggtggagggaacgagatggggttcatcggtgacaccctggagtagatctgctccatgcactagatttgcattgtgtgttaacaatcaaacaatattgtgcctcgtagttgaatcatgtcagaacaagcactagatttgcattcatacgtaactcaggaaaatgaaagaaggaagagaagaaggctcgcgttggcagaaatttatttcaaaaccattgttgctacgctagcatacatgcataccgggaggagaccaagggagctacactgttttagtaatgatgagcaccgccatatacttagaagatatttactcaaagaattatatgatgcatccgaggtaacatgctacgatgagttgcgtctaactaaaaggaatttccatgacttgtgcgccatgttacgtgagaagtgtggcctttgtgatagtgtgcacagtaaagttgaagaaagggttgcaatgttctt

SEQ ID NO: 64540 - DNA, 172 bp, Zea Mays
gcgggggcttggccaccggcggcgggagcagcggggcagcgcggacggggcgcccgggaatttcccgaaacggaaagctgcctaggtttccttctctctctctctctcgccgtccgaccctctgctccgcctgctgactgctgtttcccccctccccgttgcgagttgcgac

SEQ ID NO: 64541 - DNA, 180 bp, Zea Mays
ttttgccttttttttcatgggctcgtgttcgttcctttcttgctggagacgacccgggttagcccgctaggatagggacagacccgtaacggcaaagcaagctagagtggttcccatcagaaaacgcactgtaaccacgctcgatcggctcctaaagtactactagtaggaggattggac

SEQ ID NO: 64542 - DNA, 581 bp, Zea Mays
ttctcgccttgacaatggattaaacaaaactaaaatatgtataagacatttaagggtatgacaaaatatgtacatacaaaaatttggagcaaaatgtctctaatatgggtctttgatgtatagaagatgagatatagaggacgctattggagagaaatgagatatagaggggaatcttttagaggattgcgtaaaatatagatataagtgagagatataaaggataccactggatacatccttcgctgaccatgcaattgtgattttaccccccctattttgaaaccgaagctattgttttcccctccctcacagcgctgttcgtgaaaatcataattagtgattaaaaaataaaaaatgtgaaaaaatggatgaaaggttcgaactaccctcctattctcattggcctcgtgcaggccgtccgtcactggcgcccttacctgtgggggggggtcactttgctgttcgtactgaccattacaaccttaagtttttgcttgatcagcgcctgtcgaccgtacctcagcaccagtggatcagcaaactcttcggcttcgacttctcgatggagtacaggccgg

SEQ ID NO: 64543 - DNA, 659 bp, Zea Mays
gttagtgattactaaaacagtaaagtggcatgagaatcaaattaacatcaattaacaaggactatctcccttcaccactccatatgtatcatggagtaaatcaatgttgtgatggcacatgacacatttcaggttggatggcctaataaataagcaacactatgagtaaacaaacaccttgactgcagtaatgacatccaccaatacaggactgttgtgcatatgtgttatatttgcagcaaacacaatatgacgaaaaaacaatcaacagttggatacccgtgtctgcttctaggtatacttcagaggttgaggtgtcctaaaaccatttccatagaaactgaaagaagtgtttcctcctaaagtttagaaactgaaaaaggtgtttcctcatttgcagaattgtttccaactcaaattttcacagaactgaatagtaatagagatattgagacaagataaattagccacttccagttcaacacagctttgacaaagtcaaaaagccaacaataaaaccaacctaagaatgcctcataaaacaagtagcccaaatctttagctatgctaacaataaaaaagatcataagagtgctcataatacaagctaagtagccctaatacaagaatgttgtgccccttcaacatactgaccaatg

SEQ ID NO: 64544 - DNA, 250 bp, Zea Mays
actgaaaaaatgacatatgttgattcgtctgattccaggatacatttcacagacagacaaaagaatgtgttctgcacaatgtataggaccgattttactaattctatataattaagtctgttgcagttacagccataaagttatgttttggcttctgattgagcacatgaaaattccacaaaaaaaacataatatcaatgcggaaaaggattgtaaggatcaagtaatgcaccaaaaaaatggagcaacc

SEQ ID NO: 64545 - DNA, 258 bp, Zea Mays
caaaccacatgacgggggagaagaagatgttcacctcctacgtcaagaacaaagattcccaagactcaatcatattcggtgacaggaatcaagcaaggtgaaagggttaggaaagattgctatttcatccgagcactccatttccaatgtgtttttagttgagtcgcttggatataacttgttgtctatgagtcagctttgtaatatgggatataactgtttattcacaaatgtagatgtgtctgtctttagaagaag

SEQ ID NO: 64546 - DNA, 727 bp, Zea Mays
ccaatccaagggagtgtcacttagtggctgtgaagcgaattcttagatatttagtcgctacgccttgcttcgggatctggtatccaaaggggtctacctttgacttaattggatattcagactccgattatgctggatgtaaggtcgataggaagagtacatcagagacgtgccaattcttaggaaggtccctggtgtcatggagttctaagaaacagacttccgttgccctatccaccgctgaggccgagtacgttgccgtaggacagtgttgcgcgcaactactttggatgaggcaaaccctctaggactttggctacaatctgagcaaagtcccactcctatgtgataatgagagtgctatccgcatagcggacaatcctgttgagcacagccgcacaaagcacattgacatctgtcatcactttttgagagatcaccagcaaaagggagatatcgaagtgttttatattagcaccaagaaccagctagccgatatctttaccaagcctttagatgagaagaccttttgcaggctgcgtagtgagctaaatgtcttatattcgtggaacttggattgatttgcagcatacatgtgtgttatgctttgatcatgttccttatgcattttgttgtttatttatggtgctcaagttgtacaaacactccccggacctcaaaagtccaggtgtgagtgatgcacatatttagggggagatgtgctaca

SEQ ID NO: 64547 - DNA, 280 bp, Zea Mays
gggtgtgagacgtcttgacgtccgaggtgactcctagcttgtcatcgactaggtcatgaaaaattcgagctaccacgacgcgagaatggaagcctactgtgaaaaagtttagcgcctcgaggacaagtgctttagcctagagctcaatcacatcgcacgacgatacaacgaggtagcagatgaactagcgaagatcgccttgggatagaccaggttccccccgaccgtctttgctagggatatctacaaaccctcgatggtacgtaaggaggaaaccgaa

SEQ ID NO: 64548 - DNA, 466 bp, Zea Mays
gagacagtgggcgatgccgcactcaacgcagtaccacccgcttatgtctcctctccagaggagacggggatggcctctatcagcgacacggggcgcgcgggagccgcctcagccgcgacagcgccaggcttggctagtgctctaggagcaggcagtaccaccttagttccctacttggtggtttcttgggtagagtgggggcaggacgaagcccccgcagacaccccggcaccgtgcttcaccacctaggtggcagtaaaggatggcgcatgggctcgatgcttggtgctaagaacaagacaacatgtgagaaaaaagaaacgtcatgcaaaggctatgtcttcgcatctcgacaacttacccaaagaggggcacaatggcaggcctcgacctccggcccctaggtccctgacgccccaccacgtacatcgatgatggagcggtagccctcccttctctaggcccc

SEQ ID NO: 64549 - DNA, 309 bp, Zea Mays
gttaagagctcttttgcgtagaaggagaggatggtgtatgaagcaggaaagctgaaacggtaaggtaacggtccgaagcgtccatctcgggcgattttatagggacaggcggagtcaccaaggtgcgagtcgcaatagccagtcagcgttcgttttgaatcccgcacgcacgcgtgccacaaatggtcggttggccaatcaggatgtcccgtcgcattaaatgaccatgcccctccgagaaaaaatgtaccgagcgtcgtttcgcattatacctcgaaaggtacaccctcctacttctgcctatctttc

SEQ ID NO: 64550 - DNA, 341 bp, Zea Mays
aaataagtaccaaagtacttcctttggaggctcgggggctactatcgggtgtgataattaggggtacccagattatccctctaaaaacacactcagaagaggttaaggcataaccccgaatgtaagaggtcgagtcacctccttacccgaggcccaccacggatatctaccctccatgcactaaaacccctccatgagggtctccgacgtccgaaaaatctccgccttgcccgaagtcaccttgtcctaccatcgctccgtccgtatcgtctgagccagtctcaggcagaaaggacagggacacccgaagtccagcgggggacactcacatttaatgcgtg

SEQ ID NO: 64551 - DNA, 293 bp, Zea Mays
ccgcaaatcccacaggtggccactccaccaactatggcacacgtcagggaaggctcgaccatcgcctcggaaagactttcgccttgcccaagctgggctctgacctcgataatcgcaacaaaggaatcacaacatcactcgacatagggaacatggtgcacttcgtaagtaggcttttacccatgccgaagccctattacaacaactacagggtgggcgacccctcccctggggctcgggcgtacgaccaaccccttggcctcaccctcggctctcaacaggaaatcagcaag

SEQ ID NO: 64552 - DNA, 1099 bp, Zea Mays
gtccatagacatctaagaaaaagcgtctcgcagagggagggagatcgagtcgtccaaagagaaagaaccgcaacaagcagtccacgcgcgccgcatctcggccttcggggtacgatctggtaggatcaccggtacacatgaaggctcctcgaggttcgttggatgtggaagacccttcgcgtcataaggaattcttaatggagtttgcatcgtgcaaggctgcttgcggcatgggagggagccctgcatcatgtcagcttgggtatgttgctcccaaacaaatcgctatggtcccgcgtgcatatagagccatacggggttgggattcgtgcgtggggacgacttatggggtgcttgccagcgacgtccgccgtgggggcactgtgctgccatatccggcgcttgggggaggaagaagaacatgcccttgccgttggatttagatggacgatcaagattagacagagaataccttttcgtagtctcagtcttgcaccgttcatcgcgagaccgagggctcttatttgatcagtggcgtggagagatatgaggcgctgatcttagactaagggcctgtgtcgtgtaccggttcactggggtagttcatctaatctgggccttagatcctaaaatggatggcccagaaccgagcacgttgaagtcgcgtggtatttttgcagtatgagtcctcggggttttccgcaattaacccgtagtcctgtgtagttcatatttcattacaaacggccccagaactttatgaactagaccctgtctttaataaaaattgtagctgccatccacagggttgggaaattaaaatctaaaatgattttcaggatagaataaaatatggtaaacatagaaaattcacaactttctcattctgagcgcaatttgatccattcaagttgcgttagcttcacaataatgttgcctacgcctccataacattactttatcaaataacatgttgtcaaaaataaatattcatttaacctatgcttagtggattaaatcttctaaacaaagttaatgtatccataactatagtaagactaaaatataatccctagtcaagttataaacaagattaaag

SEQ ID NO: 64553 - DNA, 270 bp, Zea Mays
ccatagacatctaagaaaaagcgtctcgcagagggagggagatcgagtcgtccaaagagaaagaaccgcaacaagcagtccacgcgcgccgcatctcggccttcggggtacgatctggtaggatcaccggtacacatgaaggctcctcgaggttcgttggatgtggaagacccttcgcgtcataaggaattcttaatggagtttgcatcgtgcaaggctgcttgcggcatgggagggagccctgcatcatgtcagcttggtgaggtcacg

SEQ ID NO: 64554 - DNA, 1898 bp, Zea Mays
cgcccctgcgccaaatccaccgccacgccctgctcgccgatggaaggtccgccgcctgccgctctattctccacgcgcaatccgccagcgcgcagacctttccatccgcgcccgcgccaaatccgccgcccttgcgccaaatctgccgccacgccactactcgccgatggaaggtctccacgcgcaatccgccgcctgccatcgccagcgcgcaatcctttccatccgcgcccgcaacgcccgcccctgcgccaaatcctccttggacgcgccccgacggctggcgcaacccgtcgagcaaatccgcgtagatcccgtctccatctcccgtcaaccaggcgagtcccgccgtgaatgtcgcccacctcccttcgactccgacgctcccaggaccacaccgcccaagccgtcgagcaaatccgcgttgtgcaagtggtggcgcagcctcgcgcccgccctgctcgccgccgcactggcgatcacggtggccgcgctgcggccggcgacggagcacgcggacgccaaggggcggccgccgctgtggttctggccaggaggagtgttcaaagtggccctgttcgcggacctgcattatggcgaggacgcgtggacggactggggccccgcgcaggacgccgcgtccgaccgcgtcatggccgccgtcctcgacgccgagaacccagccatagatgtgcagacatccctattggaagaagatccgaacaagaattatcaagaagacaaaaggcgtccacacgcgctctgttctgcccgccgctctgttctgcctgccgcgcgcaatccgccgcccgcgcaatccgccagcgcgcagacctttccatccgcgcacgcgccaaatccgctgcccctgcgccaaatccaccgccacgcccctgctcgccgatggaagggccccgcgcaggacgccgcgtccgaccgcgtcatggccgccgtccttgacgccgagaacccaggtgcgtgcctgcgcacgctctccttttgctttcctggaccctttcccttttcctccgaaagaatcaaagaactgaaacggaactccctctctgcctcatggtctctgcggcggcggaatccgatccacgcatcttcgctcagacttggtggtgtacgagcagccatagatgtgcagacatccctattggaagaagatccgaacaagaattatcaagaagacaaaaggttctgtctttgtggtcatatggaaacctcaaatcttcgcttcccactgtatcaaattccttgggatccttatgacgcaaaaagaagcttattctcctaagatatgtgagatggccaagttcttgggcaaagacatttgtttgcttgaagacatcaacaccttctaactgctccaatgccatcatacttctgatcccagctggagtgttgaaacaggagtgcatcaactttcatgagataatgatccagtggacgtgccaatgacaaggtcatagaagaagctatgcttgaggaagctatgagtgactgaaggatttcattttccgtactatcatgtttcaactttcattggccagtcatcaaagaagtatatgatgtgtttggatttggggttctgttagtcaagttgatcattggtcagaaggcgttggattttggaagagtagcaaatcagaaaggtggaatgctcgactaggttaagaaacttcataaagaaaagcagctacctttctttggtggacaaaggcctgggtagcaactaggacagggttgagtcagtaccacttgtctcactggcctagaatgttcgaggtgatcaggtggaaggagacgggctcacacagagatgggaggtgtcgtagaacgtagacacgctagagttcgtctcatcggagctcctacttcaaaagtacatggat

SEQ ID NO: 64555 - DNA, 1424 bp, Zea Mays
ggaaggtccgccgcctgccgctctattctccacgcgcaatccgccagcgcgcagacctttccatccgcgcccgcgccaaatccgccgcccttgcgccaaatctgccgccacgccactactcgccgatggaaggtctccacgcgcaatccgccgcctgccatcgccagcgcgcaatcctttccatccgcgcccgcaacgcccgcccctgcgccaaatcctccttggacgcgccccgacggctggcgcaacccgtcgagcaaatccgcgtagatcccgtctccatctcccgtcaaccaggcgagtcccgccgtgaatgtcgcccacctcccttcgactccgacgctcccaggaccacaccgcccaagccgtcgagcaaatccgcgttgtgcaagtggtggcgcagcctcgcgcccgccctgctcgccgccgcactggcgatcacggtggccgcgctgcggccggcgacggagcacgcggacgccaaggggcggccgccgctgtggttctggccaggaggagtgttcaaagtggccctgttcgcggacctgcattatggcgaggacgcgtggacggactggggccccgcgcaggacgccgcgtccgaccgcgtcatggccgccgtcctcgacgccgagaacccagacttggtggtgtacgagcagccatagatgtgcagacatccctattggaagaagatccgaacaagaattatcaagaagacaaaaggttctgtctttgtggtcatatggaaacctcaaatcttcgcttcccactgtatcaaattccttgggatccttatgacgcaaaaagaagcttattctcctaagatatgtgagatggccaagttcttgggcaaagacatttgtttgcttgaagacatcaacaccttctaactgctccaatgccatcatacttctgatcccagctggagtgttgaaacaggagtgcatcaactttcatgagataatgatccagtggacgtgccaatgacaaggtcatagaagaagctatgcttgaggaagctatgagtgactgaaggatttcattttccgtactatcatgtttcaactttcattggccagtcatcaaagaagtatatgatgtgtttggatttggggttctgttagtcaagttgatcattggtcagaaggcgttggattttggaagagtagcaaatcagaaaggtggaatgctcgactaggttaagaaacttcataaagaaaagcagctacctttctttggtggacaaaggcctgggtagcaactaggacagggttgagtcagtaccacttgtctcactggcctagaatgttcgaggtgatcaggtggaaggagacgggctcacacagagatgggaggtgtcgtagaacgtagacacgctagagttcgtctcatcggagctcctacttcaaaagtacatggat

SEQ ID NO: 64556 - DNA, 2228 bp, Zea Mays
ggaaggtccgccgcctgccgctctattctccacgcgcaatccgccagcgcgcagacctttccatccgcgcccgcgccaaatccgccgcccttgcgccaaatctgccgccacgccactactcgccgatggaaggtctccacgcgcaatccgccgcctgccatcgccagcgcgcaatcctttccatccgcgcccgcaacgcccgcccctgcgccaaatcctccttggacgcgccccgacggctggcgcaacccgtcgagcaaatccgcgtagatcccgtctccatctcccgtcaaccaggcgagtcccgccgtgaatgtcgcccacctcccttcgactccgacgctcccaggaccacaccgcccaagccgtcgagcaaatccgcgttgtgcaagtggtggcgcagcctcgcgcccgccctgctcgccgccgcactggcgatcacggtggccgcgctgcggccggcgacggagcacgcggacgccaaggggcggccgccgctgtggttctggccaggaggagtgttcaaagtggccctgttcgcggacctgcattatggcgaggacgcgtggacggactggggccccgcgcaggacgccgcgtccgaccgcgtcatggccgccgtcctcgacgccgagaacccagccatagatgtgcagacatccctattggaagaagatccgaacaagaattatcaagaagacaaaaggtaaataatacaacacccatacttattcttcttctgatttttgatagtttatgaagaacaataatattgtgcaaactgctaagctgctagcttgttatctatttttagacaatatacacctcttgttaagaatggagaggtaggagatgatcctggaggcagcatgtcaaagatagaactcacatgtttgttgttcttctatttttttatcgctcataaggaaaattgagaccctgctcttgatgttttagacatggcgtacttcctgttatggtgcctgaaattggcatgaagtttcaggatgaggtagaggcttggaagttttggaatacatatggtaacacggttttgaggttagaatgagagatgcaaacaaaagaaaatctattggaatactgagatcatttagatttatttgtgcaaaagagggtcagtggaaataaggtaaaataagtcatcttgtaaacggccacgagctaaaactagaactaaatgtcttgctgtattttgaactaaatgtattattattgttctatcttttggagatagaaatacgagcatgcagtcaatctcagcatgcatttagtttcaattaaatcttggtaaacaacttggtctctcctactctatatgttgttactgtaggcgtccacacgcgctctgttctgcccgccgctctgttctgcctgccgcgcgcaatccgccgcccgcgcaatccgccagcgcgcagacctttccatccgcgcacgcgccaaatccgctgcccctgcgccaaatccaccgccacgcccctgctcgccgatggaagggccccgcgcaggacgccgcgtccgaccgcgtcatggccgccgtccttgacgccgagaacccaggtgcgtgcctgcgcacgctctccttttgctttcctggaccctttcccttttcctccgaaagaatcaaagaactgaaacggaactccctctctgcctcatggtctctgcggcggcggaatccgatccacgcatcttcgctcagacttggtggtgtacgagcagccatagatgtgcagacatccctattggaagaagatccgaacaagaattatcaagaagacaaaaggagtgtcatcccgttgcgtttcattgggctcgagggtgatatgatggtcgaagtgatcctccacgtagcgcttctctccgctgttgcgctcgtgaggggcgcatgctgcttggcactaacctcgctggctttgtcctctccatcgccaacgacattggcggttctagaggtttgtttgcattatttctgcagctatgatgtcatacttgtcaattctattgaggcaagaccagtattctcaaggcccccctcagaagcatttcaggttgacagctttattgctaaaagttaccatgaagatgtgaagattagcttgcatgtgaagatcagagtaaaaggactgtgattgaaaactctataatctactttctcttaagatttaattgtaaatataggtttatctgggaggtgcttcttagataag

SEQ ID NO: 64557 - DNA, 1752 bp, Zea Mays
atggaaggtctccacgcgcaatccgccgcctgccatcgccagcgcgcaatcctttccatccgcgcccgcaacgcccgcccctgcgccaaatcctccttggacgcgccccgacggctggcgcaacccgtcgagcaaatccgcgtagatcccgtctccatctcccgtcaaccaggcgagtcccgccgtgaatgtcgcccacctcccttcgactccgacgctcccaggaccacaccgcccaagccgtcgagcaaatccgcgttgtgcaagtggtggcgcagcctcgcgcccgccctgctcgccgccgcactggcgatcacggtggccgcgctgcggccggcgacggagcacgcggacgccaaggggcggccgccgctgtggttctggccaggaggagtgttcaaagtggccctgttcgcggacctgcattatggcgaggacgcgtggacggactggggccccgcgcaggacgccgcgtccgaccgcgtcatggccgccgtcctcgacgccgagaacccagacttggtggtgtacgagcagccatagatgtgcagacatccctattggaagaagatccgaacaagaattatcaagaagacaaaaggcgtccacacgcgctctgttctgcccgccgctctgttctgcctgccgcgcgcaatccgccgcccgcgcaatccgccagcgcgcagacctttccatccgcgcacgcgccaaatccgctgcccctgcgccaaatccaccgccacgcccctgctcgccgatggaagggccccgcgcaggacgccgcgtccgaccgcgtcatggccgccgtccttgacgccgagaacccaggtgcgtgcctgcgcacgctctccttttgctttcctggaccctttcccttttcctccgaaagaatcaaagaactgaaacggaactccctctctgcctcatggtctctgcggcggcggaatccgatccacgcatcttcgctcagacttggtggtgtacgagcagccatagatgtgcagacatccctattggaagaagatccgaacaagaattatcaagaagacaaaaggttctgtctttgtggtcatatggaaacctcaaatcttcgcttcccactgtatcaaattccttgggatccttatgacgcaaaaagaagcttattctcctaagatatgtgagatggccaagttcttgggcaaagacatttgtttgcttgaagacatcaacaccttctaactgctccaatgccatcatacttctgatcccagctggagtgttgaaacaggagtgcatcaactttcatgagataatgatccagtggacgtgccaatgacaaggtcatagaagaagctatgcttgaggaagctatgagtgactgaaggatttcattttccgtactatcatgtttcaactttcattggccagtcatcaaagaagtatatgatgtgtttggatttggggttctgttagtcaagttgatcattggtcagaaggcgttggattttggaagagtagcaaatcagaaaggtggaatgctcgactaggttaagaaacttcataaagaaaagcagctacctttctttggtggacaaaggcctgggtagcaactaggacagggttgagtcagtaccacttgtctcactggcctagaatgttcgaggtgatcaggtggaaggagacgggctcacacagagatgggaggtgtcgtagaacgtagacacgctagagttcgtctcatcggagctcctacttcaaaagtacatggat

SEQ ID NO: 64558 - DNA, 697 bp, Zea Mays
aagacgacgaagcggaggcggcctataaaaagggcaggagggaggaggaggaggacgaggccgccgcagcacagcacggtgatgcggtggcttcccccaacaccaaaagtagctcgcatcatttttcatttatttatttatttaaaagtggtggcaacatgtccattgaatactgatggagggttgcatgtatcaatcaattagaagaaaatctatctattgcaattgaatgcctgctgctgcatacgtgtctttcttcctcgtgatacatacaagatgcctgataggagtaatgcagcaacacagcacaagacaggaaaaagaaatctgaatacgtgtgctgactggcatgtttagcacaacaggatcaggcagagcagagtgacgatggctcacgcaatcctgggcatgggcaggcaatcagcaccatctctaatacataccaccacatggtgtttgtatgcagagctagcagagggctgtagtgcgtggcgagatagaataaaaaagaaagaaaagaaggtagcaagtggtgagatagaatagaattgatagagagagaaaaaggaggcaagcaaagtgggcaggaaggaagacttacatccattgctttgcttctctttccctttctctttctcttcttggtctctctctctctctctctgcactggactgccttcttgctttgtggtggttc

SEQ ID NO: 64559 - DNA, 1217 bp, Zea Mays
agaaaacaaggtgttgaattgcatatgtttgagccatgtaaacactcagattagacttgcttcttttcgaacacataccgcatcatattgcctaaatagcatataagcatgcaaaaaggaatctttttctaggcacaatcggattaaaaaaggtgaaaacagaaaagagatgacgactggatgaaattggaactaacaaagttagagaatccatgcgcacaagtaaataggacaaacaagaaagagacgatcatatgttgattgtgatgtgcacttgtagttcagaccaatagcaatagggatatgcatgttcatgtaccatgctgtgcctatgtctgtgtgcggtgcacagcaggatcaagaaagaccatcctgcaaaagcatttacaatagtcagtggccgcccatccatcatgataccatgaccggaatatttgacttgcaattttcttccctcctttacttgtctagtataaactgcaaacattttagttttccgacatacataacttttgatgcgatatacacgagggccaaagcaaacattacatcatcttgcatattgtggtgattcatcatattccatagtgcagaaactcaccactaaaaaggtaaacagttctcccaacagatgcactcagctgacattgtagactataaaatatatacaatctctggtcagctactcacctggattctgtttgttgactgttggttgcacaagtgctcttgcaagaatgaacccaaaaaaaatcaggggtcaaatatctctctgccctggatacacttgtacagaaagagaagggaagaaaaagataagagcaatcctggattccatattctgttttataggttcccaaaaggccactgttgtttcataaagaagggcactttctcatcttcttaaccagaaatgaaatgaccgaggagaaggttattccttttgggtacactcaagagataccaacatcatccatgctggagctccaatgtgattctcacaagtcacaacaagggccaaagtaagtatatagcagcattcattatgccacggtgcaaaaacacaccattcaaaaggtaaacaattttctccaacacaagtatatactcttgtacaatagcctgtccaacagctgtcaagactaatgaccacactcagctgacaatatttttttttctcgaaatgcgcaggagaactgcgccccattatattaaag

SEQ ID NO: 64560 - DNA, 1553 bp, Zea Mays
atatattgcagattattctttttgcagagagagaatcaaaatcactttgcgtgcagcatcgattgggtcggaaatcgagggtttggtaagcgagatcgccgccggtgacagactgacagggacgagatggacgccggcggaggcggcgtcttggccgccgtgctctgcatgctgctggtcttcgccatcttccttctcctcctctggcgccgccgctccgatgccgccaccgccgataaccaccgcgtcccgccccagcccctccaggaggatcaggtgctgcacggtcgcgcggcggcgcgacggatgcgtcggaggcctggggctgccggagcaggctcctctactgcgtcaactagccgcaatgctgtagaggacgacgcggagagtgacgatgaggaggtccccgaaggtcgcaacgtacccagatcctccaaaaaggagaagaaaaggcaagagcgagagatgcagcgtcaggccgaagaacctgcacgggattcatggaggagtaaacaagaccgatacgacgaaatgaggaggaagaaggatgaggagcgtgaggcacaagagaggcaattggaagaagaagctagggcacgaaaagcaaaggaggaggctgctgctgctttagagtttgagaaatggaaaggggccttctctgttgatgctgaaggtacaacagagagtgagacacaagacgatggtcagggtttgctccacaactttgtggaatacatcaagaagcagaagtgtgttcccctagaggacctagctgcagagttcaggatgcgaacccaggactgtatcaatcggattgttactctggaaagcatgggtatgttatctggggtgatggatgaccgtgggaagttcatctacatctccactgaagagatgaaggcagttgcagagtacattaggaagcaagggagagtgagcatatcacatctggccaacaactcaaaccagttcatcgatctggagccgaaggcccagtacgaggtggagagccagcaggatgacagtgcagaagcaggcacagaagcatgagaattccttgtgacctggcaccatgtcgtgctcaatgatgttttgtagtgtgatgacttaacatggtttgagttgggcactggccatataatatatgcagtagtcggtataaacatacttgttctgacatgctagataccattaccccatgcagagaactcaggcttttgttctatcatcatgattgaaaatcatcggttgaccttggtggtgttggggaggagggaggtggtgtttgagtctagcagcaagagatttggcaatgattctgtagatgacaaagactttgctcggagacaaggcagacttgtagtcaggttcacaaatcgtcctattagtaatatatagcctttgcagtgccggttgtgttcttttatgtgctttcttttcgtgcatttttactcaatttattgttgggaaattgggtgaaggtaagaagcgaaggccttcggggatgagagacaatttctgtcattagagttcgcgtcccccttttataggcg

SEQ ID NO: 64561 - DNA, 1549 bp, Zea Mays
atatattgcagattattctttttgcagagagagaatcaaaatcactttgcgtgcagcatcgattgggtcggaaatcgagggtttggtaagcgagatcgccgccggtgacagactgacagggacgagatggacgccggcggaggcggcgtcttggccgccgtgctctgcatgctgctggtcttcgccatcttccttctcctcctctggcgccgccgctccgatgccgccaccgccgataaccaccgcgtcccgccccagcccctccaggaggatcaggtgctgcacggtcgcgcggcggcgcgacggatgcgtcggaggcctggggctgccggagcaggctcctctactgcgtcaactagccgcaatgctgtagaggacgacgcggagagtgacgatgaggaggtccccgaaggtcgcaacgtacccagatcctccaaaaaggagaagaaaaggcaagagcgagagatgcagcgtcaggccgaagaacctgcacgggattcatggaggagtaaacaagaccgatacgacgaaatgaggaggaagaaggatgaggagcgtgaggcacaagagaggcaattgaagaagctagggcacgaaaagcaaaggaggaggctgctgctgctttagagtttgagaaatggaaaggggccttctctgttgatgctgaaggtacaacagagagtgagacacaagacgatggtcagggtttgctccacaactttgtggaatacatcaagaagcagaagtgtgttcccctagaggacctagctgcagagttcaggatgcgaacccaggactgtatcaatcggattgttactctggaaagcatggataggttatctggggtgatggatgaccgtgggaagttcatctacatctccactgaagagatgaaggcagttgcagagtacattaggaagcaagggagagtgagcatatcacatctggccaacaactcaaaccagttcatcgatctggagccgaaggcccagtacgaggtggagagccagcaggatgacagtgcagaagcaggcacagaagcatgagaattccttgtgacctggcaccatgtcgtgctcaatgatgttttgtagtgtgatgacttaacatggtttgagttgggcactggccatataatatatgcagtagtcggtataaacatacttgttctgacatgctagataccattaccccatgcagagaactcaggcttttgttctatcatcatgattgaaaatcatcggttgaccttggtggtgttggggaggagggaggtggtgtttgagtctagcagcaagagatttggcaatgattctgtagatgacaaagactttgctcggagacaaggcagacttgtagtcaggttcacaaatcgtcctattagtaatatatagcctttgcagtgccggttgtgttcttttatgtgctttcttttcgtgcatttttactcaatttattgttgggaaattgggtgaaggtaagaagcgaaggccttcggggatgagagacaatttctgtcattagagttcgcgtcccccttttataggcg

SEQ ID NO: 64562 - DNA, 1835 bp, Zea Mays
aagcagaacgggagttgagttgagacagtctgaacacgtggagtcgacgtgtgcccgcgccggcgccggccaaacgcaatccgctgacgcagagcgctaaacaaaagaagggtccctgttgccggggcccagccgccgcgcacgcccaaaacacacactgacgcgtggggccaccgcctttttttcccctttgctgcgtgtcttgttgttcctcctctcctccctcgcggacacacaaacccaaagcagagaggtgagagggagaggaccgagggagagaggagagagagcgatcgagagatgaggagggagcttgcctcccccttagctactgccgccgctgccacggccggtgcctcctcctcggctgccgcctcgctccggggctggtgggacgatgtcaacgagtcgccccagtggcaggacggggccttcttctccctcgccgccgcctacgccctcgtctccgccgtcgcactgattcagctcgtcaggatccagcgccgggtgcccgagttcggatggaccacgcagaaagtcttccacctcatgaacttccttgtcaatggggtccgtgctctggtgttcggcttccatgtccatgtcttcctccttcgcacaaaagtatacaagttggtgttgctagatctccccggcttgttgtttttctccacctacaccttgctcgtgctcttctgggcagaaatataccatcaggctaggagtctcccaacggacaagctaaggcctgcatacattgccgttaacgccatcatatacgttgttcagctttgcatatggatatacctcggaataaatgataatgccgcggttgagctggccagcaaaatattcattgtagctgtctcctttgttgcgcttcttgggttttcagtatatggtggaaggttgtttgtcttgctgagacgtttccctattgaatctaaggggcggcaaaagaagctgtatgaggcgtgcacataatgtcgaatgtcgtgctcacatttaatgcgagccatgcagtagttatctcttcgcaaagcgaccaccataccgaataccagggttgggaccgtgacagcaatttgtgttacctgctttctgataagatgtgttgtggtcgcgctatctgcatttgatgctgatgtatctctcgaggttttggaccatccagtcctggatttcttctattatatgtttgcggagatactcccttctgcgctggttctcttcgtccttcggaagcttcctcccaagcgggtatcggcgcaataccaccctattaactagggagttctttgtttttatgatgttacatgctaagaactccggataagctggaactgctgaaaacctacatccggttgtattgctgtaatattttatggaagcatcccagggttggcaagatgcatcatcaccatcatgctctatgagaaaagagttttgagtggtgctaatgagtttgtgctactgctagccagagcatcacatgacatctccagcagagtaccataccattatttgaattgcatgtgcattcttgacgcggacaaggccaatgatttatcgccttgttggtcccagtgacttttatggagtacttgtgtggtaattgttggtattcctgaggactagatctgaaactgaaaatgcgttatatcagctatcggtcgtcctaatatcaatttttgttaggcttttatctgtttcagcgttccagagtagagcctttagcctaatgttgtcaggatctgtaattcgaggagcagtgttggtaggattattattgtagttttggtgctggattgttctggtaaatcgatcgatcttcc

SEQ ID NO: 64563 - DNA, 1929 bp, Zea Mays
aagcagaacgggagttgagttgagacagtctgaacacgtggagtcgacgtgtgcccgcgccggcgccggccaaacgcaatccgctgacgcagagcgctaaacaaaagaagggtccctgttgccggggcccagccgccgcgcacgcccaaaacacacactgacgcgtggggccaccgcctttttttcccctttgctgcgtgtcttgttgttcctcctctcctccctcgcggacacacaaacccaaagcagagaggtgagagggagaggaccgagggagagaggagagagagcgatcgagagatgaggagggagcttgcctcccccttagctactgccgccgctgccacggccggtgcctcctcctcggctgccgcctcgctccggggctggtgggacgatgtcaacgagtcgccccagtggcaggacggggccttcttctccctcgccgccgcctacgccctcgtctccgccgtcgcactgattcagctcgtcaggatccagcgccgggtgcccgagttcggatggaccacgcagaaagtcttccacctcatgaacttccttgtcaatggggtccgtgctctggtgttcggcttccatgtccatgtcttcctccttcgcacaaaagtatacaagttggtgttgctagatctccccggcttgttgtttttctccacctacaccttgctcgtgctcttctgggcagaaatataccatcaggctaggagtctcccaacggacaagctaaggcctgcatacattgccgttaacgccatcatatacgttgttcagctttgcatatggatatacctcggaataaatgataatgccgcggttgagctggccagcaaaatattcattgtagctgtctcctttgttgcgcttcttgggttttcagtatatggtggaaggttgtttgtcttgctgagacgtttccctattgaatctaaggggcggcaaaagaagctgtatgaggattgtctactcaaataaggtgataaatactaaagtatgcttgcacaacggcttcaggtacacctgccccctacacgcgtgctagggtgaaaaggcgtgcacataatgtcgaatgtcgtgctcacatttaatgcgagccatgcagtagttatctcttcgcaaagcgaccaccataccgaataccagggttgggaccgtgacagcaatttgtgttacctgctttctgataagatgtgttgtggtcgcgctatctgcatttgatgctgatgtatctctcgaggttttggaccatccagtcctggatttcttctattatatgtttgcggagatactcccttctgcgctggttctcttcgtccttcggaagcttcctcccaagcgggtatcggcgcaataccaccctattaactagggagttctttgtttttatgatgttacatgctaagaactccggataagctggaactgctgaaaacctacatccggttgtattgctgtaatattttatggaagcatcccagggttggcaagatgcatcatcaccatcatgctctatgagaaaagagttttgagtggtgctaatgagtttgtgctactgctagccagagcatcacatgacatctccagcagagtaccataccattatttgaattgcatgtgcattcttgacgcggacaaggccaatgatttatcgccttgttggtcccagtgacttttatggagtacttgtgtggtaattgttggtattcctgaggactagatctgaaactgaaaatgcgttatatcagctatcggtcgtcctaatatcaatttttgttaggcttttatctgtttcagcgttccagagtagagcctttagcctaatgttgtcaggatctgtaattcgaggagcagtgttggtaggattattattgtagttttggtgctggattgttctggtaaatcgatcgatcttcc

SEQ ID NO: 64564 - DNA, 1748 bp, Zea Mays
aagcagaacgggagttgagttgagacagtctgaacacgtggagtcgacgtgtgcccgcgccggcgccggccaaacgcaatccgctgacgcagagcgctaaacaaaagaagggtccctgttgccggggcccagccgccgcgcacgcccaaaacacacactgacgcgtggggccaccgcctttttttcccctttgctgcgtgtcttgttgttcctcctctcctccctcgcggacacacaaacccaaagcagagaggtgagagggagaggaccgagggagagaggagagagagcgatcgagagatgaggagggagcttgcctcccccttagctactgccgccgctgccacggccggtgcctcctcctcggctgccgcctcgctccggggctggtgggacgatgtcaacgagtcgccccagtggcaggacggggccttcttctccctcgccgccgcctacgccctcgtctccgccgtcgcactgattcagctcgtcaggatccagcgccgggtgcccgagttcggatggaccacgcagaaagtcttccacctcatgaacttccttgtcaatggggtccgtgctctggtgttcggcttccatgtccatgtcttcctccttcgcacaaaagtatacaagttggtgttgctagatctccccggcttgttgtttttctccacctacaccttgctcgtgctcttctgggcagaaatataccatcagttgcaggctaggagtctcccaacggacaagctaaggcctgcatacattgccgttaacgccatcatatacgttgttcagctttgcatatggatatacctcggaataaatgataatgccgcggttgagctggccagcaaaatattcattgtagctgtctcctttgttgcgcttcttgggttttcagtatatggtggaaggttgtttgtcttgctgagacgtttccctattgaatctaaggggcggcaaaagaagctgtatgaggttgggaccgtgacagcaatttgtgttacctgctttctgataagatgtgttgtggtcgcgctatctgcatttgatgctgatgtatctctcgaggttttggaccatccagtcctggatttcttctattatatgtttgcggagatactcccttctgcgctggttctcttcgtccttcggaagcttcctcccaagcgggtatcggcgcaataccaccctattaactagggagttctttgtttttatgatgttacatgctaagaactccggataagctggaactgctgaaaacctacatccggttgtattgctgtaatattttatggaagcatcccagggttggcaagatgcatcatcaccatcatgctctatgagaaaagagttttgagtggtgctaatgagtttgtgctactgctagccagagcatcacatgacatctccagcagagtaccataccattatttgaattgcatgtgcattcttgacgcggacaaggccaatgatttatcgccttgttggtcccagtgacttttatggagtacttgtgtggtaattgttggtattcctgaggactagatctgaaactgaaaatgcgttatatcagctatcggtcgtcctaatatcaatttttgttaggcttttatctgtttcagcgttccagagtagagcctttagcctaatgttgtcaggatctgtaattcgaggagcagtgttggtaggattattattgtagttttggtgctggattgttctggtaaatcgatcgatcttcc

SEQ ID NO: 64565 - DNA, 1765 bp, Zea Mays
gcgaatttcagcagctacgcggggccctggattctcgcttcttctcgctcccggtcccggatgatcctccgttccctgcgctgtgctttgttggctttgatctgtctgcaggggccgtggggagattcaggcagcgcatttgctcagagccagccgccgcttcaccggaccgttcgcgcagaggcaaatgacggcggcggcctcatgccggagctcccgcccagcggcctcatgcccatgccggagctctcacccagcggctctcccacgccatttgtccccttcctggcgcccgctccgctcgcgccattctttaacaacagcacgccaaagctctcaggaaaatgcacgctgaactttaccgctgtcgacaaactcatgaccaccacagctgtcgactgcttcacctcgtttgctcctttcctggccaatgtcatctgctgcccgcagcttcaggcaacactgaccatcctcatagggcagtctagcaagcagacagggtctctcgcattggatcccacggtggccaactactgcctgtccgatgtccaggagctgttgctgagccaaggcgccagcgacaaccttcacagcctctgctcggttcacctctctaatgtaaccgagggatcctgccctgttagcaccgtcgatgcgtttgagagcgccgttgattcgtccaagcttcttgaagcctgtcgcaagattgactctgttaatgagtgctgcagccagacatgtcagaatgcgataaatgaagctgcccagaaaatctcgtccaaggacgcaggtttgacgagctacaccgggagtcccaagactgacagctgtaggaatgttgttctgagatggttgtcaagcaggcttgacccacggtccgcgaaggaaatgctgaggcagatttccaactgcaatgtcaatggagtttgtcctctaagctttccagacacaagtaaggtggcaaaagagtgtggtggaacaatgacgaacagtactgcatgttgcaaggcaatgttaacttatgtagcccatttgcaaaagcaaagcttcataacaaacttgcaagctttaaattgtgcctctttccttggggcaaagttgcaaaagatgaatgtcagcatgaatgtctatagctcttgtcaaataacattaaaagatttttcactgcaagttggatctcaagaatctggatgcctccttccaagtatgccctctgatgcatctttcgacagcacttctgggattagcttcacatgcgatctgaatgacaacatcgcagccccatggccatcttccatgcaagcaccatcttcatcgtgcaacaagtctgtcaatatcccagagcgacctgctgcgacatcggcacaaagtggtgtgaaccacaagaacctaaagctaagactgcttgcctctttggtctcccttcttctggtgctcttggtacaagtttagcaaggtccagttgccctattatcgcgatgattcgttcaggagagctaactggaagtcagtgaagcgctgagttttttgcgatctcgcggtcgcatcgaagtgtagtaggtttcacgtgtattttattttattttattttttgaatctcctggtagcaattagtgtagtttgttgtaaggaatatatgtataatataatgatagtagtaacttatattcatttgtatagcgagaaagaacgtctggtggacggattccagcattgtttaacacaatgtttattgtttactaattgatgtgtttgatgttgatag

SEQ ID NO: 64566 - DNA, 2984 bp, Zea Mays
cttgcttcccctttcctctctaacctagattgcgttactctcatggatggcggatgcgcttccttccgttctgctaccactcttcttcgttctcgtccccgcaggccgcaggatttttccaccacacacatgcatccttttggatttgtttagttcataagcccttcagactggcagatatcaagaggtcatacacatctcgcacctctaagtgggtgtgggtctgcaacaattctgcaaccaccttatccttgcctttgggagtaagcccgacctacatctggaggcttcgtcgagccttggaaggcctttttgttgattacggctaatttccaatggcagctgagatgtaacaaatttgctcagttcagttctctaggaaaagttcccgtggttcagcaatgtgattggtttcataggttttttcgtgtgttggtgatcaaagcaatctggtgtaagcttgcgtagttgacatcagagtttgtttcttatggttaggttcttttgcttttcatcctctactgcacatcacagatccaaggaggttttttccccagcagatgaaaccatgcatgcagcgtcaaagaaggattatcagttggagtccatgactggctcagttcgttcaaaccagatgacagaagaaaataaccgttcagctgttagtggtcattgtggcagtagcccatcatctcatcaagaatgctgtaggtcagaagacttgaatagatatgtgtgctctgatgagggcaaggaggttgggcacctaaagaagagtcagtcgcttgtaaacatgcttcaaaaggatcatggtcgtaattctagcgaaggctctgaggttgatgttacaaaccatgaacacaaatatgatccctctaatttgaagagatctgaagttgttggagaatctagtaagctgtacagactgaaaaatgaggatgattttgatgcctcatctgacctaatcagccatgacttttgtgaacctttaggtgatcacactgttgattctgatagccatcatgacatgccttattcccaaagcaatctcccaagatcacaatctgcaatatttcagaatgattgcaccagtgatccagaaggttctgtcgattctgagatactagggtgcagatctgttgacggtttatgttcactgactgatgagaaatttgactacctgagaggtggtgaaatgtatcactgtaaatcaaatttggatgtttattgtgcaccttctccaaatatgcaccgggcatcaaacattgacgaccatggttcagtaggttgctctgatgttgctgcagagggtcaacggtccactggaagcacagaagaattttttgtcagggatgggatcctagtaggtcacgaatactgggatggcaaatacatttgtggcgatcactcgctgggtccagttgcccttttctgtgcagattattaccattctgggaatgatgtcgacctcagtgaagctacaggtcaagagagagagctgtcgaacagagatagcacactccaccagtcgcttgtagtggaagtacctgagtcggtgagcatttctgatacaaacgacattagtggggaacctgaacacagtagaactgacattgatgaggacccaagtgaacttactccaagaacctacaatattaaaagaatcgaggattggatcaatcagattgatatcaatgatatcgctttggatgggcaaggagagaattcagtttctgctttagccaaatctcgtgaaccgatggctggcgttcctgctgtgcggcctgatgctaaaagcccgcttggtatggagatagcttacacttatatttcgaagttaactcctgcttcatcatcggcacagttggcaaaccttggtttggttgcgatcccaagactgagcgcattctcaggtttgcgcgtattaaacttatcagggaactcaattgtgcgagtaacagcaggagctcttccaaaaggccttcacatgttaagcctgtcaaagaataacatatcaacaattgaaggccttagagagttgacacgattgcgcttgttggatatcagctataatagaatatctagaattggccatggattggcctcctgttcctcgttgaaggagttatatctggccggtaacaagatcagtgaggtagatggtcttcaccggcttctgaagctcaagattctggacttgcgccacaacaagatttctacatcaaagggcctcgggcagctagctgcgaattacaactctctagaagccattaaccttgccggcaaccctgcacagaagaatgtaggcgatgagcacctgaagaagtacctgcttggtctcctgccaaacctcgctgtgtacaacaagcagcctattagggcgactggatcaaaagacgtctcggaccgccatacccgcaagatctcttcttcgcaccattctgaccgtggtggcagacccgaccgcagatcttccaggttggtgggtgccccgtctgctcacaagccacagagctcgcggcatggacgctctggatatgtgtcaagctcagcgctcaagtacacgagagcccgcaacacgcacaagacctcgctggggtcaaggccccttgaacatgcgagtgccatagatctggcgaagcaaacccagacagagggaaggacacagtaagatcagtcaagcacgaccatcgatatactaccatggtattgttgtgaagtaaagcgaggcaccagttttgctggtggattttttttctctctcacgtgaataaagctcaaaacagtaaacagagcagtgctttcatatcagcccatatttttttttctaatattgttgagtggtattgatggcaattgggaattgtatgatttacttgccttatgaataaagcttgaaagaaacaaaataaagattagtattttttttcaagatgtcttctataagactgtactattgcttggtggtgaaattttgtgaacat

SEQ ID NO: 64567 - DNA, 2959 bp, Zea Mays
gtggagccgagccttttgcttctgcctccgccagtgctggacctgcacctacctctcggttgcaaaccatgattaacatctccctggatttttccaccacacacatgcatccttttggatttgtttagttcataagcccttcagactggcagatatcaagaggtcatacacatctcgcacctctaagtgggtgtgggtctgcaacaattctgcaaccaccttatccttgcctttgggagtaagcccgacctacatctggaggcttcgtcgagccttggaaggcctttttgttgattacggctaatttccaatggcagctgagatgtaacaaatttgctcagttcagttctctaggaaaagttcccgtggttcagcaatgtgattggtttcataggttttttcgtgtgttggtgatcaaagcaatctggtgtaagcttgcgtagttgacatcagagtttgtttcttatggttaggttcttttgcttttcatcctctactgcacatcacagatccaaggaggttttttccccagcagatgaaaccatgcatgcagcgtcaaagaaggattatcagttggagtccatgactggctcagttcgttcaaaccagatgacagaagaaaataaccgttcagctgttagtggtcattgtggcagtagcccatcatctcatcaagaatgctgtaggtcagaagacttgaatagatatgtgtgctctgatgagggcaaggaggttgggcacctaaagaagagtcagtcgcttgtaaacatgcttcaaaaggatcatggtcgtaattctagcgaaggctctgaggttgatgttacaaaccatgaacacaaatatgatccctctaatttgaagagatctgaagttgttggagaatctagtaagctgtacagactgaaaaatgaggatgattttgatgcctcatctgacctaatcagccatgacttttgtgaacctttaggtgatcacactgttgattctgatagccatcatgacatgccttattcccaaagcaatctcccaagatcacaatctgcaatatttcagaatgattgcaccagtgatccagaaggttctgtcgattctgagatactagggtgcagatctgttgacggtttatgttcactgactgatgagaaatttgactacctgagaggtggtgaaatgtatcactgtaaatcaaatttggatgtttattgtgcaccttctccaaatatgcaccgggcatcaaacattgacgaccatggttcagtaggttgctctgatgttgctgcagagggtcaacggtccactggaagcacagaagaattttttgtcagggatgggatcctagtaggtcacgaatactgggatggcaaatacatttgtggcgatcactcgctgggtccagttgcccttttctgtgcagattattaccattctgggaatgatgtcgacctcagtgaagctacaggtcaagagagagagctgtcgaacagagatagcacactccaccagtcgcttgtagtggaagtacctgagtcggtgagcatttctgatacaaacgacattagtggggaacctgaacacagtagaactgacattgatgaggacccaagtgaacttactccaagaacctacaatattaaaagaatcgaggattggatcaatcagattgatatcaatgatatcgctttggatgggcaaggagagaattcagtttctgctttagccaaatctcgtgaaccgatggctggcgttcctgctgtgcggcctgatgctaaaagcccgcttggtatggagatagcttacacttatatttcgaagttaactcctgcttcatcatcggcacagttggcaaaccttggtttggttgcgatcccaagactgagcgcattctcaggtttgcgcgtattaaacttatcagggaactcaattgtgcgagtaacagcaggagctcttccaaaaggccttcacatgttaagcctgtcaaagaataacatatcaacaattgaaggccttagagagttgacacgattgcgcttgttggatatcagctataatagaatatctagaattggccatggattggcctcctgttcctcgttgaaggagttatatctggccggtaacaagatcagtgaggtagatggtcttcaccggcttctgaagctcaagattctggacttgcgccacaacaagatttctacatcaaagggcctcgggcagctagctgcgaattacaactctctagaagccattaaccttgccggcaaccctgcacagaagaatgtaggcgatgagcacctgaagaagtacctgcttggtctcctgccaaacctcgctgtgtacaacaagcagcctattagggcgactggatcaaaagacgtctcggaccgccatacccgcaagatctcttcttcgcaccattctgaccgtggtggcagacccgaccgcagatcttccaggttggtgggtgccccgtctgctcacaagccacagagctcgcggcatggacgctctggatatgtgtcaagctcagcgctcaagtacacgagagcccgcaacacgcacaagacctcgctggggtcaaggccccttgaacatgcgagtgccatagatctggcgaagcaaacccagacagagggaaggacacagtaagatcagtcaagcacgaccatcgatatactaccatggtattgttgtgaagtaaagcgaggcaccagttttgctggtggattttttttctctctcacgtgaataaagctcaaaacagtaaacagagcagtgctttcatatcagcccatatttttttttctaatattgttgagtggtattgatggcaattgggaattgtatgatttacttgccttatgaataaagcttgaaagaaacaaaataaagattagtattttttttcaagatgtcttctataagactgtactattgcttggtggtgaaattttgtgaacat

SEQ ID NO: 64568 - DNA, 3074 bp, Zea Mays
atactttttcggttgcaaactgtgattgctgatggcggtttcttttttctaatcctgggatcttgccatctataaacaacactcttccatctgaaacaattcaagatggtgtaaccaaagttgcctaggtagggtcgccctcctcgttgcaatgtctgagccgaggaataatatgtcatcctaaatgatggttggaattaggatttttccaccacacacatgcatccttttggatttgtttagttcataagcccttcagactggcagatatcaagaggtcatacacatctcgcacctctaagtgggtgtgggtctgcaacaattctgcaaccaccttatccttgcctttgggagtaagcccgacctacatctggaggcttcgtcgagccttggaaggcctttttgttgattacggctaatttccaatggcagctgagatgtaacaaatttgctcagttcagttctctaggaaaagttcccgtggttcagcaatgtgattggtttcataggttttttcgtgtgttggtgatcaaagcaatctggtgtaagcttgcgtagttgacatcagagtttgtttcttatggttaggttcttttgcttttcatcctctactgcacatcacagatccaaggaggttttttccccagcagatgaaaccatgcatgcagcgtcaaagaaggattatcagttggagtccatgactggctcagttcgttcaaaccagatgacagaagaaaataaccgttcagctgttagtggtcattgtggcagtagcccatcatctcatcaagaatgctgtaggtcagaagacttgaatagatatgtgtgctctgatgagggcaaggaggttgggcacctaaagaagagtcagtcgcttgtaaacatgcttcaaaaggatcatggtcgtaattctagcgaaggctctgaggttgatgttacaaaccatgaacacaaatatgatccctctaatttgaagagatctgaagttgttggagaatctagtaagctgtacagactgaaaaatgaggatgattttgatgcctcatctgacctaatcagccatgacttttgtgaacctttaggtgatcacactgttgattctgatagccatcatgacatgccttattcccaaagcaatctcccaagatcacaatctgcaatatttcagaatgattgcaccagtgatccagaaggttctgtcgattctgagatactagggtgcagatctgttgacggtttatgttcactgactgatgagaaatttgactacctgagaggtggtgaaatgtatcactgtaaatcaaatttggatgtttattgtgcaccttctccaaatatgcaccgggcatcaaacattgacgaccatggttcagtaggttgctctgatgttgctgcagagggtcaacggtccactggaagcacagaagaattttttgtcagggatgggatcctagtaggtcacgaatactgggatggcaaatacatttgtggcgatcactcgctgggtccagttgcccttttctgtgcagattattaccattctgggaatgatgtcgacctcagtgaagctacaggtcaagagagagagctgtcgaacagagatagcacactccaccagtcgcttgtagtggaagtacctgagtcggtgagcatttctgatacaaacgacattagtggggaacctgaacacagtagaactgacattgatgaggacccaagtgaacttactccaagaacctacaatattaaaagaatcgaggattggatcaatcagattgatatcaatgatatcgctttggatgggcaaggagagaattcagtttctgctttagccaaatctcgtgaaccgatggctggcgttcctgctgtgcggcctgatgctaaaagcccgcttggtatggagatagcttacacttatatttcgaagttaactcctgcttcatcatcggcacagttggcaaaccttggtttggttgcgatcccaagactgagcgcattctcaggtttgcgcgtattaaacttatcagggaactcaattgtgcgagtaacagcaggagctcttccaaaaggccttcacatgttaagcctgtcaaagaataacatatcaacaattgaaggccttagagagttgacacgattgcgcttgttggatatcagctataatagaatatctagaattggccatggattggcctcctgttcctcgttgaaggagttatatctggccggtaacaagatcagtgaggtagatggtcttcaccggcttctgaagctcaagattctggacttgcgccacaacaagatttctacatcaaagggcctcgggcagctagctgcgaattacaactctctagaagccattaaccttgccggcaaccctgcacagaagaatgtaggcgatgagcacctgaagaagtacctgcttggtctcctgccaaacctcgctgtgtacaacaagcagcctattagggcgactggatcaaaagacgtctcggaccgccatacccgcaagatctcttcttcgcaccattctgaccgtggtggcagacccgaccgcagatcttccaggttggtgggtgccccgtctgctcacaagccacagagctcgcggcatggacgctctggatatgtgtcaagctcagcgctcaagtacacgagagcccgcaacacgcacaagacctcgctggggtcaaggccccttgaacatgcgagtgccatagatctggcgaagcaaacccagacagagggaaggacacagtaagatcagtcaagcacgaccatcgatatactaccatggtattgttgtgaagtaaagcgaggcaccagttttgctggtggattttttttctctctcacgtgaataaagctcaaaacagtaaacagagcagtgctttcatatcagcccatatttttttttctaatattgttgagtggtattgatggcaattgggaattgtatgatttacttgccttatgaataaagcttgaaagaaacaaaataaagattagtattttttttcaagatgtcttctataagactgtactattgcttggtggtgaaattttgtgaacat

SEQ ID NO: 64569 - DNA, 2894 bp, Zea Mays
gccgcgatgagatcatgagaggatttttccaccacacacatgcatccttttggatttgtttagttcataagcccttcagactggcagatatcaagaggtcatacacatctcgcacctctaagtgggtgtgggtctgcaacaattctgcaaccaccttatccttgcctttgggagtaagcccgacctacatctggaggcttcgtcgagccttggaaggcctttttgttgattacggctaatttccaatggcagctgagatgtaacaaatttgctcagttcagttctctaggaaaagttcccgtggttcagcaatgtgattggtttcataggttttttcgtgtgttggtgatcaaagcaatctggtgtaagcttgcgtagttgacatcagagtttgtttcttatggttaggttcttttgcttttcatcctctactgcacatcacagatccaaggaggttttttccccagcagatgaaaccatgcatgcagcgtcaaagaaggattatcagttggagtccatgactggctcagttcgttcaaaccagatgacagaagaaaataaccgttcagctgttagtggtcattgtggcagtagcccatcatctcatcaagaatgctgtaggtcagaagacttgaatagatatgtgtgctctgatgagggcaaggaggttgggcacctaaagaagagtcagtcgcttgtaaacatgcttcaaaaggatcatggtcgtaattctagcgaaggctctgaggttgatgttacaaaccatgaacacaaatatgatccctctaatttgaagagatctgaagttgttggagaatctagtaagctgtacagactgaaaaatgaggatgattttgatgcctcatctgacctaatcagccatgacttttgtgaacctttaggtgatcacactgttgattctgatagccatcatgacatgccttattcccaaagcaatctcccaagatcacaatctgcaatatttcagaatgattgcaccagtgatccagaaggttctgtcgattctgagatactagggtgcagatctgttgacggtttatgttcactgactgatgagaaatttgactacctgagaggtggtgaaatgtatcactgtaaatcaaatttggatgtttattgtgcaccttctccaaatatgcaccgggcatcaaacattgacgaccatggttcagtaggttgctctgatgttgctgcagagggtcaacggtccactggaagcacagaagaattttttgtcagggatgggatcctagtaggtcacgaatactgggatggcaaatacatttgtggcgatcactcgctgggtccagttgcccttttctgtgcagattattaccattctgggaatgatgtcgacctcagtgaagctacaggtcaagagagagagctgtcgaacagagatagcacactccaccagtcgcttgtagtggaagtacctgagtcggtgagcatttctgatacaaacgacattagtggggaacctgaacacagtagaactgacattgatgaggacccaagtgaacttactccaagaacctacaatattaaaagaatcgaggattggatcaatcagattgatatcaatgatatcgctttggatgggcaaggagagaattcagtttctgctttagccaaatctcgtgaaccgatggctggcgttcctgctgtgcggcctgatgctaaaagcccgcttggtatggagatagcttacacttatatttcgaagttaactcctgcttcatcatcggcacagttggcaaaccttggtttggttgcgatcccaagactgagcgcattctcaggtttgcgcgtattaaacttatcagggaactcaattgtgcgagtaacagcaggagctcttccaaaaggccttcacatgttaagcctgtcaaagaataacatatcaacaattgaaggccttagagagttgacacgattgcgcttgttggatatcagctataatagaatatctagaattggccatggattggcctcctgttcctcgttgaaggagttatatctggccggtaacaagatcagtgaggtagatggtcttcaccggcttctgaagctcaagattctggacttgcgccacaacaagatttctacatcaaagggcctcgggcagctagctgcgaattacaactctctagaagccattaaccttgccggcaaccctgcacagaagaatgtaggcgatgagcacctgaagaagtacctgcttggtctcctgccaaacctcgctgtgtacaacaagcagcctattagggcgactggatcaaaagacgtctcggaccgccatacccgcaagatctcttcttcgcaccattctgaccgtggtggcagacccgaccgcagatcttccaggttggtgggtgccccgtctgctcacaagccacagagctcgcggcatggacgctctggatatgtgtcaagctcagcgctcaagtacacgagagcccgcaacacgcacaagacctcgctggggtcaaggccccttgaacatgcgagtgccatagatctggcgaagcaaacccagacagagggaaggacacagtaagatcagtcaagcacgaccatcgatatactaccatggtattgttgtgaagtaaagcgaggcaccagttttgctggtggattttttttctctctcacgtgaataaagctcaaaacagtaaacagagcagtgctttcatatcagcccatatttttttttctaatattgttgagtggtattgatggcaattgggaattgtatgatttacttgccttatgaataaagcttgaaagaaacaaaataaagattagtattttttttcaagatgtcttctataagactgtactattgcttggtggtgaaattttgtgaacat

SEQ ID NO: 64570 - DNA, 898 bp, Zea Mays
atctccagaaaagggtgagtgaggtgtggaattgataatctgaatacacatacacccatctcaacacgttttaccagcaacggacaacaagatacaagctccatactaactatgtttctattcctcatcagaagagtcgattgaaggaacctttttttcctcactgacagcggaagaatcctactcataaaacaaaaaaaaggtcagttagagacaaaaggcagacagactgcgcataaatttccacttcgtggccaacagaaaaaagaacacatcaatgaggagacattaccttcattttgtcccagtccttcaatttagaaccaagcatgtatgtgtcacgaagaggtgcccatgctggttcatcttcatctttgacggcgtgctagaaaaggcagatatcaaacatgagaaagacagcccaaggcattaagattcacatttcacttacaaagcaattatcgcaccagagtggatagtagcaaacaccagctagtaacaccacctatcaggctaaagactaacccacacatgtgactcttcaatttgtaaaaccaaatttgttaactggcctcgttagtctttagttagaacaatcatgaaaaccaggacccctaattttaccactgctgtccagccttgtcgttattatcccatggcaaacaaacaaatctttaggagcacggagcctgggtactggctagcacctagggtgcctagaaaattaggcattttgtctttgccagtaaagagagaaccgggcacagaacaagaggatggcaccgtgttcatggttgccgctactaaaccatttactcaaatggttatggtcgccaggtctagtcagccatcctgtgcagctagcctattaaagcaaaaccacaacagtcatgtggcg

SEQ ID NO: 64571 - DNA, 834 bp, Zea Mays
agcctgatgacattatccaccaggaaaaggagaagagcccgtggccgtggcctggccccagctcccagccccagccaacaaaagagaagcccggcccgaactctccttccatcggccgtcgaccgatccgtctccactccaggttcacttcgcctctccctcgccctctctctctccttgcttctacccctctcccctccaggctccaggtgccctaccgccggaccggcgcccgcctcatgaaggccaaggcatccgccgccgccgccgaggatgacgccgaacccaagaagatccggtcctcacgcagtaagcaccgccgacgccgtcacagccgctcctcctctaggtgagctacaaagtctacatacccaagaggaccccagcccttgcaaggaggaaactgcagcgctgaaaacgccacaattcatcatcggtcttactatctgcaaaaactataggttttggctggatatacctattctgtgaaccacgagtgcccagcatacatgccttatggaatctggatatctgttgctcaactaaataaacagttttcctacagcaaatgtattaattgcctgggattgggtgattgagtcgttgtaatcagcaaacgtgacgtccaatactgatgaatctgtcacctgcatctattgctgttggcatagtagtattttagacatgcagtagctaccttgctgcaagcggacgttggacttggacagacactgcagaatgcagatgtgcctgactgtactctctagtctgagattgttaagcctgaagttcatatttctgctttatattattgtcgttttgatttgtttgact

SEQ ID NO: 64572 - DNA, 2206 bp, Zea Mays
agcctgatgacattatccaccaggaaaaggagaagagcccgtggccgtggcctggccccagctcccagccccagccaacaaaagagaagcccggcccgaactctccttccatcggccgtcgaccgatccgtctccactccaggttcacttcgcctctccctcgccctctctctctccttgcttctacccctctcccctccaggctccaggtgccctaccgccggaccggcgcccgcctcatgaaggccaaggcatccgccgccgccgccgaggatgacgccgaacccaagaagatccggtcctcacgcagtaagcaccgccgacgccgtcacagccgctcctcctctaggtccgaatctccgccccgcaagcgctccaagaagaacagcaagaggattcctgacaagaagagcaagaggagcaagggcagccgcggcggcagccttagacgtcggcaccatagtcttagccatagccgtagccttagtagcagcccttcctcagtagcccgacgcagcagctcctcatgtagcagcagcagcgcctctgagaggtcggtgagcccgccacccaggagcaggtccagagatgtaaggaggaaaaagggcagagggaggggcagggagagggatcgtaaggggagaaagttgcggagatcggcaagttcatctagcatctcagcaagcagtggcagtagcaggagcaagagcaggaagcggatgactgttggtggcactaaggatcgcgctacaactacaagggataagatggaaaagggctacactgatcgccgttcttgtcggtctgtcatgaacgtggacgagcacgttgatggggatgaagacaggctcgccattgccaaggtggtggacaatgatattgacaggcacaagaagaatttggaatcggagagctcaccttccaagaatgccaatacaacagaagagaaagtacctgcaagtggtggaaattcagatgcccaggatctggagctgattcttaggcagaaagctcttgaaaacttcagaaagttcagggcagcagcgaccatgggaggcaaaacagacagtggagctgcagggaaggaagcatcaatagacgatagcgtacacaatgctggcatggaggttgctgatgccacacattctcagagtcaggaaaccagtcttggagcgaggtattctgctggatcacctagatcacagaattttgggaatggtgcgaatcgttcttggaagcaggacaacggtgctggcatgagttgtggtggatcacccggattacttgagcctgctgagactggtggcccgactcaactgaagggaagagcagaagaatcaactcgtttggcttctcagtttttgtcaccacgggatgccaggaatggccgcagtgtaatgcaaaggctggcgccccctccaggtagttctgctagtgtaaaccaaatgttaggaagcagtgcagggctgaatcatgtcgatggagctccaagggttagatcagttgtgagcatacccgctagggaaaggcttgatggtagcacacatactacaccccttagccccagtgaggattcttcccctgttgaaagcggcggcaaagttggactccctctgaatgacactaacaaggctgaaggaaccaatggagagaacagaaaaacaagtgaagcttcggcctctgacggttccgtattgtcacctaccgaagacaagagccaggtgagctacaaagtctacatacccaagaggaccccagcccttgcaaggaggaaactgcagcgctgaaaacgccacaattcatcatcggtcttactatctgcaaaaactataggttttggctggatatacctattctgtgaaccacgagtgcccagcatacatgccttatggaatctggatatctgttgctcaactaaataaacagttttcctacagcaaatgtattaattgcctgggattgggtgattgagtcgttgtaatcagcaaacgtgacgtccaatactgatgaatctgtcacctgcatctattgctgttggcatagtagtattttagacatgcagtagctaccttgctgcaagcggacgttggacttggacagacactgcagaatgcagatgtgcctgactgtactctctagtctgagattgttaagcctgaagttcatatttctgctttatattattgtcgttttgatttgtttgact

SEQ ID NO: 64573 - DNA, 794 bp, Zea Mays
agcctgatgacattatccaccaggaaaaggagaagagcccgtggccgtggcctggccccagctcccagccccagccaacaaaagagaagcccggcccgaactctccttccatcggccgtcgaccgatccgtctccactccaggttcacttcgcctctccctcgccctctctctctccttgcttctacccctctcccctccaggctccaggtgccctaccgccggaccggcgcccgcctcatgaaggccaaggcatccgccgccgccgccgaggatgacgccgaacccaagaagatccggtcctcacgcagtgagctacaaagtctacatacccaagaggaccccagcccttgcaaggaggaaactgcagcgctgaaaacgccacaattcatcatcggtcttactatctgcaaaaactataggttttggctggatatacctattctgtgaaccacgagtgcccagcatacatgccttatggaatctggatatctgttgctcaactaaataaacagttttcctacagcaaatgtattaattgcctgggattgggtgattgagtcgttgtaatcagcaaacgtgacgtccaatactgatgaatctgtcacctgcatctattgctgttggcatagtagtattttagacatgcagtagctaccttgctgcaagcggacgttggacttggacagacactgcagaatgcagatgtgcctgactgtactctctagtctgagattgttaagcctgaagttcatatttctgctttatattattgtcgttttgatttgtttgact

SEQ ID NO: 64574 - DNA, 2467 bp, Zea Mays
aaaggagttaaatcctgtggcccatcctgctaagatgaaaattgaaaaggcccatgatcctgggctctctcgtctttcctcgacgagattcccaaaccgctccgccgccgccgctcgtcagcctccgttccaaccgccgcgccggcgacatgccgcccaaagagctgccggggttctactacgacccagagaagaatcgctacttccccatcaggggccccatcccgggcgctgccgcccgccgcggcacgccagcgccacctccggccgtggacacaacgggatgcagcaggaaaagggctaggcggccggagctgctcaacgccagggagatgtacggcggcggagtcatgttctccaataaagccgccaggtccacgttcaagcagcagtgccactacgcgcaggcgtctcagcccatggtctggaagtaccaagccaccacctctgtggctgataaggcgctcgaacaattggacgccatggttcagacaccgcaagggttgaaagagtccaggctgctagtctccggcagcatgaacggttcgattcggttatacggattagggactgctctgagtaactttgagaatgaggcagagtttttgccccaacctgcttgtactcttgtgggaaagcacaagccaggaccactccccagcatttggtcacctggaacaggcttcatagctttctcatccagtatatcatgcataaagaagctcggacgtcatgtccctgatgcatcgaacaccaattcatcagttcagcgagcatggtggctactcttggatctggagaatctcgtgcctctttatatattatggatctttctgaagctgttgacttggcaatcggaccatggactacctacagagttcattcacttgatcgaacaatgtggacagctgattgtagttctgatggcacacatgcagctttcggttcggaccttggtgctggtctgatcgatttggaaacaaggggatcatcatggttatgtcgttctaaaagcgacattctttccctgaaatttgtgcactcggtaacaatcttaatctacctaaacttcttcccactttgtagttttaactggttgagatatcattttatggtttgttgtcaaatgacagttattgaaaattttgcttgcctcaaccttttgcccccactttccagttaagcttaaatttggtgcatgtgcatctaatgcatgactacatgattctcaaagttttgaaaggaaagcaatatgctaccgatgtgacctttcctattgcagcatatgtcataatctgcagacctacgtaatatggattttattctttcttgttgaccctgtatccatgttatgattacttcggaatttactgtgacacactattcctgtctctgctatgcccactggattttctcactcctataagggaaaagttgtgctatgtggtctacggaatgggagtatagcccctgttgatgtacggcaaaaacagcataatcagcctactggagtagcttcatctagcaatgctaggaggacagttcccatgctgcccacaagacatggtgggaagcaaagaaaccaggctagcaaggataaattttcaagagttatttctatgtcgtcagcagtttgtagcttggtttcactctcatcagatgagaactacttcttaggaagctccatggatggatctatcaaactcttcgatcttcgcctcattcagaagggaggtatacagtcgtacgaggggcatgtgaactcacacacacttttaccacttgctgttgatccatctgagaccttacttatgtcaggtggggaggactgcactgttcgcatatggagcatcaaaacaggcgagctaatctttgcgcggagcatgggagacagtcccttcacgtcatcttgttggcccgaaagcagccatggcttgtgcagtccttggctgtttgatgtaaaccacagctggggagcttggttggggtcacgtgctgggttgttctatatgcatggtacaatctgtaatgttacacactgatgatgaattgatgatggctgatgagcaaacataccaggcagctctgtcgaagcctgttgctgatggttcaacatttcagcaacagcacatggcaaaaaagaaaagaaaaactctttctggattcctagcagacaaaatcgttgtccttgttgaacatggtcaggtctaactcctcccagttggttcgcagggtgatgaaaaagaggacgcagttctggcagaggaggccgcatatctgccccatccacagcccctggacgacacagacatgcattgttaatttggtacattaacattcattaattatttggtacatgaacattcgttcagaatagaacacatactgtaccttggtttggaagccgagcgtgaatccgaagaggatggcgagcggcaagccgatgacatagaaggccaccaggttg

SEQ ID NO: 64575 - DNA, 2676 bp, Zea Mays
aaaggagttaaatcctgtggcccatcctgctaagatgaaaattgaaaaggcccatgatcctgggctctctcgtctttcctcgacgagattcccaaaccgctccgccgccgccgctcgtcagcctccgttccaaccgccgcgccggcgacatgccgcccaaagagctgccggggttctactacgacccagagaagaatcgctacttccccatcaggggccccatcccgggcgctgccgcccgccgcggcacgccagcgccacctccggccgtggacacaacgggatgcagcaggaaaagggctaggcggccggagctgctcaacgccagggagatgtacggcggcggagtcatgttctccaataaagccgccaggtccacgttcaagcagcagtgccactacgcgcaggcgtctcagcccatggtctggaagtaccaagccaccacctctgtggctgataaggcgctcgaacaattggacgccatggttcagacaccgcaagggttgaaagagtccaggctgctagtctccggcagcatgaacggttcgattcggttatacggattagggactgctctgagtaactttgagaatgaggcagagtttttgccccaacctgcttgtactcttgtgggaaagcacaagccaggaccactccccagcatttggtcacctggaacaggcttcatagctttctcatccagtatatcatgcataaagaagctcggacgtcatgtccctgatgcatcgaacaccaattcatcagttcagcgagcatggtggctactcttggatctggagaatctcgtgcctctttatatattatggatctttctgaagctgttgacttggcaatcggaccatggactacctacagagttcattcacttgatcgaacaatgtggacagctgattgtagttctgatggcacacatgcagctttcggttcggaccttggtgctggtctgatcgatttggaaacaaggggatcatcatggttatgtcgttctaaaagcgacattctttccctgaaatttgtgcactcggtaacaatcttaatctacctaaacttcttcccactttgtagttttaactggttgagatatcattttatggtttgttgtcaaatgacagttattgaaaattttgcttgcctcaaccttttgcccccactttccagttaagcttaaatttggtgcatgtgcatctaatgcatgactacatgattctcaaagttttgaaaggaaagcaatatgctaccgatgtgacctttcctattgcagcatatgtcataatctgcagacctacgtaatatggattttattctttcttgttgaccctgtatccatgttatgattacttcggaatttactgtgacacactattcctgtctctgctatgcccactggattttctcactcctataagggaaaagttgtgctatgtggtctacggaatgggagtatagcccctgttgatgtacggcaaaaacagcataatcagcctactggagtagcttcatctagcaatgctaggaggacagttcccatgctgcccacaagacatggtgggaagcaaagaaaccaggctagcaaggataaattttcaagagttatttctatgtcgtcagcagtttgtagcttggtttcactctcatcagatgagaactacttcttaggaagctccatggatggatctatcaaactcttcgatcttcgcctcattcagaagggaggtatacagtcgtacgaggggcatgtgaactcacacacacttttaccacttgctgttgatccatctgagaccttacttatgtcaggtggggaggactgcactgttcgcatatggagcatcaaaacaggcgagctaatctttgcgcggagcatgggagacagtcccttcacgtcatcttgttggcccgaaagcagccatggcttgtgcagtccttggctgtttgatgtaaaccacagctggggagcttggttggggtcacgtgctgggttgttctatatgcatggtacttgagttattctgcactactacttacgttactaaattggagccttggagtctagagcaaaaaaaaggtggctgtattctcaagaaacatgagaccactgagctctggagtgaatgaaggacgtcgtctttggaagttacacatcacctagagctagggtgtccagtccttggtaggaattagacatgtttctcttagtggtggatactgtctagctaggaagagagtcttgagggattgatggacgcatgcatcttcaattcctgtgtattgtattactacaggtacaatctgtaatgttacacactgatgatgaattgatgatggctgatgagcaaacataccaggcagctctgtcgaagcctgttgctgatggttcaacatttcagcaacagcacatggcaaaaaagaaaagaaaaactctttctggattcctagcagacaaaatcgttgtccttgttgaacatggtcaggtctaactcctcccagttggttcgcagggtgatgaaaaagaggacgcagttctggcagaggaggccgcatatctgccccatccacagcccctggacgacacagacatgcattgttaatttgccgagcgtgaatccgaagaggatggcgagcggcaagccgatgacatagaaggccaccaggttg

SEQ ID NO: 64576 - DNA, 2228 bp, Zea Mays
aaaggagttaaatcctgtggcccatcctgctaagatgaaaattgaaaaggcccatgatcctgggctctctcgtctttcctcgacgagattcccaaaccgctccgccgccgccgctcgtcagcctccgttccaaccgccgcgccggcgacatgccgcccaaagagctgccggggttctactacgacccagagaagaatcgctacttccccatcaggggccccatcccgggcgctgccgcccgccgcggcacgccagcgccacctccggccgtggacacaacgggatgcagcaggaaaagggctaggcggccggagctgctcaacgccagggagatgtacggcggcggagtcatgttctccaataaagccgccaggtccacgttcaagcagcagtgccactacgcgcaggcgtctcagcccatggtctggaagtaccaagccaccacctctgtggctgataaggcgctcgaacaattggacgccatggttcagacaccgcaagggttgaaagagtccaggctgctagtctccggcagcatgaacggttcgattcggttatacggattagggactgctctgagtaactttgagaatgaggcagagtttttgccccaacctgcttgtactcttgtgggaaagcacaagccaggaccactccccagcatttggtcacctggaacaggcttcatagctttctcatccagtatatcatgcataaagaagctcggacgtcatgtccctgatgcatcgaacaccaattcatcagttcagcgagcattgtatcctgaactcgttacttattgtactctctatttatttggacatttggtgttgccatagttgcacatgtttgcattatgttttctttattattaactggaaatatgttgtgagcttgtgtcccttgacgttgtaaaacatggtggctactcttggatctggagaatctcgtgcctctttatatattatggatctttctgaagctgttgacttggcaatcggaccatggactacctacagagttcattcacttgatcgaacaatgtggacagctgattgtagttctgatggcacacatgcagctttcggttcggaccttggtgctggtctgatcgatttggaaacaaggggatcatcatggttatgtcgttctaaaagcgacattctttccctgaaatttgtgcactcgggaaaagttgtgctatgtggtctacggaatgggagtatagcccctgttgatgtacggcaaaaacagcataatcagcctactggagtagcttcatctagcaatgctaggaggacagttcccatgctgcccacaagacatggtgggaagcaaagaaaccaggctagcaaggataaattttcaagagttatttctatgtcgtcagcagtttgtagcttggtttcactctcatcagatgagaactacttcttaggaagctccatggatggatctatcaaactcttcgatcttcgcctcattcagaagggaggtatacagtcgtacgaggggcatgtgaactcacacacacttttaccacttgctgttgatccatctgagaccttacttatgtcaggtggggaggactgcactgttcgcatatggagcatcaaaacaggcgagctaatctttgcgcggagcatgggagacagtcccttcacgtcatcttgttggcccgaaagcagccatggcttgtgcagtccttggctgtttgatgtaaaccacagctggggagcttggttggggtcacgtgctgggttgttctatatgcatggtacaatctgtaatgttacacactgatgatgaattgatgatggctgatgagcaaacataccaggcagctctgtcgaagcctgttgctgatggttcaacatttcagcaacagcacatggcaaaaaagaaaagaaaaactctttctggattcctagcagacaaaatcgttgtccttgttgaacatggtcaggtctaactcctcccagttggttcgcagggtgatgaaaaagaggacgcagttctggcagaggaggccgcatatctgccccatccacagcccctggacgacacagacatgcattgttaatttggtacattaacattcattaattatttggtacatgaacattcgttcagaatagaacacatactgtaccttggtttggaagccgagcgtgaatccgaagaggatggcgagcggcaagccgatgacatagaaggccaccaggttg

SEQ ID NO: 64577 - DNA, 2372 bp, Zea Mays
aaaggagttaaatcctgtggcccatcctgctaagatgaaaattgaaaaggcccatgatcctgggctctctcgtctttcctcgacgagattcccaaaccgctccgccgccgccgctcgtcagcctccgttccaaccgccgcgccggcgacatgccgcccaaagagctgccggggttctactacgacccagagaagaatcgctacttccccatcaggggccccatcccgggcgctgccgcccgccgcggcacgccagcgccacctccggccgtggacacaacgggatgcagcaggaaaagggctaggcggccggagctgctcaacgccagggagatgtacggcggcggagtcatgttctccaataaagccgccaggtccacgttcaagcagcagtgccactacgcgcaggcgtctcagcccatggtctggaagtaccaagccaccacctctgtggctgataaggcgctcgaacaattggacgccatggttcagacaccgcaagggttgaaagagtccaggctgctagtctccggcagcatgaacggttcgattcggttatacggattagggactgctctgagtaactttgagaatgaggcagagtttttgccccaacctgcttgtactcttgtgggaaagcacaagccaggaccactccccagcatttggtcacctggaacaggcttcatagctttctcatccagtatatcatgcataaagaagctcggacgtcatgtccctgatgcatcgaacaccaattcatcagttcagcgagcatggtggctactcttggatctggagaatctcgtgcctctttatatattatggatctttctgaagctgttgacttggcaatcggaccatggactacctacagagttcattcacttgatcgaacaatgtggacagctgattgtagttctgatggcacacatgcagctttcggttcggaccttggtgctggtctgatcgatttggaaacaaggggatcatcatggttatgtcgttctaaaagcgacattctttccctgaaatttgtgcactcgggaaaagttgtgctatgtggtctacggaatgggagtatagcccctgttgatgtacggcaaaaacagcataatcagcctactggagtagcttcatctagcaatgctaggaggacagttcccatgctgcccacaagacatggtgggaagcaaagaaaccaggctagcaaggataaattttcaagagttatttctatgtcgtcagcagtttgtagcttggtttcactctcatcagatgagaactacttcttaggaagctccatggatggatctatcaaactcttcgatcttcgcctcattcagaagggaggtatacagtcgtacgaggggcatgtgaactcacacacacttttaccacttgctgttgatccatctgagaccttacttatgtcaggtggggaggactgcactgttcgcatatggagcatcaaaacaggcgagctaatctttgcgcggagcatgggagacagtcccttcacgtcatcttgttggcccgaaagcagccatggcttgtgcagtccttggctgtttgatgtaaaccacagctggggagcttggttggggtcacgtgctgggttgttctatatgcatggtacttgagttattctgcactactacttacgttactaaattggagccttggagtctagagcaaaaaaaaggtggctgtattctcaagaaacatgagaccactgagctctggagtgaatgaaggacgtcgtctttggaagttacacatcacctagagctagggtgtccagtccttggtaggaattagacatgtttctcttagtggtggatactgtctagctaggaagagagtcttgagggattgatggacgcatgcatcttcaattcctgtgtattgtattactacaggtacaatctgtaatgttacacactgatgatgaattgatgatggctgatgagcaaacataccaggcagctctgtcgaagcctgttgctgatggttcaacatttcagcaacagcacatggcaaaaaagaaaagaaaaactctttctggattcctagcagacaaaatcgttgtccttgttgaacatggtcaggtctaactcctcccagttggttcgcagggtgatgaaaaagaggacgcagttctggcagaggaggccgcatatctgccccatccacagcccctggacgacacagacatgcattgttaatttggtacattaacattcattaattatttggtacatgaacattcgttcagaatagaacacatactgtaccttggtttggaagccgagcgtgaatccgaagaggatggcgagcggcaagccgatgacatagaaggccaccaggttg

SEQ ID NO: 64578 - DNA, 472 bp, Zea Mays
ctcgttcgtgtcatcgatggatgatggagactgacgaaatagaagagatgtgattattatttttatttttcttcttgtttcccccatgcatgcctagtaaaaacacttgatccatgacctagctaggatgaggtagataggagttgttgttgcgttaaacgatcgagaaatcgatcggtagaatgaattaatgggccagccagcagagtgtgatctcactatctgagtgatagctaggatgtacgtactccctctgtccggagatccagtattaaattaaatccacccagtgaaacaataaatactacatcaacgagctagagagtcaccacacaagcgaatctgctgctgagatcgtcggcgacgtgtaccttagctagcagtgtgttggccttgccctgaactaatagctaggacccatggccggtgccggcggcgactggcccttcacggccgacgacgacgcgtacgg

SEQ ID NO: 64579 - DNA, 1114 bp, Zea Mays
gtccatgtattgtgtgaaagcaatgcacgctttgtaaaatggaaggatggaagtatgcagcttctgattggcaatgaggttcttgatatatctgtacatgaggcgcatcatgaccaatcccatctgtttttgaggcatgggaagggaattctacaatcacaaggaaggctattgcacaaaatgcaatttatgccatcctccttgttttcgaagtcacatcgcttattaactgccctggttgattctcagaataagaaaactgttaagatgcaaaaatggtttgagactaaggatcctgagaaagcgaaaatggaaaaagaaaggattcagggccaaaatattcgagcccattcaatccttcaacgcaaaagggaaaaagtgaaccgcaagtacacacaacctgctcggccaaggcgacagctttctccaggatttttggaagacgctctagatgaggatgaggagccagactatggttctcggcgaatgccaggtcgtagacgtttcgaggatgaattggaggctgaagcactagctgagaggcgtatcatcaacgcgaagaagtcaaatatgagcagaaatgttccccgcaaaccaccgtaccctcctgctcgtctgccgagacgtcaagctgatgaatactcggagagtgagagggaggagtcagaatatgaaactgacggcgaggatattgaacattcaccgcctcgtggaagggaagatgagctggatgaggaggaagaatacgaggaagaagttgaggaagaagcgcctctctcagatgaagaaatggaggctcccaaaaggaagagagaatcagggggtggtggtgggcacatgcgcgaggagctggcgtccgaggacgacgaatccccaccaaggaagcaaccgactgttcagcatcgtagaaaggctgtcgtgtttgatgacagcgacgaggactagtgtgtgtatgacctgacctttacagtttattttttccatttcttgtcgagaatgatttatctgaaaagaagatgttggtaactgttattttccggcgggccggtttattatgagatggtgaagcaaaaaaaaaatatgttgggcaatatgctatcatgtcaccggggtg

SEQ ID NO: 64580 - DNA, 682 bp, Zea Mays
attaaaagtaagggacgaaggacttgttgcataaataaaagggacgcgttggctggcgtcggtccgccgcccgcactaccacgcccccgctcctctcgtctctatcttcgcctcttccatcgcaggattcagcggccatgggcggcggcaacgcccagaagtccaagatggcgcgcgagaggaacgccgagaagaacaagggcggcaaaggcagccagctggaggccaacaagaaggccatgaacatccagtgcaagatctgcatgcagaccttcatctgcaccacctccgaggccaagtgcaaagaacatgcggaggcgaggcatcccaagaacgacctctaccagtgcttcccccacctcaagaactagtaagcagcagaagcatatgctctgctcagctaaaagacaagtactacatatatatatatacgctgtgtgtcaattaatgggttctaggctgctgctgatgcggctgcttcgttcgtgttgccccgtctgattatgtactgtaacccttggctgtcagcctgctgtgctaaaaaccattggttctgtgtggattcatgctgcctgcctgtgctgtgcttgctcaatattttcttctcttttccttgtgttcttcggtgagaatttgggacattgcaaggatgccatttatctctagtaacggtaatttccat

SEQ ID NO: 64581 - DNA, 241 bp, Zea Mays
gttggctggcgtcggtccgccgcccgcactaccacgcccccgctcctctcgtctctatcttcgcctcttccatcgcaggattcagcggccatgggcggcggcaacgcccagaagtccaagatggcgcgcgagaggaacgccgagaagaacaagggcggcaaaggcagccagctggaggccaacaagaaggccatgaacatccagaagaactgcttgtatagcagtcattgccgaagaactg

SEQ ID NO: 64582 - DNA, 240 bp, Zea Mays
cgtcggtccgccgcccgcactaccacgcccccgctcctctcgtctctatcttcgcctcttccatcgcaggattcagcggccatgggcggcggcaacgcccagaagtccaagatggcgcgcgagaggaacgccgagaagaacaagggcggcaaaggcagccagctggaggccaacaagaaggccatgaacatccaggctactccgtctggattcggcagatccagccacggcgcgattctc

SEQ ID NO: 64583 - DNA, 4232 bp, Zea Mays
ctgggctttaagcctgtgtaactgtgttttcagttttatcttttcagttcaaccccagcagggcattttatggccaagaaagagtttgcatgaccgattgactaatcagcgccctgttggcaaccaggcagagtctcgttggtacaagaagatttggcaccccaccaatctctggccaagaaagagttggaaattggtcccaaaagtcatgcatgtgaatagactattgactctcacaatttagttttttattatatatgtttttgcttcttgggcccatggttcttaggccccatttggtttggtgtgattaaagtttagtcacttttagttcctaaagaaacaaacatggtgactaaattggggtgactaaactttagttctttagtcaccagggggtgactaaaagaatctaaaatatgatttttaccttatttgtcctctccacattttttttgcagcaaacatcaactaattaatacgggtaatacagtcattattcacagcaattaatattttgtagtccgatttagtcactggaacaaaaacgagatactttagcgactagtattcactatgtaaccaaacggggtcttatatattcccttgctctcctcggagttgtcaagtgaagcatagaatacagtcatacactcatacagactacagagtgagttttagaaacatcaatactcatcttgtgttttcttagttcttacccgagaactcccaaatggaaagtttcctttctgcaatcctgggtgagctgatatctcgatccatgaatttcatcatcaacaagtggtcaaagccactgacactggacatggaggaaagcatacaaggggctcttcttcaagcacaggtcatcattgaggaggccatgggacggcacatcacgaatcaagctatgctcctgcagctgggcatgctaagggacgccatgcaccgaggctattacacacttgatgcgttcaggtaccagcctcactatggagaaggtgctaatgatccatctgtttcaggaacaactacgagaggcactcgacaaattgagatccatgattgttgatatgaatgagttggtcatgttcttgatgagctaccctcgcctgtatcgccagccatacagcatgcatatccttctgtgtaactgcatgtttggtcgccagatggaagcacaacttgtcattagtttccttttgcacacaaaacctcatagttctgaagaattggaggtcctgccagttgttggtccactcggagtcggtaagagtacactaatcgctcatgtttgcaagtatgaaagagtccgtgattatttatcagaaatcttgtggttgcatgactgtgatttcacggatgatgagctaactttcagacagggaggtgcaatgaaacgtcagattcttttgtcaaacttgaagaaaggcaagagattgctagttgttattgaactatatggcaatctctgtgaagatggatggaacaggttttaccgtgcttccagacggagctttcttagcggtagtaaaatcatcgtgactagttgttcagacaagattgtaaagttcggaacaacaccagctctaactctgaagcacctgtcccctgaggcttactggtatttcttcaagacacttacatttggaagcacggatcccgagatgcaccctaggtttgcacagctggtcatggagatagctagactgcagattcgttcaatcaatagtgcatatactacctctaatttgttgagggacaattttagcatacacttctggtgtaaggtgctgagcttcttgagagggttcatccagaagcatatctgcaaattcggtgtgcatccttttgaacttctaaacaaaaacaagcctgtacagcttggaagaatggcttcactttctgaagatttcatgatttgtcatgagtatcgctgctctccccaagagggggttccagagataagaatgcaagatgtgatgtatggaagcaataagaagcaaggaaaatttgaggtcctaggatggagatctcagatacccccctactacagctatgtctatgtttgtgagattcgagagcgaaaaattacaggtgcaaagaggaagcactgtgtggaagatggagccacatccagttaattgtatcattttctggtttatgcaggcaggtactctatggataaattacataatcatggatgttgatggctcagtggttcactcagcgaaggcttggaatggaattcaacagtcaagtgctatacgtattctctggaatagctaactggtagcaacgaaataaaaaagacaaatcagaataaccaggtaaaggagaaactggtcccaaaggtcatacatgtgactggacttttgactctctttcagttctgtttttcttatatgtgtttgcttcttgtcccccaaccattcccggatcccctttctcacttgagctttgacgtgaaccacagaatacagagtttcagaaacatcacaactcacctctgagttttctcacccatccacagaatacaggaaggggaactcacatggaaagttttcttcctgcagccctgggagagctcatggctcaacacataaacttcatcatcaacaagtgcttcaagccgcacacaatggtcatggaggaaagcctacaaagggctcttctccgagcacaggtcatcgatgaggaggccatgggacggcacatcacaaatcaagccatgatccagcagctgggcatgctgagagatgccatgcaccgaggctattacgcgctcgatgccttcaggtaccagcctcactgtggagaggactgcaatgatccagctattaggggcatgctatccctatccaaggtaccctctccaaaggaaccctatttcttcagccaaactgcgcagtcccgggtacaactacaagatgcacttgacggattgagttccatgattgttgatctaaatgagtcagtcatgttcttgatgagctatcctcgtctataccgccaaccttacagcatgcatatcctactggctaactgcatgtttggtcgccatatggaagcagaacttgttgttaaatttctgttgcacacaccccctcactgctctcgagaattggaggtcatgccaattgtggggccacccagagtcggcaagagtaccttagtggctcatgtttgcaaggacggaagagtctgtgattatttctcagaaatcttgtggttgtgcgagtctgattttacaagtgatgagctagctggcagacaagggtgtggaatgaaacgtcaaaattgtatgccaaacttgaacagaggcaagagattgcttgttgttattgaactgtgtggaaatctatatgaagatgcatggaataggctgtaccttgtttccaaacggagctttcctagtggtagtaaaatcatagtcacaagccattcagacacgattgtaaagtttggaacaacaccggctctaactctgaagcctctgtcccatgaggcgtactggtatttcttcaaggctcttacgtttgaaagcatggatcccaagatgcatccaacgcttgcacagcttgcaatggagatagctagaatgttgcatggttcgttccatggtgcacacatcacatcttatttgctgagggaaaaatttaacatacacttttggttcaagtttctgtgcttcttgagagggttcatccagaagcatgtctccgagatcggtgtcaatccatttgatcttctgaaccaaaatagacctgtacaacatggaagaatggctacaccttccgaagatttaatagtttgtcatcagtatcaccgttcttcacaagaggaggttccggagataaggatccaagatgtgctgtatggaagcactaagagacatggaaaatttgaggtcctagtatggagatctcagatacccccttactacagctatgtcaatgtttgtgagattcgagagcgtaaaattacaggtgctaagaggaagcaccctatgaaagatagaactactttctgataattttgtaatttttctggtttatgcaggaacacacacacattcatcttatattcacttttttggggtcggatgtcataagttacagcagagtcaattatgaagtgtaactgttatgttttcatatctgaagtatagcagcctcggtctgttcttgaacggctttgtttccggctatatattttcagttcaaaccaag

SEQ ID NO: 64584 - DNA, 1162 bp, Zea Mays
gagagatgagacgaaaatctcctctgcatccggcatcccgatcctgtgtgtctctactctgcactcctcgattcgattcaaccgacccagcaggcgggaaatggcgaacggtgggaccgaggcatcgccgctgcggccccggcggcgcgccggctccagggacccgttcctcatcgtgtgccgcttcttcggcgtcgtcacggccgccgccgcgctgctctgcgtcgccgccaacgtcctctccgcggtctactccttccgcggcggcgctgacatcatcggcggcgtgttccggtgctacgcggtggtgttctccgtcttcgtcgccgttctcgagaccgagtgggcacccgtcatcaggctctggaagatatttgagtacttgccggcaaggggaatgctgcagatctttgttgctatcatgaccaaggcgtacccaaatgttgagaggagcgagctgattttgatccaggagatcgctacttacatgcttcttgtgtgtggagctgtctacataatcgcaggtatactatgtcttggtgttttaaaacgttctaggcagcataaagcaacatcacaggagcaagcggccaaggatctggaggtcagtacctgttggttcctcctgctctagtagtgatagcatcggatcctgaggagctagagaagaggagagaggagcttgagtctctgttaactgccgagcggtcagagatggcctgatgtcgacctaccatctctcttctggtgtaaataagtgtttttttttttattctctgttgaatgttggtagcatgcatactgctttgccgtgaccatcggtttcatcgccttctctagctagtttggagcatgttgtttcagctgggttctagacattcgtgtaatgcactgtttacttatatgatgatctcctgttgtagatatatgttgcagaaatttacgaatctaagcaaagaatctgggatgattgaggaatatgtttgccctgaaaaaacatttatttttaaccaacaaagagggacctacattttggtgctaacgggcaacggcaaaggacacctatgcttgattgatcactactacagttgcaaaattcgacatttggcaccaacgaccaggcaaataaagttgagagaaacagcccttaatcaaaaagcag

SEQ ID NO: 64585 - DNA, 1204 bp, Zea Mays
gaaaatctcctctgcatccggcatcccgatcctgtgtgtctctactctgcactcctcgattcgattcaaccgacccagcaggcgggaaatggcgaacggtgggaccgaggcatcgccgctgcggccccggcggcgcgccggctccagggacccgttcctcatcgtgtgccgcttcttcggcgtcgtcacggccgccgccgcgctgctctgcgtcgccgccaacgtcctctccgcggtctactccttccgcggcggcgctgacatcatcggcggcgtgttccggtgctacgcggtggtgttctccgtcttcgtcgccgttctcgagaccgagtgggcacccgtcatcaggctctggaagatatttgagtacttgccggcaaggggaatgctgcagatcttgtgagtatttaattctaagtttctcgggtacaagcagcagtgcaaccaatgtagcgacaggggcagacgggcagtcctgttagttgtacatcgcatccttccacaagtgttgctatcatgaccaaggcgtacccaaatgttgagaggagcgagctgattttgatccaggagatcgctacttacatgcttcttgtgtgtggagctgtctacataatcgcaggtatactatgtcttggtgttttaaaacgttctaggcagcataaagcaacatcacaggagcaagcggccaaggatctggaggagctagagaagaggagagaggagcttgagtctctgttaactgccgagcggtcagagatggcctgatgtcgacctaccatctctcttctggtgtaaataagtgtttttttttttattctctgttgaatgttggtagcatgcatactgctttgccgtgaccatcggtttcatcgccttctctagctagtttggagcatgttgtttcagctgggttctagacattcgtgtaatgcactgtttacttatatgatgatctcctgttgtagatatatgttgcagaaatttacgaatctaagcaaagaatctgggatgattgaggaatatgtttgccctgaaaaaacatttatttttaaccaacaaagagggacctacattttggtgctaacgggcaacggcaaaggacacctatgcttgattgatcactactacagttgcaaaattcgacatttggcaccaacgaccaggcaaataaagttgagagaaacagcccttaatcaaaaagcag

SEQ ID NO: 64586 - DNA, 1238 bp, Zea Mays
tcctctgcatccggcatcccgatcctgtgtgtctctactctgcactcctcgattcgattcaaccgacccagcaggcgggaaatggcgaacggtgggaccgaggcatcgccgctgcggccccggcggcgcgccggctccagggacccgttcctcatcgtgtgccgcttcttcggcgtcgtcacggccgccgccgcgctgctctgcgtcgccgccaacgtcctctccgcggtctactccttccgcggcggcgctgacatcatcggcggcgtgttccggtgctacgcggtggtgttctccgtcttcgtcgccgttctcgagaccgagtgggcacccgtcatcaggctctggaagatatttgagtacttgccggcaaggggaatgctgcagatctttgttgctatcatgaccaaggcgtacccaaatgttgagaggagcgagctgattttgatccaggagatcgctacttacatgcttcttgtgtgtggagctgtctacataatcgcacatgatggaccagttgaatgcttcaagtatggagtggaatctctcttacaagtattaaaatggttacggcatctaatagtaccactgttcctgaccaggcatgcctgtcatagcaaaaaaaacctctctctcgtttttggaaagaaaaggtatactatgtcttggtgttttaaaacgttctaggcagcataaagcaacatcacaggagcaagcggccaaggatctggaggagctagagaagaggagagaggagcttgagtctctgttaactgccgagcggtcagagatggcctgatgtcgacctaccatctctcttctggtgtaaataagtgtttttttttttattctctgttgaatgttggtagcatgcatactgctttgccgtgaccatcggtttcatcgccttctctagctagtttggagcatgttgtttcagctgggttctagacattcgtgtaatgcactgtttacttatatgatgatctcctgttgtagatatatgttgcagaaatttacgaatctaagcaaagaatctgggatgattgaggaatatgtttgccctgaaaaaacatttatttttaaccaacaaagagggacctacattttggtgctaacgggcaacggcaaaggacacctatgcttgattgatcactactacagttgcaaaattcgacatttggcaccaacgaccaggcaaataaagttgagagaaacagcccttaatcaaaaagcag

SEQ ID NO: 64587 - DNA, 1009 bp, Zea Mays
tcctctgcatccggcatcccgatcctgtgtgtctctactctgcactcctcgattcgattcaaccgacccagcaggcgggaaatggcgaacggtgggaccgaggcatcgccgctgcggccccggcggcgcgccggctccagggacccgttcctcatcgtgtgccgcttcttcggcgtcgtcacggccgccgccgcgctgctctgcgtcgccgccaacgtcctctccgcggtctactccttccgcggcggcgctgacatcatcggcggcgtgttccggtgctacgcggtggtgttctccgtcttcgtcgccgttctcgagaccgagtgggcacccgtcatcaggctctggaagatatttgagtacttgccggcaaggggaatgctgcagatctttgttgctatcatgaccaaggcgtacccaaatgttgagaggagcgagctgattttgatccaggagatcgctacttacatgcttcttgtgtgtggagctgtctacataatcgcagagctagagaagaggagagaggagcttgagtctctgttaactgccgagcggtcagagatggcctgatgtcgacctaccatctctcttctggtgtaaataagtgtttttttttttattctctgttgaatgttggtagcatgcatactgctttgccgtgaccatcggtttcatcgccttctctagctagtttggagcatgttgtttcagctgggttctagacattcgtgtaatgcactgtttacttatatgatgatctcctgttgtagatatatgttgcagaaatttacgaatctaagcaaagaatctgggatgattgaggaatatgtttgccctgaaaaaacatttatttttaaccaacaaagagggacctacattttggtgctaacgggcaacggcaaaggacacctatgcttgattgatcactactacagttgcaaaattcgacatttggcaccaacgaccaggcaaataaagttgagagaaacagcccttaatcaaaaagcag

SEQ ID NO: 64588 - DNA, 1014 bp, Zea Mays
ttttacctcatttttttttctattctctgccccaaacgcacaagccctagccgccgaccaccatggcggcggcgccacctccggacccgacggttctaattgaagacctcgtcgaggagttcctcctccgcattcccccggatgaccccgccagcctcgctcgcgccgccctcgtcagtaggcactggcaccgcgtgatcaccggccccgtcttccgccgtagattccaggacggcaggctaggagttgccaaaacaagcaattcaacgcttggttgttcaacacttcacctgtggataagggaccatgaaagatgggaagaaagaaggcccattgagcttcgtatgctgctcccagatgatgccctacgcgatcctcaattcccgcctgaattttttccagacaagccttggctggctggctttgcagggacaggagctggtgtcattttctttaagacacgtcttgggtattttgctgttgatctgaattcagggaggagcaagaacataggcgggtgcttaggttggggttgcattattccctatgtgagcttctgcattccagcgccaggagcaatatccacagatgagggaccagaagctggtctcgagggctaggagctctggcttgtgaagtgaataagaagctctaaatcaagaaggatatttactagaccagaagcatggtttgggtgggatatctctacatgattttgttgctgttctgaccttgtttgtgctcccgaacttgagtttgcaatcaaattatgataatggtattgactctcatatgaaagcatggcatatggaatttaatactgtgtatgactgtggacaattttcctcttctactttttatcataggaccaagggataaaatcagcttactccaatccagttttatgaattgttcatttgatagctttgttgaatatgaaggactacttttttatgcactgtgtctttgagcaagatcggtgaacaacactgagcatgggcttttgaggctttt

SEQ ID NO: 64589 - DNA, 1023 bp, Zea Mays
ctgaatctttttacctcatttttttttctgttctctgccccaaacgcacaagccctagccgccgaccaccatggcggcggcgccacctccggacccgacggttctaattgaagacctcgtcgaggagttcctcctccgcattcccccggatgaccccgccagcctcgctcgtgccgccctcgtcagtaggcactggcaccgcgtcatcaccggccccgtcttccgccgtagattccgaggacggcaggctaggagttgccaaaacaagcaattcaacgcttggttgttcaacacttcacctgtggataagggaccatgaaagatgggaagaaagaaggcccattgagcttcgtatgctgctcccagatgatgccctacgcgatcctcaattcccgcctgaattttttccagacaagccttggctggctggctttgcagggacaggagctggtgtcattttctttaagacacgtcttgggtattttgctgttgatctgaattcagggaggagcaagaacataggcgggtgcttaggttggggttgcattattccctatgtgagcttctgcattccagcgccaggagcaatatccacagatgagggaccagaagctggtctcgagggctaggagctctggcttgtgaagtgaataagaagctctaaatcaagaaggatatttactagaccagaagcatggtttgggtgggatatctctacatgattttgttgctgttctgaccttgtttgtgctcccgaacttgagtttgcaatcaaattatgataatggtattgactctcatatgaaagcatggcatatggaatttaatactgtgtatgactgtggacaattttcctcttctactttttatcataggaccaagggataaaatcagcttactccaatccagttttatgaattgttcatttgatagctttgttgaatatgaaggactacttttttatgcactgtgtctttgagcaagatcggtgaacaacactgagcatgggcttttgaggctttt

SEQ ID NO: 64590 - DNA, 2154 bp, Zea Mays
atggcggcggcgccacctccggacccgacggttctaattgaagacctcgtcgaggagttcctcctccgcattcccccggatgaccccgccagcctcgctcgtgccgccctcgtcagtaggcactggcaccgcgtcatcaccggccccgtcttccgccgtagattccgtgagttccaccgctcgccacctttgcagggctacatctccaacatccacaattccatccacttcgtccctatatcgtcgttccgcccgcgccatgctgacctcgacgacgtgatagcgatccactcaagccctggtcgcgtccttctctgtcgccgccccgggaagggtctggatgtcttccccgggaagggtctggatgtcttcctctccgtgtgggatcccatcaccgatgagctgcgggatttgcccgcgctgccgctgccggtggtcccaggcccgtgcacatgtaactgggacgcggccgtcatctgcgccgtaggcgagggctgcaaccatatccattgcggcttcaaggtcgtctgcgtaggaacttctcaaaggagggacttctcctgtgtctattcacccgaggctggtagctgctggagtgatctcatctttgctgcttcaggggaacacaccaactcctttgagacggggacctgtgtccacgctgggagctccctctacttcctgagtcgattcaaccatgaaatcgtcaaatatgacttgctgacggatcgaatgtctaccatttgcttcagagtagaacctgacgcccaaattaacggcatggccactgtgcttattgccacagaggacggcaggctaggagttgccaaaacaagcaattcaacgcttggttgttcaacacttcacctgtggataagggaccatgaaagatgggaagaaagaaggcccattgagcttcgtatgctgctcccagatgatgccctacgcgatcctcaattcccgcctgaattttttccagacaagccttggctggctggctttgcagggacaggagctggtgtcattttctttaagacacgtcttgggtattttgctgttgatctgaattcagggaggagcaagaacataggcgggtgcttaggttggggttgcattattccctatgtgagcttctgcattccaggtaccctggcaccctgctttcactctgtattttgctcatttgcacttgcacaataagtagtagttcagctgtgtatgggctcagcaacattgtgtaatacttttttattggtatttggtatcatgaaccagattactcctacctatatattacctacataaaaggttaggttctcacgtattctacggtgcaaacattagtctcatcatgccaacctttaattatacatgttcctcaaccatctcttgtatactaatttcacatgataacgtcgtagaaaaataaataggataaattcctagatgtagtttgagttcatcttgatgctgttatttacatgtgttgaagcttgtgaaattctatctcttacagctgatacaaaacatatatatacacaagactcttgggctacacggtaacggccagacacggcccaacaatatgtgaccattaactggataataaatcagtgctgtttttttggcttttgtatgatttgtgtttacccaatattcattgttatcatagattcatcatattttgtatttgagtttcttatgcagcgccaggagcaatatccacagatgagggaccagaagctggtctcgagggctaggagctctggcttgtgaagtgaataagaagctctaaatcaagaaggatatttactagaccagaagcatggtttgggtgggatatctctacatgattttgttgctgttctgaccttgtttgtgctcccgaacttgagtttgcaatcaaattatgataatggtattgactctcatatgaaagcatggcatatggaatttaatactgtgtatgactgtggacaattttcctcttctactttttatcataggaccaagggataaaatcagcttactccaatccagttttatgaattgttcatttgatagctttgttgaatatgaaggactacttttttatgcactgtgtctttgagcaagatcggtgaacaacactgagcatgggcttttgaggctttt

SEQ ID NO: 64591 - DNA, 1218 bp, Zea Mays
gcatgcatgcatgcatggtacgaacgtctggatagagtctccgagctgagtgtggtccgacgtggaagtgtacgtctcaacacacgacgcatgtgaccgacaagggcaagttgaagtctatgcatggatgggcctgagcgccgcgctgaatgaatctggacgggtggtagggcatctcggtgggcaaaacaaataactccgtgtgctgcatggctgcctttggaatctttgcatgcagctgtgtgctgaactgaaacccttcgctctatctatataaacagatgcccttcgctctcgtctcagcaggcagcatcgtctcaagttttgttctcctctcctagctagccagcacctgcagatctgctcgttgccttgcgatggctcgcagcggcgccgtggtttcctgcatgctgctcctggtggtggcggcgcaactgctcatggtgatggccacgcagacagcggcggcggcggcggcggcgggcgaccaacgcggagctggacgccggctgctgtggcaggtgacctgccactacagcaactgtaattgccgcacttgcccgatatatggctgggcgtgctgcagcacttgctgctagctagctagctagctagtgtgagttcttccgcgcgcgcaagcagcctttgcataccacccctcttgcttagctcatgcatgtccagcagtagccggttgctgggctcgtcgtcgtcgtcgtctgcggcggcggcggcgggggcgggggcggcgtcatctctggcgtggttacgttctcatcagcgacttctaatggcgctcgctcgatctttatttcctgcagtcctttttgtaataagaagccaattgatgtgtgtgcacgcgcaatcctaataataaatagatcttctttgtgccttgctttgtttgatatatataataaaagtcttcgttgcaaacgtacatcttttttatttaggaaattcattttttactaccgctttccggacggcatgcaggcctcaagtgtgctgtaaaaaaaagtgcaagttgagagagagccgtttcatgtcacgctcgaaatccagtggactcgttttgagacaatttattatccaccaaccatctaaagttaacttggcgccaccttttttccgcgatacgtagtattagtagagctgggcatctttgtactaagaatacgaaaacatcgtacaaccaaacaaaagaatagaacaggc

SEQ ID NO: 64592 - DNA, 2060 bp, Zea Mays
gtccttactcctttacagctaggaggggatgctacaaatacttattggatcctaatgaccgagagggtcagttctatggttgtccaggagacagttagccaaattctgtctggtctgattcacagttacgagggcaaaggagactcaaatccaaatgataacttggagaggcttgagatggcgcatatcaagttggaagctgctcttgagacatgcagcaagtggcacatcactgatttgtcgttgttgcgttggcgcaagaagctgaagcgagctgctcaagagtgtgatgacacgctatacaaatacaagaagatgatccttgaagatgaacagatggaacaggaggttaggaattcctactttcctagacgaatagcgcatgctaccaaatctttcattttctctgcctttggccacaacaactacgagtccagcagatctgctgttcgaagattcgagtggtatgcagatggtgctagtgagtttctgagattcgtagagcttggtggcgcaccttgctgtcacatgccattcaactcttttgccaagcacctttttgcaggcaaggaactacagcacaaaattgttcgtggaaacgagtaccctttgtttctactatggttgatgccctttgttacggaagagcatggaatcgaagcttgcctgatatttatcaagaaagacggaaatacactggaggatgactttttctttagtgtaatactgcagctttcagaaagtacagacatagttgggatcacaatgaagtgcttgcagttgttcccccatcattttcagcccacagttgatactatcaagaaagaacttactcaactaactacacaggacttttcatgggtgccatatgttgatctatggcacagaaaacactgggacaatcttcataggtttagcactcaatggtttcgcccagatccattatgttgcaagcagcatgatcagcataagcttcagtatagcaacctaggcacagttgatgcttctctggattcaattattgaagtaaatatgcagtgtcagatctcgctacccaagtacaacaaccatcggaccgcactgtctgaatgcaaatattctctgcgcgattatcaaaagctgaaagctggattcctctttactccccattgtccttcagaaaacatgctacctgcagatacaagttctacgatggtgccgatcttcaggaggggacaacattgcgaggatactgacattgccttggaacaactgaaagaaatcatgatgtcaaaggcgatagattacttccgacaatacactgaagcgacagtctaccaaatactttggaaggctatacatggcactgcgtacattcattttgaaaagccagccatggaggctccaggtgcacggagaagttttaggggagctaggaaaagaaaactagtccaaccaatggaccaggatgtgcagcatcggacgcgtatgatctctcacttgctcgacttatgggctccacatgctcccgttaggctacgaggcttgatcttggactggattcagaaagaaaaggaaagccagttagcagcaccagtgcaccactgttgcacctgacgttctgaatcaattaacctggagagataacaggaacacatcaaaggttggcttactactcacaaaagggagcaaatctgtcagaaaaataaaagggcggatatacagggaccagggtgatagaaatttgggtcaaaagctatgtttccagtgaagaggatcaaacccataccatgaaggtcttgagttacatatcaatagtttgtgttctgttggtcacaaaaataggaagtactactatcaacctacattagaacttatgaaagtgtaacacatcacttgttctcagtttgagttatgcatatatgaccagctgatcatgtgatgggaataaaaaaagtgaaacatatttgtaactatatgttttttttttgtgtgagctttgagatggtggttatgccatgttttactcgaatttaaaggttgcaacttcagcttatttatatactgtattaattaaagct

SEQ ID NO: 64593 - DNA, 1717 bp, Zea Mays
cccgtactcaccgccgcaataagcccatacgagcccaacctggaacccgttggcgagcattgggcaacccatgcatacctcccccgagctgatttggtggagggatcacgattcctccccatggatccttgtgatccctgtccaccaatcacccccgagagttcgcgctccgttccaccaaaatcctccccacttcctcgttcctcaaacttgaataagatggagaatctagcacatccaatctcctctggttttgtgacttccaaactagtcctccacgcgtcacttcccacgcctagaaggggattgtcgccgccgccgcgcaacaatggcctcctcttcggagaacacagtgggggggggggggtccaaggccatcgacgccgaacccggagccctttagtaggtcaaaaatcaaatggcaaatatcaggagaatgggaatggtgaagttgagaaggatgatgatgaggaggacattgatgagaagataggagatgaagaggataatgatctggatctttcctggaaaatgttggacattgctaggacaatagttgagaagagccaagagaacactattgagaaagtaaaaaaatattctggtcttgctgaagttgcaacggaaagaggacatgcatagacaactcactcactgactacatgagagctttatccatgttggagcacttggttgagcctgatcatcgccgagttgtggaattaaacttccgcatatgtttggtttatgagctagtttccaagattggagatgcgattccgtactgtacaaaagcgatttcactatgcaagtcacgcatatagagccctgaaaagttccaaggatgctttgcatgataaagacggtaatgatgcacctgctgttgaagctgaaggaggttcagaaaaaactgccgctgaaaaagagctagagcagcttactagcatatgcaattttattatgcttcatgggtctgttactgtatgagtgagcgaaagactttgggccctgcgagccggagaggtacgccacaccaatcaccaatcacatcaaccgcgacactctcagcgcgagcctggcacccccgcctctggatattatggagagcttgcgccagcacatacttcaaatatggatgcgctctgctatacaaagctcaggaggaaactgatttttaggtccctttgtcagcgctcctactattctcaaaatggcttcggctctggctcctctgtcttcttggcttctctagaggaggcagagccgttttgcaattcatttggcaaaacagcttctcacgagcagacggtggcagagactataatttcgtgaaacattattgtgtgccgaatagaagaagccggtagaagcttgttttctcgtgcttcggctcccaatagcaaaacaactctggctctttgatgactctcggtaaggagccgtttttctaagaccgtttggtatggcttcacgaagagccagaaaaggagccaccgagagagccaggcccttaatatggagaggatgcctgtcttcggagaaagctgttgctgaagaaggtatatgattaccagctcgaggacctggaccaagcagccccaagccctgccatggatgagatggtgaagacaattgcgtctaggataactgacgcgatgccaggagctgcatcttttacttgttcccagatggcagcctcgagcaatggatttaactc

SEQ ID NO: 64594 - DNA, 5512 bp, Zea Mays
cctccgtctccaacacagctcgccgccgccgagtagctgctcttcgtttctttccagttccagctgaaagccttctcgccgtacccatttttggtaccggtgggggagcactgtcccaatggctggccgccgttcgccgtcggcggatcccggtctcggtcactgcgaagctcccgaaatgagatccggtggcgctttagagccctcgtccgttccaatacgcagtcggatgctgggttacgctcgcctctaaatctaagcttattatttatgcctttgcttcgtattcgtcagatctgatttcgtatttctgtctcgaccgaaattttgcgcggtgcagtgattataaaaacattcctcgtactgatgggtcatcctcgtgaacgactcctatacacccatagaatctgagcacccaaaacacatctccaaattttttttactttcgtgctctattttgtttgtttgttatactatttaggttttttaaaagaaacttgacttccgcgctgttttgcaaatctgtatttttcttatttgctttataatttgtattggatggttttgaattacttggatttatcatgacaatacattgttgtagcactcaaaacactgctagatttatcttctagcctgtggtcaagtcgtcacagcgagtggctctatcgttcatctactgcttgcccagtgcccagttgacacccgtccttcctgcgttgctattgtcgatcgacgaattcttcatgagatcttctatctggtcgcaaggtggaacttttggttccgatgctaccgcaacgtcagcatcgcatcaacttttgtattgacacaatgtattattaaaacaaatatgttattgataatgtaatgatgaaaattaaaatatgtaatttatgaaacatataattttactagttgtaggggttttattaaatcatttttagttaatcgttgtccgcattatcaatcgaagggtattgtgcggacctctctttgaaaaaaacgtctctaaacttttacaatgtccgtggagcaacttcaaactagataaagtgaattcggatttttataaaaaatgtaaccaaagagttatccaattgggaagtcacggccgtgcaaatattcagtgttttttaaaaaacagtgaatgttgttgtttaaatgactctaaatgttattttagtctgttctgtccagcttgataatattgcataattctctgggatttcagcatcaaaacttaaaatgggctccgaatcttaactgaaccacccacctaaactttctcggtggaatgtggagctttaatctcccccataattagtctattttaataagaatttaatacatgtttattggaaatacttgataacaatatatattataatcctataaatattgaagtatttttaaaaattacaaaagctaatgtataaaaggtaaatatcttagttcaggaaagttgagttcaaaagggaatggttggtgaggagaattagagggaagaatagttaataaggtatttaaatataaatagaaagacgaatgatgtgatttgatttgagagagatggttggagaaatctacctacaaacgttagacatctaaattatacaaatgtcaagtatactcaactaaatatcattgcaaaatttctagccgtgcttcaatcatctatttaataaaagcttctcacataaaatgtatttttcctaaaataaatatatagtaatataaaaaactgggtagctcaaaacatagattcgaatcttgaaactaaaatttaagctagaggcattccatctgttcattagtacctttgtaaactatataacaagctttaaaattgtttattttataaaacgattcttggtaaagattatatattaccttcctctaaataagtgaaatggtggatattcatttctgagttagcttgaaattttatcgcacactcacaagtaatagtctcttaaaatgaaataatatatgtacataatatacctagagcttttaactaaataaaggaccataacaaatatacagagagggtaagagtccggcggtgtccaggcgaccaggcgggtcatgggtctggcgcgctggtcccgtggtggcagcgcgatgaggaattgggccaggggagtttgcgcgtgactaggattgggccagcacgcgcacaaggaaaaagaggaatgggccaaaaggcgcccaaatcgaccgatgtaggttttttctcttttgttttttttctgttttagattcctacttcaaatttaaattcaaatcagagtttcaagttctagtttaaatgcaacatctaaaatatcaggatgaatgcaaagtatatatttttatatacttgaatgggtcccgttcgccagattcttctcctttctgttgtataccgcggcggctgtgtcccaattctcaacaaccttcgcacgaattcagctgtgaccgtggagaatctgttgcagaccgtgtgaatccaggacgccacgacctggccggggttccgctcgggtataaggagtggtcgtgttcctctcatcggtgagggagcagaatcagtcgtcttcctcccgtgattctagcagagtcgttgcagcggtgcacagaattcggctggggaatcccagtgctccctcaactaattccgcatccccttcccaccaatcggacccgagcgccatctcccgcctccgacacaccctgacggtgccatcagcggcgaggcgcgcgcacggagccgaccttcgaaccctggtgtttggccgaggcgccttacgggatcgtcctcgccgcgcgatagctctggcctctcctcgcatccgcgttctctccacccgccgcggtaaacgctccttcacgcgaccccgtgtgcccatcgcgcatgctggtggtgcagctgcgcctccgccccggggcctcctcgagtccaagctcgccgaggcactcaactttgccaactccctcgtggaacaccgcgatggcttctaccacagcgagttcgacgccaagggcgcgccgccacacttcgtcgtccagaacccccgtcgtggcccgcttccacccttattccgcgctcccggtaagattgccaccagctgtttctcgttcgtccgcacatcgtgtgtcgcctcgccgttgtccatctagcgcacccggtcgcgggttggccgtgcggcggcaaactcagcgtcgcgggcagggctgcgccgcttggggtagaagatgggtcggtctccgtcggatctgcgacgtgtggctgtgattagaagactgtgtaacgattcgtgagatcgaatctgggtcgttaatttgtgatcgtgcggcggtgatcagatcccgcgttaatagtatcttcatcgtagattactgatcctatggctcacgtgcctacaggggctcagatctattcctgactgatggatctaatctgatcggctcagaggagcttatacccctttgaccttgtcaatttgttaaagaacccctgtgctatgagcaaaataaccctctgtcctggccagtttagaaaacaatacaaacaggtcctaaattttatgggttagacctcgagcttctggtaaatagcacccgcagcccaggaatggattaaatcaagtaattaatatagaaaattagtttttagtacaaaaataattccaggatcttgtttaattcatggaaaatttatattagcttctttttagtccattccagttcctataattttatattaatattgtctattacttgtagcatgaaacctatactagaattgattactcaattaattttgtagcaagtacatatgaacttcggaaatccataactcctccgttttaactccgatttgatccgttcaagttgcgttagtctcgtataaatatttactatgtaataaccacatttattataccatgcctcattattttataattggagttgtatttaattgatgttggttagtctggttaaactgcttatcattatagtttctagaaaaatgatctatgatcaatttatatctgagattaaatttgaagataattatgtatagaataacctctcatatgatttatattaaccaatttataatatagttaatattttaatcatacatatcttctataaaatcataactctttaaccgtaactccgattttagtggttctcgatcccccgatcttgtagcgacgcgtaaattattattattcagcttgtacttatgtttggtgtgatgttaatgttgtctataccatgtttgtttgtattgctacgactagcagtgaggtcacgaggatatgaagaatcaccttggtaactggaatctcaagtgccagacaagttatgcccttgaccacttttgttacccaataatgttctttattgtcacttattcatgcataacttaatattgatggtacccaataggtcaccctaatatgtttatccattttaccttgtttaccctgaatcatttgggtagttatgctattgctttatatggttttgggttaatatttcattatatccatgttccaattattatgttattttatttatgttcatgtcaagatcattatatttttaattggaacatggagcttaacttgagaaacacgtgacaccacaagggtggaatgagacgcccttggctaactaattagaaaagctagtggaagactaccttacccgaaaggggcaagggcagtaggggagttgcatgcaaggaggttctcgggttgattttgctacgatggcggtcagacgggggattcttgtaagtgctcttcccataaactgtagcgggttttcagaagctagtgaaactttgtaaaggcctcatagtggatccctagccattcacctcggtagtgtctaagggccttgcaaaccctggcgacatgggatacacaacttgtgggtacatggtacaaactctgcagaatgtaaaattggtatactagccgagctcacggtcaagagcagctcaggactctcgcatgattaaattatggaacttaaattcattttttcatttgcatttgcatgagattatttattaattttgttgtattatttattatggtttggttttacttacatttagtaactgctaatcaaacttgaccaacttattaaaagcaatggtcagctttaacctctattgttaatcatccttacacatcacatgaactctcaccttatgtgagttcatgctcattattcctcacaacttgttgagcgatgaacatgtgtgagctcacccttgttgtctcacacccccacaggagaagaacatgtggttcaagaggagccacacaacgaggagttcgattcgatctaggtggcgtctcccagttgactttttggcgccaaggatggattttagatccttttatatttatcttttattttgtaagacttctgatgtgtaataaatactctggtttttgtgacatttatcgctatacactctgttattatatatgttgtc

SEQ ID NO: 64595 - DNA, 1595 bp, Zea Mays
ccacctccacctaaacggcctaataatcctcagatccgacggcccgcgctcgatccccgccgtccatcttgtgctaaaccctgtcgccaacgaattaaattgaactcggcacgcgcacacgtccgcggccgcccgcacgccgccagcaacccccctcccgctccccgcaaaaccctagcgctctctacctctgtctctctctgttcgtcggcgatggcggcagcggggggcgaggaggaggccggcgagagccggaagcttttcgtgggcgggatcccggccggggcgcaggagcccgagctgcgggcccacttttcgcgctttggggaggtgcgctccgtcatcgtgatgcgcgaccgagagacgggccacggccgggggttcggcttcgtcgagtttgaggaagaggctgccgctggcaccgcgctcggcgacggggagaagctcaagcacttcctctgcggccgcatggtggacgttaagagggccaggacaagagctccacgaaaccagggcgagcagcactcgcagcctcagcaggctgagcaaggccggggtcaggggaaccaagacaatcagtcgcccgctggtaatggtaccgctgactgtggcaacagtgtgagctatgattcaaaaaagcgcgacgagccggtcgagggggttcggtttcgtcacctttgattcggaggaagcagtggggaaggtgatgcggcagagctttcacgacctgaacgggaccaaggtagaggccaagattgctatccccaaggatgagcagtattaccgtaacagaggaggccatggtgctcgtccctttggcgggagggatcctgccgctcctggctatggagggttcatgtaccaaacatacaatgctagatctggcccctacaatggctacatgccccaacctgctcccacacatccctactttcctgccccctattttgctgcggggggctatccctatgggagtggatacccaggtcaaggcgtcatgccaaacattcctggcatggggcctaggcggggtcctccggcctatggaacataccctcaaatgtatccggtgtataacattatacatagagctggttatggtggtccagccacttcttttcagcatgaaattaatggtggaggtgattacaaaaaggatcaaacgaatgtagatatgcagcaagttgacaacactgctagcgttgcgacaaagttggaaaatatgaagctaggttgacaatgactttcaggactattacttctacaacgatgacactggagttagtctattgtttgggaacccgcaactgtgaagactttgagctgagagattctttggttgacaagtacatcattagaattcttcaaacttacgtaccgttcctatccccactgcctgtaaaacagaaagcatgcgagtcgctggctggctgttgacctcacctcccctctcctctcctctcctcttgtaccaatgttaaattcttacgaccgtttaatgtatcttaatcagacaatccagaatcgaccctaatcgtctgctttgctcaaccccgattgtttctgtttctgcaatgtcgaatccatggttttct

SEQ ID NO: 64596 - DNA, 586 bp, Zea Mays
cgcgcgtacacaacgcaagcgcagaagaagacttgcccttgcccacctcctcctcctcctcctcctcctccgccgccgcgcgcttcacacccctcatctcctcgcggcaatggccaccgcaccgtgcgctccccaatgattgctgctccactccgacgaccgatcgccattgccgcgcaagcagggcccaagctggaggacttcctcggcgcggcggcgcagtcgcaggccatggcgctgagcctggacaaccccgccgccgccgcctccagcttctactactacggcggcggcggcggtccggggcaccagcacgggttcctgcagccgtgcggcgacctgtacggcggaacctcggccgcgtccctggtgtccgcggacgacgaggcggccgccgcgacggccatggcgagctgggtggcggcggcgcgcgccgagagcggcgtgctgtccgccgccgcagccgcggggcaccaccacgcgctggccctgtccatgagctccgggtcgctgtcgagctgcgtgaccgcgcaccccgcggcgcccgagtacggcgcggcggcggcgctggacggcgggcgcaagc

SEQ ID NO: 64597 - DNA, 3007 bp, Zea Mays
cgcgcgtacacaacgcaagcgcagaagaagacttgcccttgcccacctcctcctcctcctcctcctcctccgccgccgcgcgcttcacacccctcatctcctcgcggcaatggccaccgcaccgtgcgctccccaatgattgctgctccactccgacgaccgatcgccattgccgcgcaagcaggttgtgttactagcttgctgtcgcttaggtagttttgtgttttagcttggttcacacgatgaccaacgaaaacaatggcaacggcacgaaccccgcgtcggcgagcggctggctaggcttctcgctgtcgcctcacatggcttccgccatggacgaacaccagcaccagcaccagcaccataatggcctcttcttcccttccgtcaccgcggcatacggcctcggtggcggcgacggcgtggtggccgccagcgcgtcgccgtactacacgccgcagctggcgtccatgccgctgaagtccgacggctccctctgcatcatggaggcgctccgcaggagcgaccaacaggatcaccacgggcccaagctggaggacttcctcggcgcggcggcgcagtcgcaggccatggcgctgagcctggacaaccccgccgccgccgcctccagcttctactactacggcggcggcggcggtccggggcaccagcacgggttcctgcagccgtgcggcgacctgtacggcggaacctcggccgcgtccctggtgtccgcggacgacgaggcggccgccgcgacggccatggcgagctgggtggcggcggcgcgcgccgagagcggcgtgctgtccgccgccgcagccgcggggcaccaccacgcgctggccctgtccatgagctccgggtcgctgtcgagctgcgtgaccgcgcaccccgcggcgcccgagtacggcgcggcggcggcgctggacggcgggcgcaagcgcggcggcgcggcggggcagaagcagcccgtgcaccaccgcaagtccatcgacacgttcgggcagaggacgtcgcagtaccgcggcgtgaccaggcataggtggacggggaggtacgaggcgcacctgtgggacaacagctgcaagaaggaaggccagaccaggaagggcaggcaggtctatctcggcgggtacgacgtggaggagaaggcggcgagagcctacgacctggcggcgctcaagtactggggcccttccacgcacatcaacttcccgctggaggactaccaggatgagctggaggagatgaagaacatgacgcggcaggagtacgtggcgcacctcaggaggaagagcagcggcttctcgcggggcgcgtccatgtaccggggagtcacaaggcaccaccagcacgggcggtggcaggcgcgcatcggccgcgtctccggcaacaaggacctctacctcggcaccttcagcacgcaggaggaggccgcggaggcgtacgacgtcgcggccatcaagttcaggggcctcaacgccgtcaccaacttcgacatcacgcgctacgacgtcgacaagatcatggccagcaacacgctgctgccgggcgacctcgcgcgccgcaggaaggacgacgccagcgacgacaacccggcgcccgccgccgcagccgccatcgccatcgccgaaccggcggcgcatcagcctgccgccggcgtcaacgacgccagcgagacgtggaagcatgtggtggcatcggcggcgctggccgccgcgccgcgggacaaccaccaccaccgccaccacgacgtgctgtccggcgaggccttctccgtgctgcacgacctggtggccaccgccgcggacggcggcgccggccaccaccaccaccacgcccacagcgccgcgcaccacgtgcccatgtccagcgcgacgtcgtcgctggtcaccagcctcggcaactcccgcgagggcagccccgaccgcggcggcggcctgtccatgctcttctccaagccgccgcaggccgccaagcccatgagcccgctcatgccgctgggctcctgggcgtccgcgacggcgtcggccagggccgccgtctccatcgcgcacatgcccgtgttcgccgcctggaccgacgcctgatcgtaccactcgatccaccgattcatgacatggccagcggccggccggttccaccatgcattatgtgccactccggccgaccgacggacggctagccacccaccacgtaacccggccgttctagctcggtgcacgtccgcgcgctagctctccaccgggttgcgtcgctggacttcttcacaccacttagttgattttaattacggttcttgggaggtagtgagttcattagttaattagctaatagccatcggaggagattggtcagaagctagctaggcgatatgatggaagggcaggagcgcacggcgcgcggcctctgctgtttccttcttctccggctccgtcgtgtgcggcccggacaaggaggggttttgtaaaatggaggccggcggagatcggatcacgtgcgtctactctaaaatctatatccagaactaatccactactaatgttaagtcatagcctctttgaattctcttacatatcgagctccggggcttcaacccgtctgaaccactggcatatgggtccggatgcagatttcaagcatcgcgatccacctgcctcacgctaaggtatacaagataaacgtgtacctttgttaacatgtaaaccgaatattgacgtggtgtgccatgttagagcatactaataaaagctcgaagatctaaatgacaaacatctaagttcatagatttaaataacacaacatgccaagttttagatcctaagtggctccaacgtagctacatcgacatccgattttgcaaacctgactttggatgttttcacatgagccgacaaagttctatgacccgtttttccggttttttgagttcgagcctaagtgatacaacgtgccaagttcgaggactgtcaatgcactttactgatagattctgatattcgac

SEQ ID NO: 64598 - DNA, 2159 bp, Zea Mays
gtcgcagtaccgcggcgtgaccagcaggcataggtggacggggaggtacgaggcgcacctgtgggacaacagctgcaagaaggaaggccagaccaggaagggcaggcagggtaattaatatgaggcgcgagagctggctggcgcacgcgcacacttgattattaattagaataactataactaactaactaactaacttggtgatggttgtctgacttgtggggacggctcgtgatctcctgctcgatccctgtggctgtgacgccgcgcgcagtctatctcggcgggtacgacgtggaggagaaggcggcgagagcctacgacctggcggcgctcaagtactggggcccttccacgcacatcaacttcccgctggaggactaccaggatgagctggaggagatgaagaacatgacgcggcaggagtacgtggcgcacctcaggaggaagagcagcggcttctcgcggggcgcgtccatgtaccggggagtcacaaggcaccaccagcacgggcggtggcaggcgcgcatcggccgcgtctccggcaacaaggacctctacctcggcaccttcagcacgcaggaggaggccgcggaggcgtacgacgtcgcggccatcaagttcaggggcctcaacgccgtcaccaacttcgacatcacgcgctacgacgtcgacaagatcatggccagcaacacgctgctgccgggcgacctcgcgcgccgcaggaaggacgacgccagcgacgacaacccggcgcccgccgccgcagccgccatcgccatcgccgaaccggcggcgcatcagcctgccgccggcgtcaacgacgccagcgagacgtggaagcatgtggtggcatcggcggcgctggccgccgcgccgcgggacaaccaccaccaccgccaccacgacgtgctgtccggcgaggccttctccgtgctgcacgacctggtggccaccgccgcggacggcggcgccggccaccaccaccaccacgcccacagcgccgcgcaccacgtgcccatgtccagcgcgacgtcgtcgctggtcaccagcctcggcaactcccgcgagggcagccccgaccgcggcggcggcctgtccatgctcttctccaagccgccgcaggccgccaagcccatgagcccgctcatgccgctgggctcctgggcgtccgcgacggcgtcggccagggccgccgtctccatcgcgcacatgcccgtgttcgccgcctggaccgacgcctgatcgtaccactcgatccaccgattcatgacatggccagcggccggccggttccaccatgcattatgtgccactccggccgaccgacggacggctagccacccaccacgtaacccggccgttctagctcggtgcacgtccgcgcgctagctctccaccgggttgcgtcgctggacttcttcacaccacttagttgattttaattacggttcttgggaggtagtgagttcattagttaattagctaatagccatcggaggagattggtcagaagctagctaggcgatatgatggaagggcaggagcgcacggcgcgcggcctctgctgtttccttcttctccggctccgtcgtgtgcggcccggacaaggaggggttttgtaaaatggaggccggcggagatcggatcacgtgcgtctactctaaaatctatatccagaactaatccactactaatgttaagtcatagcctctttgaattctcttacatatcgagctccggggcttcaacccgtctgaaccactggcatatgggtccggatgcagatttcaagcatcgcgatccacctgcctcacgctaaggtatacaagataaacgtgtacctttgttaacatgtaaaccgaatattgacgtggtgtgccatgttagagcatactaataaaagctcgaagatctaaatgacaaacatctaagttcatagatttaaataacacaacatgccaagttttagatcctaagtggctccaacgtagctacatcgacatccgattttgcaaacctgactttggatgttttcacatgagccgacaaagttctatgacccgtttttccggttttttgagttcgagcctaagtgatacaacgtgccaagttcgaggactgtcaatgcactttactgatagattctgatattcgac

SEQ ID NO: 64599 - DNA, 2295 bp, Zea Mays
agtcgcccgcgtctcccacccccgcctcccccgccgccgcgctcgccctcccccgcctcccccgccgccgcgctcgccctcccccacgacagccgccatgcgccctatctccgccgtgcttgcgcttcctcacccgcgcaatttgcacgcgctccccccgcgacagtcgccacgctcgcacgcactccctctgcaatagctgtcatgcgccctatctccgtcgcatcccgcccgctcgccacgcttgattcctcctttcaatggtgcccacgccgtccaatcccgcccgcggtccttccccacgcggatcccccacccctcctccccaccgccgccgcaacaaatccgcgcacctcgatctgctcaagtgagcgtggctcaacgagaaggccacgtcagatatcctcagcttcgaatcgcccctcgcgttacgtgtccgcgagcagatccagcacctcatacgctcttctccctcccccttcttgaccacgttcctccactcccccccatagctctgggatctggccatggctccctctcctggtgtcgtgtcacccaggaggcggcgctcgatgacttcgtcgacgatggcgttgacgacctggtggtctcgctctaccagatggacctcgatctcacgctcttcctcctccgctcctaactcctcccggagaagatcaagaagtacacgatgcatatctctagggccacggccgaggcgactggtgaagttgcggcaatctgatgcgggaggtggccgacctcatccttagcttccctgacgagacgcccgtcgtcgtcctctctgccatggggaagaccaccaataacctcctcctggccggagagaatgcggtgagctgcggtgcccccaaggcgtccgaaatccctaagctcgctgtcatcaaggacctgcatcttaggacggttgatgagcttggtttagataagtcgattgtttcagggttccacatgcacattcaccgagtcaatcctgcgatcgtgtggcttccatactgggctgttcacctcaccacatttgatggatgttagagagcgatttcagctagggttaatatttgaatatttctgaagagaaatttttgaagtacttctggtggtgctggaacaagttgaaggagaagactgatgatgatattcccatgccagcctatttcaggttcctcgcgctgctcgcattcaagatattttctgctgagcaggtagatgttgctgttctcgaggttggcctaggagggaagtttgatgcaactaatgtggttaaagcacctgtagtttgtggcatatcttcccttggatatgatcatatggaaattcttggtgaccaaatcctgttcttggtgataaacttggtgtcgataaacgggttgttagttctcatgaatgtcatgttgtctcgaaataaagagcttctgtccgcacctaatcgcctaaaatggaaatgtttgactcattgtttaattcggggggaagctgaaggtggtctgatccggtaagagatcttaatctgcattacacttgttggattttgatgtcgcttctgggagtgtttgattgaattctacaccagttctaggaagagaaagcctgaccaagtcatcatctccaggtttgttattgtttggatgcaaaaatcgtcgttagttaacttttttgtgttgaagtaactgtttggttgagaaaattagttgcctatcttctattttctctgttttgttatagcagcaagctgatttgtgtctaatttatagggacgatgttagcgaaagtcaatttaatcaggtgctgaacattgagttgcaacaaatcatcgatggagactgtcaccgcagccagaaaaccacggtctcaatttgaggagcctttccatctatgtttgttagaaggcatataatgcctatttatctcttgtattcgaacatttggcaattaagaaatagaagattacttccccaatatcccttattcctaatctcacctttcacggcttctggtgaacaatcacttgctattaccgactgacatgtccactcctcatatgtgagatattggggttgatatatatgttgttcgtttccatgtaattattgtgtactaacatttattgaataatttttacgccgtaacaacgtacgggcactcacctagtgtctgatggaaagggaactgttcgggtgggttagataaaataatatctgaaaaactgcaaggtaagaccatggagcagtaagatgaaactatcatagtgaaagggaaataggcttacaccttttc

SEQ ID NO: 64600 - DNA, 2297 bp, Zea Mays
agtcgcccgcgtctcccacccccgcctcccccgccgccgcgctcgccctcccccgcctcccccgccgccgcgctcgccctcccccacgacagccgccatgcgccctatctccgccgtgcttgcgcttcctcacccgcgcaatttgcacgcgctccccccgcgacagtcgccacgctcgcacgcactccctctgcaatagctgtcatgcgccctatctccgtcgcatcccgcccgctcgccacgcttgattcctcctttcaatggtgcccacgccgtccaatcccgcccgcggtccttccccacgcggatcccccacccctcctccccaccgccgccgcaacaaatccgcgcacctcgatctgctcaagtgagcgtggctcaacgagaaggccacgtcagatatcctcagcttcgaatcgcccctcgcgttacgtgtccgcgagcagatccagcacctcatacgctcttctccctcccccttcttgaccacgttcctccactcccccccatagctctgggatctggccatggctccctctcctggtgtcgtgtcacccaggaggcggcgctcgatgacttcgtcgacgatggcgttgacgacctggtggtctcgctctaccagatggacctcgatctcacgctcttcctcctccgctcctaactcctcccggagaagatcaagaagtacacgatgcatatctctagggccacggccgaggcgactggtgaagttgcggcaatctgatgcgggaggtggccgacctcatccttagcttccctgacgagacgcccgtcgtcgtcctctctgccatggggaagaccaccaataacctcctcctggccggagagaatgcggtgagctgcggtgcccccaaggcgtccgaaatccctaagctcgctgtcatcaaggacctgcatcttaggacggttgatgagcttggtttagataagtcgattgtttcagggttccacatgcacattcaccgagtcaatcctgcgatcgtgtggcttccatactgggctgttcacctcaccacatttgatggatgttagagagcgatttcagctagggttaatatttgaatatttctgaagagaaatttttgaagtacttctggtggtgctggaacaagttgaagcctatttcaggttcctcgcgctgctcgcattcaagatattttctgctgagcaggtagatgttgctgttctcgaggttggcctaggagggaagtttgatgcaactaatgtggttaaagcacctgtagtttgtggcatatcttcccttggatatgatcatatggaaattcttggtgaccaaatcctgttcttggtgataaacttggtgtcgataaacgggttaattctgttggcaaaattaggatgacacaggttgttagttctcatgaatgtcatgttgtctcgaaataaagagcttctgtccgcacctaatcgcctaaaatggaaatgtttgactcattgtttaattcggggggaagctgaaggtggtctgatccggtaagagatcttaatctgcattacacttgttggattttgatgtcgcttctgggagtgtttgattgaattctacaccagttctaggaagagaaagcctgaccaagtcatcatctccaggtttgttattgtttggatgcaaaaatcgtcgttagttaacttttttgtgttgaagtaactgtttggttgagaaaattagttgcctatcttctattttctctgttttgttatagcagcaagctgatttgtgtctaatttatagggacgatgttagcgaaagtcaatttaatcaggtgctgaacattgagttgcaacaaatcatcgatggagactgtcaccgcagccagaaaaccacggtctcaatttgaggagcctttccatctatgtttgttagaaggcatataatgcctatttatctcttgtattcgaacatttggcaattaagaaatagaagattacttccccaatatcccttattcctaatctcacctttcacggcttctggtgaacaatcacttgctattaccgactgacatgtccactcctcatatgtgagatattggggttgatatatatgttgttcgtttccatgtaattattgtgtactaacatttattgaataatttttacgccgtaacaacgtacgggcactcacctagtgtctgatggaaagggaactgttcgggtgggttagataaaataatatctgaaaaactgcaaggtaagaccatggagcagtaagatgaaactatcatagtgaaagggaaataggcttacaccttttc

SEQ ID NO: 64601 - DNA, 2069 bp, Zea Mays
agtcgcccgcgtctcccacccccgcctcccccgccgccgcgctcgccctcccccgcctcccccgccgccgcgctcgccctcccccacgacagccgccatgcgccctatctccgccgtgcttgcgcttcctcacccgcgcaatttgcacgcgctccccccgcgacagtcgccacgctcgcacgcactccctctgcaatagctgtcatgcgccctatctccgtcgcatcccgcccgctcgccacgcttgattcctcctttcaatggtgcccacgccgtccaatcccgcccgcggtccttccccacgcggatcccccacccctcctccccaccgccgccgcaacaaatccgcgcacctcgatctgctcaagtgagcgtggctcaacgagaaggccacgtcagatatcctcagcttcgaatcgcccctcgcgttacgtgtccgcgagcagatccagcacctcatacgctcttctccctcccccttcttgaccacgttcctccactcccccccatagctctgggatctggccatggctccctctcctggtgtcgtgtcacccaggaggcggcgctcgatgacttcgtcgacgatggcgttgacgacctggtggtctcgctctaccagatggacctcgatctcacgctcttcctcctccgctcctaactcctcccggagaagatcaagaagtacacgatgcatatctctagggccacggccgaggcgactggtgaagttgcggcaatctgatgcgggaggtggccgacctcatccttagcttccctgacgagacgcccgtcgtcgtcctctctgccatggggaagaccaccaataacctcctcctggccggagagaatgcggtgagctgcggtgcccccaaggcgtccgaaatccctaagctcgctgtcatcaaggacctgcatcttaggacggttgatgagcttggtttagataagtcgattgtttcagggttccacatgcacattcaccgagtcaatcctgcgatcgtgtggcttccatactgggctgttcacctcaccacatttgatggatgttagagagcgatttcagctagggttaatatttgaatatttctgaagagaaatttttgaagtacttctggtggtgctggaacaagttgaaggagaagactgatgatgatattcccatgccagcctatttcaggttcctcgcgctgctcgcattcaagatattttctgctgagcaggtagatgttgctgttctcgaggttggcctaggagggaagtttgatgcaactaatgtggttaaagcacctgtagtttgtggcatatcttcccttggatatgatcatatggaaattcttggtgaccaaatcctgttcttggtgataaacttggtgtcgataaacgggttaattctgttggcaaaattaggatgacacaggttgttagttctcatgaatgtcatgttgtctcgaaataaagagcttctgtccgcacctaatcgcctaaaatggaaatgtttgactcattgtttaattcggggggaagctgaaggtggtctgatccgggacgatgttagcgaaagtcaatttaatcaggtgctgaacattgagttgcaacaaatcatcgatggagactgtcaccgcagccagaaaaccacggtctcaatttgaggagcctttccatctatgtttgttagaaggcatataatgcctatttatctcttgtattcgaacatttggcaattaagaaatagaagattacttccccaatatcccttattcctaatctcacctttcacggcttctggtgaacaatcacttgctattaccgactgacatgtccactcctcatatgtgagatattggggttgatatatatgttgttcgtttccatgtaattattgtgtactaacatttattgaataatttttacgccgtaacaacgtacgggcactcacctagtgtctgatggaaagggaactgttcgggtgggttagataaaataatatctgaaaaactgcaaggtaagaccatggagcagtaagatgaaactatcatagtgaaagggaaataggcttacaccttttc

SEQ ID NO: 64602 - DNA, 2366 bp, Zea Mays
cgacagccgccatgcgccctatctccgccgtgcttgcgcttcctcacccgcgcaatttgcacgcgctccccccgcgacagtcgccacgctcgcacgcactccctctgcaatagctgtcatgcgccctatctccgtcgcatcccgcccgctcgccacgcttgattcctcctttcaatggtgcccacgccgtccaatcccgcccgcggtccttccccacgcggatcccccacccctcctccccaccgccgccgcaacaaatccgcgcacctcgatctgctcaagtgagcgtggctcaacgagaaggccacgtcagatatcctcagcttcgaatcgcccctcgcgttacgtgtccgcgagcagatccagcacctcatacgctcttctccctcccccttcttgaccacgttcctccactcccccccatagctctgggatctggccatggctccctctcctggtgtcgtgtcacccaggaggcggcgctcgatgacttcgtcgacgatggcgttgacgacctggtggtctcgctctaccagatggacctcgatctcacgctcttcctcctccgctcctaactcctcccggagaagatcaagaagtacacgatgcatatctctagggccacggccgaggcgactggtgaagttgcggcaatctgatgcgggaggtggccgacctcatccttagcttccctgacgagacgcccgtcgtcgtcctctctgccatggggaagaccaccaataacctcctcctggccggagagaatgcggtgagctgcggtgcccccaaggcgtccgaaatccctaagctcgctgtcatcaaggacctgcatcttaggacggttgatgagcttggtttagataagtcgattgtttcagggttccacatgcacattcaccgagtcaatcctgcgatcgtgtggcttccatactgggctgttcacctcaccacatttgatggatgttagagagcgatttcagctagggttaatatttgaatatttctgaagagaaatttttgaagtacttctggtggtgctggaacaagttgaaggagaagactgatgatgatattcccatgccagcctatttcaggttcctcgcgctgctcgcattcaagatattttctgctgagcaggtagatgttgctgttctcgaggttggcctaggagggaagtttgatgcaactaatgtggttaaagcacctgtagtttgtggcatatcttcccttggatatgatcatatggaaattcttggtgaccaaatcctgttcttggtgataaacttggtgtcgataaacgggttaattctgttggcaaaattaggatgacacaggtgacatgaagatgccaagtcggtgcatccatactaattgcgactttggtctgtttggacctctggtaaacgacgtagtaggtttggagacctggaactacaaatcaatagtattgggacttaagtgacaacctgaacaagtttaggaacaacttgctagaaaatttttatgctttctaccaatcttacaacgataatttgaaagttgatatttatggtacttatttggtccaggaactagattttttgtacattctttcggatctggattaaacaacgctctctttgtatatgaacaatgctctataaatatacgtttgataattttatatgatatttaataaatagtagctactgtgactgtttcattttgtttttcttaggttgttagttctcatgaatgtcatgttgtctcgaaataaagagcttctgtccgcacctaatcgcctaaaatggaaatgtttgactcattgtttaattcggggggaagctgaaggtggtctgatccgggacgatgttagcgaaagtcaatttaatcaggtgctgaacattgagttgcaacaaatcatcgatggagactgtcaccgcagccagaaaaccacggtctcaatttgaggagcctttccatctatgtttgttagaaggcatataatgcctatttatctcttgtattcgaacatttggcaattaagaaatagaagattacttccccaatatcccttattcctaatctcacctttcacggcttctggtgaacaatcacttgctattaccgactgacatgtccactcctcatatgtgagatattggggttgatatatatgttgttcgtttccatgtaattattgtgtactaacatttattgaataatttttacgccgtaacaacgtacgggcactcacctagtgtctgatggaaagggaactgttcgggtgggttagataaaataatatctgaaaaactgcaaggtaagaccatggagcagtaagatgaaactatcatagtgaaagggaaataggcttacaccttttc

SEQ ID NO: 64603 - DNA, 2445 bp, Zea Mays
cttcctcacccgcgcaatttgcacgcgctccccccgcgacagtcgccacgctcgcacgcactccctctgcaatagctgtcatgcgccctatctccgtcgcatcccgcccgctcgccacgcttgattcctcctttcaatggtgcccacgccgtccaatcccgcccgcggtccttccccacgcggatcccccacccctcctccccaccgccgccgcaacaaatccgcgcacctcgatctgctcaagtgagcgtggctcaacgagaaggccacgtcagatatcctcagcttcgaatcgcccctcgcgttacgtgtccgcgagcagatccagcacctcatacgctcttctccctcccccttcttgaccacgttcctccactcccccccatagctctgggatctggccatggctccctctcctggtgtcgtgtcacccaggaggcggcgctcgatgacttcgtcgacgatggcgttgacgacctggtggtctcgctctaccagatggacctcgatctcacgctcttcctcctccgctcctaactcctcccggagaagatcaagaagtacacgatgcatatctctagggccacggccgaggcgactggtgaagttgcggcaatctgatgcgggaggtggccgacctcatccttagcttccctgacgagacgcccgtcgtcgtcctctctgccatggggaagaccaccaataacctcctcctggccggagagaatgcggtgagctgcggtgcccccaaggcgtccgaaatccctaagctcgctgtcatcaaggacctgcatcttaggacggttgatgagcttggtttagataagtcgattgtttcagggttccacatgcacattcaccgagtcaatcctgcgatcgtgtggcttccatactgggctgttcacctcaccacatttgatggatgttagagagcgatttcagctagggttaatatttgaatatttctgaagagaaatttttgaagtacttctggtggtgctggaacaagttgaaggagaagactgatgatgatattcccatgccagcctatttcaggttcctcgcgctgctcgcattcaagatattttctgctgagcaggtagatgttgctgttctcgaggttggcctaggagggaagtttgatgcaactaatgtggttaaagcacctgtagtttgtggcatatcttcccttggatatgatcatatggaaattcttggtgaccaaatcctgttcttggtgataaacttggtgtcgataaacgggttaattctgttggcaaaattaggatgacacaggtgacatgaagatgccaagtcggtgcatccatactaattgcgactttggtctgtttggacctctggtaaacgacgtagtaggtttggagacctggaactacaaatcaatagtattgggacttaagtgacaacctgaacaagtttaggaacaacttgctagaaaatttttatgctttctaccaatcttacaacgataatttgaaagttgatatttatggtacttatttggtccaggaactagattttttgtacattctttcggatctggattaaacaacgctctctttgtatatgaacaatgctctataaatatacgtttgataattttatatgatatttaataaatagtagctactgtgactgtttcattttgtttttcttaggttgttagttctcatgaatgtcatgttgtctcgaaataaagagcttctgtccgcacctaatcgcctaaaatggaaatgtttgactcattgtttaattcggggggaagctgaaggtggtctgatccggtaagagatcttaatctgcattacacttgttggattttgatgtcgcttctgggagtgtttgattgaattctacaccagttctaggaagagaaagcctgaccaagtcatcatctccagggacgatgttagcgaaagtcaatttaatcaggtgctgaacattgagttgcaacaaatcatcgatggagactgtcaccgcagccagaaaaccacggtctcaatttgaggagcctttccatctatgtttgttagaaggcatataatgcctatttatctcttgtattcgaacatttggcaattaagaaatagaagattacttccccaatatcccttattcctaatctcacctttcacggcttctggtgaacaatcacttgctattaccgactgacatgtccactcctcatatgtgagatattggggttgatatatatgttgttcgtttccatgtaattattgtgtactaacatttattgaataatttttacgccgtaacaacgtacgggcactcacctagtgtctgatggaaagggaactgttcgggtgggttagataaaataatatctgaaaaactgcaaggtaagaccatggagcagtaagatgaaactatcatagtgaaagggaaataggcttacaccttttc

SEQ ID NO: 64604 - DNA, 2242 bp, Zea Mays
cttcctcacccgcgcaatttgcacgcgctccccccgcgacagtcgccacgctcgcacgcactccctctgcaatagctgtcatgcgccctatctccgtcgcatcccgcccgctcgccacgcttgattcctcctttcaatggtgcccacgccgtccaatcccgcccgcggtccttccccacgcggatcccccacccctcctccccaccgccgccgcaacaaatccgcgcacctcgatctgctcaagtgagcgtggctcaacgagaaggccacgtcagatatcctcagcttcgaatcgcccctcgcgttacgtgtccgcgagcagatccagcacctcatacgctcttctccctcccccttcttgaccacgttcctccactcccccccatagctctgggatctggccatggctccctctcctggtgtcgtgtcacccaggaggcggcgctcgatgacttcgtcgacgatggcgttgacgacctggtggtctcgctctaccagatggacctcgatctcacgctcttcctcctccgctcctaactcctcccggagaagatcaagaagtacacgatgcatatctctagggccacggccgaggcgactggtgaagttgcggcaatctgatgcgggaggtggccgacctcatccttagcttccctgacgagacgcccgtcgtcgtcctctctgccatggggaagaccaccaataacctcctcctgctaacaaggatagatgcgtgtgtgcctgattcgttgtctgtggaggccggagagaatgcggtgagctgcggtgcccccaaggcgtccgaaatccctaagctcgctgtcatcaaggacctgcatcttaggacggttgatgagcttggtttagataagtcgattgtttcagagaaatttttgaagtacttctggtggtgctggaacaagttgaaggagaagactgatgatgatattcccatgccagcctatttcaggttcctcgcgctgctcgcattcaagatattttctgctgagcaggtagatgttgctgttctcgaggttggcctaggagggaagtttgatgcaactaatgtggttaaagcacctgtagtttgtggcatatcttcccttggatatgatcatatggaaattcttggtgaccaaatcctgttcttggtgataaacttggtgtcgataaacgggttaattctgttggcaaaattaggatgacacaggtgacatgaagatgccaagtcggtgcatccatactaattgcgactttggtctgtttggacctctggtaaacgacgtagtaggtttggagacctggaactacaaatcaatagtattgggacttaagtgacaacctgaacaagtttaggaacaacttgctagaaaatttttatgctttctaccaatcttacaacgataatttgaaagttgatatttatggtacttatttggtccaggaactagattttttgtacattctttcggatctggattaaacaacgctctctttgtatatgaacaatgctctataaatatacgtttgataattttatatgatatttaataaatagtagctactgtgactgtttcattttgtttttcttaggttgttagttctcatgaatgtcatgttgtctcgaaataaagagcttctgtccgcacctaatcgcctaaaatggaaatgtttgactcattgtttaattcggggggaagctgaaggtggtctgatccgggacgatgttagcgaaagtcaatttaatcaggtgctgaacattgagttgcaacaaatcatcgatggagactgtcaccgcagccagaaaaccacggtctcaatttgaggagcctttccatctatgtttgttagaaggcatataatgcctatttatctcttgtattcgaacatttggcaattaagaaatagaagattacttccccaatatcccttattcctaatctcacctttcacggcttctggtgaacaatcacttgctattaccgactgacatgtccactcctcatatgtgagatattggggttgatatatatgttgttcgtttccatgtaattattgtgtactaacatttattgaataatttttacgccgtaacaacgtacgggcactcacctagtgtctgatggaaagggaactgttcgggtgggttagataaaataatatctgaaaaactgcaaggtaagaccatggagcagtaagatgaaactatcatagtgaaagggaaataggcttacaccttttc

SEQ ID NO: 64605 - DNA, 2065 bp, Zea Mays
gcacgcgctccccccgcgacagtcgccacgctcgcacgcactccctctgcaatagctgtcatgcgccctatctccgtcgcatcccgcccgctcgccacgcttgattcctcctttcaatggtgcccacgccgtccaatcccgcccgcggtccttccccacgcggatcccccacccctcctccccaccgccgccgcaacaaatccgcgcacctcgatctgctcaagtgagcgtggctcaacgagaaggccacgtcagatatcctcagcttcgaatcgcccctcgcgttacgtgtccgcgagcagatccagcacctcatacgctcttctccctcccccttcttgaccacgttcctccactcccccccatagctctgggatctggccatggctccctctcctggtgtcgtgtcacccaggaggcggcgctcgatgacttcgtcgacgatggcgttgacgacctggtggtctcgctctaccagatggacctcgatctcacgctcttcctcctccgctcctaactcctcccggagaagatcaagaagtacacgatgcatatctctagggccacggccgaggcgactggtgaagttgcggcaatctgatgcgggaggtggccgacctcatccttagcttccctgacgagacgcccgtcgtcgtcctctctgccatggggaagaccaccaataacctcctcctgctaacaaggatagatgcgtgtgtgcctgattcgttgtctgtggaggccggagagaatgcggtgagctgcggtgcccccaaggcgtccgaaatccctaagctcgctgtcatcaaggacctgcatcttaggacggttgatgagcttggtttagataagtcgattgtttcagagaaatttttgaagtacttctggtggtgctggaacaagttgaaggagaagactgatgatgatattcccatgccagcctatttcaggttcctcgcgctgctcgcattcaagatattttctgctgagcaggtagatgttgctgttctcgaggttggcctaggagggaagtttgatgcaactaatgtggttaaagcacctgtagtttgtggcatatcttcccttggatatgatcatatggaaattcttggtgaccaaatcctgttcttggtgataaacttggtgtcgataaacgggttgttagttctcatgaatgtcatgttgtctcgaaataaagagcttctgtccgcacctaatcgcctaaaatggaaatgtttgactcattgtttaattcggggggaagctgaaggtggtctgatccggtaagagatcttaatctgcattacacttgttggattttgatgtcgcttctgggagtgtttgattgaattctacaccagttctaggaagagaaagcctgaccaagtcatcatctccaggtttgttattgtttggatgcaaaaatcgtcgttagttaacttttttgtgttgaagtaactgtttggttgagaaaattagttgcctatcttctattttctctgttttgttatagcagcaagctgatttgtgtctaatttatagggacgatgttagcgaaagtcaatttaatcaggtgctgaacattgagttgcaacaaatcatcgatggagactgtcaccgcagccagaaaaccacggtctcaatttgaggagcctttccatctatgtttgttagaaggcatataatgcctatttatctcttgtattcgaacatttggcaattaagaaatagaagattacttccccaatatcccttattcctaatctcacctttcacggcttctggtgaacaatcacttgctattaccgactgacatgtccactcctcatatgtgagatattggggttgatatatatgttgttcgtttccatgtaattattgtgtactaacatttattgaataatttttacgccgtaacaacgtacgggcactcacctagtgtctgatggaaagggaactgttcgggtgggttagataaaataatatctgaaaaactgcaaggtaagaccatggagcagtaagatgaaactatcatagtgaaagggaaataggcttacaccttttc

SEQ ID NO: 64606 - DNA, 2150 bp, Zea Mays
gcgctccccccgcgacagtcgccacgctcgcacgcactccctctgcaatagctgtcatgcgccctatctccgtcgcatcccgcccgctcgccacgcttgattcctcctttcaatggtgcccacgccgtccaatcccgcccgcggtccttccccacgcggatcccccacccctcctccccaccgccgccgcaacaaatccgcgcacctcgatctgctcaagtgagcgtggctcaacgagaaggccacgtcagatatcctcagcttcgaatcgcccctcgcgttacgtgtccgcgagcagatccagcacctcatacgctcttctccctcccccttcttgaccacgttcctccactcccccccatagctctgggatctggccatggctccctctcctggtgtcgtgtcacccaggaggcggcgctcgatgacttcgtcgacgatggcgttgacgacctggtggtctcgctctaccagatggacctcgatctcacgctcttcctcctccgctcctaactcctcccggagaagatcaagaagtacacgatgcatatctctagggccacggccgaggcgactggtgaagttgcggcaatctgatgcgggaggtggccgacctcatccttagcttccctgacgagacgcccgtcgtcgtcctctctgccatggggaagaccaccaataacctcctcctggccggagagaatgcggtgagctgcggtgcccccaaggcgtccgaaatccctaagctcgctgtcatcaaggacctgcatcttaggacggttgatgagcttggtttagataagtcgattgtttcagggttccacatgcacattcaccgagtcaatcctgcgatcgtgtggcttccatactgggctgttcacctcaccacatttgatggatgttagagagcgatttcagctaggtgggttaatatttgaatatttctgaagagaaatttttgaagtacttctggtggtgctggaacaagttgaaggagaagactgatgatgatattcccatgccagcctatttcaggttcctcgcgctgctcgcattcaagatattttctgctgagcaggtagatgttgctgttctcgaggttggcctaggagggaagtttgatgcaactaatgtggttaaagcacctgtagtttgtggcatatcttcccttggatatgatcatatggaaattcttggtgaccaaatcctgttcttggtgataaacttggtgtcgataaacgggttgttagttctcatgaatgtcatgttgtctcgaaataaagagcttctgtccgcacctaatcgcctaaaatggaaatgtttgactcattgtttaattcggggggaagctgaaggtggtctgatccggtaagagatcttaatctgcattacacttgttggattttgatgtcgcttctgggagtgtttgattgaattctacaccagttctaggaagagaaagcctgaccaagtcatcatctccaggtttgttattgtttggatgcaaaaatcgtcgttagttaacttttttgtgttgaagtaactgtttggttgagaaaattagttgcctatcttctattttctctgttttgttatagcagcaagctgatttgtgtctaatttatagggacgatgttagcgaaagtcaatttaatcaggtgctgaacattgagttgcaacaaatcatcgatggagactgtcaccgcagccagaaaaccacggtctcaatttgaggagcctttccatctatgtttgttagaaggcatataatgcctatttatctcttgtattcgaacatttggcaattaagaaatagaagattacttccccaatatcccttattcctaatctcacctttcacggcttctggtgaacaatcacttgctattaccgactgacatgtccactcctcatatgtgagatattggggttgatatatatgttgttcgtttccatgtaattattgtgtactaacatttattgaataatttttacgccgtaacaacgtacgggcactcacctagtgtctgatggaaagggaactgttcgggtgggttagataaaataatatctgaaaaactgcaaggtaagaccatggagcagtaagatgaaactatcatagtgaaagggaaataggcttacaccttttc

SEQ ID NO: 64607 - DNA, 2432 bp, Zea Mays
gcgctccccccgcgacagtcgccacgctcgcacgcactccctctgcaatagctgtcatgcgccctatctccgtcgcatcccgcccgctcgccacgcttgattcctcctttcaatggtgcccacgccgtccaatcccgcccgcggtccttccccacgcggatcccccacccctcctccccaccgccgccgcaacaaatccgcgcacctcgatctgctcaagtgagcgtggctcaacgagaaggccacgtcagatatcctcagcttcgaatcgcccctcgcgttacgtgtccgcgagcagatccagcacctcatacgctcttctccctcccccttcttgaccacgttcctccactcccccccatagctctgggatctggccatggctccctctcctggtgtcgtgtcacccaggaggcggcgctcgatgacttcgtcgacgatggcgttgacgacctggtggtctcgctctaccagatggacctcgatctcacgctcttcctcctccgctcctaactcctcccggagaagatcaagaagtacacgatgcatatctctagggccacggccgaggcgactggtgaagttgcggcaatctgatgcgggaggtggccgacctcatccttagcttccctgacgagacgcccgtcgtcgtcctctctgccatggggaagaccaccaataacctcctcctggccggagagaatgcggtgagctgcggtgcccccaaggcgtccgaaatccctaagctcgctgtcatcaaggacctgcatcttaggacggttgatgagcttggtttagataagtcgattgtttcagagaaatttttgaagtacttctggtggtgctggaacaagttgaaggagaagactgatgatgatattcccatgccagcctatttcaggttcctcgcgctgctcgcattcaagatattttctgctgagcaggtagatgttgctgttctcgaggttggcctaggagggaagtttgatgcaactaatgtggttaaagcacctgtagtttgtggcatatcttcccttggatatgatcatatggaaattcttggtgaccaaatcctgttcttggtgataaacttggtgtcgataaacgggttaattctgttggcaaaattaggatgacacaggtgacatgaagatgccaagtcggtgcatccatactaattgcgactttggtctgtttggacctctggtaaacgacgtagtaggtttggagacctggaactacaaatcaatagtattgggacttaagtgacaacctgaacaagtttaggaacaacttgctagaaaatttttatgctttctaccaatcttacaacgataatttgaaagttgatatttatggtacttatttggtccaggaactagattttttgtacattctttcggatctggattaaacaacgctctctttgtatatgaacaatgctctataaatatacgtttgataattttatatgatatttaataaatagtagctactgtgactgtttcattttgtttttcttaggttgttagttctcatgaatgtcatgttgtctcgaaataaagagcttctgtccgcacctaatcgcctaaaatggaaatgtttgactcattgtttaattcggggggaagctgaaggtggtctgatccggtaagagatcttaatctgcattacacttgttggattttgatgtcgcttctgggagtgtttgattgaattctacaccagttctaggaagagaaagcctgaccaagtcatcatctccaggtttgttattgtttggatgcaaaaatcgtcgttagttaacttttttgtgttgaagtaactgtttggttgagaaaattagttgcctatcttctattttctctgttttgttatagcagcaagctgatttgtgtctaatttatagggacgatgttagcgaaagtcaatttaatcaggtgctgaacattgagttgcaacaaatcatcgatggagactgtcaccgcagccagaaaaccacggtctcaatttgaggagcctttccatctatgtttgttagaaggcatataatgcctatttatctcttgtattcgaacatttggcaattaagaaatagaagattacttccccaatatcccttattcctaatctcacctttcacggcttctggtgaacaatcacttgctattaccgactgacatgtccactcctcatatgtgagatattggggttgatatatatgttgttcgtttccatgtaattattgtgtactaacatttattgaataatttttacgccgtaacaacgtacgggcactcacctagtgtctgatggaaagggaactgttcgggtgggttagataaaataatatctgaaaaactgcaaggtaagaccatggagcagtaagatgaaactatcatagtgaaagggaaataggcttacaccttttc

SEQ ID NO: 64608 - DNA, 2608 bp, Zea Mays
gcgctccccccgcgacagtcgccacgctcgcacgcactccctctgcaatagctgtcatgcgccctatctccgtcgcatcccgcccgctcgccacgcttgattcctcctttcaatggtgcccacgccgtccaatcccgcccgcggtccttccccacgcggatcccccacccctcctccccaccgccgccgcaacaaatccgcgcacctcgatctgctcaagtgagcgtggctcaacgagaaggccacgtcagatatcctcagcttcgaatcgcccctcgcgttacgtgtccgcgagcagatccagcacctcatacgctcttctccctcccccttcttgaccacgttcctccactcccccccatagctctgggatctggccatggctccctctcctggtgtcgtgtcacccaggaggcggcgctcgatgacttcgtcgacgatggcgttgacgacctggtggtctcgctctaccagatggacctcgatctcacgctcttcctcctccgctcctaactcctcccggagaagatcaagaagtacacgatgcatatctctagggccacggccgaggcgactggtgaagttgcggcaatctgatgcgggaggtggccgacctcatccttagcttccctgacgagacgcccgtcgtcgtcctctctgccatggggaagaccaccaataacctcctcctgctaacaaggatagatgcgtgtgtgcctgattcgttgtctgtggaggccggagagaatgcggtgagctgcggtgcccccaaggcgtccgaaatccctaagctcgctgtcatcaaggacctgcatcttaggacggttgatgagcttggtttagataagtcgattgtttcagggttccacatgcacattcaccgagtcaatcctgcgatcgtgtggcttccatactgggctgttcacctcaccacatttgatggatgttagagagcgatttcagctagggttaatatttgaatatttctgaagagaaatttttgaagtacttctggtggtgctggaacaagttgaaggagaagactgatgatgatattcccatgccagcctatttcaggttcctcgcgctgctcgcattcaagatattttctgctgagcaggtagatgttgctgttctcgaggttggcctaggagggaagtttgatgcaactaatgtggttaaagcacctgtagtttgtggcatatcttcccttggatatgatcatatggaaattcttggtgaccaaatcctgttcttggtgataaacttggtgtcgataaacgggttaattctgttggcaaaattaggatgacacaggtgacatgaagatgccaagtcggtgcatccatactaattgcgactttggtctgtttggacctctggtaaacgacgtagtaggtttggagacctggaactacaaatcaatagtattgggacttaagtgacaacctgaacaagtttaggaacaacttgctagaaaatttttatgctttctaccaatcttacaacgataatttgaaagttgatatttatggtacttatttggtccaggaactagattttttgtacattctttcggatctggattaaacaacgctctctttgtatatgaacaatgctctataaatatacgtttgataattttatatgatatttaataaatagtagctactgtgactgtttcattttgtttttcttaggttgttagttctcatgaatgtcatgttgtctcgaaataaagagcttctgtccgcacctaatcgcctaaaatggaaatgtttgactcattgtttaattcggggggaagctgaaggtggtctgatccggtaagagatcttaatctgcattacacttgttggattttgatgtcgcttctgggagtgtttgattgaattctacaccagttctaggaagagaaagcctgaccaagtcatcatctccaggtttgttattgtttggatgcaaaaatcgtcgttagttaacttttttgtgttgaagtaactgtttggttgagaaaattagttgcctatcttctattttctctgttttgttatagcagcaagctgatttgtgtctaatttatagggacgatgttagcgaaagtcaatttaatcaggtgctgaacattgagttgcaacaaatcatcgatggagactgtcaccgcagccagaaaaccacggtctcaatttgaggagcctttccatctatgtttgttagaaggcatataatgcctatttatctcttgtattcgaacatttggcaattaagaaatagaagattacttccccaatatcccttattcctaatctcacctttcacggcttctggtgaacaatcacttgctattaccgactgacatgtccactcctcatatgtgagatattggggttgatatatatgttgttcgtttccatgtaattattgtgtactaacatttattgaataatttttacgccgtaacaacgtacgggcactcacctagtgtctgatggaaagggaactgttcgggtgggttagataaaataatatctgaaaaactgcaaggtaagaccatggagcagtaagatgaaactatcatagtgaaagggaaataggcttacaccttttc

SEQ ID NO: 64609 - DNA, 2262 bp, Zea Mays
gcgacagtcgccacgctcgcacgcactccctctgcaatagctgtcatgcgccctatctccgtcgcatcccgcccgctcgccacgcttgattcctcctttcaatggtgcccacgccgtccaatcccgcccgcggtccttccccacgcggatcccccacccctcctccccaccgccgccgcaacaaatccgcgcacctcgatctgctcaagtgagcgtggctcaacgagaaggccacgtcagatatcctcagcttcgaatcgcccctcgcgttacgtgtccgcgagcagatccagcacctcatacgctcttctccctcccccttcttgaccacgttcctccactcccccccatagctctgggatctggccatggctccctctcctggtgtcgtgtcacccaggaggcggcgctcgatgacttcgtcgacgatggcgttgacgacctggtggtctcgctctaccagatggacctcgatctcacgctcttcctcctccgctcctaactcctcccggagaagatcaagaagtacacgatgcatatctctagggccacggccgaggcgactggtgaagttgcggcaatctgatgcgggaggtggccgacctcatccttagcttccctgacgagacgcccgtcgtcgtcctctctgccatggggaagaccaccaataacctcctcctggccggagagaatgcggtgagctgcggtgcccccaaggcgtccgaaatccctaagctcgctgtcatcaaggacctgcatcttaggacggttgatgagcttggtttagataagtcgattgtttcagggttccacatgcacattcaccgagtcaatcctgcgatcgtgtggcttccatactgggctgttcacctcaccacatttgatggatgttagagagcgatttcagctagggttaatatttgaatatttctgaagagaaatttttgaagtacttctggtggtgctggaacaagttgaagcctatttcaggttcctcgcgctgctcgcattcaagatattttctgctgagcaggtagatgttgctgttctcgaggttggcctaggagggaagtttgatgcaactaatgtggttaaagcacctgtagtttgtggcatatcttcccttggatatgatcatatggaaattcttggtgaccaaatcctgttcttggtgataaacttggtgtcgataaacgggttaattctgttggcaaaattaggatgacacaggtgacatgaagatgccaagtcggtgcatccatactaattgcgactttggtctgtttggacctctggtaaacgacgtagtaggtttggagacctggaactacaaatcaatagtattgggacttaagtgacaacctgaacaagtttaggaacaacttgctagaaaatttttatgctttctaccaatcttacaacgataatttgaaagttgatatttatggtacttatttggtccaggaactagattttttgtacattctttcggatctggattaaacaacgctctctttgtatatgaacaatgctctataaatatacgtttgataattttatatgatatttaataaatagtagctactgtgactgtttcattttgtttttcttaggttgttagttctcatgaatgtcatgttgtctcgaaataaagagcttctgtccgcacctaatcgcctaaaatggaaatgtttgactcattgtttaattcggggggaagctgaaggtggtctgatccgggacgatgttagcgaaagtcaatttaatcaggtgctgaacattgagttgcaacaaatcatcgatggagactgtcaccgcagccagaaaaccacggtctcaatttgaggagcctttccatctatgtttgttagaaggcatataatgcctatttatctcttgtattcgaacatttggcaattaagaaatagaagattacttccccaatatcccttattcctaatctcacctttcacggcttctggtgaacaatcacttgctattaccgactgacatgtccactcctcatatgtgagatattggggttgatatatatgttgttcgtttccatgtaattattgtgtactaacatttattgaataatttttacgccgtaacaacgtacgggcactcacctagtgtctgatggaaagggaactgttcgggtgggttagataaaataatatctgaaaaactgcaaggtaagaccatggagcagtaagatgaaactatcatagtgaaagggaaataggcttacaccttttc

SEQ ID NO: 64610 - DNA, 2272 bp, Zea Mays
agtcgccacgctcgcacgcactccctctgcaatagctgtcatgcgccctatctccgtcgcatcccgcccgctcgccacgcttgattcctcctttcaatggtgcccacgccgtccaatcccgcccgcggtccttccccacgcggatcccccacccctcctccccaccgccgccgcaacaaatccgcgcacctcgatctgctcaagtgagcgtggctcaacgagaaggccacgtcagatatcctcagcttcgaatcgcccctcgcgttacgtgtccgcgagcagatccagcacctcatacgctcttctccctcccccttcttgaccacgttcctccactcccccccatagctctgggatctggccatggctccctctcctggtgtcgtgtcacccaggaggcggcgctcgatgacttcgtcgacgatggcgttgacgacctggtggtctcgctctaccagatggacctcgatctcacgctcttcctcctccgctcctaactcctcccggagaagatcaagaagtacacgatgcatatctctagggccacggccgaggcgactggtgaagttgcggcaatctgatgcgggaggtggccgacctcatccttagcttccctgacgagacgcccgtcgtcgtcctctctgccatggggaagaccaccaataacctcctcctggccggagagaatgcggtgagctgcggtgcccccaaggcgtccgaaatccctaagctcgctgtcatcaaggacctgcatcttaggacggttgatgagcttggtttagataagtcgattgtttcagggttccacatgcacattcaccgagtcaatcctgcgatcgtgtggcttccatactgggctgttcacctcaccacatttgatggatgttagagagcgatttcagctaggtgggtaattctttttcctaccattctttcatcttatacacctgcatctggctgtggtgttgacaatagtggatcctatgaacttccaaatgattttttgtatgtaaacatcctgtgtcatctttcttgtgctgtccctgtaattaggtgctatgaaatttatgatcgcactgacctagctcctcctttttgagggcatcagggttaatatttgaatatttctgaagagaaatttttgaagtacttctggtggtgctggaacaagttgaaggtaagtgtcttgatttgttgttccatataaagtcactctgcgctcgacgtttactacctagaagtgacaaagctcaaactactgaattgattccatcaggaacttttttgcatctgtcatataatctgtctaatctcatcatgctgcttttattctatataaactggtggatgatgagataaatgggcttacttccaggagaagactgatgatgatattcccatgccagcctatttcaggttcctcgcgctgctcgcattcaagatattttctgctgagcaggtagatgttgctgttctcgaggttggcctaggagggaagtttgatgcaactaatgtggttaaagcacctgtagtttgtggcatatcttcccttggatatgatcatatggaaattcttggtgaccaaatcctgttcttggtgataaacttggtgtcgataaacgggttgttagttctcatgaatgtcatgttgtctcgaaataaagagcttctgtccgcacctaatcgcctaaaatggaaatgtttgactcattgtttaattcggggggaagctgaaggtggtctgatccgggacgatgttagcgaaagtcaatttaatcaggtgctgaacattgagttgcaacaaatcatcgatggagactgtcaccgcagccagaaaaccacggtctcaatttgaggagcctttccatctatgtttgttagaaggcatataatgcctatttatctcttgtattcgaacatttggcaattaagaaatagaagattacttccccaatatcccttattcctaatctcacctttcacggcttctggtgaacaatcacttgctattaccgactgacatgtccactcctcatatgtgagatattggggttgatatatatgttgttcgtttccatgtaattattgtgtactaacatttattgaataatttttacgccgtaacaacgtacgggcactcacctagtgtctgatggaaagggaactgttcgggtgggttagataaaataatatctgaaaaactgcaaggtaagaccatggagcagtaagatgaaactatcatagtgaaagggaaataggcttacaccttttc

SEQ ID NO: 64611 - DNA, 2167 bp, Zea Mays
agtcgccacgctcgcacgcactccctctgcaatagctgtcatgcgccctatctccgtcgcatcccgcccgctcgccacgcttgattcctcctttcaatggtgcccacgccgtccaatcccgcccgcggtccttccccacgcggatcccccacccctcctccccaccgccgccgcaacaaatccgcgcacctcgatctgctcaagtgagcgtggctcaacgagaaggccacgtcagatatcctcagcttcgaatcgcccctcgcgttacgtgtccgcgagcagatccagcacctcatacgctcttctccctcccccttcttgaccacgttcctccactcccccccatagctctgggatctggccatggctccctctcctggtgtcgtgtcacccaggaggcggcgctcgatgacttcgtcgacgatggcgttgacgacctggtggtctcgctctaccagatggacctcgatctcacgctcttcctcctccgctcctaactcctcccggagaagatcaagaagtacacgatgcatatctctagggccacggccgaggcgactggtgaagttgcggcaatctgatgcgggaggtggccgacctcatccttagcttccctgacgagacgcccgtcgtcgtcctctctgccatggggaagaccaccaataacctcctcctggccggagagaatgcggtgagctgcggtgcccccaaggcgtccgaaatccctaagctcgctgtcatcaaggacctgcatcttaggacggttgatgagcttggtttagataagtcgattgtttcagggttccacatgcacattcaccgagtcaatcctgcgatcgtgtggcttccatactgggctgttcacctcaccacatttgatggatgttagagagcgatttcagctaggtgggttaatatttgaatatttctgaagagaaatttttgaagtacttctggtggtgctggaacaagttgaaggagaagactgatgatgatattcccatgccagcctatttcaggttcctcgcgctgctcgcattcaagatattttctgctgagcaggtagatgttgctgttctcgaggttggcctaggagggaagtttgatgcaactaatgtggttaaagcacctgtagtttgtggcatatcttcccttggatatgatcatatggaaattcttggtgaccaaatcctgttcttggtgataaacttggtgtcgataaacgggttaattctgttggcaaaattaggatgacacaggttgttagttctcatgaatgtcatgttgtctcgaaataaagagcttctgtccgcacctaatcgcctaaaatggaaatgtttgactcattgtttaattcggggggaagctgaaggtggtctgatccggtaagagatcttaatctgcattacacttgttggattttgatgtcgcttctgggagtgtttgattgaattctacaccagttctaggaagagaaagcctgaccaagtcatcatctccaggtttgttattgtttggatgcaaaaatcgtcgttagttaacttttttgtgttgaagtaactgtttggttgagaaaattagttgcctatcttctattttctctgttttgttatagcagcaagctgatttgtgtctaatttatagggacgatgttagcgaaagtcaatttaatcaggtgctgaacattgagttgcaacaaatcatcgatggagactgtcaccgcagccagaaaaccacggtctcaatttgaggagcctttccatctatgtttgttagaaggcatataatgcctatttatctcttgtattcgaacatttggcaattaagaaatagaagattacttccccaatatcccttattcctaatctcacctttcacggcttctggtgaacaatcacttgctattaccgactgacatgtccactcctcatatgtgagatattggggttgatatatatgttgttcgtttccatgtaattattgtgtactaacatttattgaataatttttacgccgtaacaacgtacgggcactcacctagtgtctgatggaaagggaactgttcgggtgggttagataaaataatatctgaaaaactgcaaggtaagaccatggagcagtaagatgaaactatcatagtgaaagggaaataggcttacaccttttc

SEQ ID NO: 64612 - DNA, 2283 bp, Zea Mays
agtcgccacgctcgcacgcactccctctgcaatagctgtcatgcgccctatctccgtcgcatcccgcccgctcgccacgcttgattcctcctttcaatggtgcccacgccgtccaatcccgcccgcggtccttccccacgcggatcccccacccctcctccccaccgccgccgcaacaaatccgcgcacctcgatctgctcaagtgagcgtggctcaacgagaaggccacgtcagatatcctcagcttcgaatcgcccctcgcgttacgtgtccgcgagcagatccagcacctcatacgctcttctccctcccccttcttgaccacgttcctccactcccccccatagctctgggatctggccatggctccctctcctggtgtcgtgtcacccaggaggcggcgctcgatgacttcgtcgacgatggcgttgacgacctggtggtctcgctctaccagatggacctcgatctcacgctcttcctcctccgctcctaactcctcccggagaagatcaagaagtacacgatgcatatctctagggccacggccgaggcgactggtgaagttgcggcaatctgatgcgggaggtggccgacctcatccttagcttccctgacgagacgcccgtcgtcgtcctctctgccatggggaagaccaccaataacctcctcctggccggagagaatgcggtgagctgcggtgcccccaaggcgtccgaaatccctaagctcgctgtcatcaaggacctgcatcttaggacggttgatgagcttggtttagataagtcgattgtttcagggttccacatgcacattcaccgagtcaatcctgcgatcgtgtggcttccatactgggctgttcacctcaccacatttgatggatgttagagagcgatttcagctagggttaatatttgaatatttctgaagagaaatttttgaagtacttctggtggtgctggaacaagttgaaggtaagtgtcttgatttgttgttccatataaagtcactctgcgctcgacgtttactacctagaagtgacaaagctcaaactactgaattgattccatcaggaacttttttgcatctgtcatataatctgtctaatctcatcatgctgcttttattctatataaactggtggatgatgagataaatgggcttacttccaggagaagactgatgatgatattcccatgccagcctatttcaggttcctcgcgctgctcgcattcaagatattttctgctgagcaggtagatgttgctgttctcgaggttggcctaggagggaagtttgatgcaactaatgtggttaaagcacctgtagtttgtggcatatcttcccttggatatgatcatatggaaattcttggttgttagttctcatgaatgtcatgttgtctcgaaataaagagcttctgtccgcacctaatcgcctaaaatggaaatgtttgactcattgtttaattcggggggaagctgaaggtggtctgatccggtaagagatcttaatctgcattacacttgttggattttgatgtcgcttctgggagtgtttgattgaattctacaccagttctaggaagagaaagcctgaccaagtcatcatctccaggtttgttattgtttggatgcaaaaatcgtcgttagttaacttttttgtgttgaagtaactgtttggttgagaaaattagttgcctatcttctattttctctgttttgttatagcagcaagctgatttgtgtctaatttatagggacgatgttagcgaaagtcaatttaatcaggtgctgaacattgagttgcaacaaatcatcgatggagactgtcaccgcagccagaaaaccacggtctcaatttgaggagcctttccatctatgtttgttagaaggcatataatgcctatttatctcttgtattcgaacatttggcaattaagaaatagaagattacttccccaatatcccttattcctaatctcacctttcacggcttctggtgaacaatcacttgctattaccgactgacatgtccactcctcatatgtgagatattggggttgatatatatgttgttcgtttccatgtaattattgtgtactaacatttattgaataatttttacgccgtaacaacgtacgggcactcacctagtgtctgatggaaagggaactgttcgggtgggttagataaaataatatctgaaaaactgcaaggtaagaccatggagcagtaagatgaaactatcatagtgaaagggaaataggcttacaccttttc

SEQ ID NO: 64613 - DNA, 1725 bp, Zea Mays
cgcactccctctgcaatagctgtcatgcgccctatctccgtcgcatcccgcccgctcgccacgcttgattcctcctttcaatggtgcccacgccgtccaatcccgcccgcggtccttccccacgcggatcccccacccctcctccccaccgccgccgcaacaaatccgcgcacctcgatctgctcaagtgagcgtggctcaacgagaaggccacgtcagatatcctcagcttcgaatcgcccctcgcgttacgtgtccgcgagcagatccagcacctcatacgctcttctccctcccccttcttgaccacgttcctccactcccccccatagctctgggatctggccatggctccctctcctggtgtcgtgtcacccaggaggcggcgctcgatgacttcgtcgacgatggcgttgacgacctggtggtctcgctctaccagatggacctcgatctcacgctcttcctcctccgctcctaactcctcccggagaagatcaagaagtacacgatgcatatctctagggccacggccgaggcgactggtgaagttgcggcaatctgatgcgggaggtggccgacctcatccttagcttccctgacgagacgcccgtcgtcgtcctctctgccatggggaagaccaccaataacctcctcctggccggagagaatgcggtgagctgcggtgcccccaaggcgtccgaaatccctaagctcgctgtcatcaaggacctgcatcttaggacggttgatgagcttggtttagataagtcgattgtttcagagaaatttttgaagtacttctggtggtgctggaacaagttgaaggagaagactgatgatgatattcccatgccagcctatttcaggttcctcgcgctgctcgcattcaagatattttctgctgagcaggtagatgttgctgttctcgaggttggcctaggagggaagtttgatgcaactaatgtggttaaagcacctgtagtttgtggcatatcttcccttggatatgatcatatggaaattcttggtgaccaaatcctgttcttggtgataaacttggtgtcgataaacgggttgttagttctcatgaatgtcatgttgtctcgaaataaagagcttctgtccgcacctaatcgcctaaaatggaaatgtttgactcattgtttaattcggggggaagctgaaggtggtctgatccgggacgatgttagcgaaagtcaatttaatcaggtgctgaacattgagttgcaacaaatcatcgatggagactgtcaccgcagccagaaaaccacggtctcaatttgaggagcctttccatctatgtttgttagaaggcatataatgcctatttatctcttgtattcgaacatttggcaattaagaaatagaagattacttccccaatatcccttattcctaatctcacctttcacggcttctggtgaacaatcacttgctattaccgactgacatgtccactcctcatatgtgagatattggggttgatatatatgttgttcgtttccatgtaattattgtgtactaacatttattgaataatttttacgccgtaacaacgtacgggcactcacctagtgtctgatggaaagggaactgttcgggtgggttagataaaataatatctgaaaaactgcaaggtaagaccatggagcagtaagatgaaactatcatagtgaaagggaaataggcttacaccttttc

SEQ ID NO: 64614 - DNA, 2175 bp, Zea Mays
ctatctccgtcgcatcccgcccgctcgccacgcttgattcctcctttcaatggtgcccacgccgtccaatcccgcccgcggtccttccccacgcggatcccccacccctcctccccaccgccgccgcaacaaatccgcgcacctcgatctgctcaagtgagcgtggctcaacgagaaggccacgtcagatatcctcagcttcgaatcgcccctcgcgttacgtgtccgcgagcagatccagcacctcatacgctcttctccctcccccttcttgaccacgttcctccactcccccccatagctctgggatctggccatggctccctctcctggtgtcgtgtcacccaggaggcggcgctcgatgacttcgtcgacgatggcgttgacgacctggtggtctcgctctaccagatggacctcgatctcacgctcttcctcctccgctcctaactcctcccggagaagatcaagaagtacacgatgcatatctctagggccacggccgaggcgactggtgaagttgcggcaatctgatgcgggaggtggccgacctcatccttagcttccctgacgagacgcccgtcgtcgtcctctctgccatggggaagaccaccaataacctcctcctggccggagagaatgcggtgagctgcggtgcccccaaggcgtccgaaatccctaagctcgctgtcatcaaggacctgcatcttaggacggttgatgagcttggtttagataagtcgattgtttcaggtatattgttgtttgctccactctgctcttggaacgcctcagctgttagccatacaacggttccacatgcacattcaccgagtcaatcctgcgatcgtgtggcttccatactgggctgttcacctcaccacatttgatggatgttagagagcgatttcagctagggttaatatttgaatatttctgaagagaaatttttgaagtacttctggtggtgctggaacaagttgaaggagaagactgatgatgatattcccatgccagcctatttcaggttcctcgcgctgctcgcattcaagatattttctgctgagcaggtagatgttgctgttctcgaggttggcctaggagggaagtttgatgcaactaatgtggttaaagcacctgtagtttgtggcatatcttcccttggatatgatcatatggaaattcttggtgaccaaatcctgttcttggtgataaacttggtgtcgataaacgggttaattctgttggcaaaattaggatgacacaggttgttagttctcatgaatgtcatgttgtctcgaaataaagagcttctgtccgcacctaatcgcctaaaatggaaatgtttgactcattgtttaattcggggggaagctgaaggtggtctgatccggtaagagatcttaatctgcattacacttgttggattttgatgtcgcttctgggagtgtttgattgaattctacaccagttctaggaagagaaagcctgaccaagtcatcatctccaggtttgttattgtttggatgcaaaaatcgtcgttagttaacttttttgtgttgaagtaactgtttggttgagaaaattagttgcctatcttctattttctctgttttgttatagcagcaagctgatttgtgtctaatttatagggacgatgttagcgaaagtcaatttaatcaggtgctgaacattgagttgcaacaaatcatcgatggagactgtcaccgcagccagaaaaccacggtctcaatttgaggagcctttccatctatgtttgttagaaggcatataatgcctatttatctcttgtattcgaacatttggcaattaagaaatagaagattacttccccaatatcccttattcctaatctcacctttcacggcttctggtgaacaatcacttgctattaccgactgacatgtccactcctcatatgtgagatattggggttgatatatatgttgttcgtttccatgtaattattgtgtactaacatttattgaataatttttacgccgtaacaacgtacgggcactcacctagtgtctgatggaaagggaactgttcgggtgggttagataaaataatatctgaaaaactgcaaggtaagaccatggagcagtaagatgaaactatcatagtgaaagggaaataggcttacaccttttc

SEQ ID NO: 64615 - DNA, 1665 bp, Zea Mays
cgcccgctcgccacgcttgattcctcctttcaatggtgcccacgccgtccaatcccgcccgcggtccttccccacgcggatcccccacccctcctccccaccgccgccgcaacaaatccgcgcacctcgatctgctcaagtgagcgtggctcaacgagaaggccacgtcagatatcctcagcttcgaatcgcccctcgcgttacgtgtccgcgagcagatccagcacctcatacgctcttctccctcccccttcttgaccacgttcctccactcccccccatagctctgggatctggccatggctccctctcctggtgtcgtgtcacccaggaggcggcgctcgatgacttcgtcgacgatggcgttgacgacctggtggtctcgctctaccagatggacctcgatctcacgctcttcctcctccgctcctaactcctcccggagaagatcaagaagtacacgatgcatatctctagggccacggccgaggcgactggtgaagttgcggcaatctgatgcgggaggtggccgacctcatccttagcttccctgacgagacgcccgtcgtcgtcctctctgccatggggaagaccaccaataacctcctcctgctaacaaggatagatgcgtgtgtgcctgattcgttgtctgtggaggccggagagaatgcggtgagctgcggtgcccccaaggcgtccgaaatccctaagctcgctgtcatcaaggacctgcatcttaggacggttgatgagcttggtttagataagtcgattgtttcagagaaatttttgaagtacttctggtggtgctggaacaagttgaaggagaagactgatgatgatattcccatgccagcctatttcaggttcctcgcgctgctcgcattcaagatattttctgctgagcaggttaaagcacctgtagtttgtggcatatcttcccttggatatgatcatatggaaattcttggtgaccaaatcctgttcttggtgataaacttggtgtcgataaacgggttgttagttctcatgaatgtcatgttgtctcgaaataaagagcttctgtccgcacctaatcgcctaaaatggaaatgtttgactcattgtttaattcggggggaagctgaaggtggtctgatccgggacgatgttagcgaaagtcaatttaatcaggtgctgaacattgagttgcaacaaatcatcgatggagactgtcaccgcagccagaaaaccacggtctcaatttgaggagcctttccatctatgtttgttagaaggcatataatgcctatttatctcttgtattcgaacatttggcaattaagaaatagaagattacttccccaatatcccttattcctaatctcacctttcacggcttctggtgaacaatcacttgctattaccgactgacatgtccactcctcatatgtgagatattggggttgatatatatgttgttcgtttccatgtaattattgtgtactaacatttattgaataatttttacgccgtaacaacgtacgggcactcacctagtgtctgatggaaagggaactgttcgggtgggttagataaaataatatctgaaaaactgcaaggtaagaccatggagcagtaagatgaaactatcatagtgaaagggaaataggcttacaccttttc

SEQ ID NO: 64616 - DNA, 2369 bp, Zea Mays
gtccaatcccgcccgcggtccttccccacgcggatcccccacccctcctccccaccgccgccgcaacaaatccgcgcacctcgatctgctcaagtgagcgtggctcaacgagaaggccacgtcagatatcctcagcttcgaatcgcccctcgcgttacgtgtccgcgagcagatccagcacctcatacgctcttctccctcccccttcttgaccacgttcctccactcccccccatagctctgggatctggccatggctccctctcctggtgtcgtgtcacccaggaggcggcgctcgatgacttcgtcgacgatggcgttgacgacctggtggtctcgctctaccagatggacctcgatctcacgctcttcctcctccgctcctaactcctcccggagaagatcaagaagtacacgatgcatatctctagggccacggccgaggcgactggtgaagttgcggcaatctgatgcgggaggtggccgacctcatccttagcttccctgacgagacgcccgtcgtcgtcctctctgccatggggaagaccaccaataacctcctcctgggttccacatgcacattcaccgagtcaatcctgcgatcgtgtggcttccatactgggctgttcacctcaccacatttgatggatgttagagagcgatttcagctagggttaatatttgaatatttctgaagagaaatttttgaagtacttctggtggtgctggaacaagttgaaggtaagtgtcttgatttgttgttccatataaagtcactctgcgctcgacgtttactacctagaagtgacaaagctcaaactactgaattgattccatcaggaacttttttgcatctgtcatataatctgtctaatctcatcatgctgcttttattctatataaactggtggatgatgagataaatgggcttacttccaggagaagactgatgatgatattcccatgccagcctatttcaggttcctcgcgctgctcgcattcaagatattttctgctgagcaggtagatgttgctgttctcgaggttggcctaggagggaagtttgatgcaactaatgtggttaaagcacctgtagtttgtggcatatcttcccttggatatgatcatatggaaattcttggtgaccaaatcctgttcttggtgataaacttggtgtcgataaacgggttaattctgttggcaaaattaggatgacacaggtgacatgaagatgccaagtcggtgcatccatactaattgcgactttggtctgtttggacctctggtaaacgacgtagtaggtttggagacctggaactacaaatcaatagtattgggacttaagtgacaacctgaacaagtttaggaacaacttgctagaaaatttttatgctttctaccaatcttacaacgataatttgaaagttgatatttatggtacttatttggtccaggaactagattttttgtacattctttcggatctggattaaacaacgctctctttgtatatgaacaatgctctataaatatacgtttgataattttatatgatatttaataaatagtagctactgtgactgtttcattttgtttttcttaggttgttagttctcatgaatgtcatgttgtctcgaaataaagagcttctgtccgcacctaatcgcctaaaatggaaatgtttgactcattgtttaattcggggggaagctgaaggtggtctgatccggtaagagatcttaatctgcattacacttgttggattttgatgtcgcttctgggagtgtttgattgaattctacaccagttctaggaagagaaagcctgaccaagtcatcatctccagggacgatgttagcgaaagtcaatttaatcaggtgctgaacattgagttgcaacaaatcatcgatggagactgtcaccgcagccagaaaaccacggtctcaatttgaggagcctttccatctatgtttgttagaaggcatataatgcctatttatctcttgtattcgaacatttggcaattaagaaatagaagattacttccccaatatcccttattcctaatctcacctttcacggcttctggtgaacaatcacttgctattaccgactgacatgtccactcctcatatgtgagatattggggttgatatatatgttgttcgtttccatgtaattattgtgtactaacatttattgaataatttttacgccgtaacaacgtacgggcactcacctagtgtctgatggaaagggaactgttcgggtgggttagataaaataatatctgaaaaactgcaaggtaagaccatggagcagtaagatgaaactatcatagtgaaagggaaataggcttacaccttttc

SEQ ID NO: 64617 - DNA, 1908 bp, Zea Mays
ccgcaacaaatccgcgcacctcgatctgctcaagtgagcgtggctcaacgagaaggccacgtcagatatcctcagcttcgaatcgcccctcgcgttacgtgtccgcgagcagatccagcacctcatacgctcttctccctcccccttcttgaccacgttcctccactcccccccatagctctgggatctggccatggctccctctcctggtgtcgtgtcacccaggaggcggcgctcgatgacttcgtcgacgatggcgttgacgacctggtggtctcgctctaccagatggacctcgatctcacgctcttcctcctccgctcctaactcctcccggagaagatcaagaagtacacgatgcatatctctagggccacggccgaggcgactggtgaagttgcggcaatctgatgcgggaggtggccgacctcatccttagcttccctgacgagacgcccgtcgtcgtcctctctgccatggggaagaccaccaataacctcctcctgctaacaaggatagatgcgtgtgtgcctgattcgttgtctgtggaggccggagagaatgcggtgagctgcggtgcccccaaggcgtccgaaatccctaagctcgctgtcatcaaggacctgcatcttaggacggttgatgagcttggtttagataagtcgattgtttcagagaaatttttgaagtacttctggtggtgctggaacaagttgaaggagaagactgatgatgatattcccatgccagcctatttcaggttcctcgcgctgctcgcattcaagatattttctgctgagcaggtagatgttgctgttctcgaggttggcctaggagggaagtttgatgcaactaatgtggttaaagcacctgtagtttgtggcatatcttcccttggatatgatcatatggaaattcttggtgaccaaatcctgttcttggtgataaacttggtgtcgataaacgggttaattctgttggcaaaattaggatgacacaggttgttagttctcatgaatgtcatgttgtctcgaaataaagagcttctgtccgcacctaatcgcctaaaatggaaatgtttgactcattgtttaattcggggggaagctgaaggtggtctgatccggtaagagatcttaatctgcattacacttgttggattttgatgtcgcttctgggagtgtttgattgaattctacaccagttctaggaagagaaagcctgaccaagtcatcatctccaggtttgttattgtttggatgcaaaaatcgtcgttagttaacttttttgtgttgaagtaactgtttggttgagaaaattagttgcctatcttctattttctctgttttgttatagcagcaagctgatttgtgtctaatttatagggacgatgttagcgaaagtcaatttaatcaggtgctgaacattgagttgcaacaaatcatcgatggagactgtcaccgcagccagaaaaccacggtctcaatttgaggagcctttccatctatgtttgttagaaggcatataatgcctatttatctcttgtattcgaacatttggcaattaagaaatagaagattacttccccaatatcccttattcctaatctcacctttcacggcttctggtgaacaatcacttgctattaccgactgacatgtccactcctcatatgtgagatattggggttgatatatatgttgttcgtttccatgtaattattgtgtactaacatttattgaataatttttacgccgtaacaacgtacgggcactcacctagtgtctgatggaaagggaactgttcgggtgggttagataaaataatatctgaaaaactgcaaggtaagaccatggagcagtaagatgaaactatcatagtgaaagggaaataggcttacaccttttc

SEQ ID NO: 64618 - DNA, 2014 bp, Zea Mays
cgcgcacctcgatctgctcaagtgagcgtggctcaacgagaaggccacgtcagatatcctcagcttcgaatcgcccctcgcgttacgtgtccgcgagcagatccagcacctcatacgctcttctccctcccccttcttgaccacgttcctccactcccccccatagctctgggatctggccatggctccctctcctggtgtcgtgtcacccaggaggcggcgctcgatgacttcgtcgacgatggcgttgacgacctggtggtctcgctctaccagatggacctcgatctcacgctcttcctcctccgctcctaactcctcccggagaagatcaagaagtacacgatgcatatctctagggccacggccgaggcgactggtgaagttgcggcaatctgatgcgggaggtggccgacctcatccttagcttccctgacgagacgcccgtcgtcgtcctctctgccatggggaagaccaccaataacctcctcctgatgcgtgtgtgcctgattcgttgtctgtggaggccggagagaatgcggtgagctgcggtgcccccaaggcgtccgaaatccctaagctcgctgtcatcaaggacctgcatcttaggacggttgatgagcttggtttagataagtcgattgtttcagggttccacatgcacattcaccgagtcaatcctgcgatcgtgtggcttccatactgggctgttcacctcaccacatttgatggatgttagagagcgatttcagctagggttaatatttgaatatttctgaagagaaatttttgaagtacttctggtggtgctggaacaagttgaaggagaagactgatgatgatattcccatgccagcctatttcaggttcctcgcgctgctcgcattcaagatattttctgctgagcaggtagatgttgctgttctcgaggttggcctaggagggaagtttgatgcaactaatgtggttaaagcacctgtagtttgtggcatatcttcccttggatatgatcatatggaaattcttggtgaccaaatcctgttcttggtgataaacttggtgtcgataaacgggttaattctgttggcaaaattaggatgacacaggttgttagttctcatgaatgtcatgttgtctcgaaataaagagcttctgtccgcacctaatcgcctaaaatggaaatgtttgactcattgtttaattcggggggaagctgaaggtggtctgatccggtaagagatcttaatctgcattacacttgttggattttgatgtcgcttctgggagtgtttgattgaattctacaccagttctaggaagagaaagcctgaccaagtcatcatctccaggtttgttattgtttggatgcaaaaatcgtcgttagttaacttttttgtgttgaagtaactgtttggttgagaaaattagttgcctatcttctattttctctgttttgttatagcagcaagctgatttgtgtctaatttatagggacgatgttagcgaaagtcaatttaatcaggtgctgaacattgagttgcaacaaatcatcgatggagactgtcaccgcagccagaaaaccacggtctcaatttgaggagcctttccatctatgtttgttagaaggcatataatgcctatttatctcttgtattcgaacatttggcaattaagaaatagaagattacttccccaatatcccttattcctaatctcacctttcacggcttctggtgaacaatcacttgctattaccgactgacatgtccactcctcatatgtgagatattggggttgatatatatgttgttcgtttccatgtaattattgtgtactaacatttattgaataatttttacgccgtaacaacgtacgggcactcacctagtgtctgatggaaagggaactgttcgggtgggttagataaaataatatctgaaaaactgcaaggtaagaccatggagcagtaagatgaaactatcatagtgaaagggaaataggcttacaccttttc

SEQ ID NO: 64619 - DNA, 868 bp, Zea Mays
aacaagttgaaggttcctcgcgctgctcgcattcaagatattttctgctgagcaggtagatgttgctgttctcgaggttggcctaggagggaagtttgatgcaactaatgtggttaaagcacctgtagtttgtggcatatcttcccttggatatgatcatatggaaattcttggtgaccaaatcctgttcttggtgataaacttggtgtcgataaacgggttgttagttctcatgaatgtcatgttgtctcgaaataaagagcttctgtccgcacctaatcgcctaaaatggaaatgtttgactcattgtttaattcggggggaagctgaaggtggtctgatccgggacgatgttagcgaaagtcaatttaatcaggtgctgaacattgagttgcaacaaatcatcgatggagactgtcaccgcagccagaaaaccacggtctcaatttgaggagcctttccatctatgtttgttagaaggcatataatgcctatttatctcttgtattcgaacatttggcaattaagaaatagaagattacttccccaatatcccttattcctaatctcacctttcacggcttctggtgaacaatcacttgctattaccgactgacatgtccactcctcatatgtgagatattggggttgatatatatgttgttcgtttccatgtaattattgtgtactaacatttattgaataatttttacgccgtaacaacgtacgggcactcacctagtgtctgatggaaagggaactgttcgggtgggttagataaaataatatctgaaaaactgcaaggtaagaccatggagcagtaagatgaaactatcatagtgaaagggaaataggcttacaccttttc

SEQ ID NO: 64620 - DNA, 1511 bp, Zea Mays
actggaacatagatatgataaataattatcccaaatccatgtaaagcaatagcaaactacccaagtgattcaggggtaaataaggtaatgagataaacaatctagggtaacctattgggtcccatcaaaattaacctatgcatgaataaatgatattaaagaacattattgggtaaaaagtggtcaagggcacaacttgcctgggacttgagattccaggtaccaggatgatcttcagatgactcgtgacctcacgctattcgtagtaatacaaacaaacattgtataggcaaaattaacatcacaccaaacatatatgcaaaatacatattaataatctacatattgaaataagatcacaggaacatgaattactaattttggagttatagattttaagttatggatttccaaaaattctatgtgttttgtacaagattaattaggatatcaattttaatgtggctttcatgtcaaaacagtgacccaaaataataaacaataatattacaaattataggaactggaatgggctaatttggacttaatatgaattttctatggattatacaagttttacaattatttctatactcaaaatcaatttctaaatctctttttcctattttcttttattcctggactgggcgcactaatacagagaaagtcggggtttaaatcgaacaataacccaaacacagtctactcccgcgaggacggcgggttatttataataaagggtagggtttcttttgcaaatttgaatggctgaaggggtatgggcggatgagagccgttggattaccattgcgcggcgcagattaaatcatgttcctattgaaccggtatacaccgagcaccgttgatacccagatcctcggcccagatttaaataactgagaatcaatcgcgaccctcgatcccgatcggacggcccagaagggttcaggccgaaccggtacccaagatttaatccctgccctacaactctgatctaacgaccatccacacgtcttcaacctcctgacgcacacaacggccgcggagggtgacagccgctgggctacctcaaggaggagcatgaccatcggctcgccccacacgcgggacaggcgtcgaggcagcagcggacgcctggccgttgcccaaggcgagagcacacccaggtaaaaaaatatcgttgcatggatataactactcctgacctttacgaatctcgacggagggggaggtacctgcgcgattcggtggcggccaggcccaggctttcccgaaataatggtgtcgatgttgctacccacggtacaagcagtgtttgcggagtagacgaactccgacgagatcctccatggcacaggttcggtctccagagccggcgcccgggaccctggtgacggtgggtccgattcctttggtggctgccttcagttctctctcggcgagggtacaagcggtagatggtgatggctgtatgcctcgagtatttatgcacgagagggggagatcggctg

SEQ ID NO: 64621 - DNA, 1475 bp, Zea Mays
ctgctacatgcccccgcccgaaaccccctctcggtccccgcttgcgatgcccccggtgtgacgcccgcgctcgcctcctcatggatcgcacgcccaccccgcgtacatctctgggcggcgatgcccgccccatccttgctccattctcgcggtcgtcggtcgaccctacctcgccatcccccatcccattcgcttgcaccagcggcccgagctccaggtcgagtgccgagctgtagaagggcaagatctacttcctcatgccggtcatggcaagttgcccaccccgacgcctgcgcccaataagccgcccgtcgatcgccggtcaatccgcttcggtgcgaggaggcgacaacgtcctcttgctccgatccacctctcccccaacccgctaggacgccgctgccgagagcgagcagaggcttccctcctccgacgggggaggaagatgctcaccaagttcgaaaccaagtgcaaccgggtcaaggacctcgccttccactcgcgtcgtccatggatcctgtctagcctctacagcagcgtcacccagatgtgggtctaccgcatgggcaccatcctcaaccgcttcgcagtggcgtccagttccacgccacataatcgctctttgtatccggagtagtatcgctccccttcctgactggacgtactcctagcccactagcattggccttgagcacgcacgaaggctcattcatcagtaactatccggtgatttgccgtataaactgtcacatgatgtttctacctcacaagtggttgtactcaagcaattgagataatttgctctgtgttagctcgtcatggtgcaaacatcctacttccaagacttggatttatgttctatgaagcgcgtgctgttttcaatggcatggaggccatgtacttcaaacagcgacgtcaaggaagatgatgatggtcgtagggatcgacgatagcgagcaaaacttctacacactgaagtgggcacactgcagcacttcttcccgccaagcaagctgcaacagtactgccttgtcgtcgtcaccgtcaagccctctgccgcctccagtgtccgccctgccagcccagaactcaaagagtaaatgaagatggaagaccaagatgatatttatggagactattctgatacattgtcaagcactgagttcgacaatatgaacatctcaacatactgatccatggaagaacatgtatcattgtttaatgatgaggaaagacagggatttctcttaagtacaatgcttgctagcgtgtgcgacatgccagatcacccaaaagattgacaaatgatgtgtatatggttgattcatttaattttgttatgcattttggtcactataagaatgcattctttatgtgtgctaatatgacatcctaggacctgacgcttcaattttcaaattggttattgatgtatctttttacatgaagaggtaatgcataagacatgatttgag

SEQ ID NO: 64622 - DNA, 1646 bp, Zea Mays
ctgctacatgcccccgcccgaaaccccctctcggtccccgcttgcgatgcccccggtgtgacgcccgcgctcgcctcctcatggatcgcacgcccaccccgcgtacatctctgggcggcgatgcccgccccatccttgctccattctcgcggtcgtcggtcgaccctacctcgccatcccccatcccattcgcttgcaccagcggcccgagctccaggtcgagtgccgagctgtagaagggcaagatctacttcctcatgccggtcatggcaagttgcccaccccgacgcctgcgcccaataagccgcccgtcgatcgccggtcaatccgcttcggtgcgaggaggcgacaacgtcctcttgctccgatccacctctcccccaacccgctaggacgccgctgccgagagcgagcagaggcttccctcctccgacgggggaggaagatgctcaccaagttcgaaaccaagtgcaaccgggtcaaggacctcgccttccactcgcgtcgtccatggatcctgtctagcctctacagcagcgtcacccagatgtgggtctaccgcatgggcaccatcctcaaccgcttcgcagtggcgtccagttccacgccacataatcgctctttgtatccggagtagtatcgctccccttcctgactggacgtactcctagcccactagcattggccttgagcacgcacgaaggctcattcatcagtaactatccggtgatttgccgtataaactgtcacatgatgtttctacctcacaagtggttgtactcaagcaattgagataatttgctctgtgttagctcgtcatggtgcaaacatcctacttccaagacttggatttatgttctatgaagcgcgtgctgttttcaatggcatggaggccatgtacttcaaacagcgacgtcaaggaagatgatgatggtcgtagggatcgacgatagcgagcaaaacttctacacactgaagtgggcacactgcagcacttcttcccgccaagcaagctgcaacagtactgccttgtcgtcgtcaccgtcaagccctctgccgcctccagtgtccgccctgccagcccaggaaatcataagtcgagattaaagttgatcaactcgacactcgaacaactgaatgagcaagtattacaagtgctgaaagttgtgagtgctcaagtccaacttctttatcgcataagttttggtgaagatacttattctggaacctttaaaagcatcaacgttagtgttcaagaactcaaagagtaaatgaagatggaagaccaagatgatatttatggagactattctgatacattgtcaagcactgagttcgacaatatgaacatctcaacatactgatccatggaagaacatgtatcattgtttaatgatgaggaaagacagggatttctcttaagtacaatgcttgctagcgtgtgcgacatgccagatcacccaaaagattgacaaatgatgtgtatatggttgattcatttaattttgttatgcattttggtcactataagaatgcattctttatgtgtgctaatatgacatcctaggacctgacgcttcaattttcaaattggttattgatgtatctttttacatgaagaggtaatgcataagacatgatttgag

SEQ ID NO: 64623 - DNA, 1902 bp, Zea Mays
ctgctacatgcccccgcccgaaaccccctctcggtccccgcttgcgatgcccccggtgtgacgcccgcgctcgcctcctcatggatcgcacgcccaccccgcgtacatctctgggcggcgatgcccgccccatccttgctccattctcgcggtcgtcggtcgaccctacctcgccatcccccatcccattcgcttgcaccagcggcccgagctccaggtcgagtgccgagctgtagaagggcaagatctacttcctcatgccggtcatggcaagttgcccaccccgacgcctgcgcccaataagccgcccgtcgatcgccggtcaatccgcttcggtgcgaggaggcgacaacgtcctcttgctccgatccacctctcccccaacccgctaggacgccgctgccgagagcgagcagaggcttccctcctccgacgggggaggaagatgctcaccaagttcgaaaccaagtgcaaccgggtcaaggacctcgccttccactcgcgtcgtccatggatcctgtctagcctctacagcagcgtcacccagatgtgggtctaccgcatgggcaccatcctcaaccgcttcgcagtggcgtccagttccacgccacataatcgctctttgtatccggagtagtatcgctccccttcctgactggacgtactcctagcccactagcattggccttgagcacgcacgaaggctcattcatcagtaactatccggtgatttgccgtataaactgtcacatgatgtttctacctcacaagtggttgtactcaagcaattgagataatttgctctgtgttagctcgtcatggtgcaaacatcctacttccaagacttggatttatgttctatgaagcgcgtgctgttttcaatggcatggaggccatgtacttcaaacagcgacgtcaaggaagatgatgatggtcgtagggatcgacgatagcgagcaaaacttctacacactgaagtgggcacactgcagcacttcttcccgccaagcaagctgcaacagtactgccttgtcgtcgtcaccgtcaagccctctgccgcctccagtgtccgccctgccagcccaggtatgcgaatctccaatccatgtgaggattcagggctagactagatgtagcttccgacctatatgattagttgtatgtggagagcaaacaatcaacttacacctaggtctaaataaaatagtggtggttaaatctttgaatctgtagatcaaaccatctcaagtaattttagttttgttatgaaaatttttagctccaatgaaataattgcattttaattattaagatttaacatacatttggttctatgaggaaggaaatcataagtcgagattaaagttgatcaactcgacactcgaacaactgaatgagcaagtattacaagtgctgaaagttgtgagtgctcaagtccaacttctttatcgcataagttttggtgaagatacttattctggaacctttaaaagcatcaacgttagtgttcaagaactcaaagagtaaatgaagatggaagaccaagatgatatttatggagactattctgatacattgtcaagcactgagttcgacaatatgaacatctcaacatactgatccatggaagaacatgtatcattgtttaatgatgaggaaagacagggatttctcttaagtacaatgcttgctagcgtgtgcgacatgccagatcacccaaaagattgacaaatgatgtgtatatggttgattcatttaattttgttatgcattttggtcactataagaatgcattctttatgtgtgctaatatgacatcctaggacctgacgcttcaattttcaaattggttattgatgtatctttttacatgaagaggtaatgcataagacatgatttgag

SEQ ID NO: 64624 - DNA, 874 bp, Zea Mays
cgctcgcctcctcatggatcgcacgcccaccccgcgtacatctctgggcggcgatgcccgccccatccttgctccattctcgcggtcgtcggtcgaccctacctcgccatcccccatcccattcgcttgcaccagcggcccgagctccaggtcgagtgccgagctgtagaagggcaagatctacttcctcatgccggtcatggcaagttgcccaccccgacgcctgcgcccaataagccgcccgtcgatcgccggtcaatccgcttcggtgcgaggaggcgacaacgtcctcttgctccgatccacctctcccccaacccgctaggacgccgctgccgagagcgagcagaggcttccctcctccgacgggggaggaagatgctcaccaagttcgaaaccaagtgcaaccgggtcaaggacctcgccttccactcgcgtcgtccatggatcctgtctagcctctacagcagcgtcacccagatgtgggtctaccgcatgggcaccatcctcaaccgcttcgcagtggcgtccagttccacgccacataatcgctctttgtatccggagtagtatcgctccccttcctgactggacgtactcctagcccactagcattggccttgagcacgcacgaaggctcattcatcagtaactatccggtgatttgccgtataaactgtcacatgatgtttctacctcacaagtggttgtactcaagcaattgagataatttgctctgtgttagctcgtcatggtgcaaacatcctacttccaagacttggatttatgttctatgaagcgcgtgctgttttcaatggcatggaggccatgtacttcaaacagatgttgtttgtttattgttattatcttgtcg

SEQ ID NO: 64625 - DNA, 2000 bp, Zea Mays
ccgattccacacagggccggcagtagtgcacagtgcagccgctgctgctctgccctctacggctacgagtgcgaggagccgaggacacctttccctttcccttccacctcccctcccctccgtctctcgtccccattaatatctagccgcctctccccccgtctcttctccaaaactgtgagcgagaggcagggagtgcgctcgacggccgccgccattagtgatttagtgttgagagagggagagaatctaaagtgaccggacgctgtccttccttgctgatcggcgacacggtccatccctccctcgctcgctagggttccttttcgtccatggatcagagcttcgggaatctcggggccggagctgggagcagcagcgggggctccaactccaaggcggcggcagccgccgtgtcctcctcgtctttcctgcagctgccgctgtcgacggcgtcccccgcgtactacggcgcgccgctcgcgctcctgcaccacgccgccgcggccccgtcgtcgtcgcagcagcaccagcagcagcagcaccaccaccactacgccaggcacggcgccgagatgtcggcagcggaggccgaggccatcaaggccaagatcgtggcgcacccgcagtactcggcgctcctcgccgcctacctcgactgccagaaagtacttcgcttgagctaccccgaccccggctggcgtgacctgccgtcggaaaaaccgcatctttttttatatcttgattcgtgaagcgagatttgcttaatttgatgcgtaaatctatccacgcctgtcgcgtcctcacgctcaccctcacagtcacaggacagcacggtggctatgaaatgatgcgcgcgctgtgtctgtgtgattgcaggtgggcgcgccgccggacgtgctggagaggctgacggccatggcggcaaagctggacgcgcgcccgccgggccgccacgagccgcgcgacccggagctggaccagttcatggaggcgtactgtaacatgctcgtcaagtaccgggaggagctcacccggccgatcgacgaggccatggagttcctcaagcgggtggaggcgcagctcgactgcatctccggcggcggcggctcctcctcagcgcgcctctcgctcgccgatggtaaatcagaaggtgttggctcttctgaagatgacatggacccgaatggtcgcgagaacgatccgccggagattgacccacgagcggaggacaaggagctcaagtaccagctgctgaagaagtacagtggctacctgagcagcctcaggcaggagttttccaagaagaagaagaaagggaagctcccaaaggaggccaggcagaaactcctccactggtgggagctgcactacaagtggccgtacccttcagagacggagaagattgcgctcgcagaatcaacgggcctagaccagaagcagatcaacaactggttcatcaaccagaggaaacggcactggaagccatcggaggacatgcctttcgtgatgatggaaggcttccacccgcagaacgccgctgctctgtacatggacgggccgttcatggccgacggcatgtatcgcctcggttcatgaactacacacttccatggacgactgtgggggcctatccaatcgtcggaccgtgggagtatatttcagtgttgcggtgcaaggacattgttgtggaatttttgttgctgattgccaaggggtgggtcggtcgatgtagcgtctatgcatggcttgtagttctcctgtaatgttgttgttaatttccgcttggcggcttgtaatctaggtgtatctctggaacttgaatcctgggtgattaatccggcaagcagctgcctgtttgtatgattgtatggttcgggttggtggaacatgatgcatgctaaggcgtggcctgtctggatcaaaaaaaaagaagatgtcttttgtaccagtggaatgattggaacttcagattgctgaacatttccgatctacattca

SEQ ID NO: 64626 - DNA, 2912 bp, Zea Mays
caacaacgtgcacggttcttatcatgtagtcaatgcataaaatacatgcaagtcattagaaccaggcaccgcctataagaatcagaagtgaaggtttgttggcagtacataaatccatgaacaacaatgtctaagtgtcccttctttactacatcgaccatcaacacacaactcagattaagatcaatgtagttatctacttacacattagaaaggtgggccccatgaatgaacgtcaaaaaacactaccacctgcctgtagatggttatgaagacataaatgatgtcatccatatttaagcatcgttatctatccattcttaggattcctagaccttttcttgagactccagtaccttagctcaatattccatgattgcttgttctgttggagcagtacttgatgaaacttggcaaaaacatgtacaattacaaactcaattggatcattataaagaaattgtcatttagcatgtgtcaattgcagcagttaacaaagaaaaattagaacatgttaatctagggtggggtgtaagtgagcaaccaaatattgttgagacttcgtgtgaagattatatcgatgtaatgtaacggagaactatgatttgtcataaacatggacctgcatatggtgaaatcttttcactgaagtacctgctaaacaaatgtcataatgtcagagagcacaaaaggatatagcttgaatttttactaatttaataacaaaactatattcgcgaatcaagtatatagttaagcacaccagagccgatgtagtgcttcccttttatagttgtagttggatttatgtcatcagcataaatctccacaagaaatggtctttcttcttttatgcctgctaaacatatatgatgacaacaaaaaaaagaatccaatggaacatgaggcaaaattgtaatctccaataaaggaaatacctctcttaccttagggtgacctgtatatctcaaatgataggaaagggacattaaatcaggaggcaaagctataatcatgaatcaagggaataattaggcatatgagaactattgtgctctttgcctttttcttgtcttattgggtcctgcacacatatttgttgacttagtcattcccatatgcatcactaaaaggattataaaggatcaaggataaacacacaaaagaagcttgaatgttagctcgagcaaagaataaaataccaggtgaactttcccacaacatcgacaactgttttgcctttcattaggcctaaagcaaatgcaaaacaaaaaacaaattttagttggcaagctgtaaaaaagagatgagtgtatggcgcaaaaaccacaaaaaggtataaaagagagacaagcaacactataaaattaagtgtaccaaatgtgatagttccatcactgcttaagtacctttttggacatgtggtatggtcaaagatgaccacttaaagcaaagagtccacagaagtatatcaacaaaacaatatgcaaccttgttcacctttattattggaagcaaacacaagccagctatcaccaagacaaatagttccattcctgaaaataagctgaattctatgtcctaacggttgaaggtcattcatggcctagagcttaaccatttttttctggcccaaatattttatgatctttgaaggtaaatcataaaggaaagcgtaaacaacgatgaatgtagtgcaaacagaaactataagttaccttaaataataataatagtcaaacatggcacatgtagccaaggcatagtataacatctttacttcacatgaaggaaatcgaaagaaccaaaattgtttagtcgacatagagtattccaggaaaaaaacaacctaaaacataaactcatgtgtgaattgaggacctacaatcaaggagggaggggtatcttactgcaacagaaagtttagaacagcgagtaccagaacaccgcaatcaacgatgaggtcgtttccacttctccgcatagaatatatactttaccacgcataatatattaatcaaccacaaagtaacctatatgactttatacttgtttggaaaaatacataaatgtatatagtgtcaattaaagagacaggctttagagcttacctgcaaaggaataaaacaatcttatggaaaattgtaaaatgaataagtgtatatccacgtgaatcatcgatgcaaagacaaataataaatatatcggtgcacatataagttttttgttgttctgataacaacaaatggactgtgcgtagctattagtctgtatgcaaacatacaattgaaaaaaatatgacctgagcaacaacaaagatgtgtgaagcaatcgaacaagaaatactaatagatcacatagaaataatttgtaagcgtaaatgctgttggtcaggtagatagtacatacaactcacctgtaggggagcaagataaataaaaaaagccatgctaacaactgtgcaaatcaataagcacacataagtgaaaattcttgatgtaaatagaaacaataaatgtatggttaataatacaatcaactaagctcttagattttaggtaatttttttttgctaacagtaagtggccaacaactattaatatttatgaaagcgcagatttcgaaaagaaaataaatggcttgagcaacagcaaactgttgtaaagcaatcaacatcgaagcagcaatattaatatattgcacatatagaatttataagcgtaactatcatacaatagacagatagtacctacaactcacctgttgaggagaaaaaaactcaaatcaggatatgtgaaaatgaataagcacacacatgtacaaattatcgatgtaaagggaaataataaaagtatgagtatagatataatcaacttagttccaaagttgttaataacaaatgtcatgaaaat

SEQ ID NO: 64627 - DNA, 885 bp, Zea Mays
ttaccctgcgcatgacaaggaatgtggttaataaacttgtaaaaatagctccacacatgatatttggcagttcgctacgtaaatagatacacaaatgtgcatgtagacttaactgctgcaagaattaatacgcatatttaaaggaaagaagcaccattacaattacttgatatttataatgtagtgcgacacatagagaaataatataggggggattttcatttttcaagggaaattagttcattttttcttgggaaaatggagttgtcaaactagctctaaggaaacagccattgaaataatttttttataaggatgctcgagctaaaaaaagaaccttaaaaccaaaatcctaatcctcatagctcggttcgccggcttcttcgatctctcgccgccgtgcgcgctctgctcccgcctcggcatcggcagcctcttcgggacccacctgcaccacagaggcgtcagcggaggtggggcgccgagcgccagcgccgcttgctgtgtgatgcgcacgccaaagacctgtcgcgccttggctactgtagcacgtaccgctagctcgtggacgccggagacatgtgcgaggactgcgtcgcggcggcggcgcccgagaaggtgttgctgtcgtcgatgggctggtgtgatctggatgagcgggacctcgcctgtgcctgctgcagcgtcgcgctcgagagcggtttctactggtcgtcgcacgcgcggcatggctcagactgtggccacaagcaagaggagaaggcaccgaggtcaaatggaagacgctggagtgagatgaggtggatgaagcgaggagaggagaggcatctagaagcatgtgtggacggaactctcgagaggcagagggactgtgggagtatgtag

SEQ ID NO: 64628 - DNA, 2981 bp, Zea Mays
caaaagcgcccgcgacggctggggcgagggccccaccgatcccgcctctccctctcctagtttattttactcgccaacgcacacggaccgatgcgctacctcgagcaagcttgcgttgccgccctccctccccgtcgtgctcacgtgggttggtcaaccccctccccgcgccgcgagcaccttcacctccctcccgcctacatccacatggcagcgccgtggccgtcgcgcgcggcctgctaacagcaggcaaacagcaacacctcgcggtccctcggctgctgcgcaccgcgccgctcgccatggcgccaccgctgccgctgccgctgctgcggtggctgctcctggcggcagcggtcgccgcgaccgtggcgcagccgcagccgcagccgctggcgtcgcggacggacctggcggcgctgtacagcctgcgcgcctcgctggggctgcgcgcgcgggactggccgctcagggccgacccgtgcgcgcgctgggcgggcgtggactgcgcggcgggccgcgtcgtgggcgtcaccgtcgcggggctccgccgcacgcgcctgggcgccgcccggcccccgcttctcgcgctcgacggcctgcgccgcctcaccgcgctcgcccgcttcaacgcctccggcttcccgctcccgggggagatcccgccgtggctcgccgccggcctgccgccgccgctcgccgtgctcgacctcacctccgccgccgtcaacggcacgctgccgcccgacctcggcgcctccgggaacctcacggccctgctcctgtccgggaacacgctcacgggccctgtcccgcccgcgctgctctccgccgcgggcctccgcgtcctcgacctctcccgcaacaatctctccggaccgctgcccaacgtctccgtctccctcggcgccgccggcgcctccgtgtttaacgtctccgggaattctctgtatggcgtcgccgccgacgccattggggcgctcaggagacggtttcaggtcgtcgacgtgtccagcaactacctggacggagcgtggaacgggtccgacacaacagtgcttgccacgacgaattgcttctacggtgtaccggcccagcgtagccgtgcggactgtgaggagttttacaggaagcaaggcgtcaagcttgttgatcctccagcgccctcgcctgtgccttcgtcagagccaccgccttcaccctcaccagagaagaagaagaagaagaagcacgggatctccaaaaaactactcattggagtccttgtagccgccggaacactggttgctgtgttttttatcgcactgctgttctgtttagtgaagaggagaagcagaggaaggaggggagggagagggaggggagtggcgccaaacgaggaaggcacgcgctctgtctccgtgcggaggagggacagcagcgtcaatccggtggtgttatcgccatcggcggtgtctccaagtgccaacgatggacctaaggatgcgtctgccgttatcggtgagatcacctacgagcagctggtccttgccaccggcggttttggcgacgaccagctcatcaaacacgggcattcgggggacatgtaccatggtgtgttggagaatggctcccatgtcattgttaagaaggttggcgcaaagggcgccaacagacatgcgagtgaattggatttctacgtgaggtactcgcacgaaaggatcgttccgctgctcgcgcatttgagcaatgacgatgacgaattcatggcttacaagtatatgccgaagggggatttaacccatgcgttgcacaagaaacctgtagacaccgcagatggcttgccctccctggattggataactagactgaagattgcaactggcgtggctgaggctatgtgcttccttcatgaggaatgtagcccgccattagttcacagagatatccaatcaagcagtgtccttctcgatgataaatacgaagtgcgacttgggagtatgagtgacatatgcatccagcaaagtgggggaagccagaatgtcttcactcggatattgagatcatcaaattggtgactgacgttggtatctgacgctttcttgtggcaggtctctcgacaagcacacatcaggtccaccggccacttgttcctacgacgtgctctgcttcggcaaggtgctgctagagctggtgaccggcaacttgggcatcagcggaccaaacgacgcggcgtcggaagaatggctgtcgaacacgctgaaccacatcaacggcggcgacagggcgagcatcgccggcatcatggacccgctgctcctggtggacgaggaccacctggaggaggtgtgggcggtggccgtcatcgccaagacgtgcctaagcgccaagccgtcccgccgtccctcggcgcgctacgtgctgcgcgccctggagaacccgctgcgcgtggtgcgccagggctcctcccggtccaactcggcgcggcagcagctgcggagctcgtcgtcccggagctcgtggcagtccgtgttccaggggaaccaccgggtgcagagcctggacgccgcagcgacggcggcgttggcgctggaccggcggcactcgctgaggtcgcacggtagcggaggcgaggcgtcgttctcgttcaagagagccttgcccgtgcccacggacaccgcgccggagccggctgcggcgctcgacgaggacgccgttattgtctagtgtaggaggcggacattccccggttcttagcttctttacagggcggtgttcttgattcttttcccctgcgtgatatcacgtcgtcgcatgtgtgtgtataatttgttcctgtctgatgcgttcatccgtgttccaacatgaccaaaaaaaactgtgcataaagagtacgttttcaatactttcaaggaaaatttgaactttatcttcagcatgtcttccttgattttcaaagctgagaaacaattaaacaaagacagttgggccgctttcaggag

SEQ ID NO: 64629 - DNA, 1981 bp, Zea Mays
gcgctacctcgagcaagcttgcgttgccgccctccctccccgtcgtgctcacgtgggttggtcaaccccctccccgcgccgcgagcaccttcacctccctcccgcctacatccacatggcagcgccgtggccgtcgcgcgcggcctgctaacagcaggcaaacagcaacacctcgcggtccctcggctgctgcgcaccgcgccgctcgccatggcgccaccgctgccgctgccgctgctgcggtggctgctcctggcggcagcggtcgccgcgaccgtggcgcagccgcagccgcagccgctggcgtcgcggacggacctggcggcgctgtacagcctgcgcgcctcgctggggctgcgcgcgcgggactggccgctcagggccgacccgtgcgcgcgctgggcgggcgtggactgcgcggcgggccgcgtcgtgggcgtcaccgtcgcggggctccgccgcacgcgcctgggcgccgcccggcccccgcttctcgcgctcgacggcctgcgccgcctcaccgcgctcgcccgcttcaacgcctccggcttcccgctcccgggggagatcccgccgtggctcgccgccggcctgccgccgccgctcgccgtgctcgacctcacctccgccgccgtcaacggcacgctgccgcccgacctcggcgcctccgggaacctcacggccctgctcctgtccgggaacacgctcacgggccctgtcccgcccgcgctgctctccgccgcgggcctccgcgtcctcgacctctcccgcaacaatctctccggaccgctgcccaacgtctccgtctccctcggcgccgccggcgcctccgtgtttaacgtctccgggaattctctgtatggcgtcgccgccgacgccattggggcgctcaggagacggtttcaggtcgtcgacgtgtccagcaactacctggacggagcgtggaacgggtccgacacaacagtgcttgccacgacgaattgcttctacggtgtaccggcccagcgtagccgtgcggactgtgaggagttttacaggaagcaaggcgtcaagcttgttgatcctccagcgccctcgcctgtgccttcgtcagagccaccgccttcaccctcaccagagaagaagaagaagaagaagcacgggatctccaaaaaactactcattggagtccttgtagccgccggaacactggttgctgtgttttttatcgcactgctgttctgtttagtgaagaggagaagcagaggaaggaggggagggagagggaggggagtggcgccaaacgaggaaggcacgcgctctgtctccgtgcggaggagggacagcagcgtcaatccggtggtgttatcgccatcggcggtgtctccaagtgccaacgatggacctaaggatgcgtctgccgttatcggtgagatcacctacgagcagctggtccttgccaccggcggttttggcgacgaccagctcatcaaacacgggcattcgggggacatgtaccatggtgtgttggagaatggctcccatgtcattgttaagaaggttggcgcaaagggcgccaacagacatgcgagtgaattggatttctacgtgaggtactcgcacgaaaggatcgttccgctgctcgcgcatttgagcaatgacgatgacgaattcatggcttacaagtatatgccgaagggggatttaacccatgcgttgcacaagaaacctgtagacaccgcagatggcttgccctccctggattggataactagactgaagattgcaactggcgtggctgaggctatgtgcttccttcatgaggaatgtagcccgccattagttcacagagatatccaatcaagcagtgtccttctcgatgataaatacgaagtgcgacttgggagtatgagtgacatatgcatccagcaaagtgggggaagccagaatgtcttcactcggatattgagatcatcaaaattgaattccggaggcatctgag

SEQ ID NO: 64630 - DNA, 1568 bp, Zea Mays
ccccgctccacctccacctcagtttcccactcagagctccaatggccgccgctctcccgcactcccgccttcacctcccgctccacacgcccagtcccacctcccgccgccgcccctgcccccgttcccgccgccgccttccctccttcgtcgccgtatcgcgcctccagaacaccaccgccgcgacccacccggtcctcccgcccccggctccgcccccctccgccgcgctcctcgccgccgagggcgcctccctcgcgccgcgccgcgagcaccgcttcccgggctcggtctcctccccaacaagcaccgcctctgcctctaacgaggcggagtacgccgtcctgcttcgcgccctccaggtgcgccgcgccgtcgccgccgaggtgctcgttgccgcgctcggcggcgggaaggtcggcggcctgacctacatcaagaacctcacggggcggatggggccgttcgtggaccgcgttgttgtcgaggccgcagcgatgcggcgggaccgccccgagctcgcccacatgtccttcaacgcccgtgcaaaggcgtacatccaggagtccggccttgtggagcttgtcaagtggttcaagcacaactcgatgacatatccccagatcgcaaaagttgtttgcgcatgttctggcgatttggggaaagttagaaagatgataaagtggcttaggtcaatttatgtaaaaggagattttttggggcgtgtccttgcaaacggtggatctttcttgaaccggagctttgaagaattggaagagattattggctatttggaaagccttggtgtcaggagagactggattggttatgtgatcagcagatgcccacagctgttgagcttgtctatggatgagttggagacacgagtcaggttttatacggatttgggaatggacaagaaggactttggcacaatggtctatgattatccaagagttcttggatttttaagcctggaagagatgaacagttcaatatctgaaagagtttggtttaagtactgaggaacttgggaggttactggctttcaagccacaactcatggcctgtagcattgaagaaaggtggaagcctcttgtgaaatacctgtatcaccttaacatttcacgggatggcatgaagcgaatgttgatggtccaacctacaatattctgtcttgatttggagacagtgattgcaccaaaggtacaatttttaattgatattggtgtgaggagtgatgcaatcggcaatgtgcttgcgaagtttcctcctgtattaacttatagcttgtacaagaaaatacgcccagtggacgagggttgcaatcaacccctctcaagcggtccaaggacccacttgaataccacagtgttttgctttgcttttcttaatcccgttcgcgaggaatctccacaacttggagtctctcgcccttacaaagatgttcacaaagaagcacggagtaagggagggattagcaactcacacaagacacaaagatcacagcaaatacgcacacacaagacccagacttaagctcaaaagactaacacactagaacggag

SEQ ID NO: 64631 - DNA, 5487 bp, Zea Mays
ggacaccccacacccgcccgctcgcttccgctcctccgttcccaaacctccccaaccagcagctctagggttttcgccgccgccgccgccgccgccgcccatggccgccactccggaccgagccaatgccgacctccgccatggcctctccgtcgacacccccctgccgccccagattgccagagagaagcaaggccttgatactgaaatacccctttctcctcagtggcttatgaaggtgggggaaaacaaggatcctgtttcacatggtatccgctcagatgtttcaaaaacatcaggggctggtgaagaccaaggctacaatacgaagaaaaaggatgttttcagggcttcagttcttgatggtgaaactgggcgtcgtgaccgctggcgcgatgatgaaagggaaccaaattcaacccatcggtggagtcgctggagggagacagataaggaacatggcgatgcacgcaaagcggaaagatggtcagatgacacctccaagcattctgtggatggacgtcgtgttccgcaggagcgctggggcgattccaataataaggatggcagttatgaccaacgacgtgagaataagtggactgcacgttggggttccaatgataaggagtctgaaaattggcgtgataggtggggggattcaggcaaagagggtgatgcttaccgtgaaaaaggtttatctcaccatgggaaggatgccaacagttatgaaaaggatgacaatatttctcgttcatggaaacctagttattccgcaggccgtgggcgtggagatttgccaaattatacttctcagacactgccgaaatcacctgctccttctggatatggtagggggaagctagacaatgattttgcaaagtttccaaacagtcgtggaaagttcacatctggtacaagtgcaatcagtagtggatcttcacgaccattccatcttggtcttctttctgacagacctggtggtatatcagatcgttcggcattcagatacagtaggctgaaattgcttgacatataccgaaattgtgatgtcactgattttaagttatctgttgattgtttggaggaactctctgtgttcatgcaagaggatgttttagaacctttagcactatctgctcctgttgctgaagaagcgaccattttaaaagctattgacaaaggggatatcgtaaacagtggtgtccatcaggcttctaaagatggttctgttggaaaagctggtagagaagaccagccaggaggtgtggaagtctcaggtcttgctggaaatactgatttggcagcaagaggggaaccaatgcatcctgcgacatctacttatgttgttccacaaaggtcacagtttattggagaacataaacttggaccatctgaatttgggcatcaaatacctaatttcttaaatcaagaatcaaaaactgttggcatgttgggttttgataactttgccagtccagtgcattctcatcctaatccagaaaacctctctctatactataaagatccacaaggtcaaattcaaggccctttttctggtgccgatattattggctggtttgagactggttattttggcattgatttgctggttcgtccagtgaatgcaccccatgatgttcctttcttaatgcttggggatgttatgcctcacctgcgagcaaaggtaaggcccccaccaggatttgccacttcaaagccaagtgatatgctagctccagagaccctacctacagggaagtttgtcagctctagcatgcaagcaggatcaactggcattggaatatttgacagtgggccaatcaggaaagataatgctgttgaggctcaaaatcgtttcctggagtcacttatgtccaatagtgcgcggaatccttcggcaggcactatctctataactggaggtatgaatgaacttgttagtactagctttggcaacatttctgtgcgcggaggtgagagcggggtcaatctgaactatcttttggcacagaaaggactgttggagagacaaaactctttgcaaaaccctgtttcatattggacaggagatgctccagcatcaaaagtacatcccatggctgatacatctcgccaatctttgcaatctcaaaatgttgatttactagccatgctgcaaccaaaggagaagcctcaagttcctactggtaattcgggtctgccactatgctccaattaccctgaagcaagtatcgttaatcccaacttgcatagtggagatcttgctcaaggggctcttaatatgcgtcaagatatgcagaactcccagaacattggtattggagttcaacaacacaacttaatgccacaaaaccgaccagctttggctcagttgccatctgagaagcttgctgagatgtctcaagatccacaactgttaaatatgattcgtcaagatctgcagaactcccagaacattggtattggatttcaacaacacaacttaatgccacaaaaccgaccagctttggctcagttgccacctgagaagcttgccgagatatctcaagatccacaaatgttaaatatgcttcagcagcaatatcttttgtcacaactacagttgcagtctcagacaccttttacacctcagcctccactctctatgttggacaagatgttattgctcaagcagcagcagcagcagcagcaactgcagcagcagcaacaacaactgcaacagcaactggagcagcaacaaaagctattgttgcagcagcaactgctctctcagatggtgcctcacgcgcatcctaatcaacacactgatgattcttatgcattgaagtatacttctgtgccatctgatgattctaccagtcttggttttagaagaatgcaagaggctattgaagtagatcagaaattttctgtccatggtatgcaagtgggtcaacaacctagtcagtcaattatgaattttagaaatatggatggtatagctttattgcaaaatcctgtaactgcactgccggtgccccatgaaactgctgtgggtgcacttccaaaagaggaccactctcgtcctggaatgtcggaagattttgcaaatgtcgacttacaattgaaatcaactatggtacactcaaagctggtggaagttgcagataggaacgagggttttaaatctcacgaagtggacactgcagcagaaaaaaataaaatgtctgaaaaggagttgaattctggatctactataatcatggggagtgcttctgatgaagctaagaatttgcatgaaccaccactagatccaaagtcagaaaatttatcttctgatatttctggtcaggttcaagagtcaaacctgtctgcagaagatacgcctcctggcatcacagcagctgtggcaactgaagtaaaagttactgatacacaggagaccaaaaaagcagaaaagaaaaggaagcaaaagaaaaaacaggctgctgcagatgctggcaaaggaacatcaaaggcggttgtagcccagcagcaaaggcaggaaactgaggttgacaattctgatattggtggtaataagcatgatttaacagatgatacagaggaactattttggggttcacctatcagagtgcaaaatgagattttaccctccaaaagttttccagaggaacatgacgctgacaaagctgaatcgcagtttagttctctatcatctgatcctcatagcatggcaagccagcgtgcatggaaacaacctactcaaggtctcaggcctaagtcactgctagaaatccaagctgaggaacaactgcgtgcacagaaaggattaactactgaaactgctaagccagcagcttcagttccttcaatttcttggagtggcatgtcaatatcttccgagcaacattatgggggttcaaatatatcattgggaagtatggaaagtgctgttgagagaaataaaagaagccagttgcatgatttgctggcagaagaagttctggcgaggtcaagcattgcagataatgagaataatgccaacgatgcatttttctctcctctgtcgcctgctgctgttcaggctgatgctcctgcccttgatgataatgacttcattgaggccaaggacaaaaagaacaaaaagaggtcagcaaaaacaaaagcttctactgtgaaggctccatcacctgttgtttcctttgatccaccagctatttcgatgccttctgaaaagggaaagtctgccaagcaagcacaacaggagttagaaatattgccagctccaccaagtggtccatcgtttggagattttgttctttggaagagtgatcagactagctctgtgcctgctccagcatggtctaatgactcagcaaaggtgcagaaacctttgtctttgagagatattcagagagaacaagaaaggagaaccgcatctatccagcaacaagcaccctcaccaactccagcaaaggtggccccgaaccaaagaagtcatgtgaatgcttcttcctggcaagcttctggaccacctccatcacaggcagttgcccctgtccaaatgagttccaatgctcccagtcattccaggtcaagtgctgaagatgatttgttttggggcccttctgagcactccaaacaagatacaaagcagtctgagtttccaagtctgttgagccaaagcagaagttccatgatgaaggatcattctgcactgaatcgtcaaaagtctcaggcaggcagattgccagttccttctgctgctactgcaaaccaatctggcaaagggaaagcagaggctacaaacaagcagactgaggcaatggacttcagagattggttggatagtgaatgggccaagcttactggaacaaatgatgtaagcttccttgagttctgcataaagcaatcaactaccgaagcggaaatactcctccatgagaacattggttcccttgaccgcaaccacgagttcatcgacaagttcctcaactacaaggccttcctgtcagcagatgtgatccacatggccttccaagctcccagcagccgtggtgacggtgcagggtgggcaaaccctgctgctgcagctagaggaggcacggtcatagacgcggagctggatggcggcgggaagaaaaaggggaagaaggggaagaaggtgagtgccgcagtgttggggttcaacgtggcgagcaaccgtataatgatgggcgagatccagaacgtggattaggaggatggcggcacaccaacaccaccgtgtatataacatagtttggcctttggttacatgccaccgaagtctcagggctcgagggaagctgggggtgctcggaatggcggtctggtctacctgtttttgccgagggtgggaaactgagcttagatacagggtcatgtgctggtgattttgggttcctgtaacaattggttaggatcctgtaacggacagaaatattttcttcaatagaaactcaccagatggattcaaaaaaataa

SEQ ID NO: 64632 - DNA, 1101 bp, Zea Mays
gtacataaggaggccgtgaattattcattgagcgagaatggtcatgcaaaatgaggtagaagccgcagtgaagatttccctattggcagctttgggctcgactacaaataaacttgccaaagttaaggaaatcggaggagaaagcaaagtttcttgtcggagagagagatcgtttgcttacagagagagattctgctcttcaagaagctcagatgtggcgctcagagctaggaaaagctagaggaaatgctgcaattctagaagcagctgttgtcagagctgaagagaaagctagggtctaagcagcaaatggtgacatcggcataaaagaagccatgagccgacttgagtctgccatcaaagaaaaggaaaatctcctagcccttgtggatgctctacaatctcaattacaaagacaagagactagcacaatacatgtttgtgaagagagctcggagctctctctactgctccgaagcacatggaagatgacaatgttcataaagcttgcatatacagaccgaatactggttatagagaacgttgttgagttggatgatgagggagtcgataatccccactcttttgaagcgtctggtgtaagggaagtaaccacagaacgggaagaaaacaggtttgacattcctgttggtacttgatgtccgacctttttgcgtgaattgcttagaaggcttagcttggactgtgtggccgttcttgttcaccgtgatgagtttgtattggtagattctcactttagttcattattacgttcttgttcaagtttcaacacgagagttccagaacttgaatccctttagacttgtgctctgtccctgatgaaataaaatagcacatctggtgttgagtgtgtgagtgtacacctgaaccgtcatgtttggcagtttctttttttctcagccaggaagttcttgttgtatcctgcaaactgagttagtaagagggtgtttggttcctttagccattcctataaactttagggactaaactttagtccttagaaatactatttggaagacttattttaaggggtgtttggtttctagggactaatgtttagtccctagattttattccatt

SEQ ID NO: 64633 - DNA, 477 bp, Zea Mays
cagaactgcagtagctattcctgtataacatgctagggctggtgcagagccagtacagcaagctggacagcaagggcatcctcaaggggggcgtcaagttcaggaagagcgactagctgatttcctcccatctacgactacgatttgattcatcctgggagtcttgatcgatcgacacttgttctgttctgtacagcgagtaacaaccgctgctgctagctacattctttactgtactgtacttgtgtgatgacatcatatcttcgcgtcgcgtgtactgaagaactacacattgcactaaggttgctttcgtacgtgtacgtgctcatctttcttccttggaaatcactcggatgtgccgccctttgcaaaatgcagcgatcccttgtttttttttctttttcttgaggaactggcttcttttggttttgtatttccggtcgggttcatcaggattcttcaaacaaaaaaaaaaaa

SEQ ID NO: 64634 - DNA, 1086 bp, Zea Mays
cggccagtgattcttccttcctggcgattaaccgatagaggtagctaggcagctagccctagcttggctcgactcgacgtcgacccgacgacctctctccctcgtcgggggtcgtctgcgacgacgtggccagtgcacggacgccaaggagatgagggacctcgccgacaatgactataaatagctccgatctcccccctgctatcgccaccaaccaaactgctccagcagctttagagcttctcaagcttcacagtagcaaccaagctagctagctagctcttcttgctgcctgcttgctcgatcgatcgagctaggtcgtcgaggggtggagtaggcaagctggcagctgctactgctatggcctggtgcgaccgccttgtgtcagcagcatgggcggcattgcccgtggtggagaagagctgccgcggcgccggcgacgacgacgacgacgactacgacgtcgctccggctgcgtaaccgacgggtctccagcggcgttttgcgcatatgcatgcatgcatgcagtcatgactagctatacgtaaaagcgctgatgagtagcacgtacgtgtgctgctgagctggttttgcttggcaaaaaattgtcgacgactgggctgactggaataggtggatgaagaatcaaggaggcataggagtgcaaccagagaaaagctgggagtcatggtggaatagtgagaatgcacatctacgttactcagtattgagttctagaattcttgaagtgttgctctcactaccctttcatgcatcaatgagtttagtctaggaaactgtttgaagcggggaaatttggtgctttggcagcgagaatttggatggagccggcggctgttgcctcatcggcgcgctcacgcgcacgccgcacatcccgggcgtgccgttgcctgacgtagagtcggccgtatatgacatttgtcgtgtatttttacttgttataactctttttcagttggagattcttgtattaagaaagaaaattacctttaataacaagcccttgtataaagatcatcaaaagctatacattattgatgaactattggagattatgaatataat

SEQ ID NO: 64635 - DNA, 1491 bp, Zea Mays
cggccagtgattcttccttcctggcgattaaccgatagaggtagctaggcagctagccctagcttggctcgactcgacgtcgacccgacgacctctctccctcgtcgggggtcgtctgcgacgacgtggccagtgcacggacgccaaggagatgagggacctcgccgacaatgactataaatagctccgatctcccccctgctatcgccaccaaccaaactgctccagcagctttagagcttctcaagcttcacagtagcaaccaagctagctagctagctcttcttgctgcctgcttgctcgatcgatcgagctaggtcgtcgaggggtggagtaggcaagctggcagctgctactgctatggcctggtgcgaccgccttgtgtcagcagcatgggcggcattgcccgtggtggagaagagctgccgcggcgccggcgacgacgacgacgacgactacgacgtcgctccggctgcgtaaccgacgggtctccagcggcgttttgcgcatatgcatgcatgcatgcagtcatgactagctatacgtaaaagcgctgatgagtagcacgtacgtgtgctgctgagctggggctgcttacaggattgcctatggtgatggagctaggtttggaaaagggttctgtgcagctctgagtgattttatcctcatgcaattgcagttagcatcagttttgttcacattctcacttggaacaaaagcacactactacggtcgtactattctccatgggggtgctaaataccggcctacagggcataaatttgttgttttccatgcaagctttactgagaattatcagttgtattccagaagtcattttgtcaaaggagttgagttgatcttccttttgatagtctacaacatctttaggagatcttatgttagcaatatcgtgcatgtgatgatcacatactcaacatggtttatggcagtggcttggctgtttactccttttctttttaacccagctggttttgcttggcaaaaaattgtcgacgactgggctgactggaataggtggatgaagaatcaaggaggcataggagtgcaaccagagaaaagctgggagtcatggtggaatagtgagaatgcacatctacgttactcagtattgagttctagaattcttgaagtgttgctctcactaccctttcatgcatcaatgagtttagtctaggaaactgtttgaagcggggaaatttggtgctttggcagcgagaatttggatggagccggcggctgttgcctcatcggcgcgctcacgcgcacgccgcacatcccgggcgtgccgttgcctgacgtagagtcggccgtatatgacatttgtcgtgtatttttacttgttataactctttttcagttggagattcttgtattaagaaagaaaattacctttaataacaagcccttgtataaagatcatcaaaagctatacattattgatgaactattggagattatgaatataat

SEQ ID NO: 64636 - DNA, 1652 bp, Zea Mays
gcgagattcggccgcgcatgggctggttgtctggcaccgatgccgacgagtcggcgacctacaccacccagcgctcgcgagctcccgccccgacgccggacatgcgcaccccatgctgcgtagaccctgcacgatccgatgtgctctcctcagtagaaagtagaaaggggaggaagaaaaaggaagcggtggggtctttttcccattttccctctgatattatcatgtgcggcccatcacagagggtaactatggtttcttaattgagaagtccttgcgttgcatctggaactttcttgtaattaaacagtttcttccgtggatctgatatttaaaatttatctttctagtaatctgggtttggagagatgtgaggcagcttcggagactagctctcggagactgactttctggtagtgccgtagtggtggtagtctactttacgcgtttctttgaagtataaaaaaaatcatggcattggtggtagctccgaagtttctcggaactaacgcgtaacataagaagtcaatactacaaccttggattctcatcagttgggtacttcttctccaattggaccggcgtgacttaagtagcagtagtacctgaccacacggcgtccttctcttgagcagctggttgttgctcgttctcgcttgggggctgtgtgccgtctcacagcttgacgcctccaccgatcctccacaagttcggggggttgaagaggactggaagggattgatgaaggggtacaagtcaaaatctgcccttaagcagttccaacagatgctcgcaggacacactgagagattttaagtgtcggaagggaaataatgatggagacaatcatggtgagtgctgcttgtggggtgatgaattccctgctgcgcaagcttgccactctactggagaaggaatacatgctactgaaagatgtgaagcacaacattaccttcttaagaaatgagcttgctagcatgaacttgctcctcttcaagctggcagacatagaagatctcgacgtgcaagtaaaggagtggaggaataagatccaagaactcagaacccgtgttgtggaggagagcgatcgccgttatagatacaagctggacgattcaaccttcaggcctgaaatgatggaaatcgaccatcgtctcaaggcgctctatgttgacacaaacaagcttgagggcattgatagcccagtggaacaaatcatacagtggcttacaggaaatgggaaacacgatcaagaactaaacataatggccatagtgggcttcggaggtttaggcaaaactacccttgcaatgcaggtatacaataaattcaaggacaaatttgattgcacagcttttgtgtcagtgtcaagaggccccaacatcaagaaagttttgatggacttacttaaagatgtgggagctgccattgacacaacagatgatgagatgcgtctcatcaacaaactcaaaggacatctcacaaaaaagaggtaaataatcaatcatcattatatgtgaaaagtttcctccaaatgttgttttgctaaaaggaactatatgagtcacgactcacgtagcctatagaggagaggtgaattggatcactttaaaaaccaatctagtgtttagaccaaaataaattggaagccc

SEQ ID NO: 64637 - DNA, 1647 bp, Zea Mays
gcgagattcggccgcgcatgggctggttgtctggcaccgatgccgacgagtcggcgacctacaccacccagcgctcgcgagctcccgccccgacgccggacatgcgcaccccatgctgcgtagaccctgcacgatccgatgtgctctcctcagtagaaagtagaaaggggaggaagaaaaaggaagcggtggggtctttttcccattttccctctgatattatcatgtgcggcccatcacagagggtaactatggtttcttaattgagaagtccttgcgttgcatctggaactttcttgtaattaaacagtttcttccgtggatctgatatttaaaatttatctttctagtaatctgggtttggagagatgtgaggcagcttcggagactagctctcggagactgactttctggtagtgccgtagtggtggtagtctactttacgcgtttctttgaagtataaaaaaaatcatggcattggtggtagctccgaagtttctcggaactaacgcgtaacataagaagtcaatactacaaccttggattctcatcagttgggtacttcttctccaattggaccggcgtgacttaagtagcagtagtacctgaccacacggcgtccttctcttgagcagctggttgttgctcgttctcgcttgggggctgtgtgccgtctcacagcttgacgcctccaccgatcctccacaagggggttgaagaggactggaagggattgatgaaggggtacaagtcaaaatctgcccttaagcagttccaacagatgctcgcaggacacactgagagattttaagtgtcggaagggaaataatgatggagacaatcatggtgagtgctgcttgtggggtgatgaattccctgctgcgcaagcttgccactctactggagaaggaatacatgctactgaaagatgtgaagcacaacattaccttcttaagaaatgagcttgctagcatgaacttgctcctcttcaagctggcagacatagaagatctcgacgtgcaagtaaaggagtggaggaataagatccaagaactcagaacccgtgttgtggaggagagcgatcgccgttatagatacaagctggacgattcaaccttcaggcctgaaatgatggaaatcgaccatcgtctcaaggcgctctatgttgacacaaacaagcttgagggcattgatagcccagtggaacaaatcatacagtggcttacaggaaatgggaaacacgatcaagaactaaacataatggccatagtgggcttcggaggtttaggcaaaactacccttgcaatgcaggtatacaataaattcaaggacaaatttgattgcacagcttttgtgtcagtgtcaagaggccccaacatcaagaaagttttgatggacttacttaaagatgtgggagctgccattgacacaacagatgatgagatgcgtctcatcaacaaactcaaaggacatctcacaaaaaagaggtaaataatcaatcatcattatatgtgaaaagtttcctccaaatgttgttttgctaaaaggaactatatgagtcacgactcacgtagcctatagaggagaggtgaattggatcactttaaaaaccaatctagtgtttagaccaaaataaattggaagccc

SEQ ID NO: 64638 - DNA, 5338 bp, Zea Mays
aagtgtggtggccttaccatggctatcattactgtatcaagcttgctagctagtaaagatcctgacattggatcagtggaacagagtggcaaattctattgggtctacactcgagaataatccagacatagaggtcatgagaaagattctatctatcagttatttgatctaccacattatctgaaaacttgtcttctttatataagtatcttcccagaagattacatcataaatagaaagagtttgatagttagatggattaatgaaggatttgttcaagaagaatatgggaaaaatgcacatgatataggtgaaagttactttaatgagcttatcaatagaagactggtccaaccatggtttatcgatcatgacagtgggagtgtggtgacttgtcgagttcatgacatgattcttgatttaatcataacaaagtctgtagaggagaactttgttactttgttagactctcgagaacttacatcaagtccacagaacaagatacgaagattatctatccaatgtggtgacggagaaccaccagctttggtgctagaagagtcaacatcgctatctcatgtcagatcagtgactatctttgggcatgggaagcaactgccatctctttcaaacatgaaggctcttcgcgtgcttgacctagaaggttgtaagggattagaaaaccaccacctggaaaatatagagaggctaatccacctgaaatacttgaaccttagagaaacagaaatcacagagctcccaaagcaagtggtaaaactccagtacttggatacattggatataagaaacactggggtgagtgagttacctccggctattattcaacttcggcaattggctaggctgttcattgatcttgacaccagattaccatatgaaattggtaaaatgcaaaatttggaagagctgacacatgtcaatacgtgtatgtaccatatgaacttcctgaaaaagctggctcagctaagtaaacttagagagttggagataagttgggatcattacggaacacgagttgataaagtttcttatgcgggtattttgatacattcacttcacatactggccacacataaccttcggtctctcactgttcacatcatggacgaacagagcttccctcttcatacctggcatcctgctccttctgcacttcgaagactccacttcgacatgaacaacaacgaacaatttccaaagttccaacctgggtgggatcacttgtcaatctccaagaactaagcttccgcattacaaaaatgacacaagatgaccttgatgtacttggagatataccggctcttcgctctcttgccttccacatggaaatctgcaccaaaactacaccctgggaagatcctagacccgaggattggcttaggatcagaaaagggtttcaaagtttgaactccttccgcttcgaatgtggcccttgggagtggatgtgtctcatatttgaagctggatcgatgccaaagctcgaaatacttgaccttgaggttccatctgttgagaattacttgattcaaaaacttggttttgatcttggcatcaataacctctcctgcatctccacagttactcttagatttagtaatcggggatgcagccaagaaaatgaagttgccatcaggaaatcagtcagcatacatcgcaatagacctgcactggaaataataagaaaaaaggctcgaagttgaagaggcaaaaggaaaatctggatgggctgatagtaaacctgaaactctggtgaacttcgagttgggacttgtgagcatcagataaagggtgtttcgtacaggaagcaatgcagtgagttgataagagatggcgtgtgatcacaattcacagcacagacgaatccaaggaacctttccgcttttggggtttgaagatgacgcgatggaaattctcttgctgcgattgaagcgtcagccaattagaatcagaattgacacaactccggatcatgtctctctgtgctagaaacgttgattacctgtgcaaaaaaaaaagaagaagaaaaagatatcgttccaggaacaccgtggaacagctccagtgctccaaccaaacaggggcaagaggtgtttccgtgtttggcccagtagtccatgtatcctttgcatgtgaatttctccatttttctaagcgtgaatagattgggagttaggtggtgtttgttttgaagaattaattcattctatataagttgatgcatcatgagtatattctaaattagtatattctaaaaatttagtgtaatgaactcatttatcatattattactaattattagtgtataagaaatgaatcactcatttcattttccaaaccaaacaagaaagtgaaagtgagaaaatgattgttggcctcgttcctcaaaccaaacacgttgtttgtatagagttactggaggaagtttttttagtcttacaaaaaaaaatcaaggttaagagtggatttacctaactgttgcacatgcatgatctgatgaatttgactgcgtctagcttgctactgttaatctattatctcgagttctctgctgactccacattctgtacttgctaatatcgttgattgaacaacctgtacctttatttattaactttcctttggcacttttaggctggatatttcttgccacaaaatcctggttgtagtcttgtattgtagatcagatcgatggtgaggaccatggtggttttgattaatttgtgttataacagtggcattacaagtaaaactcttcttgcgacacttgagcagcatctatataatccccgacgtttatataagcccgtgaactatgaaaaacatatattgcacacataccaaagtttatgaaactggacaaagaaccccctggagtggtattgggaagtggttttgtggtttggctttgctaaatataaataaaaaatattaattataatacataattagtgtcattaaatacttaaatttatttttataataaacgtatctggagatatagatgtttctaatatttgaaagtttgactgaaatcaatatcacatcaacaactattttaaaacagaagaagtatgttatatagaagacataagccaggggctcagagcattttgttgggttccttcactgccccattgcctcttcaataaataggcagggacggtaacgagaaactcggagatgctccctatctctcccagcagggtccgttcgttttgcaccaaatccatatatattggagtggattggattaaatatcaagcaaatcaaaatccttcctagttatttttaatccctccaatccatataagactttgttcgtttacactaatccaactctagattagcatggattaaaattaaatctatgtcacaatctattccccaaaataatccaagactacttaaaattttttattcggttaaacccattatggaatataacccaagggtttgagaatttttttaaactatggaagacagattctatccatagctcattaggcatggaacaaatcatgaagatattgcacaagtttacattagaatccatggatcaaaagaataactagcttgagagacacatggattaattgatggatttaatcccaccatgggattgggtgtaagatatggattcactctatccatacccggattaaatccatggtgggaatttatctcatgtaacctaacaaagcctaagttgagaataactgaacaacctaaagagaaaaagttcttgtccctgtccgtgccaattgcaacgagtaatttttcccctccatgtccccgcgtggggaaattttctcctcggggtccccatctccacttgacatccaacgtatcatcatattatgcatacacatactaatccacatagacaaattaaattacataacacttccattcaacagaactaaagatataattaacttagaatcacaaataactaattcatactaaaggtcatggttttaaactttttttgataactccacaagccaagacgctaaccaaatcagtgcattgtgctactttcacacgtggagcgagtatgggggatagggtaccatccccacccctaccagagccgatgggaatagtcatcatttggaatcatctcatcaatatcttcattcatacactacattggtcgttctaaagaaggagcaaccaaatattctattcgaaggcattaggttttcgaaaagatgtctatagaggtgtacaactttacccatatggacacaaaagatgaaccttcatacccgcacctggatataaggattgcctcaatatttcaacattttacgtactagtgtggccaattgtatatgctcacaaacagtttgaaagataccaaagtaatgactagcttgtcatccccttatgtcatctaaggcctagtttgggtactctagtattgatctcaatctacatgtattgaggtcaatgctagagtagctaaacaaagtctaatgggtatcgatggaatgacatctcatctacccgtgtcattcctcgtgccaaatctgcaagaaagcatatcaccactaactacttggcttgtcgatattatccccagaatgtgggtctatatgggtggtcaatcaaacttaatatcacatgcgtagtccttaactactacacaagctatatatgtcactttcttgagatcccacattcatagtgaccttacctctcgcttgagtaagagaactacaattaattaatcaactcttattacctcaaatcagagttagatctttgattagtcatgtttaaccaaagtggaccaagttacctttataggttcgaagtaattattgaacccgatgtagctcctacatgtgtgagagagtgagctcacttctcacactcaacttctaagattactaagcatatattaatgtgtcaaaaacctcggtgattaagtaatggccatacttatcatctttagacgggtagctccacatttagttgttatgaatcaataacacaaagtagatgaaacacagagaagacagagatttaacgtggaaaacccctccaaagtgaaagggaaaaatcacgggcgccgaccagcaacaatatcactattttttgagtggttatagatcgcaggagatttacaataaggtgacatctaatgtgtattacaagtgtatttatagaggcgaaaccctaaggtgggtagggaacgatccgtaccgcgggggcggagcatcccgcacccccacaaggcgtcggtgacaggtatccgtttttcgctcgccaacttgtccgccttcttcagaatttggatcacactctc

SEQ ID NO: 64639 - DNA, 5324 bp, Zea Mays
aagtgtggtggccttaccatggctatcattactgtatcaagcttgctagctagtaaagatcctgacattggatcagtggaacagagtggcaaattctattgggtctacactcgagaataatccagacatagaggtcatgagaaagattctatctatcagttatttgatctaccacattatctgaaaacttgtcttctttatataagtatcttcccagaagattacatcataaatagaaagagtttgatagttagatggattaatgaaggatttgttcaagaagaatatgggaaaaatgcacatgatataggtgaaagttactttaatgagcttatcaatagaagactggtccaaccatggtttatcgatcatgacagtgggagtgtggtgacttgtcgagttcatgacatgattcttgatttaatcataacaaagtctgtagaggagaactttgttactttgttagactctcgagaacttacatcaagtccacagaacaagatacgaagattatctatccaatgtggtgacggagaaccaccagctttggtgctagaagagtcaacatcgctatctcatgtcagatcagtgactatctttgggcatgggaagcaactgccatctctttcaaacatgaaggctcttcgcgtgcttgacctagaaggttgtaagggattagaaaaccaccacctggaaaatatagagaggctaatccacctgaaatacttgaaccttagagaaacagaaatcacagagctcccaaagcaagtggtaaaactccagtacttggatacattggatataagaaacactggggtgagtgagttacctccggctattattcaacttcggcaattggctaggctgttcattgatcttgacaccagattaccatatgaaattggtaaaatgcaaaatttggaagagctgacacatgtcaatacgtgtatgtaccatatgaacttcctgaaaaagctggctcagctaagtaaacttagagagttggagataagttgggatcattacggaacacgagttgataaagtttcttatgcgggtattttgatacattcacttcacatactggccacacataaccttcggtctctcactgttcacatcatggacgaacagagcttccctcttcatacctggcatcctgctccttctgcacttcgaagactccacttcgacatgaacaacaacgaacaatttccaaagttccaacctgggtgggatcacttgtcaatctccaagaactaagcttccgcattacaaaaatgacacaagatgaccttgatgtacttggagatataccggctcttcgctctcttgccttccacatggaaatctgcaccaaaactacaccctgggaagatcctagacccgaggattggcttaggatcagaaaagggtttcaaagtttgaactccttccgcttcgaatgtggcccttgggagtggatgtgtctcatatttgaagctggatcgatgccaaagctcgaaatacttgaccttgaggttccatctgttgagaattacttgattcaaaaacttggttttgatcttggcatcaataacctctcctgcatctccacagttactcttagatttagtaatcggggatgcagccaagaaaatgaagttgccatcaggaaatcagtcagcatacatcgcaatagacctgcactggaaataataagaaaaaaggctcgaagttgaagaggcaaaaggaaaatctggatgggctgatagtaaacctgaaactctggtgaacttcgagttgggacttgtgagcatcagataaaggaagcaatgcagtgagttgataagagatggcgtgtgatcacaattcacagcacagacgaatccaaggaacctttccgcttttggggtttgaagatgacgcgatggaaattctcttgctgcgattgaagcgtcagccaattagaatcagaattgacacaactccggatcatgtctctctgtgctagaaacgttgattacctgtgcaaaaaaaaaagaagaagaaaaagatatcgttccaggaacaccgtggaacagctccagtgctccaaccaaacaggggcaagaggtgtttccgtgtttggcccagtagtccatgtatcctttgcatgtgaatttctccatttttctaagcgtgaatagattgggagttaggtggtgtttgttttgaagaattaattcattctatataagttgatgcatcatgagtatattctaaattagtatattctaaaaatttagtgtaatgaactcatttatcatattattactaattattagtgtataagaaatgaatcactcatttcattttccaaaccaaacaagaaagtgaaagtgagaaaatgattgttggcctcgttcctcaaaccaaacacgttgtttgtatagagttactggaggaagtttttttagtcttacaaaaaaaaatcaaggttaagagtggatttacctaactgttgcacatgcatgatctgatgaatttgactgcgtctagcttgctactgttaatctattatctcgagttctctgctgactccacattctgtacttgctaatatcgttgattgaacaacctgtacctttatttattaactttcctttggcacttttaggctggatatttcttgccacaaaatcctggttgtagtcttgtattgtagatcagatcgatggtgaggaccatggtggttttgattaatttgtgttataacagtggcattacaagtaaaactcttcttgcgacacttgagcagcatctatataatccccgacgtttatataagcccgtgaactatgaaaaacatatattgcacacataccaaagtttatgaaactggacaaagaaccccctggagtggtattgggaagtggttttgtggtttggctttgctaaatataaataaaaaatattaattataatacataattagtgtcattaaatacttaaatttatttttataataaacgtatctggagatatagatgtttctaatatttgaaagtttgactgaaatcaatatcacatcaacaactattttaaaacagaagaagtatgttatatagaagacataagccaggggctcagagcattttgttgggttccttcactgccccattgcctcttcaataaataggcagggacggtaacgagaaactcggagatgctccctatctctcccagcagggtccgttcgttttgcaccaaatccatatatattggagtggattggattaaatatcaagcaaatcaaaatccttcctagttatttttaatccctccaatccatataagactttgttcgtttacactaatccaactctagattagcatggattaaaattaaatctatgtcacaatctattccccaaaataatccaagactacttaaaattttttattcggttaaacccattatggaatataacccaagggtttgagaatttttttaaactatggaagacagattctatccatagctcattaggcatggaacaaatcatgaagatattgcacaagtttacattagaatccatggatcaaaagaataactagcttgagagacacatggattaattgatggatttaatcccaccatgggattgggtgtaagatatggattcactctatccatacccggattaaatccatggtgggaatttatctcatgtaacctaacaaagcctaagttgagaataactgaacaacctaaagagaaaaagttcttgtccctgtccgtgccaattgcaacgagtaatttttcccctccatgtccccgcgtggggaaattttctcctcggggtccccatctccacttgacatccaacgtatcatcatattatgcatacacatactaatccacatagacaaattaaattacataacacttccattcaacagaactaaagatataattaacttagaatcacaaataactaattcatactaaaggtcatggttttaaactttttttgataactccacaagccaagacgctaaccaaatcagtgcattgtgctactttcacacgtggagcgagtatgggggatagggtaccatccccacccctaccagagccgatgggaatagtcatcatttggaatcatctcatcaatatcttcattcatacactacattggtcgttctaaagaaggagcaaccaaatattctattcgaaggcattaggttttcgaaaagatgtctatagaggtgtacaactttacccatatggacacaaaagatgaaccttcatacccgcacctggatataaggattgcctcaatatttcaacattttacgtactagtgtggccaattgtatatgctcacaaacagtttgaaagataccaaagtaatgactagcttgtcatccccttatgtcatctaaggcctagtttgggtactctagtattgatctcaatctacatgtattgaggtcaatgctagagtagctaaacaaagtctaatgggtatcgatggaatgacatctcatctacccgtgtcattcctcgtgccaaatctgcaagaaagcatatcaccactaactacttggcttgtcgatattatccccagaatgtgggtctatatgggtggtcaatcaaacttaatatcacatgcgtagtccttaactactacacaagctatatatgtcactttcttgagatcccacattcatagtgaccttacctctcgcttgagtaagagaactacaattaattaatcaactcttattacctcaaatcagagttagatctttgattagtcatgtttaaccaaagtggaccaagttacctttataggttcgaagtaattattgaacccgatgtagctcctacatgtgtgagagagtgagctcacttctcacactcaacttctaagattactaagcatatattaatgtgtcaaaaacctcggtgattaagtaatggccatacttatcatctttagacgggtagctccacatttagttgttatgaatcaataacacaaagtagatgaaacacagagaagacagagatttaacgtggaaaacccctccaaagtgaaagggaaaaatcacgggcgccgaccagcaacaatatcactattttttgagtggttatagatcgcaggagatttacaataaggtgacatctaatgtgtattacaagtgtatttatagaggcgaaaccctaaggtgggtagggaacgatccgtaccgcgggggcggagcatcccgcacccccacaaggcgtcggtgacaggtatccgtttttcgctcgccaacttgtccgccttcttcagaatttggatcacactctc

SEQ ID NO: 64640 - DNA, 1753 bp, Zea Mays
tgggggtgtgggtgtcgggcgggccagcagctggacaagcaagcaagcaagcaagccaataatggcgtctcactctcatcggtcccggtctcccacggcgccctgtcccagctgggggcacgcccacgcgccgcggtgccggcggcggctcgtccgggcactgctgctcgtagcggcgctggcgctggcggcggcaggtggtggtggtcgtggctccgcggccgccgccgccgccgccacccagcagaggatcccggccatcttcatgttcggcgactccatcgtggacccgggcaacaacaacaaccggctgacggaggccaaggccaacttcccgccgtacgggcaggacttccccggcggcgtcgccacggggaggttctccaacggcttggtccccggggacctcctagcttccaagctgggcatcaaggagctgctgccgccgttcatcggcaccgacctgcagctcgaggacctgctcaccggcgtggccttcgcctgcggcggcagtggctacgatccgctcacgtccaagctcgcggtaactttacacgtcgtccggaagctagctgcattaacacactcactcctacgtactgactactgaagatgttatctgagactgagaagaataaaaccgttactactactacgtacgtaacaattgagaccgttggtgccgcggccggtgcagacgaccctgtcgagcgccgaccagctccagctgttccaggactacaaggataagctggcggccctggccggggaggaggagatggagcgggtcgtctcgcaggccgtctacttcacggtgatgggggcaaacgacatcgtaaacaactacttcatcctccccatcagacgccaccagtacgacctctcgtcctacgtcgacttcctcgtctcctcggcgatcaacttcacaaggactctgaacgacatgggagctcagaggatagcgttcctcggcgtgccgccactaggatgctgcccgtcacagatcacgctcgcggggagcccgtcgcgccagtgcgatcctgctaggaaccaggcgtcggagctgtacaactccagggtctccaaggagatagagcgcctcaacgcggagcgaagcggttcaggctccaagttcgtctacgtcgacatatactacaacttgctcgacctcatccagaatccagcttcgtttcaaggacgtgagcgagggttgctgcggcagcacggtgctgaacgccgccatcttcatcgcgtaccacagcgcgtgccccaacgcgcccgactacatattctgggacggattccaccccacgcagaaggcatacgacatcgtggtggacaagctcatccagcagaactccaagtacctgatgatgtgaagacagacacttgctgctgcatggcacgagggctctacctttccccgtacaaacacacggcctgacgtcgaccattattcatggacgactccccacatggcagtggcatttgccaaatgtatgatacatattaacatataaatatactatacatgcctgtgcgccaatatcatacataatgattcattagttctagtttgtatgtttttagctccaagtccatcatccttacgacgattattatatgttgtacagaaccaccacagatatgtaactagttgtgacactgacagcaaccagccaaccagaacgcctttacatttgtagaaccgtgtcggtcgggaagtacctcacggtgtgtaaccatatatata

SEQ ID NO: 64641 - DNA, 2102 bp, Zea Mays
ctttcgcctcgtctagacatccacaggcgacctactacgtacatatatatggagcgaaagctcacctcggctgcacactagcagagcagttggtaggacagcaggagaagcctttctctcttcccgttccagtgttgtgtaggccatcgactcgagtgctcgggcagatagaagagagagagagagagaggggggagatgcagcggctcacggggcgggacatgtgggacgtggaggagtgccagagcccgcgcatgggcagcgtcatcctcggcgtcgacggcggcgccagcaacaccgtctgcgtctgcatccccgccgccatgcccttcaacgacccgctccccgtcctctcccgcaccgtcgccggctgctccaaccacaactccgtcggagaggacagggcaagggagacgctggagagggtgatgtcgcaggcgctgctcaaggcgcgccggcgacggtcaaatgtctgcgccgtctgcttggccgtagcaggcgtcaaccatccagtcgatcagcagagaatgctggactggctcagggacatatttccaagccatgtcaagctgttcgtggagaacgacgcggtggcggcgctggccagtggaaccatgggcaagctgcacggatgtgtgctgatcgcagggacagggaccatagcgtatgggttcaccagtgatggtagggaagctcgagcagcaggtgcagggccagttctgggtgactggggcagtggctatgggatttctgcccaggcattgacagcagtggtgagagcttatgatggccgaggccccgaaacagtgcttaccaacaacatccttgacttccttggactggcatcgccagatgaattgatagggtggacatatgaagaccaatcatgggctcgtatcgctgaccttcttccagttgtggtagaatcagctgaaagtggtgatgaggtggcaaacaagatcctacacaattcagttggggaactagcttccagtgtcaaggctgtagtgcaaaggcttgaccttggtggtgaaggtgacacaagaatactctgattttttttccaattgaaatacatgtgtgtgtaatatagttttgcccgtaaaaatgagttgtcgcataaaaaatgaattggtaaagaaaacagtggttatatagaactaaacaaaccctgaaagttgcatttactagaatgcctcatggaagattttcttaagatgtttatatttcacagatggcaagcatccatttccacttgttatggttggtaaagtccttgaggcaaacaaaaagtgggacattgggaaagaagtgatagattgtgttaccaagaattacccaggtgcctatccaatacatcccaaggtgagcataatataataaacattcttcagattaaacaatcttcaagaactaattagctgaataatggaaacaaatatgtcagagaagattttgttgaaatgaggaagctaaaacttagctgtgaatatgcttgaacaatatccgatatacacagtttcaaactgacacatcttcatactacaaaatttgccaaattagtattcatgaggtctgtatctgattgtacctgcaggtggagccagctgttggtgcagctttattagcatggaatgctatagcaagcgaattagatggcgacattagaactgttcaataatggaacatcctgcaaattattgtatattatgttttactgctgaatcatcacctagccttttgcatttgctgtaacaggttgcttgaaaaggttgtaatcttctcgagaaagaaaggtttacaacaaggaatttgatttagcggtagtttctttcgataaaaatagagtgacaggagagaaaatgtgtgtcaatacatgagatttgttttggtgaaatttgaaatagtcatcaaatctgtgatagcaagcatgatggtaagcaaagtaactccgcttacatcagtttctgtcatctgttgctcatcaaccaagcaatggcaacagtaagttatagcaataagccatgctgtcatgtacggcaggccatacgtcaggcaacgacgtgcccgtgacatccggcgtgcgcgtgagcgcgctgaac

SEQ ID NO: 64642 - DNA, 2229 bp, Zea Mays
aaaacagttacgagtgcttgaagaaggatagccactatataacagaagggagcatatctagtgcacatattgaatcacgtccacccatctcagatccaagaaagggggctctttgaaaaaaaaaagggtggagatggtggtggtgttctatgcaaaatatacaagacaggaatggaggtgtgggaggacgttggatccattgttttaaaggcgtcgcctaggcgtccagacgcccgaaagatccaaggcgtccccgtcgcctaggtaagaatcagcaagagggcatagggcagaggggaaggggcggcgccgtttcagggcggcagcgccgaatcgggagcggcggaggccaaatccagggcagtggaggctgaatcgggggcggcgacatccaaattgttggcggcagcgtccgaatcgtcggctgcggcggtgaatctgagacggcatcggctcaatcgagggtggcagcagctggatggtgggggagagaggcaacctagggttgccagaggaagaactatatgggctggctggtgggctgggcctcctatcccttcctttttttcttttcctttttttctttttcttcctcctccatggggttgttttgctgattctcaggttgataaggcgtcgccttcctcgccctaggcgtcgcctaggtgtctagacggtggtccagtgccttatctcgtcttgccgccttaagaaccatggttggatctaaaatgcatgaccacgattcaatatgtgtaccatgcgcacaccaaatggtcatgtgcatcaaacgttcatgtgtgcctgatatgttctcataacagaactacagaaggcaaaataaaagatgatcaagctaaatatcccctctacatgtgaccgtattgaacatgttttaacaacaaattgtacgactcatgcgaacaacaacaacaacaacaaaggcctttaagtcagtcggttggggtaggctagagttgatgaaccaccaagaaaaaaacaagagtacataaggcattaatagaggaaaaaatataatcaaaagaaaatggttttataatcaacaagaatacaaaaattatagtaaaaaagaatggtattaagacaaaacctgaactcaaacagaaacatcaagaagaaaacatgccataaagagggaaaagacgtcagttcagtgcatactattctgttaactccttaccctggtaaggacaccatgtaagatggaccacgttttgaatgtccgctttggatgatagaagtagaacaaggctttttgttagttcaaccgatgttagtgccttctgcaaatttgagacggctaaaaaaactctgagaatggaacaccaaacacagcacccctgaaactactgtagtcaccactcaccacaattttacatcctataggtaatcaattaatagcagtctgcctaactgttgttctcgagaatatacaatatcctttatatgtggcacatacatgtcacccacctcaaagctagtaaacattcagtttcatcatatatgatggagagttggagataatggacaacccagatgagcaatgaacaaccagagtcagctaccatggcaggacaccaggccaacatttttgtcaatcaccgatcagatttgcatatcttcatggtcccaaaatctaagacagtaattcacaaaaacccatatgcaaaagtttcaaaagactagaaatgattaggatgcaaatgtgatgcgcagtcaaaactcagaagattctgctacacatattttttaaatggaatggagtgaatcagacaccaagaaatttggtattcacaaagacctaaccaagcttctcggcacaacttaaagaaagctgcaccaggagtaccaatgcaaaggcctcatcataagtacctgtcacatttcatcattttcatctccattccacatgtacgattactacagcaaattaaaccgctggtgttttaaatgcagaaaaacaggaggaacaagagttgcaccttgattaatgctgaagaaataattgtgatgtagaataaaatgttgaaaggcctattgtgcagttagaggctataatttagtgttggaatacaaataacaatgtcttttacatgtcatttgagatcagttccgtacctgtgatctgaactttgtcccctggttttgagccacacaggaagttactgcagacacctctctttgaggggtcttcctctccagtttcag

SEQ ID NO: 64643 - DNA, 5786 bp, Zea Mays
cacgcccttgggcccctgcggcggccctgccccactgtccactggccttgtgggcggggtacttcggctctcttcggatacttctccggctcttctctctctctctctctcccccccgtcaccaacgcccatgcttctatgaccgagagactccgggcttgaccaggacggatttgagcgaatatcttgaggttcatattgttgctggaggggaatggaaactccatcagaggccttgaagccggcggaggctaaaccggcgaagccacggccagtggcgcccacgggcaggttcgccttggggactgcttcgtccattaaaaagcgagctgatggttcggctccggcggaggtgggtgtgccccggtcttccttgatgaagtctacctcgtcgctgaacgccagttcggcgacgagaagaagcagcacggggactgctgggaagcaacaggacaatgggagctcagctgctgctaagaagtctagtcctacgctgtcggatggcgcgaggaagactaaactggtgtcagctcccgctgctggctcaaaaccagcagtggagaagaaaacatccttggtcgagaggacaggtgccgatttggccaggaagcctgctgttaaggcatccccaacttcaacactgaagaaggtccagtcaaagacagagagctccaatggcagcagtggcagcaccaggagagtgtcctccaatgcttctgtgccatcgccacgttccgtcacaagcaatgcagcaaggaaactgggtactcaagcatcatctgctgcgtctaatcggcggaagagctcaaccgcagatagccgtgattcgagattcatgatgctgccacaggtggatttgaaggctagcgatgaagtgaggctggattcaagaggtcatcgagttcgtagtctcaagcagctgaggttatcacatgctcttgagtttgtgtatctgagggacaaccttttatcaagtttggagggcattgagattctcaagggggtaaaggttcttgatttgagttttaatgattttaagctccctgggtttgagcctcttgggaactgtgttgtcctccagcaactgtatcttgctggaaatcaaataacttcacttgctagccttcctgaacttcctaacttggagttcctttctattgctcaaaacaggctaaagtcagtttgtatggctcgacagcctcgacttcaagtgttagcagctagcagaaacaaaatatcaactttgaagggatttccacattttccttctctagagcatttgcgtgttgaggagaatccactacttgagatgccacacttggaagctgcttctatcctacttataggtcctactttgaagaagttcaatgaccgagatctgaaccccaacgaggctgaggtagctaagcaatatcctgctcatacagctatttgcattcgggatggttgggaattttgctcccctgaacttgctgctgattcaacattttctttcctacttgagcaatggaataataagctgcctcaaggttacatggtgaataaagcttatgttgaccatccgtttgaagaggatccatgccattgccattttagattcacaaatcttggtggtgagggtgagctagtcctcaaataccaatggtttctgggtggcaaaacaccaacagattttgttgctatccctggtgcatcgagcgaggtgtactggccaaaacgtgaggatgttggaagatgtttgaaagttgaatgcactccaatagtaaatggtgcagaattttcgcccgtttttgctgtatctttacctgtttctccaggtactggatgtccaaaggtcatcaatctggcagtcagtggtgaagtagtggaaggaaacatactcagtggagttcctgaaattgcctggtgtggtggaacacctgggaaaggcgttgcaagttggttaaggcggaggtggaacggcaatgctgtagtaattgatggagctgaggggatggaatatcagttgacagtcaatgatatcaattcaagtttggtatttatgtacacccctgttacagacgagggtgtcaagggagagccgcaatgtacaatgacagattttgtgaaggctgcaacaccatcagtcagcaatgtgcatgttctgggagatattgttgaagataacattatcgtagggaaaggaaaatacttcggtggcagagagggactaagtaaaatccggtggtttagagagaaggaaaatggtgaatttcttcttgtgctatcagacagcatggagtatacactaaccaaggaggacgtggggagacacctcaaatttgtatatatccctgttaaccttgaaggtcaggagggtgaatctgcttgtgcgataacagatgtagttaagaaagcccctccaaaagtattcaatctaaagattgttggggaatctatggaaggaagcaagatatctgccagtgctactgttacaggtggaactgaagggtccagcagggttcaatggtacaaggcatcttcctctgaatttaagaatgaacatgagcttgaagcccttactccgtcacgagtttctaagacattccgcattcctcttggtgctgttggatattatatcgttgcaaagtttacacctgtggcacctgatggtgaagtcggtgaaccagcctatgctacatcagatggccttgtggaaacactaccacccagcctgaacttcttaacagtcactggtgaattctctgagggtcagatattaacagcatcatatgggtatatcggaggacatgaaggaaatagtttatacagctggcaccttcatgaggctgaagatgacgaaggcactccactttcagaggcaaccggtttgctacaatactgtgttacaaaggaagctgttggaaagtttgtttctttcaaatgcacccctgtcagagatgatgatattgttggtgaggcaagatcattcataggaaaggacagagttactccagggatgccgacattactttctcttgaagtaactggtgatgcaattgaaggaacaactatgtttgccagtaaaaggtattggggaggagaagaaggggacacaatgttccgctggatactgacaaattctgatggaaccgagaaagaaattgaaggagcaacaagttcatcatacaccttgaaatgcaatgacattggcttctacatatctgtcttgtgcaagcctgttagaaatgatggagttgatggttctttagtgtcgactgaagcgattggtcctattataccagggccaccaacatgtcaatctcttgaactagctggctctatggttgaaggtggccgtttgacctttcatgctgtgtatacaggaggtttgcggggaagttgcatccaagaatggttcagattacatgatgatgggcacaaggacaagttgactgctgatgaatgtctagaccttgatctagctgatatcgattgccggattgaacttatgtatacacctgtacgagaagacggagtgcacgggttaccaaggagtgttacttctgatacaatcttacctggggagcccaagggtgtcaatcttattctacctgagtgttttgaggacaatgaaatttctcccatcaaaacctatttcggtggcaaggaaggcactggcaaatatacatggtttcgaaataaagagaaacttgataacttggaatttgatctggttgctgaatcatcagaagttgttggagaaaccttaaaatataagccttcattgaatgatgttagttcctatctgattctttattgggttcctacacggcgtgatggaaaggttggtgatcctttgatggctatctctgatgatccggtcatggcagcttttccatctgtttcggatgttcacttagagcagaaaagttcagatgtatattgtggactaggcatctattatggtggatatgagggattaagcttgtatagatggtacagggaatctagtgatggaactaggcttcacatagatggtgctgattcagtcacatacgaagtgacagatgctgattacagctgccgtctactgtttggttatactcctgttcgttcagatgggataagtggagaagaaaaactctctgaaccatctgatgtaattttgccagaactactcaaaatcgagacactcaatttcaaggggaatcaggttgaaagagaaacactgactgctgctgaacaaattccgtacagtgagattcaacaacatatatggaaaaattataagaaagagatgaaatatcaatggtttatttccaatgaatcaggaggcgatcagtcttttgaaccattggcaacccagtgttctcgctcatacaaagtgcgctttgaggatattggtcgttgcctgaaatgcgaatgctttgtcactgatgtatttggacgatctagtgaattggtatccgctgtgactgctcctattttgccaggaaggcctaaaattgaaaagctggagattgaaggaagaggtttccacactgacctatatgccgttcagggtacctatagcggaggcaaagaaggcaagagtaaaatacaatggctcagatcgatggttggaagccctgatcttatctccatacctggcgaaactggaagaacgtatgaagctaatgttgatgatgtagggtataggcttgttgcaatttatacacctgtaagagaggatggagttgagggacaacctgtttctgtttcaacagaacagattgcagttgagcctgaactttacagggaagtgaaacagaagctcgatgatggttcagtcaaatttgaggttctgtgtgacaaggaccgaacacccaaaaaggcacaagtaatgggccatttggagcggagggttttggaagtcaaccgaaagaggataaaagtagtaaagcctggatctaagacatcattcccgagtactgaagtacgaggaacctacgctccaccgttccatgtcgagctgtatcgcaatgaccagcaccgcttcaagattgttgtcgacggtgatactgaagttgacttaatggtgcaaacacggcacatgcgagaccgcatcatcctcacgatcagaggcctcgcccagaagttcaacagcacctccctcaacacacttctcaggatcgagtcatgatagacctgacagtgtaaaaaccaactattacgggaagctgtaccccttgttccgattggttagagtgcgtggttttagtaggattcgtgacatgccagccttttgtgtgtatgggtgtgggacgggccgagcgtgttggattacaattttttccctgacacatctctcaaatcagagcagcatcagctggttgctctgactggtgccgtcgtgcgtcatgaaatgtacatagggtggttagagcgagaaagagagtggtgtttcttggtgctgtatttattatgcactggttgggttgggttttttcgactgccattctcatactaagtattggttctttcttttttcggtcgttgggtttgcatatacttgtaccgacaacacagcttggggtgattgggcgagtgctgttcagaatgcctggtccacacttgtgtacgactggaatcctacggtggcgtattcacatgctgttttatggtgcaaatgtaaattcatctgttcataaacgagaatcaaaatcgtcggccacgtgtattcgtcgtattcgtaccgatgtatactaccttataaaccagtactaatctcacggtggcatcaattatcttcctctgtttcacaa

SEQ ID NO: 64644 - DNA, 5925 bp, Zea Mays
ctctctctctcccccccgtgcgtttcccttccccttctctcctctcctgcctgttcggctccccacactgcagcttcccttccctctcacctcggtgaccgcattgggtgctcgcggggcggaagaggaggcgcgggtcgaggtcggctagcctaacccgtccggccgtaccgaggctggtgggatccgctcgccggccggcaccggggaggtgagccacccccacgtgctcgccgcgcggttaaactcactggtggtcaccaacgcccatgcttctatgaccgagagactccgggcttgaccaggacggatttgagcgaatatcttgaggttcatattgttgctggaggggaatggaaactccatcagaggccttgaagccggcggaggctaaaccggcgaagccacggccagtggcgcccacgggcaggttcgccttggggactgcttcgtccattaaaaagcgagctgatggttcggctccggcggaggtgggtgtgccccggtcttccttgatgaagtctacctcgtcgctgaacgccagttcggcgacgagaagaagcagcacggggactgctgggaagcaacaggacaatgggagctcagctgctgctaagaagtctagtcctacgctgtcggatggcgcgaggaagactaaactggtgtcagctcccgctgctggctcaaaaccagcagtggagaagaaaacatccttggtcgagaggacaggtgccgatttggccaggaagcctgctgttaaggcatccccaacttcaacactgaagaaggtccagtcaaagacagagagctccaatggcagcagtggcagcaccaggagagtgtcctccaatgcttctgtgccatcgccacgttccgtcacaagcaatgcagcaaggaaactgggtactcaagcatcatctgctgcgtctaatcggcggaagagctcaaccgcagatagccgtgattcgagattcatgatgctgccacaggtggatttgaaggctagcgatgaagtgaggctggattcaagaggtcatcgagttcgtagtctcaagcagctgaggttatcacatgctcttgagtttgtgtatctgagggacaaccttttatcaagtttggagggcattgagattctcaagggggtaaaggttcttgatttgagttttaatgattttaagctccctgggtttgagcctcttgggaactgtgttgtcctccagcaactgtatcttgctggaaatcaaataacttcacttgctagccttcctgaacttcctaacttggagttcctttctattgctcaaaacaggctaaagtcagtttgtatggctcgacagcctcgacttcaagtgttagcagctagcagaaacaaaatatcaactttgaagggatttccacattttccttctctagagcatttgcgtgttgaggagaatccactacttgagatgccacacttggaagctgcttctatcctacttataggtcctactttgaagaagttcaatgaccgagatctgaaccccaacgaggctgaggtagctaagcaatatcctgctcatacagctatttgcattcgggatggttgggaattttgctcccctgaacttgctgctgattcaacattttctttcctacttgagcaatggaataataagctgcctcaaggttacatggtgaataaagcttatgttgaccatccgtttgaagaggatccatgccattgccattttagattcacaaatcttggtggtgagggtgagctagtcctcaaataccaatggtttctgggtggcaaaacaccaacagattttgttgctatccctggtgcatcgagcgaggtgtactggccaaaacgtgaggatgttggaagatgtttgaaagttgaatgcactccaatagtaaatggtgcagaattttcgcccgtttttgctgtatctttacctgtttctccaggtactggatgtccaaaggtcatcaatctggcagtcagtggtgaagtagtggaaggaaacatactcagtggagttcctgaaattgcctggtgtggtggaacacctgggaaaggcgttgcaagttggttaaggcggaggtggaacggcaatgctgtagtaattgatggagctgaggggatggaatatcagttgacagtcaatgatatcaattcaagtttggtatttatgtacacccctgttacagacgagggtgtcaagggagagccgcaatgtacaatgacagattttgtgaaggctgcaacaccatcagtcagcaatgtgcatgttctgggagatattgttgaagataacattatcgtagggaaaggaaaatacttcggtggcagagagggactaagtaaaatccggtggtttagagagaaggaaaatggtgaatttcttcttgtgctatcagacagcatggagtatacactaaccaaggaggacgtggggagacacctcaaatttgtatatatccctgttaaccttgaaggtcaggagggtgaatctgcttgtgcgataacagatgtagttaagaaagcccctccaaaagtattcaatctaaagattgttggggaatctatggaaggaagcaagatatctgccagtgctactgttacaggtggaactgaagggtccagcagggttcaatggtacaaggcatcttcctctgaatttaagaatgaacatgagcttgaagcccttactccgtcacgagtttctaagacattccgcattcctcttggtgctgttggatattatatcgttgcaaagtttacacctgtggcacctgatggtgaagtcggtgaaccagcctatgctacatcagatggccttgtggaaacactaccacccagcctgaacttcttaacagtcactggtgaattctctgagggtcagatattaacagcatcatatgggtatatcggaggacatgaaggaaatagtttatacagctggcaccttcatgaggctgaagatgacgaaggcactccactttcagaggcaaccggtttgctacaatactgtgttacaaaggaagctgttggaaagtttgtttctttcaaatgcacccctgtcagagatgatgatattgttggtgaggcaagatcattcataggaaaggacagagttactccagggatgccgacattactttctcttgaagtaactggtgatgcaattgaaggaacaactatgtttgccagtaaaaggtattggggaggagaagaaggggacacaatgttccgctggatactgacaaattctgatggaaccgagaaagaaattgaaggagcaacaagttcatcatacaccttgaaatgcaatgacattggcttctacatatctgtcttgtgcaagcctgttagaaatgatggagttgatggttctttagtgtcgactgaagcgattggtcctattataccagggccaccaacatgtcaatctcttgaactagctggctctatggttgaaggtggccgtttgacctttcatgctgtgtatacaggaggtttgcggggaagttgcatccaagaatggttcagattacatgatgatgggcacaaggacaagttgactgctgatgaatgtctagaccttgatctagctgatatcgattgccggattgaacttatgtatacacctgtacgagaagacggagtgcacgggttaccaaggagtgttacttctgatacaatcttacctggggagcccaagggtgtcaatcttattctacctgagtgttttgaggacaatgaaatttctcccatcaaaacctatttcggtggcaaggaaggcactggcaaatatacatggtttcgaaataaagagaaacttgataacttggaatttgatctggttgctgaatcatcagaagttgttggagaaaccttaaaatataagccttcattgaatgatgttagttcctatctgattctttattgggttcctacacggcgtgatggaaaggttggtgatcctttgatggctatctctgatgatccggtcatggcagcttttccatctgtttcggatgttcacttagagcagaaaagttcagatgtatattgtggactaggcatctattatggtggatatgagggattaagcttgtatagatggtacagggaatctagtgatggaactaggcttcacatagatggtgctgattcagtcacatacgaagtgacagatgctgattacagctgccgtctactgtttggttatactcctgttcgttcagatgggataagtggagaagaaaaactctctgaaccatctgatgtaattttgccagaactactcaaaatcgagacactcaatttcaaggggaatcaggttgaaagagaaacactgactgctgctgaacaaattccgtacagtgagattcaacaacatatatggaaaaattataagaaagagatgaaatatcaatggtttatttccaatgaatcaggaggcgatcagtcttttgaaccattggcaacccagtgttctcgctcatacaaagtgcgctttgaggatattggtcgttgcctgaaatgcgaatgctttgtcactgatgtatttggacgatctagtgaattggtatccgctgtgactgctcctattttgccaggaaggcctaaaattgaaaagctggagattgaaggaagaggtttccacactgacctatatgccgttcagggtacctatagcggaggcaaagaaggcaagagtaaaatacaatggctcagatcgatggttggaagccctgatcttatctccatacctggcgaaactggaagaacgtatgaagctaatgttgatgatgtagggtataggcttgttgcaatttatacacctgtaagagaggatggagttgagggacaacctgtttctgtttcaacagaacagattgcagttgagcctgaactttacagggaagtgaaacagaagctcgatgatggttcagtcaaatttgaggttctgtgtgacaaggaccgaacacccaaaaaggcacaagtaatgggccatttggagcggagggttttggaagtcaaccgaaagaggataaaagtagtaaagcctggatctaagacatcattcccgagtactgaagtacgaggaacctacgctccaccgttccatgtcgagctgtatcgcaatgaccagcaccgcttcaagattgttgtcgacggtgatactgaagttgacttaatggtgcaaacacggcacatgcgagaccgcatcatcctcacgatcagaggcctcgcccagaagttcaacagcacctccctcaacacacttctcaggatcgagtcatgatagacctgacagtgtaaaaaccaactattacgggaagctgtaccccttgttccgattggttagagtgcgtggttttagtaggattcgtgacatgccagccttttgtgtgtatgggtgtgggacgggccgagcgtgttggattacaattttttccctgacacatctctcaaatcagagcagcatcagctggttgctctgactggtgccgtcgtgcgtcatgaaatgtacatagggtggttagagcgagaaagagagtggtgtttcttggtgctgtatttattatgcactggttgggttgggttttttcgactgccattctcatactaagtattggttctttcttttttcggtcgttgggtttgcatatacttgtaccgacaacacagcttggggtgattgggcgagtgctgttcagaatgcctggtccacacttgtgtacgactggaatcctacggtggcgtattcacatgctgttttatggtgcaaatgtaaattcatctgttcataaacgagaatcaaaatcgtcggccacgtgtattcgtcgtattcgtaccgatgtatactaccttataaaccagtactaatctcacggtggcatcaattatcttcctctgtttcacaa

SEQ ID NO: 64645 - DNA, 6297 bp, Zea Mays
gtgcgtttcccttccccttctctcctctcctgcctgttcggctccccacactgcagcttcccttccctctcacctcggtgaccgcattgggtgctcgcggggcggaagaggaggcgcgggtcgaggtcggctagcctaacccgtccggccgtaccgaggctggtgggatccgctcgccggccggcaccggggaggtgagccacccccacgtgctcgccgcgcggttaaactcactggtggtcaccaacgcccatgcttctatgaccgagagactccgggcttgaccaggacggatttgagcgaatatcttgaggttcatattgttgctggaggggaatggaaactccatcagaggccttgaagccggcggaggctaaaccggcgaagccacggccagtggcgcccacgggcaggttcgccttggggactgcttcgtccattaaaaagcgagctgatggttcggctccggcggaggtgggtgtgccccggtcttccttgatgaagtctacctcgtcgctgaacgccagttcggcgacgagaagaagcagcacggggactgctgggaagcaacaggacaatgggagctcagctgctgctaagaagtctagtcctacgctgtcggatggcgcgaggaagactaaactggtgtcagctcccgctgctggctcaaaaccagcagtggagaagaaaacatccttggtcgagaggacaggtgccgatttggccaggaagcctgctgttaaggcatccccaacttcaacactgaagaaggtccagtcaaagacagagagctccaatggcagcagtggcagcaccaggagagtgtcctccaatgcttctgtgccatcgccacgttccgtcacaagcaatgcagcaaggaaactgggtactcaagcatcatctgctgcgtctaatcggcggaagagctcaaccgcagatagccgtgattcgagattcatgatgctgccacaggtggatttgaaggctagcgatgaagtgaggctggattcaagaggtcatcgagttcgtagtctcaagcagctgaggttatcacatgctcttgagtttgtgtatctgagggacaaccttttatcaagtttggagggcattgagattctcaagggggtaaaggttcttgatttgagttttaatgattttaagctccctgggtttgagcctcttgggaactgtgttgtcctccagcaactgtatcttgctggaaatcaaataacttcacttgctagccttcctgaacttcctaacttggagttcctttctattgctcaaaacaggctaaagtcagtttgtatggctcgacagcctcgacttcaagtgttagcagctagcagaaacaaaatatcaactttgaagggatttccacattttccttctctagagcatttgcgtgttgaggagaatccactacttgagatgccacacttggaagctgcttctatcctacttataggtcctactttgaagaagttcaatgaccgagatctgaaccccaacgaggctgaggtagctaagcaatatcctgctcatacagctatttgcattcgggatggttgggaattttgctcccctgaacttgctgctgattcaacattttctttcctacttgagcaatggaataataagctgcctcaaggttacatggtgaataaagcttatgttgaccatccgtttgaagaggatccatgccattgccattttagattcacaaatcttggtggtgagggtgagctagtcctcaaataccaatggtttctgggtggcaaaacaccaacagattttgttgctatccctggtgcatcgagcgaggtgtactggccaaaacgtgaggatgttggaagatgtttgaaagttgaatgcactccaatagtaaatggtgcagaattttcgcccgtttttgctgtatctttacctgtttctccaggtactggatgtccaaaggtcatcaatctggcagtcagtggtgaagtagtggaaggaaacatactcagtggagttcctgaaattgcctggtgtggtggaacacctgggaaaggcgttgcaagttggttaaggcggaggtggaacggcaatgctgtagtaattgatggagctgaggggatggaatatcagttgacagtcaatgatatcaattcaagtttggtatttatgtacacccctgttacagacgagggtgtcaagggagagccgcaatgtacaatgacagattttgtgaaggctgcaacaccatcagtcagcaatgtgcatgttctgggagatattgttgaagataacattatcgtagggaaaggaaaatacttcggtggcagagagggactaagtaaaatccggtggtttagagagaaggaaaatggtgaatttcttcttgtgctatcagacagcatggagtatacactaaccaaggaggacgtggggagacacctcaaatttgtcaggagggtgaatctgcttgtgcgataacagatgtagttaagaaagcccctccaaaagtattcaatctaaagattgttggggaatctatggaaggaagcaagatatctgccagtgctactgttacaggtggaactgaagggtccagcagggttcaatggtacaaggcatcttcctctgaatttaagaatgaacatgagcttgaagcccttactccgtcacgagtttctaagacattccgcattcctcttggtgctgttggatattatatcgttgcaaagtttacacctgtggcacctgatggtgaagtcggtgaaccagcctatgctacatcagatggccttgtggaaacactaccacccagcctgaacttcttaacagtcactggtgaattctctgagggtcagatattaacagcatcatatgggtatatcggaggacatgaaggaaatagtttatacagctggcaccttcatgaggctgaagatgacgaaggcactccactttcagaggcaaccggtttgctacaatactgtgttacaaaggaagctgttggaaagtttgtttctttcaaatgcacccctgtcagagatgatgatattgttggtgaggcaagatcattcataggaaaggacagagttactccaggtgcttctgttttcgttttcttgaaaaaattacgacactgaagatattattctgtcacaaaagagacactcctctttgtgtgcttgtatggatgacaaaaaaacatgtttggaaattaagtgatgcatgagcctggattatgtatggaaatatggatatcacacatacttttgcattatggatatcacacataatatgtgacgaactacaaagatgtgaaacagaaaagaagtacaacaattgtagcacactcctgagggcctgtttgggaactcttcctcaaaaccacagttttataatgccacaatttattgtatgccattgacatagccatggtatattttacatcagtccaatctgatacctatttggagacacaatatttcagttgtagtgtagaagagaagactgcagggatgccgacattactttctcttgaagtaactggtgatgcaattgaaggaacaactatgtttgccagtaaaaggtattggggaggagaagaaggggacacaatgttccgctggatactgacaaattctgatggaaccgagaaagaaattgaaggagcaacaagttcatcatacaccttgaaatgcaatgacattggcttctacatatctgtcttgtgcaagcctgttagaaatgatggagttgatggttctttagtgtcgactgaagcgattggtcctattataccagggccaccaacatgtcaatctcttgaactagctggctctatggttgaaggtggccgtttgacctttcatgctgtgtatacaggaggtttgcggggaagttgcatccaagaatggttcagattacatgatgatgggcacaaggacaagttgactgctgatgaatgtctagaccttgatctagctgatatcgattgccggattgaacttatgtatacacctgtacgagaagacggagtgcacgggttaccaaggagtgttacttctgatacaatcttacctggggagcccaagggtgtcaatcttattctacctgagtgttttgaggacaatgaaatttctcccatcaaaacctatttcggtggcaaggaaggcactggcaaatatacatggtttcgaaataaagagaaacttgataacttggaatttgatctggttgctgaatcatcagaagttgttggagaaaccttaaaatataagccttcattgaatgatgttagttcctatctgattctttattgggttcctacacggcgtgatggaaaggttggtgatcctttgatggctatctctgatgatccggtcatggcagcttttccatctgtttcggatgttcacttagagcagaaaagttcagatgtatattgtggactaggcatctattatggtggatatgagggattaagcttgtatagatggtacagggaatctagtgatggaactaggcttcacatagatggtgctgattcagtcacatacgaagtgacagatgctgattacagctgccgtctactgtttggttatactcctgttcgttcagatgggataagtggagaagaaaaactctctgaaccatctgatgtaattttgccagaactactcaaaatcgagacactcaatttcaaggggaatcaggttgaaagagaaacactgactgctgctgaacaaattccgtacagtgagattcaacaacatatatggaaaaattataagaaagagatgaaatatcaatggtttatttccaatgaatcaggaggcgatcagtcttttgaaccattggcaacccagtgttctcgctcatacaaagtgcgctttgaggatattggtcgttgcctgaaatgcgaatgctttgtcactgatgtatttggacgatctagtgaattggtatccgctgtgactgctcctattttgccaggaaggcctaaaattgaaaagctggagattgaaggaagaggtttccacactgacctatatgccgttcagggtacctatagcggaggcaaagaaggcaagagtaaaatacaatggctcagatcgatggttggaagccctgatcttatctccatacctggcgaaactggaagaacgtatgaagctaatgttgatgatgtagggtataggcttgttgcaatttatacacctgtaagagaggatggagttgagggacaacctgtttctgtttcaacagaacagattgcagttgagcctgaactttacagggaagtgaaacagaagctcgatgatggttcagtcaaatttgaggttctgtgtgacaaggaccgaacacccaaaaaggcacaagtaatgggccatttggagcggagggttttggaagtcaaccgaaagaggataaaagtagtaaagcctggatctaagacatcattcccgagtactgaagtacgaggaacctacgctccaccgttccatgtcgagctgtatcgcaatgaccagcaccgcttcaagattgttgtcgacggtgatactgaagttgacttaatggtgcaaacacggcacatgcgagaccgcatcatcctcacgatcagaggcctcgcccagaagttcaacagcacctccctcaacacacttctcaggatcgagtcatgatagacctgacagtgtaaaaaccaactattacgggaagctgtaccccttgttccgattggttagagtgcgtggttttagtaggattcgtgacatgccagccttttgtgtgtatgggtgtgggacgggccgagcgtgttggattacaattttttccctgacacatctctcaaatcagagcagcatcagctggttgctctgactggtgccgtcgtgcgtcatgaaatgtacatagggtggttagagcgagaaagagagtggtgtttcttggtgctgtatttattatgcactggttgggttgggttttttcgactgccattctcatactaagtattggttctttcttttttcggtcgttgggtttgcatatacttgtaccgacaacacagcttggggtgattgggcgagtgctgttcagaatgcctggtccacacttgtgtacgactggaatcctacggtggcgtattcacatgctgttttatggtgcaaatgtaaattcatctgttcataaacgagaatcaaaatcgtcggccacgtgtattcgtcgtattcgtaccgatgtatactaccttataaaccagtactaatctcacggtggcatcaattatcttcctctgtttcacaa

SEQ ID NO: 64646 - DNA, 5888 bp, Zea Mays
gtgcgtttcccttccccttctctcctctcctgcctgttcggctccccacactgcagcttcccttccctctcacctcggtgaccgcattgggtgctcgcggggcggaagaggaggcgcgggtcgaggtcggctagcctaacccgtccggccgtaccgaggctggtgggatccgctcgccggccggcaccggggaggtgagccacccccacgtgctcgccgcgcggttaaactcactggtggtcaccaacgcccatgcttctatgaccgagagactccgggcttgaccaggacggatttgagcgaatatcttgaggttcatattgttgctggaggggaatggaaactccatcagaggccttgaagccggcggaggctaaaccggcgaagccacggccagtggcgcccacgggcaggttcgccttggggactgcttcgtccattaaaaagcgagctgatggttcggctccggcggaggtgggtgtgccccggtcttccttgatgaagtctacctcgtcgctgaacgccagttcggcgacgagaagaagcagcacggggactgctgggaagcaacaggacaatgggagctcagctgctgctaagaagtctagtcctacgctgtcggatggcgcgaggaagactaaactggtgtcagctcccgctgctggctcaaaaccagcagtggagaagaaaacatccttggtcgagaggacaggtgccgatttggccaggaagcctgctgttaaggcatccccaacttcaacactgaagaaggtccagtcaaagacagagagctccaatggcagcagtggcagcaccaggagagtgtcctccaatgcttctgtgccatcgccacgttccgtcacaagcaatgcagcaaggaaactgggtactcaagcatcatctgctgcgtctaatcggcggaagagctcaaccgcagatagccgtgattcgagattcatgatgctgccacaggtggatttgaaggctagcgatgaagtgaggctggattcaagaggtcatcgagttcgtagtctcaagcagctgaggttatcacatgctcttgagtttgtgtatctgagggacaaccttttatcaagtttggagggcattgagattctcaagggggtaaaggttcttgatttgagttttaatgattttaagctccctgggtttgagcctcttgggaactgtgttgtcctccagcaactgtatcttgctggaaatcaaataacttcacttgctagccttcctgaacttcctaacttggagttcctttctattgctcaaaacaggctaaagtcagtttgtatggctcgacagcctcgacttcaagtgttagcagctagcagaaacaaaatatcaactttgaagggatttccacattttccttctctagagcatttgcgtgttgaggagaatccactacttgagatgccacacttggaagctgcttctatcctacttataggtcctactttgaagaagttcaatgaccgagatctgaaccccaacgaggctgaggtagctaagcaatatcctgctcatacagctatttgcattcgggatggttgggaattttgctcccctgaacttgctgctgattcaacattttctttcctacttgagcaatggaataataagctgcctcaaggttacatggtgaataaagcttatgttgaccatccgtttgaagaggatccatgccattgccattttagattcacaaatcttggtggtgagggtgagctagtcctcaaataccaatggtttctgggtggcaaaacaccaacagattttgttgctatccctggtgcatcgagcgaggtgtactggccaaaacgtgaggatgttggaagatgtttgaaagttgaatgcactccaatagtaaatggtgcagaattttcgcccgtttttgctgtatctttacctgtttctccaggtactggatgtccaaaggtcatcaatctggcagtcagtggtgaagtagtggaaggaaacatactcagtggagttcctgaaattgcctggtgtggtggaacacctgggaaaggcgttgcaagttggttaaggcggaggtggaacggcaatgctgtagtaattgatggagctgaggggatggaatatcagttgacagtcaatgatatcaattcaagtttggtatttatgtacacccctgttacagacgagggtgtcaagggagagccgcaatgtacaatgacagattttgtgaaggctgcaacaccatcagtcagcaatgtgcatgttctgggagatattgttgaagataacattatcgtagggaaaggaaaatacttcggtggcagagagggactaagtaaaatccggtggtttagagagaaggaaaatggtgaatttcttcttgtgctatcagacagcatggagtatacactaaccaaggaggacgtggggagacacctcaaatttgtatatatccctgttaaccttgaaggtcaggagggtgaatctgcttgtgcgataacagatgtagttaagaaagcccctccaaaagtattcaatctaaagattgttggggaatctatggaaggaagcaagatatctgccagtgctactgttacaggtggaactgaagggtccagcagggttcaatggtacaaggcatcttcctctgaatttaagaatgaacatgagcttgaagcccttactccgtcacgagtttctaagacattccgcattcctcttggtgctgttggatattatatcgttgcaaagtttacacctgtggcacctgatggtgaagtcggtgaaccagcctatgctacatcagatggccttgtggaaacactaccacccagcctgaacttcttaacagtcactggtgaattctctgagggtcagatattaacagcatcatatgggtatatcggaggacatgaaggaaatagtttatacagctggcaccttcatgaggctgaagatgacgaaggcactccactttcagaggcaaccggtttgctacaatactgtgttacaaaggaagctgttggaaagtttgtttctttcaaatgcacccctgtcagagatgatgatattgttggtgaggcaagatcattcataggaaaggacagagttactccagggatgccgacattactttctcttgaagtaactggtgatgcaattgaaggaacaactatgtttgccagtaaaaggtattggggaggagaagaaggggacacaatgttccgctggatactgacaaattctgatggaaccgagaaagaaattgaaggagcaacaagttcatcatacaccttgaaatgcaatgacattggcttctacatatctgtcttgtgcaagcctgttagaaatgatggagttgatggttctttagtgtcgactgaagcgattggtcctattataccagggccaccaacatgtcaatctcttgaactagctggctctatggttgaaggtggccgtttgacctttcatgctgtgtatacaggaggtttgcggggaagttgcatccaagaatggttcagattacatgatgatgggcacaaggacaagttgactgctgatgaatgtctagaccttgatctagctgatatcgattgccggattgaacttatgtatacacctgtacgagaagacggagtgcacgggttaccaaggagtgttacttctgatacaatcttacctggggagcccaagggtgtcaatcttattctacctgagtgttttgaggacaatgaaatttctcccatcaaaacctatttcggtggcaaggaaggcactggcaaatatacatggtttcgaaataaagagaaacttgataacttggaatttgatctggttgctgaatcatcagaagttgttggagaaaccttaaaatataagccttcattgaatgatgttagttcctatctgattctttattgggttcctacacggcgtgatggaaaggttggtgatcctttgatggctatctctgatgatccggtcatggcagcttttccatctgtttcggatgttcacttagagcagaaaagttcagatgtatattgtggactaggcatctattatggtggatatgagggattaagcttgtatagatggtacagggaatctagtgatggaactaggcttcacatagatggtgctgattcagtcacatacgaagtgacagatgctgattacagctgccgtctactgtttggatgggataagtggagaagaaaaactctctgaaccatctgatgtaattttgccagaactactcaaaatcgagacactcaatttcaaggggaatcaggttgaaagagaaacactgactgctgctgaacaaattccgtacagtgagattcaacaacatatatggaaaaattataagaaagagatgaaatatcaatggtttatttccaatgaatcaggaggcgatcagtcttttgaaccattggcaacccagtgttctcgctcatacaaagtgcgctttgaggatattggtcgttgcctgaaatgcgaatgctttgtcactgatgtatttggacgatctagtgaattggtatccgctgtgactgctcctattttgccaggaaggcctaaaattgaaaagctggagattgaaggaagaggtttccacactgacctatatgccgttcagggtacctatagcggaggcaaagaaggcaagagtaaaatacaatggctcagatcgatggttggaagccctgatcttatctccatacctggcgaaactggaagaacgtatgaagctaatgttgatgatgtagggtataggcttgttgcaatttatacacctgtaagagaggatggagttgagggacaacctgtttctgtttcaacagaacagattgcagttgagcctgaactttacagggaagtgaaacagaagctcgatgatggttcagtcaaatttgaggttctgtgtgacaaggaccgaacacccaaaaaggcacaagtaatgggccatttggagcggagggttttggaagtcaaccgaaagaggataaaagtagtaaagcctggatctaagacatcattcccgagtactgaagtacgaggaacctacgctccaccgttccatgtcgagctgtatcgcaatgaccagcaccgcttcaagattgttgtcgacggtgatactgaagttgacttaatggtgcaaacacggcacatgcgagaccgcatcatcctcacgatcagaggcctcgcccagaagttcaacagcacctccctcaacacacttctcaggatcgagtcatgatagacctgacagtgtaaaaaccaactattacgggaagctgtaccccttgttccgattggttagagtgcgtggttttagtaggattcgtgacatgccagccttttgtgtgtatgggtgtgggacgggccgagcgtgttggattacaattttttccctgacacatctctcaaatcagagcagcatcagctggttgctctgactggtgccgtcgtgcgtcatgaaatgtacatagggtggttagagcgagaaagagagtggtgtttcttggtgctgtatttattatgcactggttgggttgggttttttcgactgccattctcatactaagtattggttctttcttttttcggtcgttgggtttgcatatacttgtaccgacaacacagcttggggtgattgggcgagtgctgttcagaatgcctggtccacacttgtgtacgactggaatcctacggtggcgtattcacatgctgttttatggtgcaaatgtaaattcatctgttcataaacgagaatcaaaatcgtcggccacgtgtattcgtcgtattcgtaccgatgtatactaccttataaaccagtactaatctcacggtggcatcaattatcttcctctgtttcacaa

SEQ ID NO: 64647 - DNA, 6277 bp, Zea Mays
gtgcgtttcccttccccttctctcctctcctgcctgttcggctccccacactgcagcttcccttccctctcacctcggtgaccgcattgggtgctcgcggggcggaagaggaggcgcgggtcgaggtcggctagcctaacccgtccggccgtaccgaggctggtgggatccgctcgccggccggcaccggggaggtcaccaacgcccatgcttctatgaccgagagactccgggcttgaccaggacggatttgagcgaatatcttgaggttcatattgttgctggaggggaatggaaactccatcagaggccttgaagccggcggaggctaaaccggcgaagccacggccagtggcgcccacgggcaggttcgccttggggactgcttcgtccattaaaaagcgagctgatggttcggctccggcggaggtgggtgtgccccggtcttccttgatgaagtctacctcgtcgctgaacgccagttcggcgacgagaagaagcagcacggggactgctgggaagcaacaggacaatgggagctcagctgctgctaagaagtctagtcctacgctgtcggatggcgcgaggaagactaaactggtgtcagctcccgctgctggctcaaaaccagcagtggagaagaaaacatccttggtcgagaggacaggtgccgatttggccaggaagcctgctgttaaggcatccccaacttcaacactgaagaaggtccagtcaaagacagagagctccaatggcagcagtggcagcaccaggagagtgtcctccaatgcttctgtgccatcgccacgttccgtcacaagcaatgcagcaaggaaactgggtactcaagcatcatctgctgcgtctaatcggcggaagagctcaaccgcagatagccgtgattcgagattcatgatgctgccacaggtggatttgaaggctagcgatgaagtgaggctggattcaagaggtcatcgagttcgtagtctcaagcagctgaggttatcacatgctcttgagtttgtgtatctgagggacaaccttttatcaagtttggagggcattgagattctcaagggggtaaaggttcttgatttgagttttaatgattttaagctccctgggtttgagcctcttgggaactgtgttgtcctccagcaactgtatcttgctggaaatcaaataacttcacttgctagccttcctgaacttcctaacttggagttcctttctattgctcaaaacaggctaaagtcagtttgtatggctcgacagcctcgacttcaagtgttagcagctagcagaaacaaaatatcaactttgaagggatttccacattttccttctctagagcatttgcgtgttgaggagaatccactacttgagatgccacacttggaagctgcttctatcctacttataggtcctactttgaagaagttcaatgaccgagatctgaaccccaacgaggctgaggtagctaagcaatatcctgctcatacagctatttgcattcgggatggttgggaattttgctcccctgaacttgctgctgattcaacattttctttcctacttgagcaatggaataataagctgcctcaaggttacatggtgaataaagcttatgttgaccatccgtttgaagaggatccatgccattgccattttagattcacaaatcttggtggtgagggtgagctagtcctcaaataccaatggtttctgggtggcaaaacaccaacagattttgttgctatccctggtgcatcgagcgaggtgtactggccaaaacgtgaggatgttggaagatgtttgaaagttgaatgcactccaatagtaaatggtgcagaattttcgcccgtttttgctgtatctttacctgtttctccaggtactggatgtccaaaggtcatcaatctggcagtcagtggtgaagtagtggaaggaaacatactcagtggagttcctgaaattgcctggtgtggtggaacacctgggaaaggcgttgcaagttggttaaggcggaggtggaacggcaatgctgtagtaattgatggagctgaggggatggaatatcagttgacagtcaatgatatcaattcaagtttggtatttatgtacacccctgttacagacgagggtgtcaagggagagccgcaatgtacaatgacagattttgtgaaggctgcaacaccatcagtcagcaatgtgcatgttctgggagatattgttgaagataacattatcgtagggaaaggaaaatacttcggtggcagagagggactaagtaaaatccggtggtttagagagaaggaaaatggtgaatttcttcttgtgctatcagacagcatggagtatacactaaccaaggaggacgtggggagacacctcaaatttgtatatatccctgttaaccttgaaggtcaggagggtgaatctgcttgtgcgataacagatgtagttaagaaagcccctccaaaagtattcaatctaaagattgttggggaatctatggaaggaagcaagatatctgccagtgctactgttacaggtggaactgaagggtccagcagggttcaatggtacaaggcatcttcctctgaatttaagaatgaacatgagcttgaagcccttactccgtcacgagtttctaagacattccgcattcctcttggtgctgttggatattatatcgttgcaaagtttacacctgtggcacctgatggtgaagtcggtgaaccagcctatgctacatcagatggccttgtggaaacactaccacccagcctgaacttcttaacagtcactggtgaattctctgagggtcagatattaacagcatcatatgggtatatcggaggacatgaaggaaatagtttatacagctggcaccttcatgaggctgaagatgacgaaggcactccactttcagaggcaaccggtttgctacaatactgtgttacaaaggaagctgttggaaagtttgtttctttcaaatgcacccctgtcagagatgatgatattgttggtgaggcaagatcattcataggaaaggacagagttactccaggtgcttctgttttcgttttcttgaaaaaattacgacactgaagatattattctgtcacaaaagagacactcctctttgtgtgcttgtatggatgacaaaaaaacatgtttggaaattaagtgatgcatgagcctggattatgtatggaaatatggatatcacacatacttttgcattatggatatcacacataatatgtgacgaactacaaagatgtgaaacagaaaagaagtacaacaattgtagcacactcctgagggcctgtttgggaactcttcctcaaaaccacagttttataatgccacaatttattgtatgccattgacatagccatggtatattttacatcagtccaatctgatacctatttggagacacaatatttcagttgtagtgtagaagagaagactgcagggatgccgacattactttctcttgaagtaactggtgatgcaattgaaggaacaactatgtttgccagtaaaaggtattggggaggagaagaaggggacacaatgttccgctggatactgacaaattctgatggaaccgagaaagaaattgaaggagcaacaagttcatcatacaccttgaaatgcaatgacattggcttctacatatctgtcttgtgcaagcctgttagaaatgatggagttgatggttctttagtgtcgactgaagcgattggtcctattataccagggccaccaacatgtcaatctcttgaactagctggctctatggttgaaggtggccgtttgacctttcatgctgtgtatacaggaggtttgcggggaagttgcatccaagaatggttcagattacatgatgatgggcacaaggacaagttgactgctgatgaatgtctagaccttgatctagctgatatcgattgccggattgaacttatgtatacacctgtacgagaagacggagtgcacgggttaccaaggagtgttacttctgatacaatcttacctggggagcccaagggtgtcaatcttattctacctgagtgttttgaggacaatgaaatttctcccatcaaaacctatttcggtggcaaggaaggcactggcaaatatacatggtttcgaaataaagagaaacttgataacttggaatttgatctggttgctgaatcatcagaagttgttggagaaaccttaaaatataagccttcattgaatgatgttagttcctatctgattctttattgggttcctacacggcgtgatggaaaggttggtgatcctttgatggctatctctgatgatccggtcatggcagcttttccatctgtttcggatgttcacttagagcagaaaagttcagatgtatattgtggactaggcatctattatggtggatatgagggattaagcttgtatagatggtacagggaatctagtgatggaactaggcttcacatagatggtgctgattcagtcacatacgaagtgacagatgctgattacagctgccgtctactgtttggttatactcctgttcgttcagatgggataagtggagaagaaaaactctctgaaccatctgatgtaattttgccagaactactcaaaatcgagacactcaatttcaaggggaatcaggttgaaagagaaacactgactgctgctgaacaaattccgtacagtgagattcaacaacatatatggaaaaattataagaaagagatgaaatatcaatggtttatttccaatgaatcaggaggcgatcagtcttttgaaccattggcaacccagtgttctcgctcatacaaagtgcgctttgaggatattggtcgttgcctgaaatgcgaatgctttgtcactgatgtatttggacgatctagtgaattggtatccgctgtgactgctcctattttgccaggaaggcctaaaattgaaaagctggagattgaaggaagaggtttccacactgacctatatgccgttcagggtacctatagcggaggcaaagaaggcaagagtaaaatacaatggctcagatcgatggttggaagccctgatcttatctccatacctggcgaaactggaagaacgtatgaagctaatgttgatgatgtagggtataggcttgttgcaatttatacacctgtaagagaggatggagttgagggacaacctgtttctgtttcaacagaacagattgcagttgagcctgaactttacagggaagtgaaacagaagctcgatgatggttcagtcaaatttgaggttctgtgtgacaaggaccgaacacccaaaaaggcacaagtaatgggccatttggagcggagggttttggaagtcaaccgaaagaggataaaagtagtaaagcctggatctaagacatcattcccgagtactgaagtacgaggaacctacgctccaccgttccatgtcgagctgtatcgcaatgaccagcaccgcttcaagattgttgtcgacggtgatactgaagttgacttaatggtgcaaacacggcacatgcgagaccgcatcatcctcacgatcagaggcctcgcccagaagttcaacagcacctccctcaacacacttctcaggatcgagtcatgatagacctgacagtgtaaaaaccaactattacgggaagctgtaccccttgttccgattggttagagtgcgtggttttagtaggattcgtgacatgccagccttttgtgtgtatgggtgtgggacgggccgagcgtgttggattacaattttttccctgacacatctctcaaatcagagcagcatcagctggttgctctgactggtgccgtcgtgcgtcatgaaatgtacatagggtggttagagcgagaaagagagtggtgtttcttggtgctgtatttattatgcactggttgggttgggttttttcgactgccattctcatactaagtattggttctttcttttttcggtcgttgggtttgcatatacttgtaccgacaacacagcttggggtgattgggcgagtgctgttcagaatgcctggtccacacttgtgtacgactggaatcctacggtggcgtattcacatgctgttttatggtgcaaatgtaaattcatctgttcataaacgagaatcaaaatcgtcggccacgtgtattcgtcgtattcgtaccgatgtatactaccttataaaccagtactaatctcacggtggcatcaattatcttcctctgtttcacaa

SEQ ID NO: 64648 - DNA, 5863 bp, Zea Mays
gtgcgtttcccttccccttctctcctctcctgcctgttcggctccccacactgcagcttcccttccctctcacctcggtgaccgcattgggtgctcgcggggcggaagaggaggcgcgggtcgaggtcggctagcctaacccgtccggccgtaccgaggctggtgggatccgctcgccggccggcaccggggaggtcaccaacgcccatgcttctatgaccgagagactccgggcttgaccaggacggatttgagcgaatatcttgaggttcatattgttgctggaggggaatggaaactccatcagaggccttgaagccggcggaggctaaaccggcgaagccacggccagtggcgcccacgggcaggttcgccttggggactgcttcgtccattaaaaagcgagctgatggttcggctccggcggaggtgggtgtgccccggtcttccttgatgaagtctacctcgtcgctgaacgccagttcggcgacgagaagaagcagcacggggactgctgggaagcaacaggacaatgggagctcagctgctgctaagaagtctagtcctacgctgtcggatggcgcgaggaagactaaactggtgtcagctcccgctgctggctcaaaaccagcagtggagaagaaaacatccttggtcgagaggacaggtgccgatttggccaggaagcctgctgttaaggcatccccaacttcaacactgaagaaggtccagtcaaagacagagagctccaatggcagcagtggcagcaccaggagagtgtcctccaatgcttctgtgccatcgccacgttccgtcacaagcaatgcagcaaggaaactgggtactcaagcatcatctgctgcgtctaatcggcggaagagctcaaccgcagatagccgtgattcgagattcatgatgctgccacaggtggatttgaaggctagcgatgaagtgaggctggattcaagaggtcatcgagttcgtagtctcaagcagctgaggttatcacatgctcttgagtttgtgtatctgagggacaaccttttatcaagtttggagggcattgagattctcaagggggtaaaggttcttgatttgagttttaatgattttaagctccctgggtttgagcctcttgggaactgtgttgtcctccagcaactgtatcttgctggaaatcaaataacttcacttgctagccttcctgaacttcctaacttggagttcctttctattgctcaaaacaggctaaagtcagtttgtatggctcgacagcctcgacttcaagtgttagcagctagcagaaacaaaatatcaactttgaagggatttccacattttccttctctagagcatttgcgtgttgaggagaatccactacttgagatgccacacttggaagctgcttctatcctacttataggtcctactttgaagaagttcaatgaccgagatctgaaccccaacgaggctgaggtagctaagcaatatcctgctcatacagctatttgcattcgggatggttgggaattttgctcccctgaacttgctgctgattcaacattttctttcctacttgagcaatggaataataagctgcctcaaggttacatggtgaataaagcttatgttgaccatccgtttgaagaggatccatgccattgccattttagattcacaaatcttggtggtgagggtgagctagtcctcaaataccaatggtttctgggtggcaaaacaccaacagattttgttgctatccctggtgcatcgagcgaggtgtactggccaaaacgtgaggatgttggaagatgtttgaaagttgaatgcactccaatagtaaatggtgcagaattttcgcccgtttttgctgtatctttacctgtttctccaggtactggatgtccaaaggtcatcaatctggcagtcagtggtgaagtagtggaaggaaacatactcagtggagttcctgaaattgcctggtgtggtggaacacctgggaaaggcgttgcaagttggttaaggcggaggtggaacggcaatgctgtagtaattgatggagctgaggggatggaatatcagttgacagtcaatgatatcaattcaagtttggtatttatgtacacccctgttacagacgagggtgtcaagggagagccgcaatgtacaatgacagattttgtgaaggctgcaacaccatcagtcagcaatgtgcatgttctgggagatattgttgaagataacattatcgtagggaaaggaaaatacttcggtggcagagagggactaagtaaaatccggtggtttagagagaaggaaaatggtgaatttcttcttgtgctatcagacagcatggagtatacactaaccaaggaggacgtggggagacacctcaaatttgtatatatccctgttaaccttgaaggtcaggagggtgaatctgcttgtgcgataacagatgtagttaagaaagcccctccaaaagtattcaatctaaagattgttggggaatctatggaaggaagcaagatatctgccagtgctactgttacaggtggaactgaagggtccagcagggttcaatggtacaaggcatcttcctctgaatttaagaatgaacatgagcttgaagcccttactccgtcacgagtttctaagacattccgcattcctcttggtgctgttggatattatatcgttgcaaagtttacacctgtggcacctgatggtgaagtcggtgaaccagcctatgctacatcagatggccttgtggaaacactaccacccagcctgaacttcttaacagtcactggtgaattctctgagggtcagatattaacagcatcatatgggtatatcggaggacatgaaggaaatagtttatacagctggcaccttcatgaggctgaagatgacgaaggcactccactttcagaggcaaccggtttgctacaatactgtgttacaaaggaagctgttggaaagtttgtttctttcaaatgcacccctgtcagagatgatgatattgttggtgaggcaagatcattcataggaaaggacagagttactccagggatgccgacattactttctcttgaagtaactggtgatgcaattgaaggaacaactatgtttgccagtaaaaggtattggggaggagaagaaggggacacaatgttccgctggatactgacaaattctgatggaaccgagaaagaaattgaaggagcaacaagttcatcatacaccttgaaatgcaatgacattggcttctacatatctgtcttgtgcaagcctgttagaaatgatggagttgatggttctttagtgtcgactgaagcgattggtcctattataccagggccaccaacatgtcaatctcttgaactagctggctctatggttgaaggtggccgtttgacctttcatgctgtgtatacaggaggtttgcggggaagttgcatccaagaatggttcagattacatgatgatgggcacaaggacaagttgactgctgatgaatgtctagaccttgatctagctgatatcgattgccggattgaacttatgtatacacctgtacgagaagacggagtgcacgggttaccaaggagtgttacttctgatacaatcttacctggggagcccaagggtgtcaatcttattctacctgagtgttttgaggacaatgaaatttctcccatcaaaacctatttcggtggcaaggaaggcactggcaaatatacatggtttcgaaataaagagaaacttgataacttggaatttgatctggttgctgaatcatcagaagttgttggagaaaccttaaaatataagccttcattgaatgatgttagttcctatctgattctttattgggttcctacacggcgtgatggaaaggttggtgatcctttgatggctatctctgatgatccggtcatggcagcttttccatctgtttcggatgttcacttagagcagaaaagttcagatgtatattgtggactaggcatctattatggtggatatgagggattaagcttgtatagatggtacagggaatctagtgatggaactaggcttcacatagatggtgctgattcagtcacatacgaagtgacagatgctgattacagctgccgtctactgtttggttatactcctgttcgttcagatgggataagtggagaagaaaaactctctgaaccatctgatgtaattttgccagaactactcaaaatcgagacactcaatttcaaggggaatcaggttgaaagagaaacactgactgctgctgaacaaattccgtacagtgagattcaacaacatatatggaaaaattataagaaagagatgaaatatcaatggtttatttccaatgaatcaggaggcgatcagtcttttgaaccattggcaacccagtgttctcgctcatacaaagtgcgctttgaggatattggtcgttgcctgaaatgcgaatgctttgtcactgatgtatttggacgatctagtgaattggtatccgctgtgactgctcctattttgccaggaaggcctaaaattgaaaagctggagattgaaggaagaggtttccacactgacctatatgccgttcagggtacctatagcggaggcaaagaaggcaagagtaaaatacaatggctcagatcgatggttggaagccctgatcttatctccatacctggcgaaactggaagaacgtatgaagctaatgttgatgatgtagggtataggcttgttgcaatttatacacctgtaagagaggatggagttgagggacaacctgtttctgtttcaacagaacagattgcagttgagcctgaactttacagggaagtgaaacagaagctcgatgatggttcagtcaaatttgaggttctgtgtgacaaggaccgaacacccaaaaaggcacaagtaatgggccatttggagcggagggttttggaagtcaaccgaaagaggataaaagtagtaaagcctggatctaagacatcattcccgagtactgaagtacgaggaacctacgctccaccgttccatgtcgagctgtatcgcaatgaccagcaccgcttcaagattgttgtcgacggtgatactgaagttgacttaatggtgcaaacacggcacatgcgagaccgcatcatcctcacgatcagaggcctcgcccagaagttcaacagcacctccctcaacacacttctcaggatcgagtcatgatagacctgacagtgtaaaaaccaactattacgggaagctgtaccccttgttccgattggttagagtgcgtggttttagtaggattcgtgacatgccagccttttgtgtgtatgggtgtgggacgggccgagcgtgttggattacaattttttccctgacacatctctcaaatcagagcagcatcagctggttgctctgactggtgccgtcgtgcgtcatgaaatgtacatagggtggttagagcgagaaagagagtggtgtttcttggtgctgtatttattatgcactggttgggttgggttttttcgactgccattctcatactaagtattggttctttcttttttcggtcgttgggtttgcatatacttgtaccgacaacacagcttggggtgattgggcgagtgctgttcagaatgcctggtccacacttgtgtacgactggaatcctacggtggcgtattcacatgctgttttatggtgcaaatgtaaattcatctgttcataaacgagaatcaaaatcgtcggccacgtgtattcgtcgtattcgtaccgatgtatactaccttataaaccagtactaatctcacggtggcatcaattatcttcctctgtttcacaa

SEQ ID NO: 64649 - DNA, 5746 bp, Zea Mays
cactgttgctcggcgaggttgcggcgtgggttctggcggagtttctccggttccacagtcgcggcgaaatgccccaggtcaccaacgcccatgcttctatgaccgagagactccgggcttgaccaggacggatttgagcgaatatcttgaggttcatattgttgctggaggggaatggaaactccatcagaggccttgaagccggcggaggctaaaccggcgaagccacggccagtggcgcccacgggcaggttcgccttggggactgcttcgtccattaaaaagcgagctgatggttcggctccggcggaggtgggtgtgccccggtcttccttgatgaagtctacctcgtcgctgaacgccagttcggcgacgagaagaagcagcacggggactgctgggaagcaacaggacaatgggagctcagctgctgctaagaagtctagtcctacgctgtcggatggcgcgaggaagactaaactggtgtcagctcccgctgctggctcaaaaccagcagtggagaagaaaacatccttggtcgagaggacaggtgccgatttggccaggaagcctgctgttaaggcatccccaacttcaacactgaagaaggtccagtcaaagacagagagctccaatggcagcagtggcagcaccaggagagtgtcctccaatgcttctgtgccatcgccacgttccgtcacaagcaatgcagcaaggaaactgggtactcaagcatcatctgctgcgtctaatcggcggaagagctcaaccgcagatagccgtgattcgagattcatgatgctgccacaggtggatttgaaggctagcgatgaagtgaggctggattcaagaggtcatcgagttcgtagtctcaagcagctgaggttatcacatgctcttgagtttgtgtatctgagggacaaccttttatcaagtttggagggcattgagattctcaagggggtaaaggttcttgatttgagttttaatgattttaagctccctgggtttgagcctcttgggaactgtgttgtcctccagcaactgtatcttgctggaaatcaaataacttcacttgctagccttcctgaacttcctaacttggagttcctttctattgctcaaaacaggctaaagtcagtttgtatggctcgacagcctcgacttcaagtgttagcagctagcagaaacaaaatatcaactttgaagggatttccacattttccttctctagagcatttgcgtgttgaggagaatccactacttgagatgccacacttggaagctgcttctatcctacttataggtcctactttgaagaagttcaatgaccgagatctgaaccccaacgaggctgaggtagctaagcaatatcctgctcatacagctatttgcattcgggatggttgggaattttgctcccctgaacttgctgctgattcaacattttctttcctacttgagcaatggaataataagctgcctcaaggttacatggtgaataaagcttatgttgaccatccgtttgaagaggatccatgccattgccattttagattcacaaatcttggtggtgagggtgagctagtcctcaaataccaatggtttctgggtggcaaaacaccaacagattttgttgctatccctggtgcatcgagcgaggtgtactggccaaaacgtgaggatgttggaagatgtttgaaagttgaatgcactccaatagtaaatggtgcagaattttcgcccgtttttgctgtatctttacctgtttctccaggtactggatgtccaaaggtcatcaatctggcagtcagtggtgaagtagtggaaggaaacatactcagtggagttcctgaaattgcctggtgtggtggaacacctgggaaaggcgttgcaagttggttaaggcggaggtggaacggcaatgctgtagtaattgatggagctgaggggatggaatatcagttgacagtcaatgatatcaattcaagtttggtatttatgtacacccctgttacagacgagggtgtcaagggagagccgcaatgtacaatgacagattttgtgaaggctgcaacaccatcagtcagcaatgtgcatgttctgggagatattgttgaagataacattatcgtagggaaaggaaaatacttcggtggcagagagggactaagtaaaatccggtggtttagagagaaggaaaatggtgaatttcttcttgtgctatcagacagcatggagtatacactaaccaaggaggacgtggggagacacctcaaatttgtatatatccctgttaaccttgaaggtcaggagggtgaatctgcttgtgcgataacagatgtagttaagaaagcccctccaaaagtattcaatctaaagattgttggggaatctatggaaggaagcaagatatctgccagtgctactgttacaggtggaactgaagggtccagcagggttcaatggtacaaggcatcttcctctgaatttaagaatgaacatgagcttgaagcccttactccgtcacgagtttctaagacattccgcattcctcttggtgctgttggatattatatcgttgcaaagtttacacctgtggcacctgatggtgaagtcggtgaaccagcctatgctacatcagatggccttgtggaaacactaccacccagcctgaacttcttaacagtcactggtgaattctctgagggtcagatattaacagcatcatatgggtatatcggaggacatgaaggaaatagtttatacagctggcaccttcatgaggctgaagatgacgaaggcactccactttcagaggcaaccggtttgctacaatactgtgttacaaaggaagctgttggaaagtttgtttctttcaaatgcacccctgtcagagatgatgatattgttggtgaggcaagatcattcataggaaaggacagagttactccagggatgccgacattactttctcttgaagtaactggtgatgcaattgaaggaacaactatgtttgccagtaaaaggtattggggaggagaagaaggggacacaatgttccgctggatactgacaaattctgatggaaccgagaaagaaattgaaggagcaacaagttcatcatacaccttgaaatgcaatgacattggcttctacatatctgtcttgtgcaagcctgttagaaatgatggagttgatggttctttagtgtcgactgaagcgattggtcctattataccagggccaccaacatgtcaatctcttgaactagctggctctatggttgaaggtggccgtttgacctttcatgctgtgtatacaggaggtttgcggggaagttgcatccaagaatggttcagattacatgatgatgggcacaaggacaagttgactgctgatgaatgtctagaccttgatctagctgatatcgattgccggattgaacttatgtatacacctgtacgagaagacggagtgcacgggttaccaaggagtgttacttctgatacaatcttacctggggagcccaagggtgtcaatcttattctacctgagtgttttgaggacaatgaaatttctcccatcaaaacctatttcggtggcaaggaaggcactggcaaatatacatggtttcgaaataaagagaaacttgataacttggaatttgatctggttgctgaatcatcagaagttgttggagaaaccttaaaatataagccttcattgaatgatgttagttcctatctgattctttattgggttcctacacggcgtgatggaaaggttggtgatcctttgatggctatctctgatgatccggtcatggcagcttttccatctgtttcggatgttcacttagagcagaaaagttcagatgtatattgtggactaggcatctattatggtggatatgagggattaagcttgtatagatggtacagggaatctagtgatggaactaggcttcacatagatggtgctgattcagtcacatacgaagtgacagatgctgattacagctgccgtctactgtttggttatactcctgttcgttcagatgggataagtggagaagaaaaactctctgaaccatctgatgtaattttgccagaactactcaaaatcgagacactcaatttcaaggggaatcaggttgaaagagaaacactgactgctgctgaacaaattccgtacagtgagattcaacaacatatatggaaaaattataagaaagagatgaaatatcaatggtttatttccaatgaatcaggaggcgatcagtcttttgaaccattggcaacccagtgttctcgctcatacaaagtgcgctttgaggatattggtcgttgcctgaaatgcgaatgctttgtcactgatgtatttggacgatctagtgaattggtatccgctgtgactgctcctattttgccaggaaggcctaaaattgaaaagctggagattgaaggaagaggtttccacactgacctatatgccgttcagggtacctatagcggaggcaaagaaggcaagagtaaaatacaatggctcagatcgatggttggaagccctgatcttatctccatacctggcgaaactggaagaacgtatgaagctaatgttgatgatgtagggtataggcttgttgcaatttatacacctgtaagagaggatggagttgagggacaacctgtttctgtttcaacagaacagattgcagttgagcctgaactttacagggaagtgaaacagaagctcgatgatggttcagtcaaatttgaggttctgtgtgacaaggaccgaacacccaaaaaggcacaagtaatgggccatttggagcggagggttttggaagtcaaccgaaagaggataaaagtagtaaagcctggatctaagacatcattcccgagtactgaagtacgaggaacctacgctccaccgttccatgtcgagctgtatcgcaatgaccagcaccgcttcaagattgttgtcgacggtgatactgaagttgacttaatggtgcaaacacggcacatgcgagaccgcatcatcctcacgatcagaggcctcgcccagaagttcaacagcacctccctcaacacacttctcaggatcgagtcatgatagacctgacagtgtaaaaaccaactattacgggaagctgtaccccttgttccgattggttagagtgcgtggttttagtaggattcgtgacatgccagccttttgtgtgtatgggtgtgggacgggccgagcgtgttggattacaattttttccctgacacatctctcaaatcagagcagcatcagctggttgctctgactggtgccgtcgtgcgtcatgaaatgtacatagggtggttagagcgagaaagagagtggtgtttcttggtgctgtatttattatgcactggttgggttgggttttttcgactgccattctcatactaagtattggttctttcttttttcggtcgttgggtttgcatatacttgtaccgacaacacagcttggggtgattgggcgagtgctgttcagaatgcctggtccacacttgtgtacgactggaatcctacggtggcgtattcacatgctgttttatggtgcaaatgtaaattcatctgttcataaacgagaatcaaaatcgtcggccacgtgtattcgtcgtattcgtaccgatgtatactaccttataaaccagtactaatctcacggtggcatcaattatcttcctctgtttcacaa

SEQ ID NO: 64650 - DNA, 5660 bp, Zea Mays
gtcaccaacgcccatgcttctatgaccgagagactccgggcttgaccaggacggatttgagcgaatatcttgaggttcatattgttgctggaggggaatggaaactccatcagaggccttgaagccggcggaggctaaaccggcgaagccacggccagtggcgcccacgggcaggttcgccttggggactgcttcgtccattaaaaagcgagctgatggttcggctccggcggaggtgggtgtgccccggtcttccttgatgaagtctacctcgtcgctgaacgccagttcggcgacgagaagaagcagcacggggactgctgggaagcaacaggacaatgggagctcagctgctgctaagaagtctagtcctacgctgtcggatggcgcgaggaagactaaactggtgtcagctcccgctgctggctcaaaaccagcagtggagaagaaaacatccttggtcgagaggacaggtgccgatttggccaggaagcctgctgttaaggcatccccaacttcaacactgaagaaggtccagtcaaagacagagagctccaatggcagcagtggcagcaccaggagagtgtcctccaatgcttctgtgccatcgccacgttccgtcacaagcaatgcagcaaggaaactgggtactcaagcatcatctgctgcgtctaatcggcggaagagctcaaccgcagatagccgtgattcgagattcatgatgctgccacaggtggatttgaaggctagcgatgaagtgaggctggattcaagaggtcatcgagttcgtagtctcaagcagctgaggttatcacatgctcttgagtttgtgtatctgagggacaaccttttatcaagtttggagggcattgagattctcaagggggtaaaggttcttgatttgagttttaatgattttaagctccctgggtttgagcctcttgggaactgtgttgtcctccagcaactgtatcttgctggaaatcaaataacttcacttgctagccttcctgaacttcctaacttggagttcctttctattgctcaaaacaggctaaagtcagtttgtatggctcgacagcctcgacttcaagtgttagcagctagcagaaacaaaatatcaactttgaagggatttccacattttccttctctagagcatttgcgtgttgaggagaatccactacttgagatgccacacttggaagctgcttctatcctacttataggtcctactttgaagaagttcaatgaccgagatctgaaccccaacgaggctgaggtagctaagcaatatcctgctcatacagctatttgcattcgggatggttgggaattttgctcccctgaacttgctgctgattcaacattttctttcctacttgagcaatggaataataagctgcctcaaggttacatggtgaataaagcttatgttgaccatccgtttgaagaggatccatgccattgccattttagattcacaaatcttggtggtgagggtgagctagtcctcaaataccaatggtttctgggtggcaaaacaccaacagattttgttgctatccctggtgcatcgagcgaggtgtactggccaaaacgtgaggatgttggaagatgtttgaaagttgaatgcactccaatagtaaatggtgcagaattttcgcccgtttttgctgtatctttacctgtttctccaggtactggatgtccaaaggtcatcaatctggcagtcagtggtgaagtagtggaaggaaacatactcagtggagttcctgaaattgcctggtgtggtggaacacctgggaaaggcgttgcaaggcggaggtggaacggcaatgctgtagtaattgatggagctgaggggatggaatatcagttgacagtcaatgatatcaattcaagtttggtatttatgtacacccctgttacagacgagggtgtcaagggagagccgcaatgtacaatgacagattttgtgaaggctgcaacaccatcagtcagcaatgtgcatgttctgggagatattgttgaagataacattatcgtagggaaaggaaaatacttcggtggcagagagggactaagtaaaatccggtggtttagagagaaggaaaatggtgaatttcttcttgtgctatcagacagcatggagtatacactaaccaaggaggacgtggggagacacctcaaatttgtatatatccctgttaaccttgaaggtcaggagggtgaatctgcttgtgcgataacagatgtagttaagaaagcccctccaaaagtattcaatctaaagattgttggggaatctatggaaggaagcaagatatctgccagtgctactgttacaggtggaactgaagggtccagcagggttcaatggtacaaggcatcttcctctgaatttaagaatgaacatgagcttgaagcccttactccgtcacgagtttctaagacattccgcattcctcttggtgctgttggatattatatcgttgcaaagtttacacctgtggcacctgatggtgaagtcggtgaaccagcctatgctacatcagatggccttgtggaaacactaccacccagcctgaacttcttaacagtcactggtgaattctctgagggtcagatattaacagcatcatatgggtatatcggaggacatgaaggaaatagtttatacagctggcaccttcatgaggctgaagatgacgaaggcactccactttcagaggcaaccggtttgctacaatactgtgttacaaaggaagctgttggaaagtttgtttctttcaaatgcacccctgtcagagatgatgatattgttggtgaggcaagatcattcataggaaaggacagagttactccagggatgccgacattactttctcttgaagtaactggtgatgcaattgaaggaacaactatgtttgccagtaaaaggtattggggaggagaagaaggggacacaatgttccgctggatactgacaaattctgatggaaccgagaaagaaattgaaggagcaacaagttcatcatacaccttgaaatgcaatgacattggcttctacatatctgtcttgtgcaagcctgttagaaatgatggagttgatggttctttagtgtcgactgaagcgattggtcctattataccagggccaccaacatgtcaatctcttgaactagctggctctatggttgaaggtggccgtttgacctttcatgctgtgtatacaggaggtttgcggggaagttgcatccaagaatggttcagattacatgatgatgggcacaaggacaagttgactgctgatgaatgtctagaccttgatctagctgatatcgattgccggattgaacttatgtatacacctgtacgagaagacggagtgcacgggttaccaaggagtgttacttctgatacaatcttacctggggagcccaagggtgtcaatcttattctacctgagtgttttgaggacaatgaaatttctcccatcaaaacctatttcggtggcaaggaaggcactggcaaatatacatggtttcgaaataaagagaaacttgataacttggaatttgatctggttgctgaatcatcagaagttgttggagaaaccttaaaatataagccttcattgaatgatgttagttcctatctgattctttattgggttcctacacggcgtgatggaaaggttggtgatcctttgatggctatctctgatgatccggtcatggcagcttttccatctgtttcggatgttcacttagagcagaaaagttcagatgtatattgtggactaggcatctattatggtggatatgagggattaagcttgtatagatggtacagggaatctagtgatggaactaggcttcacatagatggtgctgattcagtcacatacgaagtgacagatgctgattacagctgccgtctactgtttggttatactcctgttcgttcagatgggataagtggagaagaaaaactctctgaaccatctgatgtaattttgccagaactactcaaaatcgagacactcaatttcaaggggaatcaggttgaaagagaaacactgactgctgctgaacaaattccgtacagtgagattcaacaacatatatggaaaaattataagaaagagatgaaatatcaatggtttatttccaatgaatcaggaggcgatcagtcttttgaaccattggcaacccagtgttctcgctcatacaaagtgcgctttgaggatattggtcgttgcctgaaatgcgaatgctttgtcactgatgtatttggacgatctagtgaattggtatccgctgtgactgctcctattttgccaggaaggcctaaaattgaaaagctggagattgaaggaagaggtttccacactgacctatatgccgttcagggtacctatagcggaggcaaagaaggcaagagtaaaatacaatggctcagatcgatggttggaagccctgatcttatctccatacctggcgaaactggaagaacgtatgaagctaatgttgatgatgtagggtataggcttgttgcaatttatacacctgtaagagaggatggagttgagggacaacctgtttctgtttcaacagaacagattgcagttgagcctgaactttacagggaagtgaaacagaagctcgatgatggttcagtcaaatttgaggttctgtgtgacaaggaccgaacacccaaaaaggcacaagtaatgggccatttggagcggagggttttggaagtcaaccgaaagaggataaaagtagtaaagcctggatctaagacatcattcccgagtactgaagtacgaggaacctacgctccaccgttccatgtcgagctgtatcgcaatgaccagcaccgcttcaagattgttgtcgacggtgatactgaagttgacttaatggtgcaaacacggcacatgcgagaccgcatcatcctcacgatcagaggcctcgcccagaagttcaacagcacctccctcaacacacttctcaggatcgagtcatgatagacctgacagtgtaaaaaccaactattacgggaagctgtaccccttgttccgattggttagagtgcgtggttttagtaggattcgtgacatgccagccttttgtgtgtatgggtgtgggacgggccgagcgtgttggattacaattttttccctgacacatctctcaaatcagagcagcatcagctggttgctctgactggtgccgtcgtgcgtcatgaaatgtacatagggtggttagagcgagaaagagagtggtgtttcttggtgctgtatttattatgcactggttgggttgggttttttcgactgccattctcatactaagtattggttctttcttttttcggtcgttgggtttgcatatacttgtaccgacaacacagcttggggtgattgggcgagtgctgttcagaatgcctggtccacacttgtgtacgactggaatcctacggtggcgtattcacatgctgttttatggtgcaaatgtaaattcatctgttcataaacgagaatcaaaatcgtcggccacgtgtattcgtcgtattcgtaccgatgtatactaccttataaaccagtactaatctcacggtggcatcaattatcttcctctgtttcacaa

SEQ ID NO: 64651 - DNA, 5594 bp, Zea Mays
tcaccaacgcccatgcttctatgaccgagagactccgggcttgaccaggacggatttgagcgaatatcttgaggttcatattgttgctggaggggaatggaaactccatcagaggccttgaagccggcggaggctaaaccggcgaagccacggccagtggcgcccacgggcaggttcgccttggggactgcttcgtccattaaaaagcgagctgatggttcggctccggcggaggtgggtgtgccccggtcttccttgatgaagtctacctcgtcgctgaacgccagttcggcgacgagaagaagcagcacggggactgctgggaagcaacaggacaatgggagctcagctgctgctaagaagtctagtcctacgctgtcggatggcgcgaggaagactaaactggtgtcagctcccgctgctggctcaaaaccagcagtggagaagaaaacatccttggtcgagaggacaggtgccgatttggccaggaagcctgctgttaaggcatccccaacttcaacactgaagaaggtccagtcaaagacagagagctccaatggcagcagtggcagcaccaggagagtgtcctccaatgcttctgtgccatcgccacgttccgtcacaagcaatgcagcaaggaaactgggtactcaagcatcatctgctgcgtctaatcggcggaagagctcaaccgcagatagccgtgattcgagattcatgatgctgccacaggtggatttgaaggctagcgatgaagtgaggctggattcaagaggtcatcgagttcgtagtctcaagcagctgaggttatcacatgctcttgagtttgtgtatctgagggacaaccttttatcaagtttggagggcattgagattctcaagggggtaaaggttcttgatttgagttttaatgattttaagctccctgggtttgagcctcttgggaactgtgttgtcctccagcaactgtatcttgctggaaatcaaataacttcacttgctagccttcctgaacttcctaacttggagttcctttctattgctcaaaacaggctaaagtcagtttgtatggctcgacagcctcgacttcaagtgttagcagctagcagaaacaaaatatcaactttgaagggatttccacattttccttctctagagcatttgcgtgttgaggagaatccactacttgagatgccacacttggaagctgcttctatcctacttataggtcctactttgaagaagttcaatgaccgagatctgaaccccaacgaggctgaggtagctaagcaatatcctgctcatacagctatttgcattcgggatggttgggaattttgctcccctgaacttgctgctgattcaacattttctttcctacttgagcaatggaataataagctgcctcaaggttacatggtgaataaagcttatgttgaccatccgtttgaagaggatccatgccattgccattttagattcacaaatcttggtggtgagggtgagctagtcctcaaataccaatggtttctgggtggcaaaacaccaacagattttgttgctatccctggtgcatcgagcgaggtgtactggccaaaacgtgaggatgttggaagatgtttgaaagttgaatgcactccaatagtaaatggtgcagaattttcgcccgtttttgctgtatctttacctgtttctccaggtactggatgtccaaaggtcatcaatctggcagtcagtggtgaagtagtggaaggaaacatactcagtggagttcctgaaattgcctggtgtggtggaacacctgggaaaggcgttgcaagttggttaaggcggaggtggaacggcaatgctgtagtaattgatggagctgaggggatggaatatcagttgacagtcaatgatatcaattcaagtttggtatttatgtacacccctgttacagacgagggtgtcaagggagagccgcaatgtacaatgacagattttgtgaaggctgcaacaccatcagtcagcaatgtgcatgttctgggagatattgttgaagataacattatcgtagggaaaggaaaatacttcggtggcagagagggactaagtaaaatccggtggtttagagagaaggaaaatggtgaatttcttcttgtgctatcagacagcatggagtatacactaaccaaggaggacgtggggagacacctcaaatttgtatatatccctgttaaccttgaaggtcaggagggtgaatctgcttgtgcgataacagatgtagttaagaaagcccctccaaaagtattcaatctaaagattgttggggaatctatggaaggaagcaagatatctgccagtgctactgttacaggtggaactgaagggtccagcagggttcaatggtacaaggcatcttcctctgaatttaagaatgaacatgagcttgaagcccttactccgtcacgagtttctaagacattccgcattcctcttggtgctgttggatattatatcgttgcaaagtttacacctgtggcacctgatggtgaagtcggtgaaccagcctatgctacatcagatggccttgtggaaacactaccacccagcctgaacttcttaacagtcactggtgaattctctgagggtcagatattaacagcatcatatgggtatatcggaggacatgaaggaaatagtttatacagctggcaccttcatgaggctgaagatgacgaaggcactccactttcagaggcaaccggtttgctacaatactgtgttacaaaggaagctgttggaaagtttgtttctttcaaatgcacccctgtcagagatgatgatattgttggtgaggcaagatcattcataggaaaggacagagttactccagggatgccgacattactttctcttgaagtaactggtgatgcaattgaaggaacaactatgtttgccagtaaaaggtattggggaggagaagaaggggacacaatgttccgctggatactgacaaattctgatggaaccgagaaagaaattgaaggagcaacaagttcatcatacaccttgaaatgcaatgacattggcttctacatatctgtcttgtgcaagcctgttagaaatgatggagttgatggttctttagtgtcgactgaagcgattggtcctattataccagggccaccaacatgtcaatctcttgaactagctggctctatggttgaaggtggccgtttgacctttcatgctgtgtatacaggaggtttgcggggaagttgcatccaagaatggttcagattacatgatgatgggcacaaggacaagttgactgctgatgaatgtctagaccttgatctagctgatatcgattgccggattgaacttatgtatacacctgtacgagaagacggagtgcacgggttaccaaggagtgttacttctgatacaatcttacctggggagcccaagggtgtcaatcttattctacctgagtgttttgaggacaatgaaatttctcccatcaaaacctatttcggtggcaaggaaggcactggcaaatatacatggtttcgaaataaagagaaacttgataacttggaatttgatctggttgctgaatcatcagaagttgttggagaaaccttaaaatataagccttcattgaatgatgttagttcctatctgattctttattgggttcctacacggcgtgatggaaaggttggtgatcctttgatggctatctctgatgatccggtcatggcagcttttccatctgtttcggatgttcacttagagcagaaaagttcagatgtatattgtggactaggcatctattatggtggatatgagggattaagcttgtatagatggtacagggaatctagtgatggaactaggcttcacatagatggtgctgattcagtcacatacgaagtgacagatgctgattacagctgccgtctactgtttggaactactcaaaatcgagacactcaatttcaaggggaatcaggttgaaagagaaacactgactgctgctgaacaaattccgtacagtgagattcaacaacatatatggaaaaattataagaaagagatgaaatatcaatggtttatttccaatgaatcaggaggcgatcagtcttttgaaccattggcaacccagtgttctcgctcatacaaagtgcgctttgaggatattggtcgttgcctgaaatgcgaatgctttgtcactgatgtatttggacgatctagtgaattggtatccgctgtgactgctcctattttgccaggaaggcctaaaattgaaaagctggagattgaaggaagaggtttccacactgacctatatgccgttcagggtacctatagcggaggcaaagaaggcaagagtaaaatacaatggctcagatcgatggttggaagccctgatcttatctccatacctggcgaaactggaagaacgtatgaagctaatgttgatgatgtagggtataggcttgttgcaatttatacacctgtaagagaggatggagttgagggacaacctgtttctgtttcaacagaacagattgcagttgagcctgaactttacagggaagtgaaacagaagctcgatgatggttcagtcaaatttgaggttctgtgtgacaaggaccgaacacccaaaaaggcacaagtaatgggccatttggagcggagggttttggaagtcaaccgaaagaggataaaagtagtaaagcctggatctaagacatcattcccgagtactgaagtacgaggaacctacgctccaccgttccatgtcgagctgtatcgcaatgaccagcaccgcttcaagattgttgtcgacggtgatactgaagttgacttaatggtgcaaacacggcacatgcgagaccgcatcatcctcacgatcagaggcctcgcccagaagttcaacagcacctccctcaacacacttctcaggatcgagtcatgatagacctgacagtgtaaaaaccaactattacgggaagctgtaccccttgttccgattggttagagtgcgtggttttagtaggattcgtgacatgccagccttttgtgtgtatgggtgtgggacgggccgagcgtgttggattacaattttttccctgacacatctctcaaatcagagcagcatcagctggttgctctgactggtgccgtcgtgcgtcatgaaatgtacatagggtggttagagcgagaaagagagtggtgtttcttggtgctgtatttattatgcactggttgggttgggttttttcgactgccattctcatactaagtattggttctttcttttttcggtcgttgggtttgcatatacttgtaccgacaacacagcttggggtgattgggcgagtgctgttcagaatgcctggtccacacttgtgtacgactggaatcctacggtggcgtattcacatgctgttttatggtgcaaatgtaaattcatctgttcataaacgagaatcaaaatcgtcggccacgtgtattcgtcgtattcgtaccgatgtatactaccttataaaccagtactaatctcacggtggcatcaattatcttcctctgtttcacaa

SEQ ID NO: 64652 - DNA, 5366 bp, Zea Mays
aggggaatggaaactccatcagaggccttgaagccggcggaggctaaaccggcgaagccacggccagtggcgcccacgggcaggttcgccttggggactgcttcgtccattaaaaagcgagctgatggttcggctccggcggaggtgggtgtgccccggtcttccttgatgaagtctacctcgtcgctgaacgccagttcggcgacgagaagaagcagcacggggactgctgggaagcaacaggacaatgggagctcagctgctgctaagaagtctagtcctacgctgtcggatggcgcgaggaagactaaactggtgtcagctcccgctgctggctcaaaaccagcagtggagaagaaaacatccttggtcgagaggacaggtgccgatttggccaggaagcctgctgttaaggcatccccaacttcaacactgaagaaggtccagtcaaagacagagagctccaatggcagcagtggcagcaccaggagagtgtcctccaatgcttctgtgccatcgccacgttccgtcacaagcaatgcagcaaggaaactgggtactcaagcatcatctgctgcgtctaatcggcggaagagctcaaccgcagatagccgtgattcgagattcatgatgctgccacaggtggatttgaaggctagcgatgaagtgaggctggattcaagaggtcatcgagttcgtagtctcaagcagctgaggttatcacatgctcttgagtttgtgtatctgagggacaaccttttatcaagtttggagggcattgagattctcaagggggtaaaggttcttgatttgagttttaatgattttaagctccctgggtttgagcctcttgggaactgtgttgtcctccagcaactgtatcttgctggaaatcaaataacttcacttgctagccttcctgaacttcctaacttggagttcctttctattgctcaaaacaggctaaagtcagtttgtatggctcgacagcctcgacttcaagtgttagcagctagcagaaacaaaatatcaactttgaagggatttccacattttccttctctagagcatttgcgtgttgaggagaatccactacttgagatgccacacttggaagctgcttctatcctacttataggtcctactttgaagaagttcaatgaccgagatctgaaccccaacgaggctgaggtagctaagcaatatcctgctcatacagctatttgcattcgggatggttgggaattttgctcccctgaacttgctgctgattcaacattttctttcctacttgagcaatggaataataagctgcctcaaggttacatggtgaataaagcttatgttgaccatccgtttgaagaggatccatgccattgccattttagattcacaaatcttggtggtgagggtgagctagtcctcaaataccaatggtttctgggtggcaaaacaccaacagattttgttgctatccctggtgcatcgagcgaggtgtactggccaaaacgtgaggatgttggaagatgtttgaaagttgaatgcactccaatagtaaatggtgcagaattttcgcccgtttttgctgtatctttacctgtttctccaggtactggatgtccaaaggtcatcaatctggcagtcagtggtgaagtagtggaaggaaacatactcagtggagttcctgaaattgcctggtgtggtggaacacctgggaaaggcgttgcaagttggttaaggcggaggtggaacggcaatgctgtagtaattgatggagctgaggggatggaatatcagttgacagtcaatgatatcaattcaagtttggtatttatgtacacccctgttacagacgagggtgtcaagggagagccgcaatgtacaatgacagattttgtgaaggctgcaacaccatcagtcagcaatgtgcatgttctgggagatattgttgaagataacattatcgtagggaaaggaaaatacttcggtggcagagagggactaagtaaaatccggtggtttagagagaaggaaaatggtgaatttcttcttgtgctatcagacagcatggagtatacactaaccaaggaggacgtggggagacacctcaaatttgtatatatccctgttaaccttgaaggtcaggagggtgaatctgcttgtgcgataacagatgtagttaagaaagcccctccaaaagtattcaatctaaagattgttggggaatctatggaaggaagcaagatatctgccagtgctactgttacaggtggaactgaagggtccagcagggttcaatggtacaaggcatcttcctctgaatttaagaatgaacatgagcttgaagcccttactccgtcacgagtttctaagacattccgcattcctcttggtgctgttggatattatatcgttgcaaagtttacacctgtggcacctgatggtgaagtcggtgaaccagcctatgctacatcagatggccttgtggaaacactaccacccagcctgaacttcttaacagtcactggtgaattctctgagggtcagatattaacagcatcatatgggtatatcggaggacatgaaggaaatagtttatacagctggcaccttcatgaggctgaagatgacgaaggcactccactttcagaggcaaccggtttgctacaatactgtgttacaaaggaagctgttggaaagtttgtttctttcaaatgcacccctgtcagagatgatgatattgttggtgaggcaagatcattcataggaaaggacagagttactccagggatgccgacattactttctcttgaagtaactggtgatgcaattgaaggaacaactatgtttgccagtaaaaggtattggggaggagaagaaggggacacaatgttccgctggatactgacaaattctgatggaaccgagaaagaaattgaaggagcaacaagttcatcatacaccttgaaatgcaatgacattggcttctacatatctgtcttgtgcaagcctgttagaaatgatggagttgatggttctttagtgtcgactgaagcgattggtcctattataccagggccaccaacatgtcaatctcttgaactagctggctctatggttgaaggtggccgtttgacctttcatgctgtgtatacaggaggtttgcggggaagttgcatccaagaatggttcagattacatgatgatgggcacaaggacaagttgactgctgatgaatgtctagaccttgatctagctgatatcgattgccggattgaacttatgtatacacctgtacgagaagacggagtgcacgggttaccaaggagtgttacttctgatacaatcttacctggggagcccaagggtgtcaatcttattctacctgagtgttttgaggacaatgaaatttctcccatcaaaacctatttcggtggcaaggaaggcactggcaaatatacatggtttcgaaataaagagaaacttgataacttggaatttgatctggttgctgaatcatcagaagttgttggagaaaccttaaaatataagccttcattgaatgatgttagttcctatctgattctttattgggttcctacacggcgtgatggaaaggttggtgatcctttgatggctatctctgatgatccggtcatgttatactcctgttcgttcagatgggataagtggagaagaaaaactctctgaaccatctgatgtaattttgccagaactactcaaaatcgagacactcaatttcaaggggaatcaggttgaaagagaaacactgactgctgctgaacaaattccgtacagtgagattcaacaacatatatggaaaaattataagaaagagatgaaatatcaatggtttatttccaatgaatcaggaggcgatcagtcttttgaaccattggcaacccagtgttctcgctcatacaaagtgcgctttgaggatattggtcgttgcctgaaatgcgaatgctttgtcactgatgtatttggacgatctagtgaattggtatccgctgtgactgctcctattttgccaggaaggcctaaaattgaaaagctggagattgaaggaagaggtttccacactgacctatatgccgttcagggtacctatagcggaggcaaagaaggcaagagtaaaatacaatggctcagatcgatggttggaagccctgatcttatctccatacctggcgaaactggaagaacgtatgaagctaatgttgatgatgtagggtataggcttgttgcaatttatacacctgtaagagaggatggagttgagggacaacctgtttctgtttcaacagaacagattgcagttgagcctgaactttacagggaagtgaaacagaagctcgatgatggttcagtcaaatttgaggttctgtgtgacaaggaccgaacacccaaaaaggcacaagtaatgggccatttggagcggagggttttggaagtcaaccgaaagaggataaaagtagtaaagcctggatctaagacatcattcccgagtactgaagtacgaggaacctacgctccaccgttccatgtcgagctgtatcgcaatgaccagcaccgcttcaagattgttgtcgacggtgatactgaagttgacttaatggtgcaaacacggcacatgcgagaccgcatcatcctcacgatcagaggcctcgcccagaagttcaacagcacctccctcaacacacttctcaggatcgagtcatgatagacctgacagtgtaaaaaccaactattacgggaagctgtaccccttgttccgattggttagagtgcgtggttttagtaggattcgtgacatgccagccttttgtgtgtatgggtgtgggacgggccgagcgtgttggattacaattttttccctgacacatctctcaaatcagagcagcatcagctggttgctctgactggtgccgtcgtgcgtcatgaaatgtacatagggtggttagagcgagaaagagagtggtgtttcttggtgctgtatttattatgcactggttgggttgggttttttcgactgccattctcatactaagtattggttctttcttttttcggtcgttgggtttgcatatacttgtaccgacaacacagcttggggtgattgggcgagtgctgttcagaatgcctggtccacacttgtgtacgactggaatcctacggtggcgtattcacatgctgttttatggtgcaaatgtaaattcatctgttcataaacgagaatcaaaatcgtcggccacgtgtattcgtcgtattcgtaccgatgtatactaccttataaaccagtactaatctcacggtggcatcaattatcttcctctgtttcacaa

SEQ ID NO: 64653 - DNA, 5543 bp, Zea Mays
aggggaatggaaactccatcagaggccttgaagccggcggaggctaaaccggcgaagccacggccagtggcgcccacgggcaggttcgccttggggactgcttcgtccattaaaaagcgagctgatggttcggctccggcggaggtgggtgtgccccggtcttccttgatgaagtctacctcgtcgctgaacgccagttcggcgacgagaagaagcagcacggggactgctgggaagcaacaggacaatgggagctcagctgctgctaagaagtctagtcctacgctgtcggatggcgcgaggaagactaaactggtgtcagctcccgctgctggctcaaaaccagcagtggagaagaaaacatccttggtcgagaggacaggtgccgatttggccaggaagcctgctgttaaggcatccccaacttcaacactgaagaaggtccagtcaaagacagagagctccaatggcagcagtggcagcaccaggagagtgtcctccaatgcttctgtgccatcgccacgttccgtcacaagcaatgcagcaaggaaactgggtactcaagcatcatctgctgcgtctaatcggcggaagagctcaaccgcagatagccgtgattcgagattcatgatgctgccacaggtggatttgaaggctagcgatgaagtgaggctggattcaagaggtcatcgagttcgtagtctcaagcagctgaggttatcacatgctcttgagtttgtgtatctgagggacaaccttttatcaagtttggagggcattgagattctcaagggggtaaaggttcttgatttgagttttaatgattttaagctccctgggtttgagcctcttgggaactgtgttgtcctccagcaactgtatcttgctggaaatcaaataacttcacttgctagccttcctgaacttcctaacttggagttcctttctattgctcaaaacaggctaaagtcagtttgtatggctcgacagcctcgacttcaagtgttagcagctagcagaaacaaaatatcaactttgaagggatttccacattttccttctctagagcatttgcgtgttgaggagaatccactacttgagatgccacacttggaagctgcttctatcctacttataggtcctactttgaagaagttcaatgaccgagatctgaaccccaacgaggctgaggtagctaagcaatatcctgctcatacagctatttgcattcgggatggttgggaattttgctcccctgaacttgctgctgattcaacattttctttcctacttgagcaatggaataataagctgcctcaaggttacatggtgaataaagcttatgttgaccatccgtttgaagaggatccatgccattgccattttagattcacaaatcttggtggtgagggtgagctagtcctcaaataccaatggtttctgggtggcaaaacaccaacagattttgttgctatccctggtgcatcgagcgaggtgtactggccaaaacgtgaggatgttggaagatgtttgaaagttgaatgcactccaatagtaaatggtgcagaattttcgcccgtttttgctgtatctttacctgtttctccaggtactggatgtccaaaggtcatcaatctggcagtcagtggtgaagtagtggaaggaaacatactcagtggagttcctgaaattgcctggtgtggtggaacacctgggaaaggcgttgcaagttggttaaggcggaggtggaacggcaatgctgtagtaattgatggagctgaggggatggaatatcagttgacagtcaatgatatcaattcaagtttggtatttatgtacacccctgttacagacgagggtgtcaagggagagccgcaatgtacaatgacagattttgtgaaggctgcaacaccatcagtcagcaatgtgcatgttctgggagatattgttgaagataacattatcgtagggaaaggaaaatacttcggtggcagagagggactaagtaaaatccggtggtttagagagaaggaaaatggtgaatttcttcttgtgctatcagacagcatggagtatacactaaccaaggaggacgtggggagacacctcaaatttgtatatatccctgttaaccttgaaggtcaggagggtgaatctgcttgtgcgataacagatgtagttaagaaagcccctccaaaagtattcaatctaaagattgttggggaatctatggaaggaagcaagatatctgccagtgctactgttacaggtggaactgaagggtccagcagggttcaatggtacaaggcatcttcctctgaatttaagaatgaacatgagcttgaagcccttactccgtcacgagtttctaagacattccgcattcctcttggtgctgttggatattatatcgttgcaaagtttacacctgtggcacctgatggtgaagtcggtgaaccagcctatgctacatcagatggccttgtggaaacactaccacccagcctgaacttcttaacagtcactggtgaattctctgagggtcagatattaacagcatcatatgggtatatcggaggacatgaaggaaatagtttatacagctggcaccttcatgaggctgaagatgacgaaggcactccactttcagaggcaaccggtttgctacaatactgtgttacaaaggaagctgttggaaagtttgtttctttcaaatgcacccctgtcagagatgatgatattgttggtgaggcaagatcattcataggaaaggacagagttactccagggatgccgacattactttctcttgaagtaactggtgatgcaattgaaggaacaactatgtttgccagtaaaaggtattggggaggagaagaaggggacacaatgttccgctggatactgacaaattctgatggaaccgagaaagaaattgaaggagcaacaagttcatcatacaccttgaaatgcaatgacattggcttctacatatctgtcttgtgcaagcctgttagaaatgatggagttgatggttctttagtgtcgactgaagcgattggtcctattataccagggccaccaacatgtcaatctcttgaactagctggctctatggttgaaggtggccgtttgacctttcatgctgtgtatacaggaggtttgcggggaagttgcatccaagaatggttcagattacatgatgatgggcacaaggacaagttgactgctgatgaatgtctagaccttgatctagctgatatcgattgccggattgaacttatgtatacacctgtacgagaagacggagtgcacgggttaccaaggagtgttacttctgatacaatcttacctggggagcccaagggtgtcaatcttattctacctgagtgttttgaggacaatgaaatttctcccatcaaaacctatttcggtggcaaggaaggcactggcaaatatacatggtttcgaaataaagagaaacttgataacttggaatttgatctggttgctgaatcatcagaagttgttggagaaaccttaaaatataagccttcattgaatgatgttagttcctatctgattctttattgggttcctacacggcgtgatggaaaggttggtgatcctttgatggctatctctgatgatccggtcatggcagaaaagttcagatgtatattgtggactaggcatctattatggtggatatgagggattaagcttgtatagatggtacagggaatctagtgatggaactaggcttcacatagatggtgctgattcagtcacatacgaagtgacagatgctgattacagctgccgtctactgtttggttatactcctgttcgttcagatgggataagtggagaagaaaaactctctgaaccatctgatgtaattttgccagaactactcaaaatcgagacactcaatttcaaggggaatcaggttgaaagagaaacactgactgctgctgaacaaattccgtacagtgagattcaacaacatatatggaaaaattataagaaagagatgaaatatcaatggtttatttccaatgaatcaggaggcgatcagtcttttgaaccattggcaacccagtgttctcgctcatacaaagtgcgctttgaggatattggtcgttgcctgaaatgcgaatgctttgtcactgatgtatttggacgatctagtgaattggtatccgctgtgactgctcctattttgccaggaaggcctaaaattgaaaagctggagattgaaggaagaggtttccacactgacctatatgccgttcagggtacctatagcggaggcaaagaaggcaagagtaaaatacaatggctcagatcgatggttggaagccctgatcttatctccatacctggcgaaactggaagaacgtatgaagctaatgttgatgatgtagggtataggcttgttgcaatttatacacctgtaagagaggatggagttgagggacaacctgtttctgtttcaacagaacagattgcagttgagcctgaactttacagggaagtgaaacagaagctcgatgatggttcagtcaaatttgaggttctgtgtgacaaggaccgaacacccaaaaaggcacaagtaatgggccatttggagcggagggttttggaagtcaaccgaaagaggataaaagtagtaaagcctggatctaagacatcattcccgagtactgaagtacgaggaacctacgctccaccgttccatgtcgagctgtatcgcaatgaccagcaccgcttcaagattgttgtcgacggtgatactgaagttgacttaatggtgcaaacacggcacatgcgagaccgcatcatcctcacgatcagaggcctcgcccagaagttcaacagcacctccctcaacacacttctcaggatcgagtcatgatagacctgacagtgtaaaaaccaactattacgggaagctgtaccccttgttccgattggttagagtgcgtggttttagtaggattcgtgacatgccagccttttgtgtgtatgggtgtgggacgggccgagcgtgttggattacaattttttccctgacacatctctcaaatcagagcagcatcagctggttgctctgactggtgccgtcgtgcgtcatgaaatgtacatagggtggttagagcgagaaagagagtggtgtttcttggtgctgtatttattatgcactggttgggttgggttttttcgactgccattctcatactaagtattggttctttcttttttcggtcgttgggtttgcatatacttgtaccgacaacacagcttggggtgattgggcgagtgctgttcagaatgcctggtccacacttgtgtacgactggaatcctacggtggcgtattcacatgctgttttatggtgcaaatgtaaattcatctgttcataaacgagaatcaaaatcgtcggccacgtgtattcgtcgtattcgtaccgatgtatactaccttataaaccagtactaatctcacggtggcatcaattatcttcctctgtttcacaa

SEQ ID NO: 64654 - DNA, 4318 bp, Zea Mays
attttcacagcctctttggtgctctaacagattcaacattttctttcctacttgagcaatggaataataagctgcctcaaggttacatggtgaataaagcttatgttgaccatccgtttgaagaggatccatgccattgccattttagattcacaaatcttggtggtgagggtgagctagtcctcaaataccaatggtttctgggtggcaaaacaccaacagattttgttgctatccctggtgcatcgagcgaggtgtactggccaaaacgtgaggatgttggaagatgtttgaaagttgaatgcactccaatagtaaatggtgcagaattttcgcccgtttttgctgtatctttacctgtttctccaggtactggatgtccaaaggtcatcaatctggcagtcagtggtgaagtagtggaaggaaacatactcagtggagttcctgaaattgcctggtgtggtggaacacctgggaaaggcgttgcaagttggttaaggcggaggtggaacggcaatgctgtagtaattgatggagctgaggggatggaatatcagttgacagtcaatgatatcaattcaagtttggtatttatgtacacccctgttacagacgagggtgtcaagggagagccgcaatgtacaatgacagattttgtgaaggctgcaacaccatcagtcagcaatgtgcatgttctgggagatattgttgaagataacattatcgtagggaaaggaaaatacttcggtggcagagagggactaagtaaaatccggtggtttagagagaaggaaaatggtgaatttcttcttgtgctatcagacagcatggagtatacactaaccaaggaggacgtggggagacacctcaaatttgtatatatccctgttaaccttgaaggtcaggagggtgaatctgcttgtgcgataacagatgtagttaagaaagcccctccaaaagtattcaatctaaagattgttggggaatctatggaaggaagcaagatatctgccagtgctactgttacaggtggaactgaagggtccagcagggttcaatggtacaaggcatcttcctctgaatttaagaatgaacatgagcttgaagcccttactccgtcacgagtttctaagacattccgcattcctcttggtgctgttggatattatatcgttgcaaagtttacacctgtggcacctgatggtgaagtcggtgaaccagcctatgctacatcagatggccttgtggaaacactaccacccagcctgaacttcttaacagtcactggtgaattctctgagggtcagatattaacagcatcatatgggtatatcggaggacatgaaggaaatagtttatacagctggcaccttcatgaggctgaagatgacgaaggcactccactttcagaggcaaccggtttgctacaatactgtgttacaaaggaagctgttggaaagtttgtttctttcaaatgcacccctgtcagagatgatgatattgttggtgaggcaagatcattcataggaaaggacagagttactccagggatgccgacattactttctcttgaagtaactggtgatgcaattgaaggaacaactatgtttgccagtaaaaggtattggggaggagaagaaggggacacaatgttccgctggatactgacaaattctgatggaaccgagaaagaaattgaaggagcaacaagttcatcatacaccttgaaatgcaatgacattggcttctacatatctgtcttgtgcaagcctgttagaaatgatggagttgatggttctttagtgtcgactgaagcgattggtcctattataccagggccaccaacatgtcaatctcttgaactagctggctctatggttgaaggtggccgtttgacctttcatgctgtgtatacaggaggtttgcggggaagttgcatccaagaatggttcagattacatgatgatgggcacaaggacaagttgactgctgatgaatgtctagaccttgatctagctgatatcgattgccggattgaacttatgtatacacctgtacgagaagacggagtgcacgggttaccaaggagtgttacttctgatacaatcttacctggggagcccaagggtgtcaatcttattctacctgagtgttttgaggacaatgaaatttctcccatcaaaacctatttcggtggcaaggaaggcactggcaaatatacatggtttcgaaataaagagaaacttgataacttggaatttgatctggttgctgaatcatcagaagttgttggagaaaccttaaaatataagccttcattgaatgatgttagttcctatctgattctttattgggttcctacacggcgtgatggaaaggttggtgatcctttgatggctatctctgatgatccggtcatggcagcttttccatctgtttcggatgttcacttagagcagaaaagttcagatgtatattgtggactaggcatctattatggtggatatgagggattaagcttgtatagatggtacagggaatctagtgatggaactaggcttcacatagatggtgctgattcagtcacatacgaagtgacagatgctgattacagctgccgtctactgtttggatgggataagtggagaagaaaaactctctgaaccatctgatgtaattttgccagaactactcaaaatcgagacactcaatttcaaggggaatcaggttgaaagagaaacactgactgctgctgaacaaattccgtacagtgagattcaacaacatatatggaaaaattataagaaagagatgaaatatcaatggtttatttccaatgaatcaggaggcgatcagtcttttgaaccattggcaacccagtgttctcgctcatacaaagtgcgctttgaggatattggtcgttgcctgaaatgcgaatgctttgtcactgatgtatttggacgatctagtgaattggtatccgctgtgactgctcctattttgccaggaaggcctaaaattgaaaagctggagattgaaggaagaggtttccacactgacctatatgccgttcagggtacctatagcggaggcaaagaaggcaagagtaaaatacaatggctcagatcgatggttggaagccctgatcttatctccatacctggcgaaactggaagaacgtatgaagctaatgttgatgatgtagggtataggcttgttgcaatttatacacctgtaagagaggatggagttgagggacaacctgtttctgtttcaacagaacagattgcagttgagcctgaactttacagggaagtgaaacagaagctcgatgatggttcagtcaaatttgaggttctgtgtgacaaggaccgaacacccaaaaaggcacaagtaatgggccatttggagcggagggttttggaagtcaaccgaaagaggataaaagtagtaaagcctggatctaagacatcattcccgagtactgaagtacgaggaacctacgctccaccgttccatgtcgagctgtatcgcaatgaccagcaccgcttcaagattgttgtcgacggtgatactgaagttgacttaatggtgcaaacacggcacatgcgagaccgcatcatcctcacgatcagaggcctcgcccagaagttcaacagcacctccctcaacacacttctcaggatcgagtcatgatagacctgacagtgtaaaaaccaactattacgggaagctgtaccccttgttccgattggttagagtgcgtggttttagtaggattcgtgacatgccagccttttgtgtgtatgggtgtgggacgggccgagcgtgttggattacaattttttccctgacacatctctcaaatcagagcagcatcagctggttgctctgactggtgccgtcgtgcgtcatgaaatgtacatagggtggttagagcgagaaagagagtggtgtttcttggtgctgtatttattatgcactggttgggttgggttttttcgactgccattctcatactaagtattggttctttcttttttcggtcgttgggtttgcatatacttgtaccgacaacacagcttggggtgattgggcgagtgctgttcagaatgcctggtccacacttgtgtacgactggaatcctacggtggcgtattcacatgctgttttatggtgcaaatgtaaattcatctgttcataaacgagaatcaaaatcgtcggccacgtgtattcgtcgtattcgtaccgatgtatactaccttataaaccagtactaatctcacggtggcatcaattatcttcctctgtttcacaa

SEQ ID NO: 64655 - DNA, 3869 bp, Zea Mays
ctgataaacagtcagacattaacaatgacataaatttgtcaggagggtgaatctgcttgtgcgataacagatgtagttaagaaagcccctccaaaagtattcaatctaaagattgttggggaatctatggaaggaagcaagatatctgccagtgctactgttacaggtggaactgaagggtccagcagggttcaatggtacaaggcatcttcctctgaatttaagaatgaacatgagcttgaagcccttactccgtcacgagtttctaagacattccgcattcctcttggtgctgttggatattatatcgttgcaaagtttacacctgtggcacctgatggtgaagtcggtgaaccagcctatgctacatcagatggccttgtggaaacactaccacccagcctgaacttcttaacagtcactggtgaattctctgagggtcagatattaacagcatcatatgggtatatcggaggacatgaaggaaatagtttatacagctggcaccttcatgaggctgaagatgacgaaggcactccactttcagaggcaaccggtttgctacaatactgtgttacaaaggaagctgttggaaagtttgtttctttcaaatgcacccctgtcagagatgatgatattgttggtgaggcaagatcattcataggaaaggacagagttactccaggtgcttctgttttcgttttcttgaaaaaattacgacactgaagatattattctgtcacaaaagagacactcctctttgtgtgcttgtatggatgacaaaaaaacatgtttggaaattaagtgatgcatgagcctggattatgtatggaaatatggatatcacacatacttttgcattatggatatcacacataatatgtgacgaactacaaagatgtgaaacagaaaagaagtacaacaattgtagcacactcctgagggcctgtttgggaactcttcctcaaaaccacagttttataatgccacaatttattgtatgccattgacatagccatggtatattttacatcagtccaatctgatacctatttggagacacaatatttcagttgtagtgtagaagagaagactgcagggatgccgacattactttctcttgaagtaactggtgatgcaattgaaggaacaactatgtttgccagtaaaaggtattggggaggagaagaaggggacacaatgttccgctggatactgacaaattctgatggaaccgagaaagaaattgaaggagcaacaagttcatcatacaccttgaaatgcaatgacattggcttctacatatctgtcttgtgcaagcctgttagaaatgatggagttgatggttctttagtgtcgactgaagcgattggtcctattataccagggccaccaacatgtcaatctcttgaactagctggctctatggttgaaggtggccgtttgacctttcatgctgtgtatacaggaggtttgcggggaagttgcatccaagaatggttcagattacatgatgatgggcacaaggacaagttgactgctgatgaatgtctagaccttgatctagctgatatcgattgccggattgaacttatgtatacacctgtacgagaagacggagtgcacgggttaccaaggagtgttacttctgatacaatcttacctggggagcccaagggtgtcaatcttattctacctgagtgttttgaggacaatgaaatttctcccatcaaaacctatttcggtggcaaggaaggcactggcaaatatacatggtttcgaaataaagagaaacttgataacttggaatttgatctggttgctgaatcatcagaagttgttggagaaaccttaaaatataagccttcattgaatgatgttagttcctatctgattctttattgggttcctacacggcgtgatggaaaggttggtgatcctttgatggctatctctgatgatccggtcatggcagcttttccatctgtttcggatgttcacttagagcagaaaagttcagatgtatattgtggactaggcatctattatggtggatatgagggattaagcttgtatagatggtacagggaatctagtgatggaactaggcttcacatagatggtgctgattcagtcacatacgaagtgacagatgctgattacagctgccgtctactgtttggatgggataagtggagaagaaaaactctctgaaccatctgatgtaattttgccagaactactcaaaatcgagacactcaatttcaaggggaatcaggttgaaagagaaacactgactgctgctgaacaaattccgtacagtgagattcaacaacatatatggaaaaattataagaaagagatgaaatatcaatggtttatttccaatgaatcaggaggcgatcagtcttttgaaccattggcaacccagtgttctcgctcatacaaagtgcgctttgaggatattggtcgttgcctgaaatgcgaatgctttgtcactgatgtatttggacgatctagtgaattggtatccgctgtgactgctcctattttgccaggaaggcctaaaattgaaaagctggagattgaaggaagaggtttccacactgacctatatgccgttcagggtacctatagcggaggcaaagaaggcaagagtaaaatacaatggctcagatcgatggttggaagccctgatcttatctccatacctggcgaaactggaagaacgtatgaagctaatgttgatgatgtagggtataggcttgttgcaatttatacacctgtaagagaggatggagttgagggacaacctgtttctgtttcaacagaacagattgcagttgagcctgaactttacagggaagtgaaacagaagctcgatgatggttcagtcaaatttgaggttctgtgtgacaaggaccgaacacccaaaaaggcacaagtaatgggccatttggagcggagggttttggaagtcaaccgaaagaggataaaagtagtaaagcctggatctaagacatcattcccgagtactgaagtacgaggaacctacgctccaccgttccatgtcgagctgtatcgcaatgaccagcaccgcttcaagattgttgtcgacggtgatactgaagttgacttaatggtgcaaacacggcacatgcgagaccgcatcatcctcacgatcagaggcctcgcccagaagttcaacagcacctccctcaacacacttctcaggatcgagtcatgatagacctgacagtgtaaaaaccaactattacgggaagctgtaccccttgttccgattggttagagtgcgtggttttagtaggattcgtgacatgccagccttttgtgtgtatgggtgtgggacgggccgagcgtgttggattacaattttttccctgacacatctctcaaatcagagcagcatcagctggttgctctgactggtgccgtcgtgcgtcatgaaatgtacatagggtggttagagcgagaaagagagtggtgtttcttggtgctgtatttattatgcactggttgggttgggttttttcgactgccattctcatactaagtattggttctttcttttttcggtcgttgggtttgcatatacttgtaccgacaacacagcttggggtgattgggcgagtgctgttcagaatgcctggtccacacttgtgtacgactggaatcctacggtggcgtattcacatgctgttttatggtgcaaatgtaaattcatctgttcataaacgagaatcaaaatcgtcggccacgtgtattcgtcgtattcgtaccgatgtatactaccttataaaccagtactaatctcacggtggcatcaattatcttcctctgtttcacaa

SEQ ID NO: 64656 - DNA, 3187 bp, Zea Mays
gttttcgttttcttgaaaaaattacgacactgaagatattattctgtcacaaaagagacactcctctttgtgtgcttgtatggatgacaaaaaaacatgtttggaaattaagtgatgcatgagcctggattatgtatggaaatatggatatcacacatacttttgcattatggatatcacacataatatgtgacgaactacaaagatgtgaaacagaaaagaagtacaacaattgtagcacactcctgagggcctgtttgggaactcttcctcaaaaccacagttttataatgccacaatttattgtatgccattgacatagccatggtatattttacatcagtccaatctgatacctatttggagacacaatatttcagttgtagtgtagaagagaagactgcagggatgccgacattactttctcttgaagtaactggtgatgcaattgaaggaacaactatgtttgccagtaaaaggtattggggaggagaagaaggggacacaatgttccgctggatactgacaaattctgatggaaccgagaaagaaattgaaggagcaacaagttcatcatacaccttgaaatgcaatgacattggcttctacatatctgtcttgtgcaagcctgttagaaatgatggagttgatggttctttagtgtcgactgaagcgattggtcctattataccagggccaccaacatgtcaatctcttgaactagctggctctatggttgaaggtggccgtttgacctttcatgctgtgtatacaggaggtttgcggggaagttgcatccaagaatggttcagattacatgatgatgggcacaaggacaagttgactgctgatgaccttgatctagctgatatcgattgccggattgaacttatgtatacacctgtacgagaagacggagtgcacgggttaccaaggagtgttacttctgatacaatcttacctggggagcccaagggtgtcaatcttattctacctgagtgttttgaggacaatgaaatttctcccatcaaaacctatttcggtggcaaggaaggcactggcaaatatacatggtttcgaaataaagagaaacttgataacttggaatttgatctggttgctgaatcatcagaagttgttggagaaaccttaaaatataagccttcattgaatgatgttagttcctatctgattctttattgggttcctacacggcgtgatggaaaggttggtgatcctttgatggctatctctgatgatccggtcatggcagcttttccatctgtttcggatgttcacttagagcagaaaagttcagatgtatattgtggactaggcatctattatggtggatatgagggattaagcttgtatagatggtacagggaatctagtgatggaactaggcttcacatagatggtgctgattcagtcacatacgaagtgacagatgctgattacagctgccgtctactgtttggttatactcctgttcgttcagatgggataagtggagaagaaaaactctctgaaccatctgatgtaattttgccagaactactcaaaatcgagacactcaatttcaaggggaatcaggttgaaagagaaacactgactgctgctgaacaaattccgtacagtgagattcaacaacatatatggaaaaattataagaaagagatgaaatatcaatggtttatttccaatgaatcaggaggcgatcagtcttttgaaccattggcaacccagtgttctcgctcatacaaagtgcgctttgaggatattggtcgttgcctgaaatgcgaatgctttgtcactgatgtatttggacgatctagtgaattggtatccgctgtgactgctcctattttgccaggaaggcctaaaattgaaaagctggagattgaaggaagaggtttccacactgacctatatgccgttcagggtacctatagcggaggcaaagaaggcaagagtaaaatacaatggctcagatcgatggttggaagccctgatcttatctccatacctggcgaaactggaagaacgtatgaagctaatgttgatgatgtagggtataggcttgttgcaatttatacacctgtaagagaggatggagttgagggacaacctgtttctgtttcaacagaacagattgcagttgagcctgaactttacagggaagtgaaacagaagctcgatgatggttcagtcaaatttgaggttctgtgtgacaaggaccgaacacccaaaaaggcacaagtaatgggccatttggagcggagggttttggaagtcaaccgaaagaggataaaagtagtaaagcctggatctaagacatcattcccgagtactgaagtacgaggaacctacgctccaccgttccatgtcgagctgtatcgcaatgaccagcaccgcttcaagattgttgtcgacggtgatactgaagttgacttaatggtgcaaacacggcacatgcgagaccgcatcatcctcacgatcagaggcctcgcccagaagttcaacagcacctccctcaacacacttctcaggatcgagtcatgatagacctgacagtgtaaaaaccaactattacgggaagctgtaccccttgttccgattggttagagtgcgtggttttagtaggattcgtgacatgccagccttttgtgtgtatgggtgtgggacgggccgagcgtgttggattacaattttttccctgacacatctctcaaatcagagcagcatcagctggttgctctgactggtgccgtcgtgcgtcatgaaatgtacatagggtggttagagcgagaaagagagtggtgtttcttggtgctgtatttattatgcactggttgggttgggttttttcgactgccattctcatactaagtattggttctttcttttttcggtcgttgggtttgcatatacttgtaccgacaacacagcttggggtgattgggcgagtgctgttcagaatgcctggtccacacttgtgtacgactggaatcctacggtggcgtattcacatgctgttttatggtgcaaatgtaaattcatctgttcataaacgagaatcaaaatcgtcggccacgtgtattcgtcgtattcgtaccgatgtatactaccttataaaccagtactaatctcacggtggcatcaattatcttcctctgtttcacaa

SEQ ID NO: 64657 - DNA, 2833 bp, Zea Mays
cataatatgtgacgaactacaaagatgtgaaacagaaaagaagtacaacaattgtagcacactcctgagggcctgtttgggaactcttcctcaaaaccacagttttataatgccacaatttattgtatgccattgacatagccatggtatattttacatcagtccaatctgatacctatttggagacacaatatttcagttgtagtgtagaagagaagactgcagggatgccgacattactttctcttgaagtaactggtgatgcaattgaaggaacaactatgtttgccagtaaaaggtattggggaggagaagaaggggacacaatgttccgctggatactgacaaattctgatggaaccgagaaagaaattgaaggagcaacaagttcatcatacaccttgaaatgcaatgacattggcttctacatatctgtcttgtgcaagcctgttagaaatgatggagttgatggttctttagtgtcgactgaagcgattggtcctattataccagggccaccaacatgtcaatctcttgaactagctggctctatggttgaaggtggccgtttgacctttcatgctgtgtatacaggaggtttgcggggaagttgcatccaagaatggttcagattacatgatgatgggcacaaggacaagttgactgctgatgaatgtctagaccttgatctagctgatatcgattgccggattgaacttatgtatacacctgtacgagaagacggagtgcacgggttaccaaggagtgttacttctgatacaatcttacctggggagcccaagggtgtcaatcttattctacctgagtgttttgaggacaatgaaatttctcccatcaaaacctatttcggtggcaaggaaggcactggcaaatatacatggtttcgaaataaagagaaacttgataacttggaatttgatctggttgctgaatcatcagaagttgttggagaaaccttaaaatataagccttcattgaatgatgttagttcctatctgattctttattgggttcctacacggcgtgatggaaaggttggtgatcctttgatggctatctctgatgatccggtcatggcagcttttccatctgtttcggatgttcacttagagcagaaaagttcagatgtatattgtggactaggcatctattatggtggatatgagggattaagcttgtatagatggtacagggaatctagtgatggaactaggcttcacatagatggtgctgattcagtcacatacgaagtgacagatgctgattacagctgccgtctactgtttggttatactcctgttcgttcagatgggataagtggagaagaaaaactctctgaaccatctgatgtaattttgccagaactactcaaaatcgagacactcaatttcaaggggaatcaggttgaaagagaaacactgactgctgctgaacaaattccgtacagtgagattcaacaacatatatggaaaaattataagaaagagatgaaatatcaatggaaggcctaaaattgaaaagctggagattgaaggaagaggtttccacactgacctatatgccgttcagggtacctatagcggaggcaaagaaggcaagagtaaaatacaatggctcagatcgatggttggaagccctgatcttatctccatacctggcgaaactggaagaacgtatgaagctaatgttgatgatgtagggtataggcttgttgcaatttatacacctgtaagagaggatggagttgagggacaacctgtttctgtttcaacagaacagattgcagttgagcctgaactttacagggaagtgaaacagaagctcgatgatggttcagtcaaatttgaggttctgtgtgacaaggaccgaacacccaaaaaggcacaagtaatgggccatttggagcggagggttttggaagtcaaccgaaagaggataaaagtagtaaagcctggatctaagacatcattcccgagtactgaagtacgaggaacctacgctccaccgttccatgtcgagctgtatcgcaatgaccagcaccgcttcaagattgttgtcgacggtgatactgaagttgacttaatggtgcaaacacggcacatgcgagaccgcatcatcctcacgatcagaggcctcgcccagaagttcaacagcacctccctcaacacacttctcaggatcgagtcatgatagacctgacagtgtaaaaaccaactattacgggaagctgtaccccttgttccgattggttagagtgcgtggttttagtaggattcgtgacatgccagccttttgtgtgtatgggtgtgggacgggccgagcgtgttggattacaattttttccctgacacatctctcaaatcagagcagcatcagctggttgctctgactggtgccgtcgtgcgtcatgaaatgtacatagggtggttagagcgagaaagagagtggtgtttcttggtgctgtatttattatgcactggttgggttgggttttttcgactgccattctcatactaagtattggttctttcttttttcggtcgttgggtttgcatatacttgtaccgacaacacagcttggggtgattgggcgagtgctgttcagaatgcctggtccacacttgtgtacgactggaatcctacggtggcgtattcacatgctgttttatggtgcaaatgtaaattcatctgttcataaacgagaatcaaaatcgtcggccacgtgtattcgtcgtattcgtaccgatgtatactaccttataaaccagtactaatctcacggtggcatcaattatcttcctctgtttcacaa

SEQ ID NO: 64658 - DNA, 2801 bp, Zea Mays
atgtgacgaactacaaagatgtgaaacagaaaagaagtacaacaattgtagcacactcctgagggcctgtttgggaactcttcctcaaaaccacagttttataatgccacaatttattgtatgccattgacatagccatggtatattttacatcagtccaatctgatacctatttggagacacaatatttcagttgtagtgtagaagagaagactgcagggatgccgacattactttctcttgaagtaactggtgatgcaattgaaggaacaactatgtttgccagtaaaaggtattggggaggagaagaaggggacacaatgttccgctggatactgacaaattctgatggaaccgagaaagaaattgaaggagcaacaagttcatcatacaccttgaaatgcaatgacattggcttctacatatctgtcttgtgcaagcctgttagaaatgatggagttgatggttctttagtgtcgactgaagcgattggtcctattataccagggccaccaacatgtcaatctcttgaactagctggctctatggttgaaggtggccgtttgacctttcatgctgtgtatacaggaggtttgcggggaagttgcatccaagaatggttcagattacatgatgatgggcacaaggacaagttgactgctgatgaatgtctagaccttgatctagctgatatcgattgccggattgaacttatgtatacacctgtacgagaagacggagtgcacgggttaccaaggagtgttacttctgatacaatcttacctggggagcccaagggtgtcaatcttattctacctgagtgttttgaggacaatgaaatttctcccatcaaaacctatttcggtggcaaggaaggcactggcaaatatacatggtttcgaaataaagagaaacttgataacttggaatttgatctggttgctgaatcatcagaagttgttggagaaaccttaaaatataagccttcattgaatgatgttagttcctatctgattctttattgggttcctacacggcgtgatggaaaggttggtgatcctttgatggctatctctgatgatccggtcatggcagttatactcctgttcgttcagatgggataagtggagaagaaaaactctctgaaccatctgatgtaattttgccagaactactcaaaatcgagacactcaatttcaaggggaatcaggttgaaagagaaacactgactgctgctgaacaaattccgtacagtgagattcaacaacatatatggaaaaattataagaaagagatgaaatatcaatggtttatttccaatgaatcaggaggcgatcagtcttttgaaccattggcaacccagtgttctcgctcatacaaagtgcgctttgaggatattggtcgttgcctgaaatgcgaatgctttgtcactgatgtatttggacgatctagtgaattggtatccgctgtgactgctcctattttgccaggaaggcctaaaattgaaaagctggagattgaaggaagaggtttccacactgacctatatgccgttcagggtacctatagcggaggcaaagaaggcaagagtaaaatacaatggctcagatcgatggttggaagccctgatcttatctccatacctggcgaaactggaagaacgtatgaagctaatgttgatgatgtagggtataggcttgttgcaatttatacacctgtaagagaggatggagttgagggacaacctgtttctgtttcaacagaacagattgcagttgagcctgaactttacagggaagtgaaacagaagctcgatgatggttcagtcaaatttgaggttctgtgtgacaaggaccgaacacccaaaaaggcacaagtaatgggccatttggagcggagggttttggaagtcaaccgaaagaggataaaagtagtaaagcctggatctaagacatcattcccgagtactgaagtacgaggaacctacgctccaccgttccatgtcgagctgtatcgcaatgaccagcaccgcttcaagattgttgtcgacggtgatactgaagttgacttaatggtgcaaacacggcacatgcgagaccgcatcatcctcacgatcagaggcctcgcccagaagttcaacagcacctccctcaacacacttctcaggatcgagtcatgatagacctgacagtgtaaaaaccaactattacgggaagctgtaccccttgttccgattggttagagtgcgtggttttagtaggattcgtgacatgccagccttttgtgtgtatgggtgtgggacgggccgagcgtgttggattacaattttttccctgacacatctctcaaatcagagcagcatcagctggttgctctgactggtgccgtcgtgcgtcatgaaatgtacatagggtggttagagcgagaaagagagtggtgtttcttggtgctgtatttattatgcactggttgggttgggttttttcgactgccattctcatactaagtattggttctttcttttttcggtcgttgggtttgcatatacttgtaccgacaacacagcttggggtgattgggcgagtgctgttcagaatgcctggtccacacttgtgtacgactggaatcctacggtggcgtattcacatgctgttttatggtgcaaatgtaaattcatctgttcataaacgagaatcaaaatcgtcggccacgtgtattcgtcgtattcgtaccgatgtatactaccttataaaccagtactaatctcacggtggcatcaattatcttcctctgtttcacaa

SEQ ID NO: 64659 - DNA, 710 bp, Zea Mays
cccatcccacgcctcgccgtgtccaggctttaagccacacgcacttgagctccaccgccactaccaccagtaccacaccactccgcgctagctgaggacggtacagcggcacagaggtgcgacgtacgacgacgacgacgcaggcgccacacatggcatcccagctctccgccgccgtgccccggttccacggcctccggggctacgccgcgcccaggtccgcggtggcagcgctgccgtccgtgagggtgggcaggaagaggtcgtcgtcgcagggcatccgctgcgactacatcggctccgccaccaacctgatcatggtgacgacgacgacgctgatgctgttcgcggggcggttcgggctggcgccgtccgcgaaccgcaaggcgacggcggggctgaagctggaggcgcgcgactccggcctgcagacgggtgaccccgccgggttcaccctcgccgacacgctggcctgcggcgccgtcggccacatcctcggcgtcggcatcgtgctcgggctcaagaacaccggcgccctcgaccagatcatcggctagatccctacgtcgccgttgttaagatcagactcagcagcctcgatcgcgccgccggccggcaggtgcaggtggtgactttgtaacgtgtgtgcgtgcgtacgtgtacattgcatccatcttggttccaatggacatatagctcctgttgctcaa

SEQ ID NO: 64660 - DNA, 503 bp, Zea Mays
acctgtcatggtgacgacgacgacgctgatgctgttcgcggggcggttcgggctggcgccgtccgcgaaccgcaaggcgacggcggggctgaagctggaggcgcgcgactccggcctgcagacgggtgaccccgccgggttcaccctcgccgacacgctggcctgcggcgccgtcggccacatcctcggcgtcggcatcgtgctcgggctcaagaacaccggcgccctcgaccagatcatcggctagatccctacgtcgccgttgttaagatcagactcagcagcctcgatcgcgccgccggccggcaggtgcaggtggtgactttgtaacgtgtgtgcgtgcgtacgtgtacattgcatccatcttggttccaatggacatatagctcctgttgctcctctagtcctcttgcgttgaccccgatcgatgagtatgacttctaccttccatgatagcaattagcaagcggttaaaacttataaaaaagagataaatccagatc

SEQ ID NO: 64661 - DNA, 666 bp, Zea Mays
cattgcagtagtggcgaccgagagcttgctaccttggcaccttgctgctgagctggagctcgagcacgaagtgagcccccggcctcactcaaggatggtataaaagggggagcgaggtcctccgtcgtctctagttagtccctcaggtcgatcgaggctagctagctagctgctgttgcttttcacctacaaatccaagacgtatacgtctcaccaaatccactggctggattttgtttttcaagtggcatccggtgaattacgcaggtgatgaaatcaaagcgataataattgtagagggagatgtcagatgtgagcttaaatctttgaatcacttgctggtggcgggtaactttcactactggcaacaacggccggggcgcgcgggaaatatagaccagataagttcagtcgattgatggccgacatggatcttctccttgaagatgaatatcagatatcgtggatacttgcggaggcgaaggcgaaggcgtgaagcttcttcacaactatgcatcctccatttcttttatagtacatgtttctttaagcggcttgcagaggaaaattaaactggtctgaagttttggctatattatgtactgttgctttgttatcagatacttgcactcctgcaaaaaaaaaatcagctttattaataatgcc

SEQ ID NO: 64662 - DNA, 4486 bp, Zea Mays
gcagaagcggatgaggaagcagtgtaggagagccaccctcgcttcccacctccagtgtctcatccgttccgacgacaaacacctccctttccctgcgctcccgtcttccttccagagctgccttgtctgcacatgcagaagcgccaagagcgagcgcctcatctctttatattgctctcacaccctccgtttctcgctcccacccactgccactgtacttgtgttgtgttagtgctgtgctgcgagaagaaggagaagcagaggaagagcaggtgctgagaagcctgccggcgcgcgttacgacaagcatatatgggggagatcaccaatgtcatggagtaccaggccatcgccaagcagaagcttccgaagatggcctacgactactacgcgtccggcgccgaggacgagtggacgctgcaggagaacagggaggccttctccaggatcttgttccgtccgcgcatactgatcgacgtgtccaagatcgacatgaccaccaccgtgctggggttcaagatctccatgcccatcatggtcgcccccactgctatgcagaagatggctcacccagatggggagaacgccactgcgcgcgcggcggctgcggcaggcaccataatgacactgtcgtcctgggcaacttcaagcgtcgaggaggttgcctcgaccgggccagggatccgcttcttccagctatacgtctacaaggacaggaaggtggtggagcagctggtgaggcgagctgaaagggctgggttcaaggccatcgcgctcaccgtcgacacgccgcgccttggccgcagggaagctgacatcaagaacagatttgtcctgccaccacacctgacgctcaagaacttcgaaggtctggacctcggcaaaatggaccaggctgctgattcagggctggcttcctatgtcgccggccaagtcgaccgcaccctgagctggaaagacgtcaagtggttgcagaccatcaccacgctgccgatcctcgtcaagggagtgctcaccgctgaagacagcttgcggtggcgaacggcgcggcggggatcatcgtgtcgaaccacggcgcgcggcagctggactacgtgccggcgaccatcagcgcgctggaggaggtcgtgaaggccgcccggggccagctccccgtgttcgtcgacggcggcgtccgccgcggcaccgacgtcttcaaggcgctcgcgctcggcgccgccggcgtattcgtcgggaggccggtggtgttctccctggcggcggcgggcgaggccggcgtgtccaacgtcctgcgcatgctgcgggacgagttcgagctcaccatggcgctcagcggctgcacctccctcgccgaaatcacccgcaagcacatcatcaccgagtccgacaagctcagcgccatcccgtcgcgcttgtagatgaggcaaaatcaatcgcctgctacgcctacgcctacgctacgccgccggtcgatcggggatactcagctcgtgcatggatgcatgcatgcgtgctcgacgacgatcatgataccatatataatctaggactgcgcatatatatatattttgttccagaaatgatcgatcacgtactgtactgtaaaatcttatagattattacacgcatggtgtgtgctgcatcttcattagttgttaataatggcgcacatggtgatctctctgtatttgaatatttgatcacaaagtatttgtttcaaatttttatgtgtgcccctatctctgtggagaacaacaaaacaacatttttttttgcttgccatcagaaaaaacgaaacagaacaacaggcagcatcagaacccaatcaaattccaatctcgtcgaaaacaaacaaacaaaccacgtcttcctcttacgttgggaaaaaaaagagataaactacgtatatatactgtgagcgatgcccctcaagtcaggcgatgaggcactaataacaggtactagtagtattttatctagctagcaagcagaggacgacgtcagcaaggccgggcggtctgttagtgcctcatcgcctgacagcctgagcctggcgtccgccggcgtagggcggggcggcggcggcggccgtccgggccttgcgcttctgcaggaacagctgcagcgaccgcttcatggacagcccggcgtccgccgcctggtcgatgtcgaccgccggtcccacgaggcctctgcctcgcgcgcaccgccgcgccagcgccacggcgctagtcgtagtgctgctgctgctgctgtcgccgtcctgctgccggccgtcgccgccgtctacccgcgtcagctgctgctgctgccgccgccgccgtccccggtggtccgccagggtctcctcgctcgccatggatatgatcgcccttgcctgaatgatgcgccaggacggccggccgtgaaaccgtacacaccgatcagtaacttgaagcagtgattacacgtgttcaatttaattaactattgacccgacaagagagtaaacaggagacaatgaacaacatataatttcatgatccaacttagaacagattcaatagtttacataaacaagttagtattgataaacactcgagtttgtaactttgtattcaaaccgatatatttcagatttttattggacatccacgggtaaaaaccgaaatcaagaaactgagcccgatagggaacctgaaatgaaagccgtgagtgggaaatcgaactcgaatccaaagtccaaacccattggacccaagaaccgaggaggatcagactcgaaaacttccatctatctctacatgcgagttggtcactcgtctttctttgtgtttgcgcgtgtggaccgtggaggtagtagacgtacagatggagacgagacgaagacaatttgtggaggaggccaagtccctgcctaaaccccaaaacacatttggcgcagcacgtgcgaaattgttttgtgaggattttcaactgtgaccgagcctgcaacgattgagacctcgatcggagtcaaagactcaaaagtcaccagcttaggcgacagacggctctgtctgtgcgccggggctaaaattctcttcacctacgtagcgcggttgctcgcatttttacgaaggtagacatatattttatatacaaatgcatgctcaaagctatgtactgcatccgtccttaagtaaaattagttagattttatacgatatttgatgtatatgttttatatatgtctaaatttatcaccaaccatttaaatatatgcatccgtccttaattaaactagtttctgagtcttctctaggtaaaaccagtttctaagaaactatatgtatctaaccaccttcttctatttttttctactaaaatcctgtttttagaaaccagatctagaaaccaacttctaaaaaaaccagggtgcatctaaatacagcctaacaatatgtgggttggcctgaacactagtttttaggagattgaagtcaccctttttctttgaacatgtcatctttttttccctcgtattcttttggggggcgtttgtactaatttctagtggttggaacaaatcattatttttttaatttttataccaatataatataacatgcatgataatgatctagtatatgcatgcatataagccggtgaaaaaaatatcagtacgtggtgactgaaaatgacaggaccaaaataggttgtacacctatttagtatttagtagtagctatttttttattttggaataaggtttgactgtagggggtatttcttttttcttgttcatattataatggaaaagagaggaacgtacaaatccacaggagtttcagggggaggggggggactattacaacgtttgtacctagctattagctaatcgatcaaaggcaaatcgcagatgaaatgtgtgtatgaaaatcggctgtttttttttcttcttcttgttctattcttacaaaaccagcctagagtcctagtctcctagactcaaaggtggtcggccaatgcaacgctagggagagcgagcatcgcaggcgagttcgttgttgcagaactattggacacgcagatggaatcctcatcatcgccaactgatccatccatgcggagtaattaactaagaagatgagagtttacctggatctcggtgacgtcggcggcgcacacccggccgttgtagaagatggtcatgttcctcctcgcctccgccggcggcggcagcggcggcggaggaagagcagccgcagtcgcggcaccgtcgtccgcccccgtcctgaggcgcaggctgagctcaacgcctcctccgccgccgccgccgttgctcaaaccactactctcctcgtcgtcgccaccgccaccgcgccaccgccgctcctgcgccgccgctccggcgacgccaccgtcgtcgacgtcccttcggccgtccatagaccggccactagcagctctctagatgcagccaacagacacaacacagggcaggcagccttcagctcgtctgtcg

SEQ ID NO: 64663 - DNA, 4490 bp, Zea Mays
gcagaagcggatgaggaagcagtgtaggagagccaccctcgcttcccacctccagtgtctcatccgttccgacgacaaacacctccctttccctgcgctcccgtcttccttccagagctgccttgtctgcacatgcagaagcgccaagagcgagcgcctcatctctttatattgctctcacaccctccgtttctcgctcccacccactgccactgtacttgtgttgtgttagtgctgtgctgcgagaagaaggagaagcagaggaagagcaggtgctgagaagcctgccggcgcgcgttacgacaagcatatatgggggagatcaccaatgtcatggagtaccaggccatcgccaagcagaagcttccgaagatggcctacgactactacgcgtccggcgccgaggacgagtggacgctgcaggagaacagggaggccttctccaggatcttgttccgtccgcgcatactgatcgacgtgtccaagatcgacatgaccaccaccgtgctggggttcaagatctccatgcccatcatggtcgcccccactgctatgcagaagatggctcacccagatggggagaacgccactgcgcgcgcggcggctgcggcaggcaccataatgacactgtcgtcctgggcaacttcaagcgtcgaggaggttgcctcgaccgggccagggatccgcttcttccagctatacgtctacaaggacaggaaggtggtggagcagctggtgaggcgagctgaaagggctgggttcaaggccatcgcgctcaccgtcgacacgccgcgccttggccgcagggaagctgacatcaagaacagatttgtcctgccaccacacctgacgctcaagaacttcgaaggtctggacctcggcaaaatggaccaggctgctgattcagggctggcttcctatgtcgccggccaagtcgaccgcaccctgagctggaaagacgtcaagtggttgcagaccatcaccacgctgccgatcctcgtcaagggagtgctcaccgctgaagacacgaggcttgcggtggcgaacggcgcggcggggatcatcgtgtcgaaccacggcgcgcggcagctggactacgtgccggcgaccatcagcgcgctggaggaggtcgtgaaggccgcccggggccagctccccgtgttcgtcgacggcggcgtccgccgcggcaccgacgtcttcaaggcgctcgcgctcggcgccgccggcgtattcgtcgggaggccggtggtgttctccctggcggcggcgggcgaggccggcgtgtccaacgtcctgcgcatgctgcgggacgagttcgagctcaccatggcgctcagcggctgcacctccctcgccgaaatcacccgcaagcacatcatcaccgagtccgacaagctcagcgccatcccgtcgcgcttgtagatgaggcaaaatcaatcgcctgctacgcctacgcctacgctacgccgccggtcgatcggggatactcagctcgtgcatggatgcatgcatgcgtgctcgacgacgatcatgataccatatataatctaggactgcgcatatatatatattttgttccagaaatgatcgatcacgtactgtactgtaaaatcttatagattattacacgcatggtgtgtgctgcatcttcattagttgttaataatggcgcacatggtgatctctctgtatttgaatatttgatcacaaagtatttgtttcaaatttttatgtgtgcccctatctctgtggagaacaacaaaacaacatttttttttgcttgccatcagaaaaaacgaaacagaacaacaggcagcatcagaacccaatcaaattccaatctcgtcgaaaacaaacaaacaaaccacgtcttcctcttacgttgggaaaaaaaagagataaactacgtatatatactgtgagcgatgcccctcaagtcaggcgatgaggcactaataacaggtactagtagtattttatctagctagcaagcagaggacgacgtcagcaaggccgggcggtctgttagtgcctcatcgcctgacagcctgagcctggcgtccgccggcgtagggcggggcggcggcggcggccgtccgggccttgcgcttctgcaggaacagctgcagcgaccgcttcatggacagcccggcgtccgccgcctggtcgatgtcgaccgccggtcccacgaggcctctgcctcgcgcgcaccgccgcgccagcgccacggcgctagtcgtagtgctgctgctgctgctgtcgccgtcctgctgccggccgtcgccgccgtctacccgcgtcagctgctgctgctgccgccgccgccgtccccggtggtccgccagggtctcctcgctcgccatggatatgatcgcccttgcctgaatgatgcgccaggacggccggccgtgaaaccgtacacaccgatcagtaacttgaagcagtgattacacgtgttcaatttaattaactattgacccgacaagagagtaaacaggagacaatgaacaacatataatttcatgatccaacttagaacagattcaatagtttacataaacaagttagtattgataaacactcgagtttgtaactttgtattcaaaccgatatatttcagatttttattggacatccacgggtaaaaaccgaaatcaagaaactgagcccgatagggaacctgaaatgaaagccgtgagtgggaaatcgaactcgaatccaaagtccaaacccattggacccaagaaccgaggaggatcagactcgaaaacttccatctatctctacatgcgagttggtcactcgtctttctttgtgtttgcgcgtgtggaccgtggaggtagtagacgtacagatggagacgagacgaagacaatttgtggaggaggccaagtccctgcctaaaccccaaaacacatttggcgcagcacgtgcgaaattgttttgtgaggattttcaactgtgaccgagcctgcaacgattgagacctcgatcggagtcaaagactcaaaagtcaccagcttaggcgacagacggctctgtctgtgcgccggggctaaaattctcttcacctacgtagcgcggttgctcgcatttttacgaaggtagacatatattttatatacaaatgcatgctcaaagctatgtactgcatccgtccttaagtaaaattagttagattttatacgatatttgatgtatatgttttatatatgtctaaatttatcaccaaccatttaaatatatgcatccgtccttaattaaactagtttctgagtcttctctaggtaaaaccagtttctaagaaactatatgtatctaaccaccttcttctatttttttctactaaaatcctgtttttagaaaccagatctagaaaccaacttctaaaaaaaccagggtgcatctaaatacagcctaacaatatgtgggttggcctgaacactagtttttaggagattgaagtcaccctttttctttgaacatgtcatctttttttccctcgtattcttttggggggcgtttgtactaatttctagtggttggaacaaatcattatttttttaatttttataccaatataatataacatgcatgataatgatctagtatatgcatgcatataagccggtgaaaaaaatatcagtacgtggtgactgaaaatgacaggaccaaaataggttgtacacctatttagtatttagtagtagctatttttttattttggaataaggtttgactgtagggggtatttcttttttcttgttcatattataatggaaaagagaggaacgtacaaatccacaggagtttcagggggaggggggggactattacaacgtttgtacctagctattagctaatcgatcaaaggcaaatcgcagatgaaatgtgtgtatgaaaatcggctgtttttttttcttcttcttgttctattcttacaaaaccagcctagagtcctagtctcctagactcaaaggtggtcggccaatgcaacgctagggagagcgagcatcgcaggcgagttcgttgttgcagaactattggacacgcagatggaatcctcatcatcgccaactgatccatccatgcggagtaattaactaagaagatgagagtttacctggatctcggtgacgtcggcggcgcacacccggccgttgtagaagatggtcatgttcctcctcgcctccgccggcggcggcagcggcggcggaggaagagcagccgcagtcgcggcaccgtcgtccgcccccgtcctgaggcgcaggctgagctcaacgcctcctccgccgccgccgccgttgctcaaaccactactctcctcgtcgtcgccaccgccaccgcgccaccgccgctcctgcgccgccgctccggcgacgccaccgtcgtcgacgtcccttcggccgtccatagaccggccactagcagctctctagatgcagccaacagacacaacacagggcaggcagccttcagctcgtctgtcg

SEQ ID NO: 64664 - DNA, 2142 bp, Zea Mays
ggaagcaatgctaagcattgcacctgcagagagtgcaggatgaggataccagaaccccaatcaactcctaacatgctatcattaagcaaaacagctaggcaatgggcagcgtacaagctacgaagcagcgagcgtttattttgcagggtggattcagcaagacagcaacagttcttttttttctgaccaatgaaacaccaaagagcgaaacacagcaacagatatgttggagaaactggacaagcaaatctacttacaaccaggcagaagagcctcaattcatctctccccgatttgaaaagcctcggtttatttctttacatctccagctccctccttataatagagactcgaaaagatcctactcgattgcgcgtctcatcagtgggcagtggctggctggctcaacaagcagctaagcatgcagaatctgactgctcgaaggtgtcaggtcgctgaactccttaggagcgtccacgtcctgccagcaaacggagtagcctggcgctcccctgctaccaggaccgccgccagcgggctcctcccgcacatgcccaatcgcgacgtggaggcctcgcccgacgactacgatcctactgtcgacgcagctcaccgagaagggcttcatgatgcgctcgggcatgggggcgccgccgaccgtgtcccacgagtccgtctccgggtcgtacaccttgaccttcatcctctcgtactccgagacgacgaacaggcgtcccgcgacgacgacgctcagccccgtccacccttcccgcatccccgccggcatcgcctcccaccggtccgccctcgggtcgtacacctggcccctcggcgccgagaagaagggccacgcgcacccctcggtcacgtacagcctgccgccgagcacggcggagtcggccgacgccatgttggcccccatgctggcgaccggccgccacgcgccggcgccagcggggtcgagcacctcggcggagctcagctcgaactggtccgcgctgtaccctcccgcgacgtacacgcggccgtcgatgacgccgccggcgaagaaggaccgcgccgccagcatccgcgccatcacggcccacctgttccggcacacgtcgtaccggagcacgaggtgcagcgggcagtccatgtcggagaccagcccgccgcagaccacgagcgcgtccccgccgtcgccggcagcagggacggccacgcagccgaacccgcgcgggcaggcgcggtcgcggcacggcatggccgggatggcgtgccagctgcgctgccccaggtccagcaccttccactggatctcgcccgtgcagcggtggaacgccagcgtgaacagccacggcgcgcgcagccccagcgcccgccgctgcgcgaagaaccgggccttgtctgccaggagatggcgccagcgccggcacaccagcctgcacgcgccgtgggactccacggccagccgcagcaggcagttcagcgccgcgtcgtcggggagccccgggatcagcgcctccgccgcctcccacgacgcctgctgcggacccgacgacgaagccggggtcgccgccaggcggaacctcggcgtcagcttcatctggccgtcgccgagcttgtggacgggcgcctggtgcgaggacacccgcacgcgacgcatgctccacccggccggccctccgccgcgggaggaaatcgagccgagaagagaacctcgaccgcgacctgctggctggccggttaggtcagggaggaaatccccgcaccaatttattgccgaggggggcctcgacgaggaattcaatcggccgccggcctggtacaatcggtaagtgacgaggaatcaatcgctgcacagctttgactggaaaaataatcgcggagaagaagagaaggggaactggcctagcctgctggtgctggacgctcgctccccaagcccggtaagagcaggctcggcctcggggacgccttcttcccttgacgcccggtggtggtggtgatggtgagtggcgccgaggaggggtgatgacgatagtcttcctcgatcggttggtccaaaccaccgaacagcgccagcagcgaggccgccgtaacgccagaccaagccagcagggcagcagagcagacggaggcaaagagtgccggtaaggt

SEQ ID NO: 64665 - DNA, 1623 bp, Zea Mays
gtgacattctatcaaacagcgtgcacaatcacaactcttcctctgcatccacacacacttgagccccacccgtgccgccgccccgcatcccttagcgctgccgctgccgctgccgctgccgccgcccatgtccgccgccccgccccgccgcgtggtcatctgcggcggcggcgtggtgggcgcgtgcacggcctacttcctcgccacccacgccgcgtcccccaccgtcccgacgctcgtcgagaggtgcgccccggcgtgcgccgcctcggggaaagccggcggcttcctggcgctggactggtgcgactccaccccggcgctctccaggctcgcgcgggcctccttcgcgctgcaccgccgcctggccgacgccctcggcggcgccgacgcctacggcttccgccccgtccacaccctctccgtcctgctccccccgcaccccgccgcctcctcctcgccgccgcacccgctgctcccgccctgggtcgacccctccgcgtccgccgccccgccgagggagcccgggacccccgacaccaccgcgcaggtccacccgggcctcttcaccaaggccgtcctcgccgcgtcgggagccgaggtcgtcatcggcgaggtggagcgcgtcgccgtggcctgggacggccgcgtcgccggcgtcgtggtcaaggggcgcgacggcgtgctggacgccgacgccgtcgtgctcgcgctcggcccgtggtccggccgcctcgaggtggtcagcgaggtgttcgacgtgtccgggctcaaggcgcacagcatcgtgctccggccgcgcgagcccgagaaggtcacgccgcactgcctcttcctcagctaccagccggagcccggcgccaagatgctcgaccccgaggtgtacccgcggcccaccggggaggtgtacatatgtgggatgagcaaggacgagaacccgccagatgacccagcaacgataacaggcgagccagactcgattgcaatgctgcataagatcgcagggaaagtgtccagccagctgaagaaggaggagggcgctgaggtggtcgcggagcaggcgtgctacctgccgtgcaccgccgacgggctgccggtcatcggggagataccaggcgtgaaggggtgctatgtggccacgggccacagctgctggggtatcctcaatggtccggccaccggcgcagccctcgccgagctcatccttgacggcaaggccaagatcgttgatctcgaacctttcagcccggcaaggtttctcaagagaaggagcaggcgtggagtctgacagtgtgaatgttcagattcaagctcgctactgaataaaacactcttggttctcccttttgcatgactgatgagtgttgcaaaacatgtatgtgcgaataaatcatggatatatagtacttgatgttctgtatttgttgttaatcacagacggacaacttgccaacacccatgatcagattcagatgttcatttagctgaggttgagctcgacaagctgttgcatctgcagctattctacgtacaccatgtctacgcaatgtttccttgtggtcaagtgacacaagtaaccttataaaaaagagtgagacctgtgctcgatatggttcatttcag

SEQ ID NO: 64666 - DNA, 717 bp, Zea Mays
gttcgcttgatcatatctttgcgtgcggattaggtttcgtctggactggactggactggttaggtactacttactactcggcagcagagggctgggcctggggctagtcaaggccgccgacgacggacggcgcggcaccggaatcagtggcgttcttctcccgtttggaccccccctgcagcgtcatgcatgttcatcagctccagtgtttctgtgtagtagattaggagtgtagagaagaggaggacgacgacgacgacagcacgcggcgacctaatgcgaagcggcaggttgtggttgcgtgcgtgtacgcgtcctcgatcgtcgtgcatccggggaaaaaaagaagaaaaaatatcgcgcgtgtttgtgtttgtgttttgcctaccgtagccagccaaagaaggttgtacagcagctagtaatgggtatggccactgctagtgcaagtaataaatcctagtattgtacagcttattaggtagccgccactcctgctctgtgggtttcgtgtctcgatgttttttgtactttgcagtgtactacgtacatactcagatgtgcttccatccagtgaagttggtggtctctcctgcgtttaccagatgtgctgggcactggacgcgcgtcggtcgtcggcacacaccaaaaaaaaaaacactgaagcacatctgcatgtatttttgcgcgcaaagatacgctcgtggcaacagagag

SEQ ID NO: 64667 - DNA, 3317 bp, Zea Mays
ctagctcctggcaggcaaagcgaagcttacacagacagggaaggaagcaaccgaagcagccaggaagcagccgttggcaaggcgcagtccctctcacctcacattccccgtctgggcatctccctcgcatctcctccacaggccacagcgccaccgcggcggcgtgccttttacaaatccgaggggcgtaaggaattccgccgcgtcctcccagaagaaaaacaaaagcgacaagcggctcgccctgcgggaggacccgacgacagctcactcgcgtgcgccacccatccacctccccgagacccgacccagatctcatctcgcgcgcggcggtccatggccaccgccgccaccgcttcccacccggcttccgcctccacctccggccgcgacgctctcgccgccgcctcctcctcccccgccgccgtctgcctcgtcccgttcaggtggtgggcgcgggtgcgggaggaggaggcggcgggcggggtgcagtacgcggccaccgccgccgcgtcgccctcctactacggcctcaggctgcttcacagcttgctgcacccggatctcgtcctgcgcctcgagcgcggggagtgccgcgccggtggcgggaacggaggcgggcgcagctacgcgctcgtcccggccgacgagctctccagggcgctcgccaggcaaaactctggtttgggtttacaaaataagcactcctttgctggagatagtgctggtgcttatcctttggtgcttaggatctctgtccgagaaacaagtatcttgacactgaagatcagcaaaaaggacaatccatttgagaattacaaacgggctaacaagatttttaatgtggattctcaaccagttcatgtttgggatttttcagggcagacaaacctaatattaatgaatgaatggaatagactacatgactgctgccatgcagatcaagagaatcttctggaagtgcaagtctatgcaatgtctgactccttaacatccaaaattggtggtaccaacaaagaaaattatggagatattagtgatatgaattctgattcgtcttacagaagttttggaagagctggttctatggggttaataggattggagaatctcggaaatacttgctttatgaacagttcaattcaatgtttggctcacacaccaaaacttgttgaatacttccttggtgattatgccaaaaatataaaccggactaatccattgggattgaacggtgaacttgccttggcgtttggagaactgttgaggagcttatggaccactgacggaaaaccagttccacctcattatttcaaggaaaaaattgcatgttttgctcctcagtttggtggctttaatcagcatgattcacaggaacttcttgcttttttactggatggtctccatgaagatcttaaccaggttaaatgtaaaccgtatgaagaagcaaaggatgcaagtggccgtcctgacgaagaagtagcagatgagtactggagcaaccatttagctcgaaatgactctgttatagttgatacatgccatggacagtacaaatctacattaacttgtcctacttgcattttcagcactgatggtagcagagaaccatgctcgtatgacgtcagtgtgccaaaatttgggactctgagtgatcttgttcaggctttaagcattgtttgcctacttggagatgatgagatcctgctggttacagaggtctataataactgcatcatccgatacttggaggagccttcagattcagtttcattgctgagggatggagataaactagcagcataccgtctacccaaaagacatgagaaatccccccttgtggtttttacacaccaacattttgtccagcattctagtgatggtaatttaactccacaaatgagggagtttgaggccccacttttggcagcacttccagaggaaattagtggattatctcttcaggatatctacctaaagttgttgagtccatttcaactttccaacggggctagttcgcttaatgattgtatggagtctaatagtgactccgtcgatacgccttctgattcaggcagtatcaattttcagaacagccaattggaagatggccctgaaagcaaccactgtagtgctagtgaatgtgaagtaacaaaaggacctgatgatttatacgatggggtttctggttctaacaaggaagcacatatggacttcgaattttatttaaaaagtgaaaggggcgagggccagcaacagaagatagaaattaatgagctccatttattattggagacagcaccaagccggttgcatgtgaatgtccactggctacagaatgcttcaagaaaatatgccacctcaatgctgaacaatctacctgagatccacaagctcgagcttatcccgaaaggaactgaagattctgttgcactacatggttgtctggaagcctttctaaaagaggaaccgttggggccggaggacatgtggtattgcccgcgctgcaagaagcatcagcaagcgatgaagaaactggatctgtggaggctgcccgaggttctggtgatccacctcaaacggttctcctacacccagttcacaaggaacaagctggagacgttcgtcgacttccccaccgtcgatttggacctgtcgtcctacgtcgcggacaagagcgagcagccgagcagccattatcgcctgtacgctgttagcaaccactacggaaacatgggagggggccattacaccgccagcatctatcatgaggaagggaaggggtggtacaagttcgatgacgactgcgtgacccctatgagcgaggacagcataaagaccccggctgcctatgttctgttctacagacgagagtgactgactggggattgaagcgcatttttctgcaggtgggttttggcgtgtctgagttttctaacgtttcggcatttgaatctctcaagccatactgacgcctaccggtgatacaacaacattatgtacagattcatctgccaacaggagagagagagagagagagagagagagagagagagagagagagagagagagagagagagagagagacctagctcagtgcaatattctttttttcgcatcagctcacagtattcttatatgggtagtacatggaccccacccacccgcacacaccaacattgtaattcctccgacttcaaccggtgatcacatcacattcaccattaaagaaagggtcaatagacacatcttttgtcgtcgcgcatcgaatcggagccagggcgatgtagtggcagtcgtgaccagcccccgttctg

SEQ ID NO: 64668 - DNA, 1457 bp, Zea Mays
tcatctcgcgcgcggcggtccatggccaccgccgccaccgcttcccacccggcttccgcctccacctccggccgcgacgctctcgccgccgcctcctcctcccccgccgccgtctgcctcgtcccgttcaggtggtgggcgcgggtgcgggaggaggaggcggcgggcggggtgcagtacgcggccaccgccgccgcgtcgccctcctactacggcctcaggctgcttcacagcttgctgcacccggatctcgtcctgcgcctcgagcgcggggagtgccgcgccggtggcgggaacggaggcgggcgcagctacgcgctcgtcccggccgacgagctctccagggcgctcgccaggcaaaactctggtttgggtttacaaaataagcactcctttgctggagatagtgctggtgcttatcctttggtgcttaggatctctgtccgagaaacaagtatcttgacactgaagatcagcaaaaaggacaatccatttgagaattacaaacgggctaacaagatttttaatgtggattctcaaccagttcatgtttgggatttttcagggcagacaaacctaatattaatgaatgaatggaatagactacatgactgctgccatgcagatcaagagaatcttctggaagtgcaagtctatgcaatgtctgactccttaacatccaaaattggtggtaccaacaaagaaaattatggagatattagtgatatgaattctgattcgtcttacagaagttttggaagagctggttctatggggttaataggattggagaatctcggaaatacttgctttatgaacagttcaattcaatgtttggctcacacaccaaaacttgttgaatacttccttggtgattatgccaaaaatataaaccggactaatccattgggattgaacggtgaacttgccttggcgtttggagaactgttgaggagcttatggaccactgacggaaaaccagttccacctcattatttcaaggaaaaaattgcatgttttgctcctcagtttggtggctttaatcagcatgattcacaggaacttcttgcttttttactggatggtctccatgaagatcttaaccaggttaaatgtaaaccgtatgaagaagcaaaggatgcaagtggccgtcctgacgaagaagtagcagatgagtactggagcaaccatttagctcgaaatgactctgttatagttgatacatgccatgtaagtttaaatgcccctattctttaaactccactcttcctgaaatagtgacatatttatagttctttcgtgcttgtaaccttatatctgtcgattgatctcacagactagaaatatgttattattaaaacacttatggaagtgaccctattctattgtaaatacttttttgcagattctaaacactaatcaggggctgggattaaaacacttaattgatctatagt

SEQ ID NO: 64669 - DNA, 3112 bp, Zea Mays
tcatctcgcgcgcggcggtccatggccaccgccgccaccgcttcccacccggcttccgcctccacctccggccgcgacgctctcgccgccgcctcctcctcccccgccgccgtctgcctcgtcccgttcaggtggtgggcgcgggtgcgggaggaggaggcggcgggcggggtgcagtacgcggccaccgccgccgcgtcgccctcctactacggcctcaggctgcttcacagcttgctgcacccggatctcgtcctgcgcctcgagcgcggggagtgccgcgccggtggcgggaacggaggcgggcgcagctacgcgctcgtcccggccgacgagctctccagggcgctcgccaggcaaaactctggtttgggtttacaaaataagcactcctttgctggagatagtgctggtgcttatcctttggtgcttaggatctctgtccgagaaacaagtatcttgacactgaagatcagcaaaaaggacaatccatttgagaattacaaacgggctaacaagatttttaatgtggattctcaaccaggcagacaaacctaatattaatgaatgaatggaatagactacatgactgctgccatgcagatcaagagaatcttctggaagtgcaagtctatgcaatgtctgactccttaacatccaaaattggtggtaccaacaaagaaaattatggagatattagtgatatgaattctgattcgtcttacagaagttttggaagagctggttctatggggttaataggattggagaatctcggaaatacttgctttatgaacagttcaattcaatgtttggctcacacaccaaaacttgttgaatacttccttggtgattatgccaaaaatataaaccggactaatccattgggattgaacggtgaacttgccttggcgtttggagaactgttgaggagcttatggaccactgacggaaaaccagttccacctcattatttcaaggaaaaaattgcatgttttgctcctcagtttggtggctttaatcagcatgattcacaggaacttcttgcttttttactggatggtctccatgaagatcttaaccaggttaaatgtaaaccgtatgaagaagcaaaggatgcaagtggccgtcctgacgaagaagtagcagatgagtactggagcaaccatttagctcgaaatgactctgttatagttgatacatgccatggacagtacaaatctacattaacttgtcctacttgcagtaaaacatctgtcacctttgacccatttatgtacttatctttgcctgtaccttccacggcaaagagggtaatgactgtaacagttttcagcactgatggtagcagagaaccatgctcgtatgacgtcagtgtgccaaaatttgggactctgagtgatcttgttcaggctttaagcattgtttgcctacttggagatgatgagatcctgctggttacagaggtctataataactgcatcatccgatacttggaggagccttcagattcagtttcattgctgagggatggagataaactagcagcataccgtctacccaaaagacatgagaaatccccccttgtggtttttacacaccaacattttgtccagcattctagtgatggtaatttaactccacaaatgagggagtttgaggccccacttttggcagcacttccagaggaaattagtggattatctcttcaggatatctacctaaagttgttgagtccatttcaactttccaacggggctagttcgcttaatgattgtatggagtctaatagtgactccgtcgatacgccttctgattcaggcagtatcaattttcagaacagccaattggaagatggccctgaaagcaaccactgtagtgctagtgaatgtgaagtaacaaaaggacctgatgatttatacgatggggtttctggttctaacaaggaagcacatatggacttcgaattttatttaaaaagtgaaaggggcgagggccagcaacagaagatagaaattaatgagctccatttattattggagacagcaccaagccggttgcatgtgaatgtccactggctacagaatgcttcaagaaaatatgccacctcaatgctgaacaatctacctgagatccacaagctcgagcttatcccgaaaggaactgaagattctgttgcactacatggttgtctggaagcctttctaaaagaggaaccgttggggccggaggacatgtggtattgcccgcgctgcaagaagcatcagcaagcgatgaagaaactggatctgtggaggctgcccgaggttctggtgatccacctcaaacggttctcctacacccagttcacaaggaacaagctggagacgttcgtcgacttccccaccgtcgatttggacctgtcgtcctacgtcgcggacaagagcgagcagccgagcagccattatcgcctgtacgctgttagcaaccactacggaaacatgggagggggccattacaccgccagcatctatcatgaggaagggaaggggtggtacaagttcgatgacgactgcgtgacccctatgagcgaggacagcataaagaccccggctgcctatgttctgttctacagacgagagtgactgactggggattgaagcgcatttttctgcaggtgggttttggtcggcaatccagagcagactgcctccctacacagtttgctgcttcaggcgtgtctgagttttctaacgtttcggcatttgaatctctcaagccatactgacgcctaccggtgatacaacaacattatgtacagattcatctgccaacaggagagagagagagagagagagagagagagagagagagagagagagagagagagagagagagagagacctagctcagtgcaatattctttttttcgcatcagctcacagtattcttatatgggtagtacatggaccccacccacccgcacacaccaacattgtaattcctccgacttcaaccggtgatcacatcacattcaccattaaagaaagggtcaatagacacatcttttgtcgtcgcgcatcgaatcggagccagggcgatgtagtggcagtcgtgaccagcccccgttctg

SEQ ID NO: 64670 - DNA, 860 bp, Zea Mays
caccagacacctttcctcctcccccctgaccccggcccattcagatctcgccttcacaacaacgacgaacagcgggtacgtacttggagatccaagaagctaagaaatgtcagcccagtttgcatccgagcatgcttgctatgtcaactgcaactattgcaacactatcctggtggtgaatgtgccaagcagttgttcctacaacgtggtgactgttaaatgtgggcattgtacaatggtgctgtccatggatctcagtcccttccatcagcaggcacgcactgtcccagacaaccaggttgtccagaacagagggtttcagtataacaattttgggagctacgagcaagcctcgtcaagaaatctacgaacgcctcccatgtatccagtgtcaaacaatcagccacaagtgccaccaatacgaccctcagagaagagacagcgtgttccatcagcatacaacagattcatcaaggaagaaatacaaaggataaagacgagcaacccagagattagccacagggaagcattcagtgctgcagcaaagaattgggctcatctccctcggctccatttcggcctcagcgtcgctgacggcggcggcggcagcaactagggaagacgatgattacggatcgagctcttcgccttacacatatatatatgcagtgtgctatgtcgtgcttggattttgtaagccttattaagttttttgacaacctgtgttttcagacctgttgcgtacttgcatgcatgaatcctgcattgcgtgcagtaattaacatgtttgatgctatatatgatatatgcatgcatggtgtacaacattactaaataaatggaaaatatttgttcaagaa

SEQ ID NO: 64671 - DNA, 715 bp, Zea Mays
cctcctcccccctgaccccggcccattcaggtgaatgtgccaagcagttgttcctacaacgtggtgactgttaaatgtgggcattgtacaatggtgctgtccatggatctcagtcccttccatcagcaggcacgcactgtcccagacaaccaggttgtccagaacagagggtttcagtataacaattttgggagctacgagcaagcctcgtcaagaaatctacgaacgcctcccatgtatccagtgtcaaacaatcagccacaagtgccaccaatacgaccctcagagaagagacagcgtgttccatcagcatacaacagattcatcaaggaagaaatacaaaggataaagacgagcaacccagagattagccacagggaagcattcagtgctgcagcaaagaattgggctcatctccctcggctccatttcggcctcagcgtcgctgacggcggcggcggcagcaactagggaagacgatgattacggatcgagctcttcgccttacacatatatatatgcagtgtgctatgtcgtgcttggattttgtaagccttattaagttttttgacaacctgtgttttcagacctgttgcgtacttgcatgcatgaatcctgcattgcgtgcagtaattaacatgtttgatgctatatatgatatatgcatgcatggtgtacaacattactaaataaatggaaaatatttgttcaagaa

SEQ ID NO: 64672 - DNA, 2792 bp, Zea Mays
ccttgtattctcaaggaaacctttatccatggctggaggtatcatactactcctgcttgtcatccccctcgtcgtgagaattgaagggagtgtcatgggggagagatccaactcgttctcacaggactccaataattctagccctgctgaaaacaaactcgaaccaggtctgctgctctggttggtgatcctaaaggggttgctaacaattggtatcagagggaaatcgttcctcgaccggaagcatccatggcgtctccttcactggtcgatactcagctcatcgaagcgttggagcaccaaacccgggttatcctcgccgaactcgacaagcggttcacggcgctcgactccaagtgggaagcgcgagtccagacgcaccaagtagcggtgggcgccgtcgtggagtggcggccccaggtggatgcctccatcgaacatcttcaacaacaccaagcagatcagccgcacctccgctccgtcgggaacatgccccacgagggcggcctcctctcttccgccatcaccaagcagatcgaacccgtctgccttaaggagcttgcattgctgggggacgccgactcgcgggtccaggccaccgaaaccgacgtcgtgttcccttccagcaaaatgctcagcctcgtcggcgcggtcgacaaggaggaacgccactcaacccaggaagtcccgagacgcgcacctcgtcgcaacgcgctacgaggggggaccaaacccaccccttcgccgtcttcgacgaccacagcgccgctggagcatcctgcactgggttcgcgcgagacgtggtcccgcgcctcctccacgctttgctcgtccgcgtcatgttcgtcgagcaggtggagggcatgcgcgacccggaggacgagggcttggcgcccaacgagaggaacctgcaacgcgtctgggcgcgcgacacactctactcaggcaccgccttcacccgcagcctcgggaacctcaccgcctccgcggcgctgcccacgccgctctacaggtatgtggcgccctgctacgactgttggggtagggtcaaccccgacgtccacgctgctccacacgcaagcatcaactgctccatgggtagaggaacaagtcagtggtagctcgcccctcgggtgttcgaccaaatgtctttgccaggctatgcaaaacattgtcaagccaaatccgccaaggatgaacgagatcacgggtgctgctcgtttgaaacctcaaggctcatttcactatggatctatcaatgggagccagatttacaagatgaggaatgaaccacctgttatcatcaatggaaagaaacgggttatagtgagtgccttggtgtggagaattaaatcactcgatataatgaccagttacattcttccaaagcccccttggttggcatttgatccaggcaaattgtttagagttgattacagctccagttccacaagtgcttccttaccgtatgcattgcaattttcacttgatgtccagacgatggaaacagttgatatagtcgttcctaatcagagatatactactggagaacaagtgtctgtggcagtttctgttgcagctactcaagggctggcatcagtgaatactatgaaattccagggcataatccagggtgtcaaggtagctattttggtggattccggcagctcccattcctttgtgagtgcagatctggcctcacaactatccagcgtggtgggcatggtgacactagtgtcagtgcaggtagcggatggcggtctcctgcagtgttattgccagttgttaggtgctaaatggatggtgcagcagtgtgagttctctaccaatttcagagtacttgacatttcagcatacaatgtcattgtggacatggattggttgtccagctacagttcgatgaaggtccattgggcccagtggtgggtgataattccttatcaaggctcttttgtattgcttcatggttgttcagctgttttgccaccaaggttttggattatagatgatggttggcaagagacacttgactattatccagagacgttgcatcagatgcttgttgcgaatgctgatgggagtttcaagctaccagggaattctgtgaaagactttcttgactctaaaactgccttgaagatacatgttttgataacaaattttcagaacaagcttcttgaagtaatcaatgcaactgaacttcctgaatttttgggggggccatgcacttatactatgggaggatgcctgatgtctaacaaaggtccatggaacgatccagatactatgaagctttcacataacaaggaagcaaagtttacaagacataatagaggtactgctctaaactccgatccggacaagttgtcttttaatgggttcattttgtgggagtattcaatcaagtgtgttgattggcaaccatgggcaccacccatgtcattggagattttgctggagattggtacgagtcgtcctaggccgtggccaaattttgcaccacctctaattccaagtcaaggatattgctcagttgtcaggcaaagtgaccacaatagcagatgtgtgaagtttccttattttgggagatgctcagccgagagtcaatgttttcagttcaaggccttgcaatacgtgttgcttcattcatggcatcaggatcctggatatgttcagtttctgcttcgacttgggggcaagtcgaattttaaggaggggagaatgtgagaggtgtccagacctagaataggtgtgaagtgtgtgtgcgtgctgggcgcgatgggtggagtgag

SEQ ID NO: 64673 - DNA, 3047 bp, Zea Mays
ccttgtattctcaaggaaacctttatccatggctggaggtatcatactactcctgcttgtcatccccctcgtcgtgagaattgaagggagtgtcatgggggagagatccaactcgttctcacaggactccaataattctagccctgctgaaaacaaactcgaaccaggtgaaaagtccttcgcatcggaggcatactgtgagaggtgtccagacctagaataggtgtgaagtgtgtgtgcgtgctgggcgcgatgggtggagtgagccactgtaaccaggatacatatacactgtcttgtggagggggaaaaggggatgcataatgagaattatcaacagaacttctctcattccttttctctgttcctgcttcctcttctccgatctctcatcttgtcctctacttccctattctgattaggtctgctgctctggttggtgatcctaaaggggttgctaacaattggtatcagagggaaatcgttcctcgaccggaagcatccatggcgtctccttcactggtcgatactcagctcatcgaagcgttggagcaccaaacccgggttatcctcgccgaactcgacaagcggttcacggcgctcgactccaagtgggaagcgcgagtccagacgcaccaagtagcggtgggcgccgtcgtggagtggcggccccaggtggatgcctccatcgaacatcttcaacaacaccaagcagatcagccgcacctccgctccgtcgggaacatgccccacgagggcggcctcctctcttccgccatcaccaagcagatcgaacccgtctgccttaaggagcttgcattgctgggggacgccgactcgcgggtccaggccaccgaaaccgacgtcgtgttcccttccagcaaaatgctcagcctcgtcggcgcggtcgacaaggaggaacgccactcaacccaggaagtcccgagacgcgcacctcgtcgcaacgcgctacgaggggggaccaaacccaccccttcgccgtcttcgacgaccacagcgccgctggagcatcctgcactgggttcgcgcgagacgtggtcccgcgcctcctccacgctttgctcgtccgcgtcatgttcgtcgagcaggtggagggcatgcgcgacccggaggacgagggcttggcgcccaacgagaggaacctgcaacgcgtctgggcgcgcgacacactctactcaggcaccgccttcacccgcagcctcgggaacctcaccgcctccgcggcgctgcccacgccgctctacaggtatgtggcgccctgctacgactgttggggtagggtcaaccccgacgtccacgctgctccacacgcaagcatcaactgctccatgggtagaggaacaagtcagtggtagctcgcccctcgggtgttcgaccaaatgtctttgccaggctatgcaaaacattgtcaagccaaatccgccaaggatgaacgagatcacgggtgctgctcgtttgaaacctcaaggctcatttcactatggatctatcaatgggagccagatttacaagatgaggaatgaaccacctgttatcatcaatggaaagaaacgggttatagtgagtgccttggtgtggagaattaaatcactcgatataatgaccagttacattcttccaaagcccccttggttggcatttgatccaggcaaattgtttagagttgattacagctccagttccacaagtgcttccttaccgtatgcattgcaattttcacttgatgtccagacgatggaaacagttgatatagtcgttcctaatcagagatatactactggagaacaagtgtctgtggcagtttctgttgcagctactcaagggctggcatcagtgaatactatgaaattccagggcataatccagggtgtcaaggtagctattttggtggattccggcagctcccattcctttgtgagtgcagatctggcctcacaactatccagcgtggtgggcatggtgacactagtgtcagtgcaggtagcggatggcggtctcctgcagtgttattgccagttgttaggtgctaaatggatggtgcagcagtgtgagttctctaccaatttcagagtacttgacatttcagcatacaatgtcattgtggacatggattggttgtccagctacagttcgatgaaggtccattgggcccagtggtgggtgataattccttatcaaggctcttttgtattgcttcatggttgttcagctgttttgccaccaaggttttggattatagatgatggttggcaagagacacttgactattatccagagacgttgcatcagatgcttgttgcgaatgctgatgggagtttcaagctaccagggaattctgtgaaagactttcttgactctaaaactgccttgaagatacatgttttgataacaaattttcagaacaagcttcttgaagtaatcaatgcaactgaacttcctgaatttttgggggggccatgcacttatactatgggaggatgcctgatgtctaacaaaggtccatggaacgatccagatactatgaagctttcacataacaaggaagcaaagtttacaagacataatagaggtactgctctaaactccgatccggacaagttgtcttttaatgggttcattttgtgggagtattcaatcaagtgtgttgattggcaaccatgggcaccacccatgtcattggagattttgctggagattggtacgagtcgtcctaggccgtggccaaattttgcaccacctctaattccaagtcaaggatattgctcagttgtcaggcaaagtgaccacaatagcagatgtgtgaagtttccttattttgggagatgctcagccgagagtcaatgttttcagttcaaggccttgcaatacgtgttgcttcattcatggcatcaggatcctggatatgttcagtttctgcttcgacttgggggcaagtcgaattttaaggaggggagaatgtgagaggtgtccagacctagaataggtgtgaagtgtgtgtgcgtgctgggcgcgatgggtggagtgag

SEQ ID NO: 64674 - DNA, 2085 bp, Zea Mays
ccttgtattctcaaggaaacctttatccatggctggaggtatcatactactcctgcttgtcatccccctcgtcgtgagaattgaagggagtgtcatgggggagagatccaactcgttctcacaggactccaataattctagccctgctgaaaacaaactcgaaccaggtgaaaagtccttcgcatcggaggcatatccggtgaaatggagcatatcaccatcactaggtcagcaatcgcaagagtctttcgagccagaagcatatccgatgaaatggaaagaaccaccaccatcaagccaacaatcgcaagactccttcgagccagaggcatatcgggtgaaatggaacaaatcaccaccaccacaccaacaatcgcaagactccttggagccggaggcatatcgggtgaaatggaacaaatcaccaccaccactccagcaatcccaagactccttcgagccagaggcatatcgggtgaaatggaacaaatcaccaccacctcaccaacaattgcaagactccttggagccggaggcatatcgggtgaaatggaacaaatcaccaccaccactccagcaatcccaaggctccttcgagtcagaggcatatcgggtgaaatggaacaaatcaccaccaccacaccaacaatcgcaagactccttcgagccagaggcatatcgggtgaaatggaacaaatcaccaccaccactccagcaatcccaagactccttcgagccagaggcatatcgggtgaaatggaacaaatcaccaccaccacaccaacaatcgcaagactccttcgagccggaggcatatcgggtgaaatggaacaaatcaccaccaccactccagcaatcgcaagactccttcgagccggaggcatatcgggtgaaatggaacaaatcaccaccaccactccaacaatcgcaagactccttcgagccggaagcatatcgggtgaaatggaacaaatcaccaccaccactccaacaatcccaagactccttcgagccggaggcatatcgggtgaaatggaacaaatcaccaccaccactccagcaatcgcaagactccttcgagccggaggcatatcgggtgaaatggaacaaatcaccaccaccactccaacaatcgcaagactctttcgagccggaggcatattgggtgggatggaagcaacatgcgcaaggagaaacagacgttgctgatgggacgacgccagcacgcggccatggcctgcatgtcgcgaccgggatgcttttcacgaggaagagcttgcttccagggacagccctaccggaaggcaccaggttcagcggccacggcttccccgatccgcagaggttcgcgctacgggcagacgcggacgccatccccttcagctacagccagctcgacgcgatcctaaggatgttccggatccctcgagggtccaagaaggcggagcaagtcgctgacacactccgggcatgcgaggccgagtcctcggacgctcatgcctgcgccacctccgagcaggcggcggcggactttgctgcctcctcgctcggggtcagggccagcgacctggtatcggtcgtcaccgccgtccacggggggaaggacgccactaggtacgtggtggcgcccgacggcgtcacacgcatcggcaaggcggcgggggccgcgaccgcggtgccgtgccacccgatgccgtacccgtacatggtccattactgccaccggccgacggacgtggaggcgctccgcgttgagctgactgggctcggagacgacggcgcgaccatcgcgatcgccatgtgccacgccaacaccatgagctgggacgaccgctacttccagatgttgaacgcgacgcgcggcgaggagatctgccacttcatgccgtggaactatgtgctatggctgccggctgccgaccttctagcgaataactaggatcaccttctaggcgggtgatacaccgtccattctaaaatgtaaaaaataaaaataaaaactatatacatagttttttattatgcacttagatatgcgttataattagatatataataaaaaaataaacgacttataatttataa

SEQ ID NO: 64675 - DNA, 4639 bp, Zea Mays
ccttgtattctcaaggaaacctttatccatggctggaggtatcatactactcctgcttgtcatccccctcgtcgtgagaattgaagggagtgtcatgggggagagatccaactcgttctcacaggactccaataattctagccctgctgaaaacaaactcgaaccaggtgaaaagtccttcgcatcggaggcatactgtgagaggtgtccagacctagaataggtgtgaagtgtgtgtgcgtgctgggcgcgatgggtggagtgagccactgtaaccaggatacatatacactgtcttgtggagggggaaaaggggatgcataatgagaattatcaacagaacttctctcattccttttctctgttcctgcttcctcttctccgatctctcatcttgtcctctacttccctattctgattaggtctgctgctctggttggtgatcctaaaggggttgctaacaattggtatcagagggaaatcgttcctcgaccggaagcatccatggcgtctccttcactggtcgatactcagctcatcgaagcgttggagcaccaaacccgggttatcctcgccgaactcgacaagcggttcacggcgctcgactccaagtgggaagcgcgagtccagacgcaccaagtagcggtgggcgccgtcgtggagtggcggccccaggtggatgcctccatcgaacatcttcaacaacaccaagcagatcagccgcacctccgctccgtcgggaacatgccccacgagggcggcctcctctcttccgccatcaccaagcagatcgaacccgtctgccttaaggagcttgcattgctgggggacgccgactcgcgggtccaggccaccgaaaccgacgtcgtgttcccttccagcaaaatgctcagcctcgtcggcgcggtcgacaaggaggaacgccactcaacccaggaagtcccgagacgcgcacctcgtcgcaacgcgctacgaggggggaccaaacccaccccttcgccgtcttcgacgaccacagcgccgctggagcatcctgcactgggttcgcgcgagacgtggtcccgcgcctcctccacgctttgctcgtccgcgtcatgttcgtcgagcaggtggagggcatgcgcgacccggaggacgagggcttggcgcccaacgagaggaacctgcaacgcgtctgggcgcgcgacacactctactcaggcaccgccttcacccgcagcctcgggaacctcaccgcctccgcggcgctgcccacgccgctctacaggtatgtggcgccctgctacgactgttggggtagggtcaaccccgacgtccacgctgctccacacgcaagcatcaactgctccatgggtagaggaacaagtcagtggtagctcgcccctcgggtgttcgaccaaatgtctttgccaggctatgcaaaacattgtcaagccaaatccgccaaggatgaacgagatcacgggtgctgctcgtttgaaacctcaaggctcatttcactatggatctatcaatgggagccagatttacaagatgaggaatgaaccacctgttatcatcaatggaaagaaacgggttatagtgagtgccttggtgtggagaattaaatcactcgatataatgaccagttacattcttccaaagcccccttggttggcatttgatccaggcaaattgtttagagttgattacagctccagttccacaagtgcttccttaccgtatgcattgcaattttcacttgatgtccagacgatggaaacagttgatatagtcgttcctaatcagagatatactactggagaacaagtgtctgtggcagtttctgttgcagctactcaagggctggcatcagtgaatactatgaaattccagggcataatccagggtgtcaaggtagctattttggtggattccggcagctcccattcctttgtgagtgcagatctggcctcacaactatccagcgtggtgggcatggtgacactagtgtcagtgcaggtagcggatggcggtctcctgcagtgttattgccagttgttaggtgctaaatggatggtgcagcagtgtgagttctctaccaatttcagagtacttgacatttcagcatacaatgtcattgtggacatggattggttgtccagctacagttcgatgaaggtccattgggcccagtggtgggtgataattccttatcaaggctcttttgtattgcttcatggttgttcagctgttttgccaccaaggttttggattatagatgatggttggcaagagacacttgactattatccagagacgttgcatcagatgcttgttgcgaatgctgatgggagtttcaagctaccagggaattctgtgaaagactttcttgactctaaaactgccttgaagatacatgttttgataacaaattttcagaacaagcttcttgaagtaatcaatgcaactgaacttcctgaatttttgggggggccatgcacttatactatgggaggatgcctgatgtctaacaaaggtccatggaacgatccagatactatgaagctttcacataacaaggaagcaaagtttacaagacataatagaggtctgctgctctggttggtgatcctaaaggggttgctaacacatacgcggtgaactggaacgaaccaccagacctgcaaatgcaagactccttcgagcgacctgagctatatcggaagcaatcagtgcaaggtgaaaagtccttcgcatcggaggcatatccggtgaaatggagcatatcaccatcactaggtcagcaatcgcaagagtctttcgagccagaagcatatccgatgaaatggaaagaaccaccaccatcaagccaacaatcgcaagactccttcgagccagaggcatatcgggtgaaatggaacaaatcaccaccaccacaccaacaatcgcaagactccttggagccggaggcatatcgggtgaaatggaacaaatcaccaccaccactccagcaatcccaagactccttcgagccagaggcatatcgggtgaaatggaacaaatcaccaccacctcaccaacaattgcaagactccttggagccggaggcatatcgggtgaaatggaacaaatcaccaccaccactccagcaatcccaaggctccttcgagtcagaggcatatcgggtgaaatggaacaaatcaccaccaccacaccaacaatcgcaagactccttcgagccagaggcatatcgggtgaaatggaacaaatcaccaccaccactccagcaatcccaagactccttcgagccagaggcatatcgggtgaaatggaacaaatcaccaccaccacaccaacaatcgcaagactccttcgagccggaggcatatcgggtgaaatggaacaaatcaccaccaccactccagcaatcgcaagactccttcgagccggaggcatatcgggtgaaatggaacaaatcaccaccaccactccaacaatcgcaagactccttcgagccggaagcatatcgggtgaaatggaacaaatcaccaccaccactccaacaatcccaagactccttcgagccggaggcatatcgggtgaaatggaacaaatcaccaccaccactccagcaatcgcaagactccttcgagccggaggcatatcgggtgaaatggaacaaatcaccaccaccactccaacaatcgcaagactctttcgagccggaggcatattgggtgggatggaagcaacatgcgcaaggagaaacagacgttgctgatgggacgacgccagcacgcggccatggcctgcatgtcgcgaccgggatgcttttcacgaggaagagcttgcttccagggacagccctaccggaaggcaccaggttcagcggccacggcttccccgatccgcagaggttcgcgctacgggcagacgcggacgccatccccttcagctacagccagctcgacgcgatcctaaggatgttccggatccctcgagggtccaagaaggcggagcaagtcgctgacacactccgggcatgcgaggccgagtcctcggacgctcatgcctgcgccacctccgagcaggcggcggcggactttgctgcctcctcgctcggggtcagggccagcgacctggtatcggtcgtcaccgccgtccacggggggaaggacgccactaggtacgtggtggcgcccgacggcgtcacacgcatcggcaaggcggcgggggccgcgaccgcggtgccgtgccacccgatgccgtacccgtacatggtccattactgccaccggccgacggacgtggaggcgctccgcgttgagctgactgggctcggagacgacggcgcgaccatcgcgatcgccatgtgccacgccaacaccatgagctgggacgaccgctacttccagatgttgaacgcgacgcgcggcgaggagatctgccacttcatgccgtggaactatgtgctatggctgccggctgccgaccttctagcgaataactaggatcaccttctaggcgggtgatacaccgtccattctaaaatgtaaaaaataaaaataaaaactatatacatagttttttattatgcacttagatatgcgttataattagatatataataaaaaaataaacgacttataatttataa

SEQ ID NO: 64676 - DNA, 1971 bp, Zea Mays
agccctcgctcagttggccggcctcgccttcgcatccgtccggccgcagtcaacctccggttcggagttcccattccccaccaaccaccgtctccatcgcaccgtcgcactgtcgcctcgccggccgcacctacgccgttgaagtcgctgtcgcagctgcagcatccatgtttaggacggaaagggcttcaacaagtgtgctaccaactgtccaactaccaagataagcatgcattgctgttttttctgtagtgatagatgcttttatgccaccatttggttcattttcacatgttttctttagcagaatcagtatggaaatactgctctttttttgctgtctttgttccattttctgtactatcttctccttttcatgatctttgttttggaaattgcgacatcaaatcccagtcaatctaaactttgtatgcttgcttggtttatctagtcatgtattaatactcatcacatttcagtgtctgctttgcaaaccaaattgatggttaagtgcttgcctatttgttctgcctgatttcatcgcagctcagttgtatgattgctgggtttcctacttttcagcttttgttttccgtttcatgttgtagtgttgctgtgtttcatgttttgatgagttttgttcatttatttgtagaacaacactctgtgttggtgtcaagatctatagagcaggcatttctagtaagtataggcttgagatgtgatgtttaccttctttatctaaataacattattgtaatgagctgtcaatgttacaagactacagaacaaatgcactgcattctattttagctaataggtttattctttggaaaagaaaatgatgtgctaattagcttagttctggggacttcaggggttccatgccggcctaacctattggaacgacttgttagttgttattccattgcatccaaagtccacatgttattttgttaagctccataatgctgtggcatcgtgttgcgaaaacattaattgggagaacattagtacatgaatacttgatcttcatagttcagttttcgtgcatgtgcacttgttagttgcgaaaatgaactaatttcccttggggaaataggtatcccttggaaaaatgggtttgccaaactagcccttagaggaactaattcctggcatatggtgctcagtgggcagtgcatcaggactcgaaggaagcatagcatcatcggtttttgtgtttcattaattctcatttcaagatggcatctgctggcctaaagccaggggtgcctgttattctacgggagctggagccatcctcagagatgttcaagcaaggagcgtcccttcgagtcacaggaaggagttttactctgcttttaagaaagcaaatattcaagggtacaggcaaagctgggacaccatctcacaagcaagtcaaaggcctctaacaacagcaacgacaagctagatttctattacatcagacaacatggtgtcactcgcttggtagttctgtagccatgcagcaattctcttctccatgtcttgcacttcagctttgtccttctatagcagcacgcaccacttctgcacgaaggagatagcaatgtatatgacatcagtaggtctgttcaggaaccacttctctattgccatcttatttgtataggtcagatcatccaagttagccctgcaaacataaacatacctagccacttaaaggcaccaagttttgtttccacccagttctcaacaaaatcagccaaagaagatgggaaccccacccaaccaaaggcatctatgataatgcaccatgcaagatgagcttttgtgaaaattaatcttcagatcagtcatccattcgaagcaatatagactaagcttaggttgaaaatatattggacagacccactatcacgatagctgtatcatcggcatattgtatatgtgtgtcacacccgggttttaggggtccaaagcccg

SEQ ID NO: 64677 - DNA, 961 bp, Zea Mays
agccctcgctcagttggccggcctcgccttcgcatccgtccggccgcagtcaacctccggttcggagttcccattccccaccaaccaccgtctccatcgcaccgtcgcactgtcgcctcgccggccgcacctacgccgttgaagtcgctgtcgcagctgcagtgggcagtgcatcaggactcgaaggaagcatagcatcatcggtttttgtgtttcattaattctcatttcaagatggcatctgctggcctaaagccaggggtgcctgttattctacgggagctggagccatcctcagagatgttcaagcaaggagcgtcccttcgagtcacaggaaggagttttactctgcttttaagaaagcaaatattcaagggtacaggcaaagctgggacaccatctcacaagcaagtcaaaggcctctaacaacagcaacgacaagctagatttctattacatcagacaacatggtgtcactcgcttggtagttctgtagccatgcagcaattctcttctccatgtcttgcacttcagctttgtccttctatagcagcacgcaccacttctgcacgaaggagatagcaatgtatatgacatcagtaggtctgttcaggaaccacttctctattgccatcttatttgtataggtcagatcatccaagttagccctgcaaacataaacatacctagccacttaaaggcaccaagttttgtttccacccagttctcaacaaaatcagccaaagaagatgggaaccccacccaaccaaaggcatctatgataatgcaccatgcaagatgagcttttgtgaaaattaatcttcagatcagtcatccattcgaagcaatatagactaagcttaggttgaaaatatattggacagacccactatcacgatagctgtatcatcggcatattgtatatgtgtgtcacacccgggttttaggggtccaaagcccg

SEQ ID NO: 64678 - DNA, 1958 bp, Zea Mays
agccctcgctcagttggccggcctcgccttcgcatccgtccggccgcagtcaacctccggttcggagttcccattccccaccaaccaccgtctccatcgcaccgtcgcactgtcgcctcgccggccgcacctacgccgttgaagtcgctgtcgcagctgcaggacggaaagggcttcaacaagtgtgctaccaactgtccaactaccaagataagcatgcattgctgttttttctgtagtgatagatgcttttatgccaccatttggttcattttcacatgttttctttagcagaatcagtatggaaatactgctctttttttgctgtctttgttccattttctgtactatcttctccttttcatgatctttgttttggaaattgcgacatcaaatcccagtcaatctaaactttgtatgcttgcttggtttatctagtcatgtattaatactcatcacatttcagtgtctgctttgcaaaccaaattgatggttaagtgcttgcctatttgttctgcctgatttcatcgcagctcagttgtatgattgctgggtttcctacttttcagcttttgttttccgtttcatgttgtagtgttgctgtgtttcatgttttgatgagttttgttcatttatttgtagaacaacactctgtgttggtgtcaagatctatagagcaggcatttctagtaagtataggcttgagatgtgatgtttaccttctttatctaaataacattattgtaatgagctgtcaatgttacaagactacagaacaaatgcactgcattctattttagctaataggtttattctttggaaaagaaaatgatgtgctaattagcttagttctggggacttcaggggttccatgccggcctaacctattggaacgacttgttagttgttattccattgcatccaaagtccacatgttattttgttaagctccataatgctgtggcatcgtgttgcgaaaacattaattgggagaacattagtacatgaatacttgatcttcatagttcagttttcgtgcatgtgcacttgttagttgcgaaaatgaactaatttcccttggggaaataggtatcccttggaaaaatgggtttgccaaactagcccttagaggaactaattcctggcatatggtgctcagtgggcagtgcatcaggactcgaaggaagcatagcatcatcggtttttgtgtttcattaattctcatttcaagatggcatctgctggcctaaagccaggggtgcctgttattctacgggagctggagccatcctcagagatgttcaagcaaggagcgtcccttcgagtcacaggaaggagttttactctgcttttaagaaagcaaatattcaagggtacaggcaaagctgggacaccatctcacaagcaagtcaaaggcctctaacaacagcaacgacaagctagatttctattacatcagacaacatggtgtcactcgcttggtagttctgtagccatgcagcaattctcttctccatgtcttgcacttcagctttgtccttctatagcagcacgcaccacttctgcacgaaggagatagcaatgtatatgacatcagtaggtctgttcaggaaccacttctctattgccatcttatttgtataggtcagatcatccaagttagccctgcaaacataaacatacctagccacttaaaggcaccaagttttgtttccacccagttctcaacaaaatcagccaaagaagatgggaaccccacccaaccaaaggcatctatgataatgcaccatgcaagatgagcttttgtgaaaattaatcttcagatcagtcatccattcgaagcaatatagactaagcttaggttgaaaatatattggacagacccactatcacgatagctgtatcatcggcatattgtatatgtgtgtcacacccgggttttaggggtccaaagcccg

SEQ ID NO: 64679 - DNA, 1478 bp, Zea Mays
agccctcgctcagttggccggcctcgccttcgcatccgtccggccgcagtcaacctccggttcggagttcccattccccaccaaccaccgtctccatcgcaccgtcgcactgtcgcctcgccggccgcacctacgccgttgaagtcgctgtcgcagctgcagaacaacactctgtgttggtgtcaagatctatagagcaggcatttctagtaagtataggcttgagatgtgatgtttaccttctttatctaaataacattattgtaatgagctgtcaatgttacaagactacagaacaaatgcactgcattctattttagctaataggtttattctttggaaaagaaaatgatgtgctaattagcttagttctggggacttcaggggttccatgccggcctaacctattggaacgacttgttagttgttattccattgcatccaaagtccacatgttattttgttaagctccataatgctgtggcatcgtgttgcgaaaacattaattgggagaacattagtacatgaatacttgatcttcatagttcagttttcgtgcatgtgcacttgttagttgcgaaaatgaactaatttcccttggggaaataggtatcccttggaaaaatgggtttgccaaactagcccttagaggaactaattcctggcatatggtgctcagtgggcagtgcatcaggactcgaaggaagcatagcatcatcggtttttgtgtttcattaattctcatttcaagatggcatctgctggcctaaagccaggggtgcctgttattctacgggagctggagccatcctcagagatgttcaagcaaggagcgtcccttcgagtcacaggaaggagttttactctgcttttaagaaagcaaatattcaagggtacaggcaaagctgggacaccatctcacaagcaagtcaaaggcctctaacaacagcaacgacaagctagatttctattacatcagacaacatggtgtcactcgcttggtagttctgtagccatgcagcaattctcttctccatgtcttgcacttcagctttgtccttctatagcagcacgcaccacttctgcacgaaggagatagcaatgtatatgacatcagtaggtctgttcaggaaccacttctctattgccatcttatttgtataggtcagatcatccaagttagccctgcaaacataaacatacctagccacttaaaggcaccaagttttgtttccacccagttctcaacaaaatcagccaaagaagatgggaaccccacccaaccaaaggcatctatgataatgcaccatgcaagatgagcttttgtgaaaattaatcttcagatcagtcatccattcgaagcaatatagactaagcttaggttgaaaatatattggacagacccactatcacgatagctgtatcatcggcatattgtatatgtgtgtcacacccgggttttaggggtccaaagcccg

SEQ ID NO: 64680 - DNA, 1411 bp, Zea Mays
agccctcgctcagttggccggcctcgccttcgcatccgtccggccgcagtcaacctccggttcggagttcccattccccaccaaccaccgtctccatcgcaccgtcgcactgtcgcctcgccggccgcacctacgccgttgaagtcgctgtcgcagctgcagcatccatgtttaggacggaaagggcttcaacaagtgtgctaccaactgtccaactaccaagataagcatgcattgctgttttttctgtagtgatagatgcttttatgccaccatttggttcattttcacatgttttctttagcagaatcagtatggaaatactgctctttttttgctgtctttgttccattttctgtactatcttctccttttcatgatctttgttttggaaattgcgacatcaaatcccagtcaatctaaactttgtatgcttgcttggtttatctagtcatgtattaatactcatcacatttcagtgtctgctttgcaaaccaaattgatggttaagtgcttgcctatttgttctgcctgatttcatcgcagctcagttgtatgattgctgggtttcctacttttcagcttttgttttccgtttcatgttgtagtgttgctgtgtttcatgttttgatgagttttgttcatttatttgtagaacaacactctgtgttggtgtcaagatctatagagcaggcatttctagtaagtataggcttgagatgtgatgtttaccttctttatctaaataacattattgtaatgagctgtcaatgttacaagactacagaacaaatgcactgcattctattttagctaataggtttattctttggaaaagaaaatgatgtgctaattagcttagttctggggacttcaggggttccatgccggcctaacctattggaacgacttgttagttgttattccattgcatccaaagtccacatgttattttgttaagctccataatgctgtggcatcgtgttgcgaaaacattaattgggagaacattagtacatgaatacttgatcttcatagttcagttttcgtgcatgtgcacttgttagttgcgaaaatgaactaatttcccttggggaaataggtatcccttggaaaaatgggtttgccaaactagcccttagaggaactaattcctggcatatggtgctcagtgggcagtgcatcaggactcgaaggaagcatagcatcatcggtttttgtgtttcattaattctcatttcaagatggcatctgctggcctaaagccaggggtgcctgttattctacgggagctggagccatcctcagagatgttcaagcaaggagcgtcccttcgagtcacaggaagtctccagtcattcgatgtggagtccgcgactgccaccattcaagacggcagccctgtttgatg

SEQ ID NO: 64681 - DNA, 1969 bp, Zea Mays
agccctcgctcagttggccggcctcgccttcgcatccgtccggccgcagtcaacctccggttcggagttcccattccccaccaaccaccgtctccatcgcaccgtcgcactgtcgcctcgccggccgcacctacgccgttgaagtcgctgtcgcagctgcaggacggaaagggcttcaacaagtgtgctaccaactgtccaactaccaagataagcatgcattgctgttttttctgtagtgatagatgcttttatgccaccatttggttcattttcacatgttttctttagcagaatcagtatggaaatactgctctttttttgctgtctttgttccattttctgtactatcttctccttttcatgatctttgttttggaaattgcgacatcaaatcccagtcaatctaaactttgtatgcttgcttggtttatctagtcatgtattaatactcatcacatttcagtgtctgctttgcaaaccaaattgatggttaagtgcttgcctatttgttctgcctgatttcatcgcagctcagttgtatgattgctgggtttcctacttttcagcttttgttttccgtttcatgttgtagtgttgctgtgtttcatgttttgatgagttttgttcatttatttgtagaacaacactctgtgttggtgtcaagatctatagagcaggcatttctagtaagtataggcttgagatgtgatgtttaccttctttatctaaataacattattgtaatgagctgtcaatgttacaagactacagaacaaatgcactgcattctattttagctaataggtttattctttggaaaagaaaatgatgtgctaattagcttagttctggggacttcaggggttccatgccggcctaacctattggaacgacttgttagttgttattccattgcatccaaagtccacatgttattttgttaagctccataatgctgtggcatcgtgttgcgaaaacattaattgggagaacattagtacatgaatacttgatcttcatagttcagttttcgtgcatgtgcacttgttagttgcgaaaatgaactaatttcccttggggaaataggtatcccttggaaaaatgggtttgccaaactagcccttagaggaactaattcctggcatatggtgctcagtgggcagtgcatcaggactcgaaggaagcatagcatcatcggtttttgtgtttcattaattctcatttcaagatggcatctgctggcctaaagccaggggtgcctgttattctacgggagctggagccatcctcagagatgttcaagcaaggagcgtcccttcgagtcacaggaagtctccagtcattcgatgtggagtccgcgactgccaccattcaagacggcagcgtaagtctgaaggttgacacccagcatctgagggatgtcagtttccgcacgaactcggtgtaccaattcattggtgaacttcagatccgtgaagttgatgatgcgattctactcgcgcgcatcggaaggaacgtcgatggcctcgacatgaacctttaccagcaggctctactcatccgacggcagcacgaagcaaagctgctgagctccaggagagcatgatctgcttgctatcttggagcaggaggcgcatggtggttgtagttattaggtttctttgtttctcaacagtgcaattgcatatgtaaacgtgaagagaactggaccaagaactggttaattgagagggtctgctgcatatgatttgcgatctctcttgccctccaaagggctgccatggcatgtgtagatgtgactgccaatttgtgatcatcttacttgcagcagaatgctggttttattttattgacatgagaacagccttgtggatcatgtttactgggatgctttgttgtgttaaaagttgggtcatgttcttttgttgtaaaggtataaataatggaggaggtcatggtgtgaaga

SEQ ID NO: 64682 - DNA, 1492 bp, Zea Mays
agccctcgctcagttggccggcctcgccttcgcatccgtccggccgcagtcaacctccggttcggagttcccattccccaccaaccaccgtctccatcgcaccgtcgcactgtcgcctcgccggccgcacctacgccgttgaagtcgctgtcgcagctgcaggacggaaagggcttcaacaagtgtgctaccaactgtccaactaccaagataagcatgcattgctgttttttctgtagtgatagatgcttttatgccaccatttggttcattttcacatgttttctttagcagaatcagtatggaaatactgctctttttttgctgtctttgttccattttctgtactatcttctccttttcatgatctttgttttggaaattgcgacatcaaatcccagtcaatctaaactttgtatgcttgcttggtttatctagtcatgtattaatactcatcacatttcagtgtctgctttgcaaaccaaattgatggttaagtgcttgcctatttgttctgcctgatttcatcgcagctcagttgtatgattgctgggtttcctacttttcagcttttgttttccgtttcatgttgtagtgttgctgtgtttcatgttttgatgagttttgttcatttatttgtagaacaacactctgtgttggtgtcaagatctatagagcaggcatttctatgggcagtgcatcaggactcgaaggaagcatagcatcatcggtttttgtgtttcattaattctcatttcaagatggcatctgctggcctaaagccaggggtgcctgttattctacgggagctggagccatcctcagagatgttcaagcaaggagcgtcccttcgagtcacaggaagtcattcgatgtggagtccgcgactgccaccattcaagacggcagcgtaagtctgaaggttgacacccagcatctgagggatgtcagtttccgcacgaactcggtgtaccaattcattggtgaacttcagatccgtgaagttgatgatgcgattctactcgcgcgcatcggaaggaacgtcgatggcctcgacatgaacctttaccagcaggctctactcatccgacggcagcacgaagcaaagctgctgagctccaggagagcatgatctgcttgctatcttggagcaggaggcgcatggtggttgtagttattaggtttctttgtttctcaacagtgcaattgcatatgtaaacgtgaagagaactggaccaagaactggttaattgagagggtctgctgcatatgatttgcgatctctcttgccctccaaagggctgccatggcatgtgtagatgtgactgccaatttgtgatcatcttacttgcagcagaatgctggttttattttattgacatgagaacagccttgtggatcatgtttactgggatgctttgttgtgttaaaagttgggtcatgttcttttgttgtaaaggtataaataatggaggaggtcatggtgtgaaga

SEQ ID NO: 64683 - DNA, 2305 bp, Zea Mays
aagaccgccttgttgtttttgtgcctcgctagatcgttccgtaagggcacccatcgtcatagatacgattcatagcttctgccactacttgtgcgcgaagagccaagaaatgcgtcaggggttgtgaagggaaggagtgccgatggccggtggccacccggcgccgctgcggccggtggtggttgcgatgaaaggccacccagggtctggcaagtccacggcggcgcgcgccatcgcgaccgcgctttgctgtccgctcctggacaaggacgatgtgagggactgcatgttgcccctagagggcttggctgctgctgggatgctcaacgacctctcctacgccgtgctgtggcggatggctgagcgccagccggtgtgcttgtggtcgtcgtggagtgtcgccctggtgataacgaggaatggcgccggaggctggagagccgtgggtcggctgttgccaatggtggcggtggtgatggatggcataagccaaagacatgggctgagctggagaggcttctggaagggtaccaaggttgcacagactatgaaattggggatgtaccgaggattgtagtggatacaactgatccgacagttgatgcacaggtggcagctgaaaaggttgtggttttcattagatcccatcttgcttgtagccaaccatcttgtgggagacaggattcacctgtttgccattagaaaccaaaatgtacactagcttaagcattaggtaaagtttcgttgcaaaaggttgatctgttgtactgcaatgctcaaagttcttttttttatgggtgtaacctaaaggttctgttactgttgggacttcaaagggattttgttgttgttgttgtgtgatctagaggtttcgtaaaaagatgttcttttttctggggttgttcctcaatctcctatctccattacatctttcacattccaatgaaatggaatatgacttttcagcatccatgtttaggacggaaagggcttcaacaagtgtgctaccaactgtccaactaccaagataagcatgcattgctgttttttctgtagtgatagatgcttttatgccaccatttggttcattttcacatgttttctttagcagaatcagtatggaaatactgctctttttttgctgtctttgttccattttctgtactatcttctccttttcatgatctttgttttggaaattgcgacatcaaatcccagtcaatctaaactttgtatgcttgcttggtttatctagtcatgtattaatactcatcacatttcagtgtctgctttgcaaaccaaattgatggttaagtgcttgcctatttgttctgcctgatttcatcgcagctcagttgtatgattgctgggtttcctacttttcagcttttgttttccgtttcatgttgtagtgttgctgtgtttcatgttttgatgagttttgttcatttatttgtagaacaacactctgtgttggtgtcaagatctatagagcaggcatttctatgggcagtgcatcaggactcgaaggaagcatagcatcatcggtttttgtgtttcattaattctcatttcaagatggcatctgctggcctaaagccaggggtgcctgttattctacgggagctggagccatcctcagagatgttcaagcaaggagcgtcccttcgagtcacaggaaggagttttactctgcttttaagaaagcaaatattcaagggtacaggcaaagctgggacaccatctcacaagcaagtcaaaggcctctaacaacagcaacgacaagctagatttctattacatcagacaacatggtgtcactcgcttggtagttctgtagccatgcagcaattctcttctccatgtcttgcacttcagctttgtccttctatagcagcacgcaccacttctgcacgaaggagatagcaatgtatatgacatcagtaggtctgttcaggaaccacttctctattgccatcttatttgtataggtcagatcatccaagttagccctgcaaacataaacatacctagccacttaaaggcaccaagttttgtttccacccagttctcaacaaaatcagccaaagaagatgggaaccccacccaaccaaaggcatctatgataatgcaccatgcaagatgagcttttgtgaaaattaatcttcagatcagtcatccattcgaagcaatatagactaagcttaggttgaaaatatattggacagacccactatcacgatagctgtatcatcggcatattgtatatgtgtgtcacacccgggttttaggggtccaaagcccg

SEQ ID NO: 64684 - DNA, 2786 bp, Zea Mays
aagaccgccttgttgtttttgtgcctcgctagatcgttccgtaagggcacccatcgtcatagatacgattcatagcttctgccactacttgtgcgcgaagagccaagaaatgcgtcaggggttgtgaagggaaggagtgccgatggccggtggccacccggcgccgctgcggccggtggtggttgcgatgaaaggccacccagggtctggcaagtccacggcggcgcgcgccatcgcgaccgcgctttgctgtccgctcctggacaaggacgatgtgagggactgcatgttgcccctagagggcttggctgctgctgggatgctcaacgacctctcctacgccgtgctgtggcggatggctgagcgccagccggtgtgcttgtggtcgtcgtggagtgtcgccctggtgataacgaggaatggcgccggaggctggagagccgtgggtcggctgttgccaatggtggcggtggtgatggatggcataagccaaagacatgggctgagctggagaggcttctggaagggtaccaaggttgcacagactatgaaattggggatgtaccgaggattgtagtggatacaactgatccgacagttgatgcacaggtggcagctgaaaaggttgtggttttcattagatcccatcttgcttgtagccaaccatcttgtgggagacaggattcacctgtttgccattagaaaccaaaatgtacactagcttaagcattaggtaaagtttcgttgcaaaaggttgatctgttgtactgcaatgctcaaagttcttttttttatgggtgtaacctaaaggttctgttactgttgggacttcaaagggattttgttgttgttgttgtgtgatctagaggtttcgtaaaaagatgttcttttttctggggttgttcctcaatctcctatctccattacatctttcacattccaatgaaatggaatatgacttttcagcatccatgtttaggacggaaagggcttcaacaagtgtgctaccaactgtccaactaccaagataagcatgcattgctgttttttctgtagtgatagatgcttttatgccaccatttggttcattttcacatgttttctttagcagaatcagtatggaaatactgctctttttttgctgtctttgttccattttctgtactatcttctccttttcatgatctttgttttggaaattgcgacatcaaatcccagtcaatctaaactttgtatgcttgcttggtttatctagtcatgtattaatactcatcacatttcagtgtctgctttgcaaaccaaattgatggttaagtgcttgcctatttgttctgcctgatttcatcgcagctcagttgtatgattgctgggtttcctacttttcagcttttgttttccgtttcatgttgtagtgttgctgtgtttcatgttttgatgagttttgttcatttatttgtagaacaacactctgtgttggtgtcaagatctatagagcaggcatttctagtaagtataggcttgagatgtgatgtttaccttctttatctaaataacattattgtaatgagctgtcaatgttacaagactacagaacaaatgcactgcattctattttagctaataggtttattctttggaaaagaaaatgatgtgctaattagcttagttctggggacttcaggggttccatgccggcctaacctattggaacgacttgttagttgttattccattgcatccaaagtccacatgttattttgttaagctccataatgctgtggcatcgtgttgcgaaaacattaattgggagaacattagtacatgaatacttgatcttcatagttcagttttcgtgcatgtgcacttgttagttgcgaaaatgaactaatttcccttggggaaataggtatcccttggaaaaatgggtttgccaaactagcccttagaggaactaattcctggcatatggtgctcagtgggcagtgcatcaggactcgaaggaagcatagcatcatcggtttttgtgtttcattaattctcatttcaagatggcatctgctggcctaaagccaggggtgcctgttattctacgggagctggagccatcctcagagatgttcaagcaaggagcgtcccttcgagtcacaggaagtctccagtcattcgatgtggagtccgcgactgccaccattcaagacggcagcgtaagtctgaaggttgacacccagcatctgagggatgtcagtttccgcacgaactcggtgtaccaattcattggtgaacttcagatccgtgaagttgatgatgcgattctactcgcgcgcatcggaaggaacgtcgatggcctcgacatgaacctttaccagcaggctctactcatccgacggcagcacgaagcaaagctgctgagctccaggagagcatgatctgcttgctatcttggagcaggaggcgcatggtggttgtagttattaggtttctttgtttctcaacagtgcaattgcatatgtaaacgtgaagagaactggaccaagaactggttaattgagagggtctgctgcatatgatttgcgatctctcttgccctccaaagggctgccatggcatgtgtagatgtgactgccaatttgtgatcatcttacttgcagcagaatgctggttttattttattgacatgagaacagccttgtggatcatgtttactgggatgctttgttgtgttaaaagttgggtcatgttcttttgttgtaaaggtataaataatggaggaggtcatggtgtgaaga

SEQ ID NO: 64685 - DNA, 2697 bp, Zea Mays
tggggatcgagtttatcctgcgcggtgtgctcatctccatcgtctcccatcgctatccctctccttggatatttctcgcgatgcttatctcctccccgcgcgcagctttttccagctcagttccttgccgcgccgccgccaagttccctgcccgctcctccttcagctcccagccgtcgaagctctctgcgcgcaggggcttcccagccatggcagcgcccgcctccctgctcccaacgtcgtgcccagctgcctctctctctccctcagcgcgcctcccctgcatcgcgcgctccctgctccaagcttgccgtcaaagctcccctgtcgcgcccttggctcggctctgcgcgccgcgcgctgctttccgagctcgcccaaatcagacagtgccttctctgctcctccccgtctccttcctctacctccagctgctttcccatggccggcgtatggcttcgcggtcgcccaatctccctactcggttcctgccggtgctcagctcctgtttgacccgctgcgcggttcttccccacgacatcgttttccctgcgttcgctcggccctgaagttccctggcgctcgcccagctcagatttcgttgcgcactccttagttcgacacctgatgcttctccatggatggccgatgctgctccatcggttcgcgctcgtcgcgcacatggccggagctcttccctgcgtcgtgtgcgttccgtcatccttgctgtgacttcgcgtcgtgaagtttccctgcacgcgtcgagctcccgcgccgaatccagccccatgttgatgcgtctctattccaacttgtcagccacggcctcgccttggtctatgctgcagcccaccgtcaaaatcgtcggagtcgctcaactcgccaatcgcatcttggccggtcgtcgatttctttttcgccatagtacaacaccgttgttgttagatccggtctccaacccgccatggcgcttgccggactttgccggtgaagtttgtcgtcgtcctctggtcccagcccgacccatccgtgcactcgctcctcatccatcgagcttcgcgcgtgctcttgtttgtggtcgagctgctgaactcgtccttccttgttcctgacttcatcgtcgccagagtcctcactggatttgtgtcctcgtcagctagctccaagcccgatctcgtcgtcgttctgtacgtcatcaagaaatcccaagaatcaggtgaagacgaagctagccgggtgatattcaccaagtgctcgacaaaagctcgaacaagtcgtcgatcaccatcctcatctacgtcaagccccaagccgtgaagacactcttatgctggccacgcgtcaccagctcgataaaaaggaatcccatgggtatctggtcaagaatagaaactgtgtgcctcgctcatcagacgtgtgtgatcaatgacgtcaaccggaaaccgtcatcgtgcttccgactatcgcgtcgaattagtcagggtaagcaaatttgttattcgtgctagtggattgatgaatggtttgactaggtataatatttattagattgtctgagtcgctttggtaatttgatcgatgtcgtaggatgaaagaggtcgcaataggtcctagtgcttgcgggattgcaggtgttaaaaatgtgatgttttattaatatatatgtgatacacaggttaaccgggaaattagtagcgagaagaattaaatcggtgctttgtatctgatgcgtggtcgaagtaacgttacggaaagtaggtcttgtgtttgtgtttctagtgtctagtcaaagtatagcatatggcgggtttcgtctaaattgtatggagtcgatgccctgctgtgatatccatgatgcttaatgcttggttttaagtgtttcatcctttttagtgtagattatctatcttatactctttaaactcgtgctcatacatgtgcatcgtgtatctcatgaggtacgataaataatcgtgtggtgcggaagacgagccaagtcgaccccaagcgcgggctaatccgcaggatgatgctgatggacaaaccggaagatggataatctaaacgagtgctaagtcaaaggatactcgccaatacgtcgtctaacaacactaacctactgttattcaggcaagccccggtgcatttgccacctccttgatgttttaaaaatctttatcaccttgtttgatgcattaggtgataggagttgtgtgctaaaccgttgatgcatttccttccttgaacaattgattacccttccttgataccctttttgaaaagaattttatgatgcttagccttgctttagcaaaaaaaaatgttttgttttaaaacaaaggtgatgcttcagtgggtgggaagttttcgaaaataaaacttgatggtggatccatcacagccgtgatgggttcaacatcggaaaaagatgtacctctgccaggtaccagacttttgggttgaaaataataaagctgagaccgggcggttgacttgcacgagaagggagtctcggtgtagtgtctccgtctgagtcgattaaggaccttttcgatgtaggcctgctcaccgtggaccctttaactggtcacatgcctcatcatgggtaagctttgcctcgggcatactaataccagaataagataacacgcaatgggagtggagagatggcgagagtagcgtgtaccctccgtggca

SEQ ID NO: 64686 - DNA, 2045 bp, Zea Mays
acactctttggttgaactcttcgcaccttaccttctattctcaaggaaacctttatccatggcccgaggtgaaaagtcctttgcatcggaggcatatgcggtgaactggaacgaaccaccagaccaacaatcgcaagactccctcgagcagctagagccgtatcgagtgatatggaagcaaccagtgcaaggtgaaaagtccttcgtatccgaggcatatccggcgaaatggaacaaaccaccatcaccaagcaagcaatcgcaagactccttcgagccagaggcatatcgggtgaaatggaacaaatcaccaccaccacaccaacaatcgcaagactccttcgagtcggaggcatatcgagtgaaatggaacaaatcaccaccaccacaccagcaatcgcaagactcctttgagccggaggcatatcgggtgaaatggaacaaatcaccaccaccacaccaacaatcgcaagactccttggagcaggaggcatatcgggtgaaatggaacaaatcaccaccaccacaacaacaaacgcaagactctttcgagcaggaggcatatcgggtgaaatggaacaaatcaccaccaccacaccagcaatcgcaagactccttcgagccggaggcatatcgggtgaaatggaacaaatcaccaccaccacaccagcaatcgcaagactcctttgagccgaaggcatattgggtgggatggaagaaacatgcgcaaggagcaacggacgttgctgatgagacaacgccagcacgtggtcatggtctgcatgtcgcgaccgggatgctcttcacgaggaagagcttgcttccagggacagccctaccggaaggtaccaagttctgcggccacggcttcctcgatcccgagaggtttgaactacgagcggatgcggatgccatcccgttcagctacagccagctcgacaccatcctgaggatgtttcggatccctcgggggtccaagaaggcagagcaagtcgccgccacgctccggacatgcgaggctgagtccccagaggctcatgcctgcgccacctccgagcaggcggcggccgacttcgctgcctcctcgctcggggtcagggccagcaagctggtcgcgctcgtcaccaccgtccatggggggaaggacgccactagatacgtggtggcgcccaacggcatcacacgcatcggcaaggcggcaggggccgcggccgtagtgccgtgccacccgatgccgtacccgtacatggtccactactgccaccagccggcggacgtggaggcgctccgtgttgagctgaccgggctcggagacggtggcgtgacaaccgcgatcgccatgtgccacgccaacaccatgaactgggacgatcgctacttccaaatgctgaacgtgacgcgcggcgaggagatctgccacttcatgccgcgcaactatgtgctctggctaccagctgccgagcttctagggaactagtggcaatgccactatgttaggtgtcgttgctttgataaaatgaagtgtatgacaatgacagcatcaacaattgttcgtatgaacatatggttggacatgataactgcgagaaagagaggatatatgttgttgcgccctatgaattgtgatatagtgttgtggtggaggatgcatcaaatgatggggaagctaccttagttgtgcaaactacttttaagaactccatttttcttactaccatcaaagacggtccttctcattctatggttgaggataatacagaacctgttttggtagaggacacaccagttgatgatgaagctaccttggtagtgcatggtccttctctttctatggttgaggataatatagaaccttgactggtagaggatcctccgatagatatagtgtcttcttcatccacaagagctagaaaggatgaggaccttgcatgcccgcctttagctcccccctcaccatcaactacgacagttaggcgttggtgtaagtcctataatatctcgtcgcttcatcgaagtgctcgtcttgcacaacgtggtgtgtgttt

SEQ ID NO: 64687 - DNA, 451 bp, Zea Mays
cctgggtcggactcccctgctccctatataggatgccaggtccttcaaccatctcgaccaatctcgccatcgctgagctcgcactgagggtgaacagggctatcgctggcaaactccgtcggtcccgtcgatctggccccgataactggtcggggaggatccgcggggcatatcaaaggtgtcgggtgacgggcgtgggattgtgctggtctgagtcgacgacaattgctcgccggagccaccttcgggtgcgattccgcagcacaacgtgggctggaattaccgcaacaggattcacggtcaaggataggtaccacaagatgagacacatgaaggatgttgtgatgagttcgtgagtggtctaggccgtcgtctcctagtcaactttgggttgctggatcgttgtctttgtatgatgtaattatttaactattttgtacagaacttcgtt

SEQ ID NO: 64688 - DNA, 2411 bp, Zea Mays
gaaactcaagtatataacatgcatacactaaaatatatgttttttttgctgaattgttggtcaaagttttaaaacgttgacttttctgaaaacatgcacgccttattttatgggatggaaggagtagtttcttacttcctagatcaacctcacattctcccgaaagaggcccacatgatctccattgttaattcagatcagacaatcaaaatcactcagtgtcaggtatagaatgcggaattttcattgtcccctgaaaccctagctcattcacatcgtcctcgtgccataacgctccactctcatcccctcccgagccgcacctctcccttccttcatccgcatcggtgagcaagagatctggagtcattgtggtggctccaacggtcggtgtcgagtcaatgaagtggtggctccgcctactcagatggattgctctatgggtcatcctcatgcgtgagtgcgtttggttgcaatgatgagacatgatgaaataggatgatcctcagataaggttgtttggttcagggtcaggggttaggacaagactgtctcagtattgtccccaattgtccctcgaaattagagggacgagaggggacgccagggaacgtccctgtcctaggtatcccgcaaccaaacgcaccgtaattctacaggtggggatgactccaacggtcagcgtcgagtcaatgaagtggtggcaatgacacttcccctcaccgagatcgggtatatgtgtagggacgaggaggtaccggtgaacgttgttttgtgtgctggtctcgtccccttctattatacacggtgtgatgaggggctgcaaccaaaacgttgttgtgcccccgatcaaggcgcgaagtgtagtcagactcggtcctctgaccgagtctaccgtgagacttaacactaccctcctcctttcactcaatgccataatgattggtgtagacttgtcagcacgagaatactacattcctggtccttctggctcttacctaaactatggggctgctgctagtgaggtagagattgatcttctcactggagcctccacaattgttcgaagtgatcttatatatgactgtggccagagcttaaaccctgctgtggacttgggacaggttgaaggggcgtttgttcaaggaatcggctatttcatgagtgaggaatatgtcaccaactcagatggattgcttatctctgacgggacttggacatacaagatcccaactgtggacaccatcccaaagcagttcaatgtgaagttacttaacagtggattccacaagaaacgcgtgctctcttcaaaagcatctggggagccaccgttgcttcttgcagcttcagtgcactgcgcaacaagagaggcaattagagctgcaaggaacgaacagcactgctctggatccaaaccttcaccatcccattttgatctggaagttcctgccatcatgcccgtggtgaaggagctgtgcggcctggacaacgtagagaggtacttggagagcctgctgagctccgaatgaaaagcctactctcaccgtcagcacttgttacccttactcccttaggccttgttcgtttctgtcggatcgcacccggaatcgttccagctaatcaaagtttatataaattagagaaacaatccggttaggaatcgttccgacccaccaatccggcacaaacgaacaaggccttagggcctgttcgtttttcacggacctggaacggttcctggccggattgtttctctaatttatgtaagttttgataagttggaatgaattctggtctaatcctggacaaacgaacgggcccttagccgtacaataccagacgtagatagcataacgatagcacaatgcgcgattgtgccgaagtcatcagagaagagagaatcatagctgttagatgatatcaccaagtcttttgcacctacgtcttgtcagcgagaacattttgggtttcgaacaagacagacttcctctgtgtgtaaaaactttgggcatacccccctcttctcatctccattggtgagattggtgtgtacatgctattgtagttcagagttcagacagagtgacacggatatcagagcagatcataagaacgtacttgcagcgatggaactgagattattttctatattctttggccactgaatgtgcttcaaatgacagcagcagcaacattttgtatgtatcaggagaaggacgcactcctggtagctcatgtgtaccattttacaactcagctcaagatgtatgagcctgtttctttgcctgaactaagctgtcctacggcctggtagggttgagtagagccggaatattctcaaacaggtttggtgtgaaaaaaattgttgtaatctgcgagttgtgggaaaagctgttgtgggctgtgagcta

SEQ ID NO: 64689 - DNA, 1642 bp, Zea Mays
tttggttcagggtcaggggttaggacaagactgtctcagtattgtccccaattgtccctcgaaattagagggacgagaggggacgccagggaacgtccctgtcctaggtatcccgcaaccaaacgcaccgtaattctacaggtggggatgactccaacggtcagcgtcgagtcaatgaagtggtggcaatgacacttcccctcaccgagatcgggtatatgtgtagggacgaggaggtaccggtgaacgttgttttgtgtgctggtctcgtccccttctattatacacggtgtgatgaggggctgcaaccaaaacgttgttgtgcccccgatcaaggcgcgaagtgtagtcagactcggtcctctgaccgagtctaccgtgagacttaacactaccctcctcctttcactcaatgccataatgattggtgtagacttgtcagcacgagaatactacattcctggtccttctggctcttacctaaactatggggctgctgctagtgaggtagagattgatcttctcactggagcctccacaattgttcgaagtgatcttatatatgactgtggccagagcttaaaccctgctgtggacttgggacaggttgaaggggcgtttgttcaaggaatcggctatttcatgagtgaggaatatgtcaccaactcagatggattgcttatctctgacgggacttggacatacaagatcccaactgtggacaccatcccaaagcagttcaatgtgaagttacttaacagtggattccacaagaaacgcgtgctctcttcaaaagcatctggggagccaccgttgcttcttgcagcttcagtgcactgcgcaacaagagaggcaattagagctgcaaggaacgaacagcactgctctggatccaaaccttcaccatcccattttgatctggaagttcctgccatcatgcccgtggtgaaggagctgtgcggcctggacaacgtagagaggtacttggagagcctgctgagctccgaatgaaaagcctactctcaccgtcagcacttgttacccttactcccttagccgtacaataccagacgtagatagcataacgatagcacaatgcgcgattgtgccgaagtcatcagagaagagagaatcatagctgttagatgatatcaccaagtcttttgcacctacgtcttgtcagcgagaacattttgggtttcgaacaagacagacttcctctgtgtgtaaaaactttgggcatacccccctcttctcatctccattggtgagattggtgtgtacatgctattgtagttcagagttcagacagagtgacacggatatcagagcagatcataagaacgtacttgcagcgatggaactgagattattttctatattctttggccactgaatgtgcttcaaatgacagcagcagcaacattttgtatgtatcaggagaaggacgcactcctggtagctcatgtgtaccattttacaactcagctcaagatgtatgagcctgtttctttgcctgaactaagctgtcctacggcctggtagggttgagtagagccggaatattctcaaacaggtttggtgtgaaaaaaattgttgtaatctgcgagttgtgggaaaagctgttgtgggctgtgagcta

SEQ ID NO: 64690 - DNA, 840 bp, Zea Mays
gaacaagacgaggcaaacacccctggaaatggaaagcaatttttaaaaaactttccatggcacttgccagccagccgcctacctgccgaaagagatcctcgaatggcccacctgccagcctcagcacccgcagcgttaaccctctgcccacccaacctcttccccccagctcaaagcatcctctgcggcgcaacggccacaccttccccggtcccgcctccgtctgtcccgcggcctccgctctcctcgccgcccgcccgcctgtccctccctctctctccctccctcctcgccgccatgaacaacctcctcacggattcctttgagctccctcggcgggactcctcaagagacgcagatattgaaatgggaatgcatcaggctgatgcttcagacaacttgaaagatttcttgaagaaggtcgatgcaattgagagtataattgcaaagctgtcaaatctattgaataagctccagactgcaaatgaggaatccaaagcagttacaaaagcaagttccatgaaagcaattaagcagcggatggagaaagatattgatgaagtggggaaaattgctcgtcaggcaaagacaaaagttgatgaactggaaagagataacctatcgaataggcaaaaacctggatgtggaaagggttctgccgtggaccgatcaagagagcaaactactggagcagtgaaaaagaaattgaaggaacggatggatgattttcagaccttgagagaagcaatcaggcaagagtatcgagaggttgtcgaaagaagggtttttactgtaactggtaatcgtcctgatgaagagtttctcatgtggctgcctcta

SEQ ID NO: 64691 - DNA, 1981 bp, Zea Mays
gaacaagacgaggcaaacacccctggaaatggaaagcaatttttaaaaaactttccatggcacttgccagccagccgcctacctgccgaaagagatcctcgaatggcccacctgccagcctcagcacccgcagcgttaaccctctgcccacccaacctcttccccccagctcaaagcatcctctgcggcgcaacggccacaccttccccggtcccgcctccgtctgtcccgcggcctccgctctcctcgccgcccgcccgcctgtccctccctctctctccctccctcctcgccgccatgaacaacctcctcacggattcctttgagctccctcggcgggactcctcaagagacgcagatattgaaatgggaatgcatcaggctgatgcttcagacaacttgaaagatttcttgaagaaggtcgatgcaattgagagtataattgcaaagctgtcaaatctattgaataagctccagactgcaaatgaggaatccaaagcagttacaaaagcaagttccatgaaagcaattaagcagcggatggagaaagatattgatgaagtggggaaaattgctcgtcaggcaaagacaaaagttgatgaactggaaagagataacctatcgaataggcaaaaacctggatgtggaaagggttctgccgtggaccgatcaagagagcaaactactggagcagtgaaaaagaaattgaaggaacggatggatgattttcagaccttgagagaagcaatcaggcaagagtatcgagaggttgtcgaaagaagggtttttactgtaactggtaatcgtcctgatgaagagacaattgatgacttgatagagaccggaaaaagtgagcaaatattcaaagatgctatccaacatcagggaagaggccagatactggacacagttgctgaaatacaggagcgacatgatgctgtaagggatctagagaggaagcttttggagttgcaacaggtgatgcttttttttgcataagttgtttgtaataatacattatgttacaaaagctatgacattcaacgaactatacagtctggtttccaaaagaaagactctaaaaataacactaactggtgtagttattgcgtccctagctcatgtgattacgtgtggtctgggatggggtaggcagtcaactcttggagctggctgctgggattaacttagaacacttaaaagaatatagaatacacataaaaccacatgtacctttcagtaagttgaccctgtctgggacatttctttgttgaggacttgaggctcaactatgcctctttataccgttgctttgtttttgtgtttagatatttatggacatggcagttcttgtcgaggctcaaggagacatgatcaacaacatcgagacacatgtctcgaatgccaccaaccacatacaacaaggcgtgagcgcgctccagaacgcgaagaagctgcagaagaactcgaggaagtggatgtgctacgccatcatcttgctgctggtgatagtggcggtcattgtcgtcgcggtcatccagccatggaagaagtgagcctagggtggctctaaacagggaggagggcgtgggagatacgtttttttttggctgtctgtgtaatatctgtgcagttgttgtgggtggttctgtgatttatggttgtacttatggtcggcaccagagaagctttggtatttccattctttctgtttgggatagttcgtgcagtccattgaccatagctctcagaaatgttattgtggtgaccatatattcatatgtcggtcagctgatgaaaagaatggtgcttctgaatctttccacaaacagtgtgctggtgcccggtaatggctgttggattaatgtaggtttgattcaattaatatttaataatagtcaatgctaatagtctactttaatgttatggtgtactaagaatttagtaccatattgggagttcttatgttttggtgcttaat

SEQ ID NO: 64692 - DNA, 1366 bp, Zea Mays
gcggggcgtgcggtcgaaggaacccgcccctgttttctcggctacgtgcggattcctttgagctccctcggcgggactcctcaagagacgcagatattgaaatgggaatgcatcaggctgatgcttcagacaacttgaaagatttcttgaagaaggtcgatgcaattgagagtataattgcaaagctgtcaaatctattgaataagctccagactgcaaatgaggaatccaaagcagttacaaaagcaagttccatgaaagcaattaagcagcggatggagaaagatattgatgaagtggggaaaattgctcgtcaggcaaagacaaaagttgatgaactggaaagagataacctatcgaataggcaaaaacctggatgtggaaagggttctgccgtggaccgatcaagagagcaaactactggagcagtgaaaaagaaattgaaggaacggatggatgattttcagaccttgagagaagcaatcaggcaagagtatcgagaggttgtcgaaagaagggtttttactgtaactggtaatcgtcctgatgaagagacaattgatgacttgatagagaccggaaaaagtgagcaaatattcaaagatgctatccaacatcagggaagaggccagatactggacacagttgctgaaatacaggagcgacatgatgctgtaagggatctagagaggaagcttttggagttgcaacagatatttatggacatggcagttcttgtcgaggctcaaggagacatgatcaacaacatcgagacacatgtctcgaatgccaccaaccacatacaacaaggcgtgagcgcgctccagaacgcgaagaagctgcagaagaactcgaggaagtggatgtgctacgccatcatcttgctgctggtgatagtggcggtcattgtcgtcgcggtcatccagccatggaagaagtgagcctagggtggctctaaacagggaggagggcgtgggagatacgtttttttttggctgtctgtgtaatatctgtgcagttgttgtgggtggttctgtgatttatggttgtacttatggtcggcaccagagaagctttggtatttccattctttctgtttgggatagttcgtgcagtccattgaccatagctctcagaaatgttattgtggtgaccatatattcatatgtcggtcagctgatgaaaagaatggtgcttctgaatctttccacaaacagtgtgctggtgcccggtaatggctgttggattaatgtaggtttgattcaattaatatttaataatagtcaatgctaatagtctactttaatgttatggtgtactaagaatttagtaccatattgggagttcttatgttttggtgcttaat

SEQ ID NO: 64693 - DNA, 972 bp, Zea Mays
aaaaaacacaactaaggataaaaatgagtacaacagcaaaaccgagggcaccaccataaaaaaccccaaataactatcgggcgacaaatattcgagaaatgagattcctttgagctccctcggcgggactcctcaagagacgcagatattgaaatgggaatgcatcaggctgatgcttcagacaacttgaaagatttcttgaagaaggtcgatgcaattgagagtataattgcaaagctgtcaaatctattgaataagctccagactgcaaatgaggaatccaaagcagttacaaaagcaagttccatgaaagcaattaagcagcggatggagaaagatattgatgaagtggggaaaattgctcgtcaggcaaagacaaaagttgatgaactggaaagagataacctatcgaataggcaaaaacctggatgtggaaagggttctgccgtggaccgatcaagagagcaaactactggagcagtgaaaaagaaattgaaggaacggatggatgattttcagaccttgagagaagcaatcaggcaagagtatcgagaggttgtcgaaagaagggtttttactgtaactggtaatcgtcctgatgaagagacaattgatgacttgatagagaccggaaaaagtgagcaaatattcaaagatgctatccaacatcagggaagaggccagatactggacacagttgctgaaatacaggagcgacatgatgctgtaagggatctagagaggaagcttttggagttgcaacaggtgatgcttttttttgcataagttgtttgtaataatacattatgttacaaaagctatgacattcaacgaactatacagtctggtttccaaaagaaagactctaaaaataacactaactggtgtagttattgcgtccctagctcatgtgattacgtgtggtctgggatggggtaggcagtcaactcttggagctggctgctgggatta

SEQ ID NO: 64694 - DNA, 1581 bp, Zea Mays
gcctgacacttacaggattatttgaatgtcaaattcaaggagacagggcacagcaacatgtacttccctcagttcattccatactcatttatagagaaggaagctagtcatgttgaagggtttagcccggagcttgcattggtcaccattggaggaggaaaagaactagaggaaaagcttgtggtaagaccaacaagtgagaccattgtaaaccacatgttcaccaaatggattcagagctatcgtgatcttcctctcatgataaaccagtgggctaacgtgacaagatgggaaatgcggactaaaccattcatccgaactcttgaatttttatggcaagaaggccatacagcccatgccacccttgaggaggcagagaaggaggcgatgcagatgattgatgtatataccaaatttgcctttgagcatgctgcaataccagttattccaggtagaaaatcaagagtagaaacatttgcgggtgccaatcggacctacactatagaagctatgatgggtgacaagaaggccttacaagctggaactagtcacaaccttggccaaaacttttcacgagcttttggaacacagtttatggatgaaaatggtcaaatcgaacacgtctggcagacctcttgggctattagtactcggtttgttggtgggattatcatgacccatggcgatgatgccggtctaatgcttcctccaaggattgcacccattcaggtcataatagtaccaatatggaaaaagggtgatgagaaggctgttgttgtggaagctgtagattcagttcaaaaaatactcaaagaagcaggaattagagttaaagtggacgactcagagctgcgaactcctggatggaaattcaatcactatgagatgaaaggggttcctgtaagaatagagataggtccacgtgatgtcacaaataagagtgttgtggtttctaggcgtgatgtccctggaaagcaaggaaaggagtttggagtgtctatggagccttcgatattggtgaaccatataaagggtcgtctagatgacatacaagcatcccttttacagaaggccataacattccgtgatagtaacattgtcgacgtaagctcatatggcgagctgaaggaagctatttctgaaggaaagtgggctagaggtccttggtcagctagcgatgctgatgagctgaaagtgaaagaagagaccagcgccaccatcagatgctacccattcgagcagcctgagggcaccaagaaatgcttcatgactggcaaccccgcagaggaagtcgcaattttcgcaaagtcatactaggcccactgtgtgtccactgtcagagataagaacagcatttccttttcaattttataggattgtaccctgtctacctaaggtccagattgatgacggttcatggaacagcattgtgtgctgctgatatttaaaatgtaaatttgataatcaataggtcaattttgttccactaacactggaggtaagttgtttgcctactcagtatcaaatgtttcaaacaagttccccaatatgctaaatcatgcaagttatcacatcgaattg

SEQ ID NO: 64695 - DNA, 1966 bp, Zea Mays
taaggctagatggctatagcactagcgtttggaggcacagaaccccccaatccaggcgggcaatccccacaggccacaatggcgtcgctgctgcgcctcccctcgctgctgtccccgtccaagcccctgctccggcgccggctgccggcggcgaggctcgcggcatccgccgcatccaggggtcaagcctcggcgaccgcgggcgcggcggcgccggcggccgcggagacccgcggcggggacagggaggggcaggtcacgccgcggtccgcggacttcaacgcctggtacacggacgtcatcgccgctgccgagctcgcggactacgggcccgtgcgagggaccatggtcattcgcccctacggatacgccatctgggaggccatccaggattatttgaatgtcaaattcaaggagacagggcacagcaacatgtacttccctcagttcattccatactcatttatagagaaggaagctagtcatgttgaagggtttagcccggagcttgcattggtcaccattggaggaggaaaagaactagaggaaaagcttgtgggctttgtaggtaagaccaacaagtgagaccattgtaaaccacatgttcaccaaatggattcagagctatcgtgatcttcctctcatgataaaccagtgggctaacgtgacaagatgggaaatgcggactaaaccattcatccgaactcttgaatttttatggcaagaaggccatacagcccatgccacccttgaggaggcagagaaggaggcgatgcagatgattgatgtatataccaaatttgcctttgagcatgctgcaataccagttattccaggtagaaaatcaagagtagaaacatttgcgggtgccaatcggacctacactatagaagctatgatgggtgacaagaaggccttacaagctggaactagtcacaaccttggccaaaacttttcacgagcttttggaacacagtttatggatgaaaatggtcaaatcgaacacgtctggcagacctcttgggctattagtactcggtttgttggtgggattatcatgacccatggcgatgatgccggtctaatgcttcctccaaggattgcacccattcaggtcataatagtaccaatatggaaaaagggtgatgagaaggctgttgttgtggaagctgtagattcagttcaaaaaatactcaaagaagcaggaattagagttaaagtggacgactcagagctgcgaactcctggatggaaattcaatcactatgagatgaaaggggttcctgtaagaatagagataggtccacgtgatgtcacaaataagagtgttgtggtttctaggcgtgatgtccctggaaagcaaggaaaggagtttggagtgtctatggagccttcgatattggtgaaccatataaagggtcgtctagatgacatacaagcatcccttttacagaaggccataacattccgtgatagtaacattgtcgacgtaagctcatatggcgagctgaaggaagctatttctgaaggaaagtgggctagaggtccttggtcagctagcgatgctgatgagctgaaagtgaaagaagagaccagcgccaccatcagatgctacccattcgagcagcctgagggcaccaagaaatgcttcatgactggcaaccccgcagaggaagtcgcaattttcgcaaagtcatactaggcccactgtgtgtccactgtcagagataagaacagcatttccttttcaattttataggattgtaccctgtctacctaaggtccagattgatgacggttcatggaacagcattgtgtgctgctgatatttaaaatgtaaatttgataatcaataggtcaattttgttccactaacactggaggtaagttgtttgcctactcagtatcaaatgtttcaaacaagttccccaatatgctaaatcatgcaagttatcacatcgaattg

SEQ ID NO: 64696 - DNA, 1845 bp, Zea Mays
taaggctagatggctatagcactagcgtttggaggcacagaaccccccaatccaggcgggcaatccccacaggccacaatggcgtcgctgctgcgcctcccctcgctgctgtccccgtccaagcccctgctccggcgccggctgccggcggcgaggctcgcggcatccgccgcatccaggggtcaagcctcggcgaccgcgggcgcggcggcgccggcggccgcggagacccgcggcggggacagggaggggcaggtcacgccgcggtccgcggacttcaacgcctggtacacggacgtcatcgccgctgccgagctcgcggactacgggcccgtgcgagggaccatggtcattcgcccctacggatacgccatctgggaggccatccaggattatttgaatgtcaaattcaaggagacagggcacagcaacatgtacttccctcaggtaagaccaacaagtgagaccattgtaaaccacatgttcaccaaatggattcagagctatcgtgatcttcctctcatgataaaccagtgggctaacgtgacaagatgggaaatgcggactaaaccattcatccgaactcttgaatttttatggcaagaaggccatacagcccatgccacccttgaggaggcagagaaggaggcgatgcagatgattgatgtatataccaaatttgcctttgagcatgctgcaataccagttattccaggtagaaaatcaagagtagaaacatttgcgggtgccaatcggacctacactatagaagctatgatgggtgacaagaaggccttacaagctggaactagtcacaaccttggccaaaacttttcacgagcttttggaacacagtttatggatgaaaatggtcaaatcgaacacgtctggcagacctcttgggctattagtactcggtttgttggtgggattatcatgacccatggcgatgatgccggtctaatgcttcctccaaggattgcacccattcaggtcataatagtaccaatatggaaaaagggtgatgagaaggctgttgttgtggaagctgtagattcagttcaaaaaatactcaaagaagcaggaattagagttaaagtggacgactcagagctgcgaactcctggatggaaattcaatcactatgagatgaaaggggttcctgtaagaatagagataggtccacgtgatgtcacaaataagagtgttgtggtttctaggcgtgatgtccctggaaagcaaggaaaggagtttggagtgtctatggagccttcgatattggtgaaccatataaagggtcgtctagatgacatacaagcatcccttttacagaaggccataacattccgtgatagtaacattgtcgacgtaagctcatatggcgagctgaaggaagctatttctgaaggaaagtgggctagaggtccttggtcagctagcgatgctgatgagctgaaagtgaaagaagagaccagcgccaccatcagatgctacccattcgagcagcctgagggcaccaagaaatgcttcatgactggcaaccccgcagaggaagtcgcaattttcgcaaagtcatactaggcccactgtgtgtccactgtcagagataagaacagcatttccttttcaattttataggattgtaccctgtctacctaaggtccagattgatgacggttcatggaacagcattgtgtgctgctgatatttaaaatgtaaatttgataatcaataggtcaattttgttccactaacactggaggtaagttgtttgcctactcagtatcaaatgtttcaaacaagttccccaatatgctaaatcatgcaagttatcacatcgaattg

SEQ ID NO: 64697 - DNA, 1934 bp, Zea Mays
taaggctagatggctatagcactagcgtttggaggcacagaaccccccaatccaggcgggcaatccccacaggccacaatggcgtcgctgctgcgcctcccctcgctgctgtccccgtccaagcccctgctccggcgccggctgccggcggcgaggctcgcggcatccgccgcatccaggggtcaagcctcggcgaccgcgggcgcggcggcgccggcggccgcggagacccgcggcggggacagggaggggcaggtcacgccgcggtccgcggacttcaacgcctggtacacggacgtcatcgccgctgccgagctcgcggactacgggcccgtgcgagggaccatggtcattcgcccctacggatacgccatctgggaggccatccaggattatttgaatgtcaaattcaaggagacagggcacagcaacatgtacttccctcagagaaggaagctagtcatgttgaagggtttagcccggagcttgcattggtcaccattggaggaggaaaagaactagaggaaaagcttgtggtaagaccaacaagtgagaccattgtaaaccacatgttcaccaaatggattcagagctatcgtgatcttcctctcatgataaaccagtgggctaacgtgacaagatgggaaatgcggactaaaccattcatccgaactcttgaatttttatggcaagaaggccatacagcccatgccacccttgaggaggcagagaaggaggcgatgcagatgattgatgtatataccaaatttgcctttgagcatgctgcaataccagttattccaggtagaaaatcaagagtagaaacatttgcgggtgccaatcggacctacactatagaagctatgatgggtgacaagaaggccttacaagctggaactagtcacaaccttggccaaaacttttcacgagcttttggaacacagtttatggatgaaaatggtcaaatcgaacacgtctggcagacctcttgggctattagtactcggtttgttggtgggattatcatgacccatggcgatgatgccggtctaatgcttcctccaaggattgcacccattcaggtcataatagtaccaatatggaaaaagggtgatgagaaggctgttgttgtggaagctgtagattcagttcaaaaaatactcaaagaagcaggaattagagttaaagtggacgactcagagctgcgaactcctggatggaaattcaatcactatgagatgaaaggggttcctgtaagaatagagataggtccacgtgatgtcacaaataagagtgttgtggtttctaggcgtgatgtccctggaaagcaaggaaaggagtttggagtgtctatggagccttcgatattggtgaaccatataaagggtcgtctagatgacatacaagcatcccttttacagaaggccataacattccgtgatagtaacattgtcgacgtaagctcatatggcgagctgaaggaagctatttctgaaggaaagtgggctagaggtccttggtcagctagcgatgctgatgagctgaaagtgaaagaagagaccagcgccaccatcagatgctacccattcgagcagcctgagggcaccaagaaatgcttcatgactggcaaccccgcagaggaagtcgcaattttcgcaaagtcatactaggcccactgtgtgtccactgtcagagataagaacagcatttccttttcaattttataggattgtaccctgtctacctaaggtccagattgatgacggttcatggaacagcattgtgtgctgctgatatttaaaatgtaaatttgataatcaataggtcaattttgttccactaacactggaggtaagttgtttgcctactcagtatcaaatgtttcaaacaagttccccaatatgctaaatcatgcaagttatcacatcgaattg

SEQ ID NO: 64698 - DNA, 732 bp, Zea Mays
gtttctactcttatagtggaagactcagagctgcgaacttctggggttcctgtaagaatagagataggtccacgtgatgtcacaaataagagtgttgtggtttctaggcgtgatgtccctggaaagcaaggaaaggagtttggagtgtctatggagccttcgatattggtgaaccatataaagggtcgtctagatgacatacaagcatcccttttacagaaggccataacattccgtgatagtaacattgtcgacgtaagctcatatggcgagctgaaggaagctatttctgaaggaaagtgggctagaggtccttggtcagctagcgatgctgatgagctgaaagtgaaagaagagaccagcgccaccatcagatgctacccattcgagcagcctgagggcaccaagaaatgcttcatgactggcaaccccgcagaggaagtcgcaattttcgcaaagtcatactaggcccactgtgtgtccactgtcagagataagaacagcatttccttttcaattttataggattgtaccctgtctacctaaggtccagattgatgacggttcatggaacagcattgtgtgctgctgatatttaaaatgtaaatttgataatcaataggtcaattttgttccactaacactggaggtaagttgtttgcctactcagtatcaaatgtttcaaacaagttccccaatatgctaaatcatgcaagttatcacatcgaattg

SEQ ID NO: 64699 - DNA, 736 bp, Zea Mays
tgctttcagcactatgaaaatcccttcgtatttgatgatttcattgggggttcctgtaagaatagagataggtccacgtgatgtcacaaataagagtgttgtggtttctaggcgtgatgtccctggaaagcaaggaaaggagtttggagtgtctatggagccttcgatattggtgaaccatataaagggtcgtctagatgacatacaagcatcccttttacagaaggccataacattccgtgatagtaacattgtcgacgtaagctcatatggcgagctgaaggaagctatttctgaaggaaagtgggctagaggtccttggtcagctagcgatgctgatgagctgaaagtgaaagaagagaccagcgccaccatcagatgctacccattcgagcagcctgagggcaccaagaaatgcttcatgactggcaaccccgcagaggaagtcgcaattttcgcaaagtcatactaggcccactgtgtgtccactgtcagagataagaacagcatttccttttcaattttataggattgtaccctgtctacctaaggtccagattgatgacggttcatggaacagcattgtgtgctgctgatatttaaaatgtaaatttgataatcaataggtcaattttgttccactaacactggaggtaagttgtttgcctactcagtatcaaatgtttcaaacaagttccccaatatgctaaatcatgcaagttatcacatcgaattg

SEQ ID NO: 64700 - DNA, 1503 bp, Zea Mays
gcaaaaaccgacattgcaaaaggcccacaagacaacgccccgctccttccgtccttcggcgcctacttccaaacggacaaaccccatcgaaaaccctctctcaaattcacaaggccccgccgccgccgcctcgtcccccattcatcttcgccgaaaccctaaccctagtcgccccgcggccacccttcccggcgacgccatgtcgaacccgaagggctccaagatgctccagttcatcaactaccgcatgcgggtgacgatccaggacgggcgccaacttgtgggcaagttcatggcgttcgaccgccacatgaacctcgtcctcggcgattgcgaggagtttcgccgcctcccgccctccaagtcctccaagactaccggtgaacgcgaggagcgccgcacgctcggcctcctcctcctccgcggcgaggaggtagtatccatgaccgtcgagggcccaccaccgcccgacgagtcccgcgccaaggccgcggcggcgggcggagccctcgccggccctggcatcggccgcgccgctgggcgcggtgtgcccaccggcccgctgctccaggcagctcctgggctcgctggtcctgtacgtggggttggtggacccgcccccggcatgatgcagccccagatctcgcggccgccgatgcccaacctgtcggcccagccggtgtcgtatccgcaggtcgtgcgcccgccgcaggggatgcctcccccaatgcgtcctggaatgccgccgcagatgcagatgccgttccgcccgcctggagcgccgcctgctccgttccctggggcaccgccacaacagttcatgaggggaccaccgccgatggggccgccacaagtgaggcccgggatgccggggccaccacctcctggaatgaggcctggaatgcctccgccaccattcggacagccgaggccagggatgccacctccgccacctggcccgcagcagcctggacaaaacccgcctcagtagttccttacctggataagcttcttgcgatacacctatgggagattttttttgtatcgcgagaaaggatcataaatcacacctatggaagacgaagacctgtgaattgcaccaatgctttcaccattctgtctcatatcagggtatctagtcctagtagtttcctttgggtattgtgggagagaaccatgccagtgtgtaccactcatcctttgatgtgagaggggactttgtatgtaaagaggccaggactttaactgttggtattggttaagttaggaaatatggataacttatttcatcgttgtcttaattctggacccacccttttccgtgtgtgtcgatgaagcgaggtaattgacttgtagaaattactttctggtttctggattctggccactttcttgttctctttgatttgtttgattgataatgtgcaatgagaaaagcttgacccgggacaaggcctcctgctagtctgctacgcagaaggcagatcaactcgagttctttca

SEQ ID NO: 64701 - DNA, 4189 bp, Zea Mays
gcttttgtatggtaggggaggggaggggggagggaaaagatggctccgggctcacacctccttgtccttttgccaaccgccgtcgtccagctcaatcctttgtggcctcttcctcacgcgccaagccagcccgtgatgctcggcgacagtagagtagtggtagccgacacacacacacacacactgcgcatacgattccctactcccatgatcccatcccatcatctcccacccagcattcacaaaaccccaagggcaaaataatatggactgtagatgctgcagtgctccactccattcagagacagacagcgctcggttcatcagttgcattgcgttcatctgctgccccagctcgtgctctctcccagtcccagtccctcgcaagctgacctctgcgttccttcagcactggcactggcagtgaggcgctgtgctgctccagtagctgtagctgtaagtagaaaagctggcaatcatcagaagaattccaagagagaggaggaggagaattctctctgtgtgtggcaagctagagctagcaagcgtaagtaagtaaggttcaaggatgggtcgagggagttgcggttgcaggcatcctctgctcgccgtcttgctgccgttgctgctagtgctagcaatggtgcccgagtcggcgcagctgcagtcgtcgcagacgtggtcgctgctcaagatccagcagctgctcagctacccgccggtgctccgcacctggggcaacggcaccgacttctgctacggcggggactacaagaccgcctccgccttcgtcgagtgctacggcgacagcgtgacgcagctccacatcatgggccccggcggcgccccgccgctgcccaagacgttcaacctggacgccctcttcacgacgctgacgaggctccccgacctccgggtgctgacgctcaccgggctcggcctctggggcccgctgccggggaaggtgtcgcggctggcgtcgctggagatcgtcaacgtcagcggcaactacctctacgggcagctcccggaggggctatcccggctgggcggcctccagacgttcatcgccgacgacaacatgctctccggcgagctgcccgggtggctcgggaggctggcgtcgctggccgtgctcagcctccggaacaactcgctgcagggcgcggtgccggagtccgtccgggacatggggtcgctgcggtcgctggcgctcgcgtgcaacaacctctccggccaggtgccggacctgagcgcgctgacgaacctgcaggcggtggacctctccaacaactcgcttggcccggcgttcccgcgcctggggcggaaggtggccagcgtcgtgctcagcggcaaccgcttcggcaacggggtccccgccgaggaggtcgcctcgctctacctcctggagcgcctggacgtgtcgaggaaccggttcgtcggcccgctcccgccggcgctgctcgcgctcccgtccatcgagtacctcagcgtcgccggaaaccgcttcacgggcctgctcgccgccaacatgtcctgcggcgagaacctccggttcgtggacgtgtcgtcgaacctcctgacggggacgctcccgtcgtgcctgaagacgctcccgtcgtcctccaactccaagcaggtgacggtcctggcggcgtccaactgcctgtccggcggcgccggcagcacgcagcacccggccctgttctgccagaaccaggcgctggccgtgggcatcgtgcccgtgcaggcgcggggcggcggcaaggccaagggcaaggccggagccgtggccggcgccgtggcggccgcgctggccgccgcgctgctcgccggcgtggccgcgttcctcttcgcgcggagggcggccgtgaggcgcgccaaggccaggccgccccggcggctggtggagcacgcggcgtcgtccatgtcggtcggcggcggcggcgcgtacccgtcgcagctgttcgccgacgcgcggtacatctcgcagacggtgaagctgggcgcgctgggcgtccccgcgtaccggtccttctcgctggtggagctggaggcggcgaccaacgacttcgaggtgtcgcgcctgatggggcaggacgcgcacgggcagatgtaccggggcacgctcggcaacggcacggcggtgacgatccggtcgctgcgggtgcggcgcagccagacgtcgcaggcgttcaaccggcacgtggagatgatctccaggctgcggcaccggcacctggtgagcgccctggggcactgcttcgagtgcagccccgacgacgccaccgtcacgcggctgtacctcgtgttcgagtacgtgcacaacgggaacctcaggagcaggatctcgcagggaaccgaagggaggaagctgccatgggtgcagaggatctcggcggccatcggcgtggccaagggcatccagttcctgcacgggggcatcatgccgggcctcttcgccaacaacctcaagatcaccaacatcctcctggaccagaacctcgtcgccaagatcggcagctacaacatccctatcctcgccgagaccgccaaatccgagggaggaggaggaggaggaggaagcaagtatccatctgacagcagggtgccccccaatggcgacaagatcgacatctacgatttcggcgtgatcctgctcgaggtcgtgaccgggaggcccatcacgtccatacacgaggtggaggtcatgaaggagcagctgcagtcggcgctgacgtcggagagcccggggcggcggagggcgctggtggaccaggcggtgagccgggcgtgctccgacgagtcggcgcggacggtgatggagatctgcctgcgctgcctggccaaggaggcggagcagcggccgtcggtggaggacgtgctgtggaacctgcagttcgcggcgcaggtgcaggacgactggcgcggggactcgcggagcagcgccagcgaggagtcgccgctgtcgccgtcgcagatcccgccgcggagggacagggagaccagcgcctggtaataagccaagcccgctctaggtgactgttgttgggcgatccgattaggcggcgaggcaggcatgcatcaagtgagatttcgttggtaaacaagtgtacagcagctgcaggctgcagctgaagctggaaacccaccacaggatgtgtacagctctttgcttcggcctactagtactagcactgctttattttatttttttcaatgcgtctttgccacctcattgattcacctactatatggatcgtttgactatgtgtaagcacaactgtatttggcgtcaatcttaccagaggtctcagttgtaggaccaagcgtgacttgactcgctgttgcagcacatttggctctttgcatggcacgatggcatcacagtcacagagtcagaaggccaaacaggcacactggcaaactactgtggattagtgagtgcactgctctccaacagttcgatgtaatgcagctgctctgcccttctccagacagctatggcggacagcaaccgcaatccttaaatcctgaaagatgcctgccgctggtcctgtcctccagcacagatagtcatcattgcgtacgtccccaatgcgagaatcgtgacatatctcgttctcggcctatatcgttgcccaccgtccacggtccaccatgatcagatgatcttcaaatttcaggtgcggcatgatgaggaatgcagaacacctttcgagcgatagccaaaaatcggatctcacttcgagatcgaccttgtctgccttgctgttccaagttgagtgtgctctgtccctgtcaaactcaacccacaaagcaagagcaacacggtccgtcaaacaaccattcccacgctataatttttgtacatgggcaggatcctttcaattcatgagaagataggtcaacaaccgctacattacgacagccaccaccatgagcaaccggggctcttgatgggggcagaacgacgacgacagactacaaaccaatcactggggttcttcaatgtttcgacaagcctggcgaaccagaaacacaaggagtgggtgtgttttttttttcacgctttcttattgtgcccctatcgggcacgacgagcatccttatgcactagtcggctgtccagctctgctccacgatctcacggactttgcggttgtactcccgcttgttctcgctgaac

SEQ ID NO: 64702 - DNA, 1641 bp, Zea Mays
tctacattctcaatctcaacgggaggaggaggaggaggaggaagcaagtatccatctgacagcagggtgccccccaatggcgacaagatcgacatctacgatttcggcgtgatcctgctcgaggtcgtgaccgggaggcccatcacgtccatacacgaggtggaggtcatgaaggagcagtcggcgctgacgtcggagagcccggggcggcggagggcgctggtggaccaggcggtgagccgggcgtgctccgacgagtcggcgcggacggtgatggagatctgcctgcgctgcctggccaaggaggcggagcagcggccgtcggtggaggacgtgctgtggaacctgcagttcgcggcgcaggtgcaggacgactggcgcggggactcgcggagcagcgccagcgaggagtcgccgctgtcgccgtcgcagatcccgccgcggagggacagggagaccagcgcctggtaataagccaagcccgctctaggtgactgttgttgggcgatccgattaggcggcgaggcaggcatgcatcaagtgagatttcgttggtaaacaagtgtacagcagctgcaggctgcagctgaagctggaaacccaccacaggatgtgtacagctctttgcttcggcctactagtactagcactgctttattttatttttttcaatgcgtctttgccacctcattgattcacctactatatggatcgtttgactatgtgtaagcacaactgtatttggcgtcaatcttaccagaggtctcagttgtaggaccaagcgtgacttgactcgctgttgcagcacatttggctctttgcatggcacgatggcatcacagtcacagagtcagaaggccaaacaggcacactggcaaactactgtggattagtgagtgcactgctctccaacagttcgatgtaatgcagctgctctgcccttctccagacagctatggcggacagcaaccgcaatccttaaatcctgaaagatgcctgccgctggtcctgtcctccagcacagatagtcatcattgcgtacgtccccaatgcgagaatcgtgacatatctcgttctcggcctatatcgttgcccaccgtccacggtccaccatgatcagatgatcttcaaatttcaggtgcggcatgatgaggaatgcagaacacctttcgagcgatagccaaaaatcggatctcacttcgagatcgaccttgtctgccttgctgttccaagttgagtgtgctctgtccctgtcaaactcaacccacaaagcaagagcaacacggtccgtcaaacaaccattcccacgctataatttttgtacatgggcaggatcctttcaattcatgagaagataggtcaacaaccgctacattacgacagccaccaccatgagcaaccggggctcttgatgggggcagaacgacgacgacagactacaaaccaatcactggggttcttcaatgtttcgacaagcctggcgaaccagaaacacaaggagtgggtgtgttttttttttcacgctttcttattgtgcccctatcgggcacgacgagcatccttatgcactagtcggctgtccagctctgctccacgatctcacggactttgcggttgtactcccgcttgttctcgctgaac

SEQ ID NO: 64703 - DNA, 2751 bp, Zea Mays
aacggcacctgcgtctctttcgcaaccatatcgctctccgacgactgctgtatcgcccccctgtctctctgcaacgactgttgggccgccgccgccctacgccagtcgccaggtgtcgacaccttcgtcggtatctttaccggcgacgagcacgcaccagggtgatgatagatgccaattcatcattctctggaggtgctcagttgcagccaagtacaagcatgaatacttattccttcatgcctgctccatcgtccccaatatcattttcatcaaataacatctctggctcttcagtcattgatggctccattgtgcagcaaagtccaccccaagaccaggcgcaaaagcagagggttctcttcatctccaggggcaacagaacccacagcttcaagctttgatccagcagcataatctggcacatatgcagcagaggcagcagcagctgctgcaatcatttgctcagacacaaccatctcaaattggcattcctcatcagcctcagcttccgccatcactagcacagcctggaatagctgtacctgttaggactcctgtcaacaatggcctttgttcccgcaggctaatgcagtatttatatcacaagcgtcgtcgtccggagaataatcccataacatattggaggaagcttgttgaggaatattttgcaccaacagcaagagaaagatggtgtgtgtcatcttacgaaaagagagcgaatgcttcagtttctactgcacaaacggctcaggacgtgtggcgatgtgacatatgcaaaacacatggtgcaaaaggatatgaatctacctatgaagtgcttcctagactctgtcaaattagatttgatcatggtgttatagacgaatacctattccttgacatgaccaagcccaacgaattccaattgcctaatggactaatggtgctggagcatacaaaagttgttcaaaagagcgtttatgaacacctacatgttatacatgaggggcatttgagaatcatattcacaccagaattaaagatcatgtcatgggagttctgttcacgacgacatgaagagtatatcactcgccgggttctggcaccgaaggtcaataatttgctacaggttgcccagaaattccaaaccgctgccactgaaaatggtcctgctggggtttcaaataatgatgcacaaaccatttgcaacatgtttgtggctgcatcacgacaactagcgaagaatctggagcaccacaccttgaatgaacatggcctttctaaacgatatgttcgctgcctgcagatatcggaggtggtgaataacatgaaggacttgattgagttcaccaacagaaacaattttggtcctatagagggcctgaagaattatccaaaaccaaatgtgtcggagcttccaggacagaatccgcgtgagacaaaacaaacaacggctgctggtggtcttccgaatgaccagaacaacaccgaagctatgggtaccaaacaagaaacaagcgctcgtgtggacaacggagcttctgttgctggagccgtcggtaatagtgctccgcagaacgctgcagcactaaacggttaccaaaatttaccgagaagctccagcgcaaatcagagtcagcttcagcagggggcatccggtgccttcaaaggtcctgccgcgacgcgcaatggcatgcagatggaagcatctaggtccttctgtggacctaaccaagtgcagctagcacgattccaacatcctgggtcatttcagcacccaatgccccagcacaacaacctccagggcttggggttgcaaaacaatcaccggggcctgggcgtgagcccacagtatcagcagcatgctttaaatcagctgattcaagaagttaagaacgctaaaaggcacacactgccacagcaaccacctctagatatccctaacataagcagtggtatcacatcaggaggtgctaacaccaacagtgctggtacaggagatcagggacagcgcatggccgtaaatggtgctgccaccatctataccgggcctactagtgtgatcaataacagcacagccagaagtaacaatttcaagtcggtaagcagcaatctggctgttgctgctgctcctgctggaggcaatgccgcgactttgaaggccaagcccttccatgaatttgatgacctggagcatctcatcgctaatgaattggtggggagcgggctgctcaacggtaacgagttggcgtggaacagttgacagagtacaaagacatctcgctgctcagacttgagcgttaaagtgttgagaacagccttcttggtagattttgctagcatggaaactagtatgtgtcggtggaaagctaccccagatcctagtttctgtttctcttttggtagattttgtattgccggtcgggacagttaactgataggagttggatttggcttgtaaatgtgagataggagttgcattgcctctgactgtcaaattatttgttccatgttccggttattcccaggctgagccaaattttttttggctaattacttcatgcagtagtttgcattggccggattggcaagaatatgtagttagtacagaacgatacaacacttctggcgattacaatcaagtttccatggtggttacgggatctgttccgctaaccatggcgacgatccagtcctgggcaccattactgctggataggcgcacgccttgtgtaacgcatcaaccagacactctacctgtctaacatc

SEQ ID NO: 64704 - DNA, 2693 bp, Zea Mays
tgcgtctctttcgcaaccatatcgctctccgacgactgctgtatcgcccccctgtctctctgcaacgactgttgggccgccgccgccctacgccagtcgccaggtgtcgacaccttcgtcggtatctttaccggcgacgagcacgcaccaggttctagtcataaatattggaagatctttattggtaattccagctatgtgccctgcctttattggagattcttcagggtgatgatagatgccaattcatcattctctggagcaaagtccaccccaagaccaggcgcaaaagcagagggttctcttcatctccaggggcaacagaacccacagcttcaagctttgatccagcagcataatctggcacatatgcagcagaggcagcagcagctgctgcaatcatttgctcagacacaaccatctcaaattggcattcctcatcagcctcagcttccgccatcactagcacagcctggaatagctgtacctgttaggactcctgtcaacaatggcctttgttcccgcaggctaatgcagtatttatatcacaagcgtcgtcgtccggagaataatcccataacatattggaggaagcttgttgaggaatattttgcaccaacagcaagagaaagatggtgtgtgtcatcttacgaaaagagagcgaatgcttcagtttctactgcacaaacggctcaggacgtgtggcgatgtgacatatgcaaaacacatggtgcaaaaggatatgaatctacctatgaagtgcttcctagactctgtcaaattagatttgatcatggtgttatagacgaatacctattccttgacatgaccaagcccaacgaattccaattgcctaatggactaatggtgctggagcatacaaaagttgttcaaaagagcgtttatgaacacctacatgttatacatgaggggcatttgagaatcatattcacaccagaattaaagatcatgtcatgggagttctgttcacgacgacatgaagagtatatcactcgccgggttctggcaccgaaggtcaataatttgctacaggttgcccagaaattccaaaccgctgccactgaaaatggtcctgctggggtttcaaataatgatgcacaaaccatttgcaacatgtttgtggctgcatcacgacaactagcgaagaatctggagcaccacaccttgaatgaacatggcctttctaaacgatatgttcgctgcctgcagatatcggaggtggtgaataacatgaaggacttgattgagttcaccaacagaaacaattttggtcctatagagggcctgaagaattatccaaaaccaaatgtgtcggagcttccaggacagaatccgcgtgagacaaaacaaacaacggctgctggtggtcttccgaatgaccagaacaacaccgaagctatgggtaccaaacaagaaacaagcgctcgtgtggacaacggagcttctgttgctggagccgtcggtaatagtgctccgcagaacgctgcagcactaaacggttaccaaaatttaccgagaagctccagcgcaaatcagagtcagcttcagcagggggcatccggtgccttcaaaggtcctgccgcgacgcgcaatggcatgcagatggaagcatctaggtccttctgtggacctaaccaagtgcagctagcacgattccaacatcctgggtcatttcagcacccaatgccccagcacaacaacctccagggcttggggttgcaaaacaatcaccggggcctgggcgtgagcccacagtatcagcagcatgctttaaatcagctgattcaagaagttaagaacgctaaaaggcacacactgccacagcaaccacctctagatatccctaacataagcagtggtatcacatcaggaggtgctaacaccaacagtgctggtacaggagatcagggacagcgcatggccgtaaatggtgctgccaccatctataccgggcctactagtgtgatcaataacagcacagccagaagtaacaatttcaagtcggtaagcagcaatctggctgttgctgctgctcctgctggaggcaatgccgcgactttgaaggccaagcccttccatgaatttgatgacctggagcatctcatcgctaatgaattggtggggagcgggctgctcaacggtaacgagttggcgtggaacagttgacagagtacaaagacatctcgctgctcagacttgagcgttaaagtgttgagaacagccttcttggtagattttgctagcatggaaactagtatgtgtcggtggaaagctaccccagatcctagtttctgtttctcttttggtagattttgtattgccggtcgggacagttaactgataggagttggatttggcttgtaaatgtgagataggagttgcattgcctctgactgtcaaattatttgttccatgttccggttattcccaggctgagccaaattttttttggctaattacttcatgcagtagtttgcattggccggattggcaagaatatgtagttagtacagaacgatacaacacttctggcgattacaatcaagtttccatggtggttacgggatctgttccgctaaccatggcgacgatccagtcctgggcaccattactgctggataggcgcacgccttgtgtaacgcatcaaccagacactctacctgtctaacatc

SEQ ID NO: 64705 - DNA, 2592 bp, Zea Mays
tgcgtctctttcgcaaccatatcgctctccgacgactgctgtatcgcccccctgtctctctgcaacgactgttgggccgccgccgccctacgccagtcgccaggtgtcgacaccttcgtcggtatctttaccggcgacgagcacgcaccaggttctagtcataaatattggaagatctttattggtaattccagctatgtgccctgcctttattggagattcttcagggtgatgatagatgccaattcatcattctctggagcaaagtccaccccaagaccaggcgcaaaagcagagggttctcttcatctccaggggcaacagaacccacagcttcaagctttgatccagcagcataatctggcacatatgcagcagaggcagcagcagctgctgcaatcatttgctcagacacaaccatctcaaattggcattcctcatcagcctcagcttccgccatcactagcacagcctggaatagctgtacctgttaggactcctgtcaacaatggcctttgttcccgcaggctaatgcagtatttatatcacaagcgtcgtcgtccggagaataatcccataacatattggaggaagcttgttgaggaatattttgcaccaacagcaagagaaagatggtgtgtgtcatcttacgaaaagagagcgaatgcttcagtttctactgcacaaacggctcaggacgtgtggcgatgtgacatatgcaaaacacatggtgcaaaaggatatgaatctacctatgaagtgcttcctagactctgtcaaattagatttgatcatggtgttatagacgaatacctattccttgacatgaccaagcccaacgaattccaattgcctaatggactaatggtgctggagcatacaaaagttgttcaaaagagcgtttatgaacacctacatgttatacatgaggggcatttgagaatcatattcacaccagaattaaagatcatgtcatgggagttctgttcacgacgacatgaagagtatatcactcgccgggttctggcaccgaaggtttgtggctgcatcacgacaactagcgaagaatctggagcaccacaccttgaatgaacatggcctttctaaacgatatgttcgctgcctgcagatatcggaggtggtgaataacatgaaggacttgattgagttcaccaacagaaacaattttggtcctatagagggcctgaagaattatccaaaaccaaatgtgtcggagcttccaggacagaatccgcgtgagacaaaacaaacaacggctgctggtggtcttccgaatgaccagaacaacaccgaagctatgggtaccaaacaagaaacaagcgctcgtgtggacaacggagcttctgttgctggagccgtcggtaatagtgctccgcagaacgctgcagcactaaacggttaccaaaatttaccgagaagctccagcgcaaatcagagtcagcttcagcagggggcatccggtgccttcaaaggtcctgccgcgacgcgcaatggcatgcagatggaagcatctaggtccttctgtggacctaaccaagtgcagctagcacgattccaacatcctgggtcatttcagcacccaatgccccagcacaacaacctccagggcttggggttgcaaaacaatcaccggggcctgggcgtgagcccacagtatcagcagcatgctttaaatcagctgattcaagaagttaagaacgctaaaaggcacacactgccacagcaaccacctctagatatccctaacataagcagtggtatcacatcaggaggtgctaacaccaacagtgctggtacaggagatcagggacagcgcatggccgtaaatggtgctgccaccatctataccgggcctactagtgtgatcaataacagcacagccagaagtaacaatttcaagtcggtaagcagcaatctggctgttgctgctgctcctgctggaggcaatgccgcgactttgaaggccaagcccttccatgaatttgatgacctggagcatctcatcgctaatgaattggtggggagcgggctgctcaacggtaacgagttggcgtggaacagttgacagagtacaaagacatctcgctgctcagacttgagcgttaaagtgttgagaacagccttcttggtagattttgctagcatggaaactagtatgtgtcggtggaaagctaccccagatcctagtttctgtttctcttttggtagattttgtattgccggtcgggacagttaactgataggagttggatttggcttgtaaatgtgagataggagttgcattgcctctgactgtcaaattatttgttccatgttccggttattcccaggctgagccaaattttttttggctaattacttcatgcagtagtttgcattggccggattggcaagaatatgtagttagtacagaacgatacaacacttctggcgattacaatcaagtttccatggtggttacgggatctgttccgctaaccatggcgacgatccagtcctgggcaccattactgctggataggcgcacgccttgtgtaacgcatcaaccagacactctacctgtctaacatc

SEQ ID NO: 64706 - DNA, 2763 bp, Zea Mays
tgcgtctctttcgcaaccatatcgctctccgacgactgctgtatcgcccccctgtctctctgcaacgactgttgggccgccgccgccctacgccagtcgccaggtgtcgacaccttcgtcggtatctttaccggcgacgagcacgcaccaggttctagtcataaatattggaagatctttattggtaattccagctatgtgccctgcctttattggagattcttcagggtgatgatagatgccaattcatcattctctggagcaaagtccaccccaagaccaggcgcaaaagcagagggttctcttcatctccaggggcaacagaacccacagcttcaagctttgatccagcagcataatctggcacatatgcagcagaggcagcagcagctgctgcaatcatttgctcagacacaaccatctcaaattggcattcctcatcagcctcagcttccgccatcactagcacagcctggaatagctgtacctgttaggactcctgtcaacaatggcctttgttcccgcaggctaatgcagtatttatatcacaagcgtcgtcgtccggagaataatcccataacatattggaggaagcttgttgaggaatattttgcaccaacagcaagagaaagatggtgtgtgtcatcttacgaaaagagagcgaatgcttcagtttctactgcacaaacggctcaggacgtgtggcgatgtgacatatgcaaaacacatggtgcaaaaggatatggttagctaattttgtcaactctgccaaactatattcatgatatattttggtattaaaaaatttagtttttaatctacctatgaagtgcttcctagactctgtcaaattagatttgatcatggtgttatagacgaatacctattccttgacatgaccaagcccaacgaattccaattgcctaatggactaatggtgctggagcatacaaaagttgttcaaaagagcgtttatgaacacctacatgttatacatgaggggcatttgagaatcatattcacaccagaattaaagatcatgtcatgggagttctgttcacgacgacatgaagagtatatcactcgccgggttctggcaccgaaggtcaataatttgctacaggttgcccagaaattccaaaccgctgccactgaaaatggtcctgctggggtttcaaataatgatgcacaaaccatttgcaacatgtttgtggctgcatcacgacaactagcgaagaatctggagcaccacaccttgaatgaacatggcctttctaaacgatatgttcgctgcctgcagatatcggaggtggtgaataacatgaaggacttgattgagttcaccaacagaaacaattttggtcctatagagggcctgaagaattatccaaaaccaaatgtgtcggagcttccaggacagaatccgcgtgagacaaaacaaacaacggctgctggtggtcttccgaatgaccagaacaacaccgaagctatgggtaccaaacaagaaacaagcgctcgtgtggacaacggagcttctgttgctggagccgtcggtaatagtgctccgcagaacgctgcagcactaaacggttaccaaaatttaccgagaagctccagcgcaaatcagagtcagcttcagcagggggcatccggtgccttcaaaggtcctgccgcgacgcgcaatggcatgcagatggaagcatctaggtccttctgtggacctaaccaagtgcagctagcacgattccaacatcctgggtcatttcagcacccaatgccccagcacaacaacctccagggcttggggttgcaaaacaatcaccggggcctgggcgtgagcccacagtatcagcagcatgctttaaatcagctgattcaagaagttaagaacgctaaaaggcacacactgccacagcaaccacctctagatatccctaacataagcagtggtatcacatcaggaggtgctaacaccaacagtgctggtacaggagatcagggacagcgcatggccgtaaatggtgctgccaccatctataccgggcctactagtgtgatcaataacagcacagccagaagtaacaatttcaagtcggtaagcagcaatctggctgttgctgctgctcctgctggaggcaatgccgcgactttgaaggccaagcccttccatgaatttgatgacctggagcatctcatcgctaatgaattggtggggagcgggctgctcaacggtaacgagttggcgtggaacagttgacagagtacaaagacatctcgctgctcagacttgagcgttaaagtgttgagaacagccttcttggtagattttgctagcatggaaactagtatgtgtcggtggaaagctaccccagatcctagtttctgtttctcttttggtagattttgtattgccggtcgggacagttaactgataggagttggatttggcttgtaaatgtgagataggagttgcattgcctctgactgtcaaattatttgttccatgttccggttattcccaggctgagccaaattttttttggctaattacttcatgcagtagtttgcattggccggattggcaagaatatgtagttagtacagaacgatacaacacttctggcgattacaatcaagtttccatggtggttacgggatctgttccgctaaccatggcgacgatccagtcctgggcaccattactgctggataggcgcacgccttgtgtaacgcatcaaccagacactctacctgtctaacatc

SEQ ID NO: 64707 - DNA, 2951 bp, Zea Mays
tgcgtctctttcgcaaccatatcgctctccgacgactgctgtatcgcccccctgtctctctgcaacgactgttgggccgccgccgccctacgccagtcgccaggtgtcgacaccttcgtcggtatctttaccggcgacgagcacgcaccagcaggttctagtcataaatattggaagatctttattggtaattccagctatgtgccctgcctttattggagattcttcagggtgatgatagatgccaattcatcattctctggaggtgctcagttgcagccaagtacaagcatgaatacttattccttcatgcctgctccatcgtccccaatatcattttcatcaaataacatctctggctcttcagtcattgatggctccattgtgcagcaaagtccaccccaagaccaggcgcaaaagcagaggtcttcaagtctaacatcacatcctattattgaggctggtggtgcattgcatgctccaaagaaattaagaattgatgttaggcaagatgaactgcagcaacagctgattcagcgtctgctccatggtcagggttctcttcatctccaggggcaacagaacccacagcttcaagctttgatccagcagcataatctggcacatatgcagcagaggcagcagcagctgctgcaatcatttgctcagacacaaccatctcaaattggcattcctcatcagcctcagcttccgccatcactagcacagcctggaatagctgtacctgttaggactcctgtcaacaatggcctttgttcccgcaggctaatgcagtatttatatcacaagcgtcgtcgtccggagaataatcccataacatattggaggaagcttgttgaggaatattttgcaccaacagcaagagaaagatggtgtgtgtcatcttacgaaaagagagcgaatgcttcagtttctactgcacaaacggctcaggacgtgtggcgatgtgacatatgcaaaacacatggtgcaaaaggatatgaatctacctatgaagtgcttcctagactctgtcaaattagatttgatcatggtgttatagacgaatacctattccttgacatgaccaagcccaacgaattccaattgcctaatggactaatggtgctggagcatacaaaagttgttcaaaagagcgtttatgaacacctacatgttatacatgaggggcatttgagaatcatattcacaccagaattaaagatcatgtcatgggagttctgttcacgacgacatgaagagtatatcactcgccgggttctggcaccgaaggtcaataatttgctacaggttgcccagaaattccaaaccgctgccactgaaaatggtcctgctggggtttcaaataatgatgcacaaaccatttgcaacatgtttgtggctgcatcacgacaactagcgaagaatctggagcaccacaccttgaatgaacatggcctttctaaacgatatgttcgctgcctgcagatatcggaggtggtgaataacatgaaggacttgattgagttcaccaacagaaacaattttggtcctatagagggcctgaagaattatccaaaaccaaatgtgtcggagcttccaggacagaatccgcgtgagacaaaacaaacaacggctgctggtggtcttccgaatgaccagaacaacaccgaagctatgggtaccaaacaagaaacaagcgctcgtgtggacaacggagcttctgttgctggagccgtcggtaatagtgctccgcagaacgctgcagcactaaacggttaccaaaatttaccgagaagctccagcgcaaatcagagtcagcttcagcagggggcatccggtgccttcaaaggtcctgccgcgacgcgcaatggcatgcagatggaagcatctaggtccttctgtggacctaaccaagtgcagctagcacgattccaacatcctgggtcatttcagcacccaatgccccagcacaacaacctccagggcttggggttgcaaaacaatcaccggggcctgggcgtgagcccacagtatcagcagcatgctttaaatcagctgattcaagaagttaagaacgctaaaaggcacacactgccacagcaaccacctctagatatccctaacataagcagtggtatcacatcaggaggtgctaacaccaacagtgctggtacaggagatcagggacagcgcatggccgtaaatggtgctgccaccatctataccgggcctactagtgtgatcaataacagcacagccagaagtaacaatttcaagtcggtaagcagcaatctggctgttgctgctgctcctgctggaggcaatgccgcgactttgaaggccaagcccttccatgaatttgatgacctggagcatctcatcgctaatgaattggtggggagcgggctgctcaacggtaacgagttggcgtggaacagttgacagagtacaaagacatctcgctgctcagacttgagcgttaaagtgttgagaacagccttcttggtagattttgctagcatggaaactagtatgtgtcggtggaaagctaccccagatcctagtttctgtttctcttttggtagattttgtattgccggtcgggacagttaactgataggagttggatttggcttgtaaatgtgagataggagttgcattgcctctgactgtcaaattatttgttccatgttccggttattcccaggctgagccaaattttttttggctaattacttcatgcagtagtttgcattggccggattggcaagaatatgtagttagtacagaacgatacaacacttctggcgattacaatcaagtttccatggtggttacgggatctgttccgctaaccatggcgacgatccagtcctgggcaccattactgctggataggcgcacgccttgtgtaacgcatcaaccagacactctacctgtctaacatc

SEQ ID NO: 64708 - DNA, 2712 bp, Zea Mays
tgcgtctctttcgcaaccatatcgctctccgacgactgctgtatcgcccccctgtctctctgcaacgactgttgggccgccgccgccctacgccagtcgccaggtgtcgacaccttcgtcggtatctttaccggcgacgagcacgcaccagcaaagtccaccccaagaccaggcgcaaaagcagaggtcttcaagtctaacatcacatcctattattgaggctggtggtgcattgcatgctccaaagaaattaagaattgatgttaggcaagatgaactgcagcaacagctgattcagcgtctgctccatggtcagggttctcttcatctccaggggcaacagaacccacagcttcaagctttgatccagcagcataatctggcacatatgcagcagaggcagcagcagctgctgcaatcatttgctcagacacaaccatctcaaattggcattcctcatcagcctcagcttccgccatcactagcacagcctggaatagctgtacctgttaggactcctgtcaacaatggcctttgttcccgcaggctaatgcagtatttatatcacaagcgtcgtcgtccggagaataatcccataacatattggaggaagcttgttgaggaatattttgcaccaacagcaagagaaagatggtgtgtgtcatcttacgaaaagagagcgaatgcttcagtttctactgcacaaacggctcaggacgtgtggcgatgtgacatatgcaaaacacatggtgcaaaaggatatgaatctacctatgaagtgcttcctagactctgtcaaattagatttgatcatggtgttatagacgaatacctattccttgacatgaccaagcccaacgaattccaattgcctaatggactaatggtgctggagcatacaaaagttgttcaaaagagcgtttatgaacacctacatgttatacatgaggggcatttgagaatcatattcacaccagaattaaagatcatgtcatgggagttctgttcacgacgacatgaagagtatatcactcgccgggttctggcaccgaaggtcaataatttgctacaggttgcccagaaattccaaaccgctgccactgaaaatggtcctgctggggtttcaaataatgatgcacaaaccatttgcaacatgtttgtggctgcatcacgacaactagcgaagaatctggagcaccacaccttgaatgaacatggcctttctaaacgatatgttcgctgcctgcagatatcggaggtggtgaataacatgaaggacttgattgagttcaccaacagaaacaattttggtcctatagagggcctgaagaattatccaaaaccaaatgtgtcggagcttccaggacagaatccgcgtgagacaaaacaaacaacggctgctggtggtcttccgaatgaccagaacaacaccgaagctatgggtaccaaacaagaaacaagcgctcgtgtggacaacggagcttctgttgctggagccgtcggtaatagtgctccgcagaacgctgcagcactaaacggttaccaaaatttaccgagaagctccagcgcaaatcagagtcagcttcagcagggggcatccggtgccttcaaaggtcctgccgcgacgcgcaatggcatgcagatggaagcatctaggtccttctgtggacctaaccaagtgcagctagcacgattccaacatcctgggtcatttcagcacccaatgccccagcacaacaacctccagggcttggggttgcaaaacaatcaccggggcctgggcgtgagcccacagtatcagcagcatgctttaaatcagctgattcaagaagttaagaacgctaaaaggcacacactgccacagcaaccacctctagatatccctaacataagcagtggtatcacatcaggaggtgctaacaccaacagtgctggtacaggagatcagggacagcgcatggccgtaaatggtgctgccaccatctataccgggcctactagtgtgatcaataacagcacagccagaagtaacaatttcaagtcggtaagcagcaatctggctgttgctgctgctcctgctggaggcaatgccgcgactttgaaggccaagcccttccatgaatttgatgacctggagcatctcatcgctaatgaattggtggggagcgggctgctcaacggtaacgagttggcgtggaacagttgacagagtacaaagacatctcgctgctcagacttgagcgttaaagtgttgagaacagccttcttggtagattttgctagcatggaaactagtatgtgtcggtggaaagctaccccagatcctagtttctgtttctcttttggtagattttgtattgccggtcgggacagttaactgataggagttggatttggcttgtaaatgtgagataggagttgcattgcctctgactgtcaaattatttgttccatgttccggttattcccaggctgagccaaattttttttggctaattacttcatgcagtagtttgcattggccggattggcaagaatatgtagttagtacagaacgatacaacacttctggcgattacaatcaagtttccatggtggttacgggatctgttccgctaaccatggcgacgatccagtcctgggcaccattactgctggataggcgcacgccttgtgtaacgcatcaaccagacactctacctgtctaacatc

SEQ ID NO: 64709 - DNA, 1214 bp, Zea Mays
cccgcacagcaagggcgtgcccccaccccgacgccccccgcctcaccatgcccccaactcgccgtgcgatccatgcccccagcccagcttcccctactacctcaaggccggtatccccaattccccattccttctcctccctttgctcgcctggaggtggtctgcccccaccacctgtgcgcttcccgcttccctgtcccacctcacgctcccaggaggagacactccggaagatggtggggcggcggcttcgcgctccacagatgttgtcgggtccaagaagcagagtctccgcgctccatggaggtcgccttccgcgtggacaacagcgcgacgagatgctacaactacactcatgacagcttcaatagcatatctgcattttttcctcatcctcagaatcgtctctctcggattttgacagcctgttgtcaacgaaggcgagcatggtgtactctaagctcagcaatttccagaaaaaaatcgttaacttgcaagttagtttcaatatttctagcatattccaatcacagcatcgtccagtccacacccatccaatttaggggcttcttgttgtgctctcaggccccagtcgaaaagcaaggtcctgtcatcacaaactcctagcaaatttaggatatgtcatgagaacaagacatgacaacattacaacctcagaggttagaggaatgtgtttggggtgagtaatttttttgtgttgtttcctctgtccatggccatggaggagcaaaggaggccacctagctcgaagatagcgccagtgtccatgaaggcgtcctccgcaaatgcgacgcttcaaggcatgaagaacagaagccattttcgaagggacatgaaaactgcactgcaacaagacgtggacaagctgaggaagaagttgtggcacgagaagaacgtccactgagctctaaagcaggcgttcgcgaggccgctctgcctcgcctccctattgtctcaagtcaatgtccttctttgcttttcgatcaatttcacaagcaagaagcaacctaaccaataatttgttgcccttccgaaggactcgatacactttctgatttctgcctcttctgaattgttcctagacattggagcttctggccccgttgcaagtggaaaatccttgtacttaaaggttgcaatgtagtggtcccgttgcaacgcacgggcactcacctagtaaataaaataagcat

SEQ ID NO: 64710 - DNA, 1672 bp, Zea Mays
cccgcacagcaagggcgtgcccccaccccgacgccccccgcctcaccatgcccccaactcgccgtgcgatccatgcccccagcccagcttcccctactacctcaaggccggtatccccaattccccattccttctcctccctttgctcgcctggaggtggtctgcccccaccacctgtgcgcttcccgcttccctgtcccacctcacgctcccaggaggagacactccggaagatggtggggcggcggcttcgcgctccacagatgttgtcgggtccaagaagcagagtctccgcgctccatggaggtcgccttccgcgtggacaacagcgcgacgagatgctacaactacactcatgacagcttcaatagcatatctgcattttttcctcatcctcagaatcgtctctctcggtctgttcttccccctttcgtttatggcttacgaagtgctgaatttttagatccggatctctctctctctgatggtgatttttgagtgagaaagatcgatactatttggttagaatttctattaagtggtaatcatgaaattgaaatcaatctcaaaagttttactgttttaatcccgacatgttcgtactgtggtatgacctttcctttttattttgttttagaattatttacaagttatccattgagattgattttactgttttaatcccgacaatgtctatgaagtcgttgacatctggattatattctattagtgctgatttggatcaattcttgtttattaggagacttcaaatgttttctctcccctataaaaacactttgtttcatttgcttataattaactgctgcactgtccatggattgctctctcattctacttcctatgattttaggattttgacagcctgttgtcaacgaaggcgagcatggtgtactctaagctcagcaatttccagaaaaaaatcgttaacttgcaagttagtttcaatatttctagcatattccaatcacagcatcgtccagtccacacccatccaatttaggggcttcttgttgtgctctcaggccccagtcgaaaagcaaggtcctgtcatcacaaactcctagcaaatttaggatatgtcatgagaacaagacatgacaacattacaacctcagaggttagaggaatgtgtttggggtgagtaatttttttgtgttgtttcctctgtccatggccatggaggagcaaaggaggccacctagctcgaagatagcgccagtgtccatgaaggcgtcctccgcaaatgcgacgcttcaaggcatgaagaacagaagccattttcgaagggacatgaaaactgcactgcaacaagacgtggacaagctgaggaagaagttgtggcacgagaagaacgtccactgagctctaaagcaggcgttcgcgaggccgctctgcctcgcctccctattgtctcaagtcaatgtccttctttgcttttcgatcaatttcacaagcaagaagcaacctaaccaataatttgttgcccttccgaaggactcgatacactttctgatttctgcctcttctgaattgttcctagacattggagcttctggccccgttgcaagtggaaaatccttgtacttaaaggttgcaatgtagtggtcccgttgcaacgcacgggcactcacctagtaaataaaataagcat

SEQ ID NO: 64711 - DNA, 1672 bp, Zea Mays
cccgcacagcaagggcgtgcccccaccccgacgccccccgcctcaccatgcccccaactcgccgtgcgatccatgcccccagcccagcttcccctactacctcaaggccggtatccccaattccccattccttctcctccctttgctcgcctggaggtggtctgcccccaccacctgtgcgcttcccgcttccctgtcccacctcacgctcccaggaggagacactccggaagatggtggggcggcggcttcgcgctccacagatgttgtcgggtccaagaagcagagtctccgcgctccatggaggtcgccttccgcgtggacaacagcgcgacgagatgctacaactacactcatgacagcttcaatagcatatctgcattttttcctcatcctcagaatcgtctctctcggtctgttcttccccctttcgtttatggcttacgaagtgctgaatttttagatccggatctctctctctctgatggtgatttttgagtgagaaagatcgatactatttggttagaatttctattaagtggtaatcatgaaattgaaatcaatctcaaaagttttactgttttaatcccgacatgttcgtactgtggtatgacctttcctttttattttgttttagaattatttacaagttatccattgagattgattttactgttttaatcccgacaatgtctatgaagtcgttgacatctggattatattctattagtgctgatttggatcaattcttgtttatcaggagacttcaaatgttttctctcccctataaaaacactttgtttcatttgcttataattaactgttgcactgtccatggattgctctctcattctacttcctatgattttaggattttgacagcctattgtcaacgaaggcgagcatggtgtactctaagctcagcaatttccagaaaaaaatcgttaacttgcaagttagtttcaatatttctagcatattccaatcacagcatcgtccagtccacacccatccaatttaggggcttcttgttgtgctctcaggccccagtcgaaaagcaaggtcctgtcatcacaaactcctagcaaatttaggatatgtcatgagaacaagacatgacaacattacaacctcagaggttagaggaatgtgtttggggtgagtaatttttttgtgttgtttcctctgtccatggccatggaggagcaaaggaggccacctagctcgaagatagcgccagtgtccatgaaggcgtcctccgcaaatgcgacgcttcaaggcatgaagaacagaagccattttcgaagggacatgaaaactgcactgcaacaagacgtggacaagctgaggaagaagttgtggcacgagaagaacgtccactgagctctaaagcaggcgttcgcgaggccgctctgcctcgcctccctattgtctcaagtcaatgtccttctttgcttttcgatcaatttcacaagcaagaagcaacctaaccaataatttgttgcccttccgaaggactcgatacactttctgatttctgcctcttctgaattgttcctagacattggagcttctggccccgttgcaagtggaaaatccttgtacttaaaggttgcaatgtagtggtcccgttgcaacgcacgggcactcacctagtaaataaaataagcat

SEQ ID NO: 64712 - DNA, 946 bp, Zea Mays
aaaaaatcgttaacttgcaagttagtttcaatatttctagcatattccaatcacagcatcgtccagcccacacccatccaatttaggatcgatttgtgggagggagcaggcgtgtaggaccgatttgtgggagggagcagggccacgtgatcaatttctctcttaaccattgttctttccttttgtctccaataagatctgtgggaggaatacattggtctgatcatgtagtgcatgtgcaatgatacctgtgaaatagaagtcgttttctggggggagctccatcgtcgggaagaggggtcatggctcaccacggacaaaaggtcgaaaagcaaggtcctgtcatcacaaactcctagcaaatttaggatatgtcatgagaacaagacatgacaacattacaacctcagaggttagaggaatgtgtttggggtgagtaatttttttgtgttgtttcctctgtccatggccatggaggagcaaaggaggccacctagctcgaagatagcgccagtgtccatgaaggcgtcctccgcaaatgcgacgcttcaaggcatgaagaacagaagccattttcgaagggacatgaaaactgcactgcaacaagacgtggacaagctgaggaagaagttgtggcacgagaagaacgtccactgagctctaaagcaggcgttcgcgaggccgctctgcctcgcctccctattgtctcaagtcaatgtccttctttgcttttcgatcaatttcacaagcaagaagcaacctaaccaataatttgttgcccttccgaaggactcgatacactttctgatttctgcctcttctgaattgttcctagacattggagcttctggccccgttgcaagtggaaaatccttgtacttaaaggttgcaatgtagtggtcccgttgcaacgcacgggcactcacctagtaaataaaataagcat

SEQ ID NO: 64713 - DNA, 1331 bp, Zea Mays
ctaggagtctaggtcagcgcctcagcagcaaggccgcaagaccagcagtccaaggctcaaagcggcccaggacctaggtccaagcgaacagcctgcgggcctggcgctctgcctctccctctcgtctttcacccacagaaggcaaagatgatcaagaggcgctactttaggcaggaccatggtgataacagcggctcctcatcttcctcctcatcggattgtgactcggacaacgatttggcagaagaggcagtcagcagtgaggaagtagaggagcaggaagaagaggaagcagtcaaggaagaatcaggagaagaagaggaaggagaactagaacaacaaattgtagaagggagttcaggataccaaagtgaggacaactcatggaatgatgttgatggtgcatctatagacgatgatgaacacagcagcccaagagatgaagaacgtcatgaaataagtttgcccattatgaaatcttctggtgctaatgctgactctgccaaaagtgctgataacacagatgacgctgttgatgcagacttccctaactgcattctgaaatgcaaatctgtgtttaagtgcaagctctgtcctaggatcatgtgcttaaatgtggagatggtcaagatacatctgaaatcaaagaggcatgctcgttccgagaaactactaggagaagggaggcttaagctgatgctcaacagcgatggtgaactggaggaagagcaagagacacatgctgaacgacatgctcggactatagccctttcccagcaagtacaaaagcagaagaaggattcaggtaggcagcgacagaatcggagaaagaagaagaggtctcgggttaatctggaagaggcacagaacaacaaaaaacaacgcaaagctaaatgaagtgggtcttgcagaagcttccaagttcttttgtagcttcaactgctgtgttcccaaactttgtagcggccataccgttaggatattcaagtatccaagagttttctcgtcggctgtaccccgtttcggcctaaactgttagtaatttgttgaattttagatatttaattgaagtggatcaaaatgatatttttgagccgagcagctgatataggctcctcgaactacagtgtgtcgcctgtgccaaatcatcacaggttcatgatccacacgaactataattgtgcttctcaaactgtggtgtggagcttgagccattttagaggagtcacacactgtgtgtgtattttaaaaaaagcggatctggtttctcattttgtattaaaccgtttggctgttttcagcaacgtcctctatatctatctctatatctg

SEQ ID NO: 64714 - DNA, 1566 bp, Zea Mays
aagcgaacagcctgcgggcctggcgctctgcctctccctctcgccgtgcagggcttcaggccatccgggctccggcttccggcatccatcaggcgtcctcataagatggtgtagggcagcgagcgccgagcagagcagcaaggcagagcagcgagcagccgagcagcgaggcagcgggcgtcctcagaatccgggctgccgagccgccgagcagagcagccgagagcagcgaggcagcgagaacggcccacgagaaggcccgtgcgggtgcggtcgccctgggccgaacaaccccggaccgccgtccgctgcttcctactcttcaccgcttcaccccgcgtgcgcgctttctctgttgctctgctacaactgcggcgccgccgccgccgccgccctacgccagttgccgagcccttcatcgctcttctcgccggcgacgagcacccaccacaacaagtctttcacccacagaaggcaaagatgatcaagaggcgctactttaggcaggaccatggtgataacagcggctcctcatcttcctcctcatcggattgtgactcggacaacgatttggcagaagaggcagtcagcagtgaggaagtagaggagcaggaagaagaggaagcagtcaaggaagaatcaggagaagaagaggaaggagaactagaacaacaaattgtagaagggagttcaggataccaaagtgaggacaactcatggaatgatgttgatggtgcatctatagacgatgatgaacacagcagcccaagagatgaagaacgtcatgaaataagtttgcccattatgaaatcttctgtgcaagctctgtcctaggatcatgtgcttaaatgtggagatggtcaagatacatctgaaatcaaagaggcatgctcgttccgagaaactactaggagaagggaggcttaagctgatgctcaacagcgatggtgaactggaggaagagcaagagacacatgctgaacgacatgctcggactatagccctttcccagcaagtacaaaagcagaagaaggattcaggtaggcagcgacagaatcggagaaagaagaagaggtctcgggttaatctggaagaggcacagaacaacaaaaaacaacgcaaagctaaatgaagtgggtcttgcagaagcttccaagttcttttgtagcttcaactgctgtgttcccaaactttgtagcggccataccgttaggatattcaagtatccaagagttttctcgtcggctgtaccccgtttcggcctaaactgttagtaatttgttgaattttagatatttaattgaagtggatcaaaatgatatttttgagccgagcagctgatataggctcctcgaactacagtgtgtcgcctgtgccaaatcatcacaggttcatgatccacacgaactataattgtgcttctcaaactgtggtgtggagcttgagccattttagaggagtcacacactgtgtgtgtattttaaaaaaagcggatctggtttctcattttgtattaaaccgtttggctgttttcagcaacgtcctctatatctatctctatatctg

SEQ ID NO: 64715 - DNA, 1019 bp, Zea Mays
ccgttagctactttgttcttcccagtgtgtccgtgctctggtgtgtggcctccgtctcacgcctgagctgcaagccctcttggcgccacacagcgcaggatgagccacagaacagaagcgtctcttcctcctcctcttcttcctcctcatctgcaccaccacagaacacagattcgcgagcccaagaccaagagcaagagaagaagagctcagctgctgctgcggtgctgccggtgccgggcggagtttaacatcgcgccgcagctaactcaacgcagttaagcttctcctactcctagcttagccaatagccatggcgctggctagccaggtcgccgctaaccagccgccgccgccgacgctctcctcccccgcccgccgcctcccaagagccagcagcaacgctctgctgctgctccagccggcggccgcggtcctcggcggccggaccctgaggcttcggcctcccggcgcgcggaggagggccctggacgccgtcgtcgtcgcgcgggcgtcgtctgaggcgaaggcggagaccgccgaggcgggcggcggcggcgggggagcggaggaggagcggccgtacgaggagtacgaggtgacgatcgagaagccgtacgggctcaagttcaccaagggccgcgacggcggcacgtacgtggaggccatccagcccggcgccgccgccgacctgaccggccagttcgaggtgggcgacaaggtgctggccaccagctccgtcttcggggaggagatctggccggcggcggggtacggccagaccatgtactgcatccgccagaggatcggccctctgtacatgaagatggagaggaggtttggtaagtgggacggcgccggcgacctcaccgagaaggagatcatcaggttcgagaggaactccggagtggtcagcggcagggtgcgggagatccagctgcaaaactaccagaggaagatggagcagaagatgcagagggaagaggacctccgcatggggctcaagctgtacaagacgg

SEQ ID NO: 64716 - DNA, 2693 bp, Zea Mays
cacgacccacgagggtggcggaccgcgtttccaaatccaaaaggaaaacaatcgcgagcacgagacggggacgagcagctccacaacaattcgtgcctgcctgccctgcctctcggacacctccctcgtcctccccctcctacgccgcccccgtcctcggcccccacgcgctcgcgcggcgcacgaggcgacgaacccgacctcctcctccgcgcccgtccctgccaccggtcgccgatgagctcggagggctggggcgctgacctgagttttatggagagaggatgccagagctgcgaagcagtactcgccaagcatgcctaaggtcgaagaagcttgaagatctgcagctaggagagccgcctgcgaaaccggtctcacctgctccgccgagggcaggaaagcgtgctcctacacgtgctgctaggggcagaaagggtgccactgggaaaggagtgccccctgcacctacgactagaagaaagcggggtaatattgtcgacttggaagctgatccagcttgtgaagacccccctaaagctgtcaagggactggaagttgctgctgctgctgcacccaagaaccttcctttgaaggaggtagccgaggttggtgttctgaaaatgaatggtgtgagtgcagagaagattattggggctgaagatgaatcaacagcgacacctgtgccagagagggttcaagtaggtaattctccagagtacataactgacaggaagttaggtaaaggtggttttggtcaggtctatgttggtcgaagggtttctggtggagctgcccgcactggtcctgatgcatatgaggtcgcattgaaattagagcatcgaaacagtaaaggatgcaattatggccctccatatgagtggcagcactctcaatggttgctatggcataccatcggtccactacaagggtcgtcagggcgactactatatacttgtaatggatatgcttggtcccagcctttgggacgtgtggaattcaatggggcaggcgatgactccaaatatggctgcttgcattgctgtagagagcatatcgattcttgagaagctccattctaaagggtttgtgcatggtgatgtgaaaccagagaattttctgcttggtcagcctggatcgcctgacgataagaaactttaccttatagatctcggtttagcatccaagtggaaagagaataatggtcatcatgttgattatgatcaacggcctgatatctttaggggaacaattagatatgcgagtgtccatgctcatttggggcgcactggtagtaggagggatgatttagagtcactggcatacacccttattttcctgattagaggaagattgccttggcaaggctaccagggagataccaagagtttccttgtttgcaagaagaaaatggctacttctccagagatgctttgttgtttctgtccagctccattcaaacagtttcttgagattgtcacaaatatgaaatttgatgaagagccaaattatgccaagcttatctctatttttgatggtttgattgaagcacctgcgtcgagaccagtcagaattgatggggccctcaaggttggacagaaacgtggaagattgcatgcaaatctagaagatgaacaacctaaaaagaaggttagattagggagcccagcggctcaatggatttcagtttataatgctaggcgacccatgaagcagaggtaccattacaatgtggctgactcaaggctaagtcaacatatagaaaagggtaatgatgacgggctttacgttagttgtgtggcttcctcggcaaacctttgggcactcatcatggacgctggaactggtttctgttctcaagtttacgagctctcaccagtttttctccacaaggactggataatggagcagtgggagaaaagttactacataacagcaattgctggatcaaccaatgggagttcattggttgtcatgtccaaaggaactccttacacacagcaatcatacaaggttagcgaatcgttcccttacaagtggatcaataaaaagtggaaagaagggttccatgtaacatctatggccactgctggaaatcgctggggcgtagttatgtcaaggaactcagggttttctactcaggttgtagagttggacttcctgtaccctagcgaaggcattcatcggcgatgggagagtggttacaggataacttccacagcggccaccaatgaccaagctgctttcatcttgagcatgccaaagcggaagccgatggacgagacgcaagaaaccctccggacctctgcctttcccagttcacatgtcaaggagaaatgggcgaagaatctctacatagcctcgatctgctacggacgaacagtgtgctgatagtcgaagagaggggcggccgcgctgactcaatacggtggcttgcgtcaagagattagagatgtgagatgaacattaaatcaaaaccagttctaatgatgataggatcagtagatctgatgatacggtatggtatcctaccgtagctgtaaagaaatgttgtacccagtgccggccgcgagaccgttactgccatgaagtgaagctaatgcattttggagtctcttcccgggaaaatggaacacaatataatgctcatgtgcaaatcatataggtttaatttcttgcgcactagagtttgc

SEQ ID NO: 64717 - DNA, 2499 bp, Zea Mays
gcagctccacaacaattcgtgcctgcctgccctgcctctcggacacctccctcgtcctccccctcctacgccgcccccgtcctcggcccccacgcgctcgcgcggcgcacgaggcgacgaacccgacctcctcctccgcgcccgtccctgccaccggtcgccgatgagctcggagggctggggcgctgacctgagttttatggagagaggatgccagagctgcgaagcagtactcgccaagcatgcctaaggtcgaagaagcttgaagatctgcagctaggagagccgcctgcgaaaccggtctcacctgctccgccgagggcaggaaagcgtgctcctacacgtgctgctaggggcagaaagggtgccactgggaaaggagtgccccctgcacctacgactagaagaaagcggggtaatattgtcgacttggaagctgatccagcttgtgaagacccccctaaagctgtcaagggactggaagttgctgctgctgctgcacccaagaaccttcctttgaaggaggtagccgaggttggtgttctgaaaatgaatggtgtgagtgcagagaagattattggggctgaagatgaatcaacagcgacacctgtgccagagagggttcaagtaggtaattctccagagtacataactgacaggaagttaggtaaaggtggttttggtcaggtctatgttggtcgaagggtttctggtggagctgcccgcactggtcctgatgcatatgaggtcgcattgaaattagagcatcgaaacagtaaaggatgcaattatggccctccatatgagtggcaggtttataacactctcaatggttgctatggcataccatcggtccactacaagggtcgtcagggcgactactatatacttgtaatggatatgcttggtcccagcctttgggacgtgtggaattcaatggggcaggcgatgactccaaatatggctgcttgcattgctgtagagagcatatcgattcttgagaagctccattctaaagggtttgtgcatggtgatgtgaaaccagagaattttctgcttggtcagcctggatcgcctgacgataagaaactttaccttatagatctcggtttagcatccaagtggaaagagaataatggtcatcatgttgattatgatcaacggcctgatatctttaggggaacaattagatatgcgagtgtccatgctcatttggggcgcactggtagtaggagggatgatttagagtcactggcatacacccttattttcctgattagaggaagattgccttggcaaggctaccagggagataccaagagtttccttgtttgcaagaagaaaatggctacttctccagagatgctttgttgtttctgtccagctccattcaaacagtttcttgagattgtcacaaatatgaaatttgatgaagagccaaattatgccaagcttatctctatttttgatggtttgattgaagcacctgcgtcgagaccagtcagaattgatggggccctcaaggtaccattacaatgtggctgactcaaggctaagtcaacatatagaaaagggtaatgatgacgggctttacgttagttgtgtggcttcctcggcaaacctttgggcactcatcatggacgctggaactggtttctgttctcaagtttacgagctctcaccagtttttctccacaaggactggataatggagcagtgggagaaaagttactacataacagcaattgctggatcaaccaatgggagttcattggttgtcatgtccaaaggaactccttacacacagcaatcatacaaggttagcgaatcgttcccttacaagtggatcaataaaaagtggaaagaagggttccatgtaacatctatggccactgctggaaatcgctggggcgtagttatgtcaaggaactcagggttttctactcaggttgtagagttggacttcctgtaccctagcgaaggcattcatcggcgatgggagagtggttacaggataacttccacagcggccaccaatgaccaagctgctttcatcttgagcatgccaaagcggaagccgatggacgagacgcaagaaaccctccggacctctgcctttcccagttcacatgtcaaggagaaatgggcgaagaatctctacatagcctcgatctgctacggacgaacagtgtgctgatagtcgaagagaggggcggccgcgctgactcaatacggtggcttgcgtcaagagattagagatgtgagatgaacattaaatcaaaaccagttctaatgatgataggatcagtagatctgatgatacggtatggtatcctaccgtagctgtaaagaaatgttgtacccagtgccggccgcgagaccgttactgccatgaagtgaagctaatgcattttggagtctcttcccgggaaaatggaacacaatataatgctcatgtgcaaatcatataggtttaatttcttgcgcactagagtttgc

SEQ ID NO: 64718 - DNA, 2612 bp, Zea Mays
gcagctccacaacaattcgtgcctgcctgccctgcctctcggacacctccctcgtcctccccctcctacgccgcccccgtcctcggcccccacgcgctcgcgcggcgcacgaggcgacgaacccgacctcctcctccgcgcccgtccctgccaccggtcgccgatattggaaggagctcggagggctggggcgctgacctgagttttatggagagaggatgccagagctgcgaagcagtactcgccaagcatgcctaaggtcgaagaagcttgaagatctgcagctaggagagccgcctgcgaaaccggtctcacctgctccgccgagggcaggaaagcgtgctcctacacgtgctgctaggggcagaaagggtgccactgggaaaggagtgccccctgcacctacgactagaagaaagcggggtaatattgtcgacttggaagctgatccagcttgtgaagacccccctaaagctgtcaagggactggaagttgctgctgctgctgcacccaagaaccttcctttgaaggaggtagccgaggttggtgttctgaaaatgaatggtgtgagtgcagagaagattattggggctgaagatgaatcaacagcgacacctgtgccagagagggttcaagtaggtaattctccagagtacataactgacaggaagttaggtaaaggtggttttggtcaggtctatgttggtcgaagggtttctggtggagctgcccgcactggtcctgatgcatatgaggtcgcattgaaattagagcatcgaaacagtaaaggatgcaattatggccctccatatgagtggcaggtttataacactctcaatggttgctatggcataccatcggtccactacaagggtcgtcagggcgactactatatacttcctttgggacgtgtggaattcaatggggcaggcgatgactccaaatatggctgcttgcattgctgtagagagcatatcgattcttgagaagctccattctaaagggtttgtgcatggtgatgtgaaaccagagaattttctgcttggtcagcctggatcgcctgacgataagaaactttaccttatagatctcggtttagcatccaagtggaaagagaataatggtcatcatgttgattatgatcaacggcctgatatctttaggggaacaattagatatgcgagtgtccatgctcatttggggcgcactggtagtaggagggatgatttagagtcactggcatacacccttattttcctgattagaggaagattgccttggcaaggctaccagggagataccaagagtttccttgtttgcaagaagaaaatggctacttctccagagatgctttgttgtttctgtccagctccattcaaacagtttcttgagattgtcacaaatatgaaatttgatgaagagccaaattatgccaagcttatctctatttttgatggtttgattgaagcacctgcgtcgagaccagtcagaattgatggggccctcaaggttggacagaaacgtggaagattgcatgcaaatctagaagatgaacaacctaaaaagaaggttagattagggagcccagcggctcaatggatttcagtttataatgctaggcgacccatgaagcagaggtaccattacaatgtggctgactcaaggctaagtcaacatatagaaaagggtaatgatgacgggctttacgttagttgtgtggcttcctcggcaaacctttgggcactcatcatggacgctggaactggtttctgttctcaagtttacgagctctcaccagtttttctccacaaggactggataatggagcagtgggagaaaagttactacataacagcaattgctggatcaaccaatgggagttcattggttgtcatgtccaaaggaactccttacacacagcaatcatacaaggttagcgaatcgttcccttacaagtggatcaataaaaagtggaaagaagggttccatgtaacatctatggccactgctggaaatcgctggggcgtagttatgtcaaggaactcagggttttctactcaggttgtagagttggacttcctgtaccctagcgaaggcattcatcggcgatgggagagtggttacaggataacttccacagcggccaccaatgaccaagctgctttcatcttgagcatgccaaagcggaagccgatggacgagacgcaagaaaccctccggacctctgcctttcccagttcacatgtcaaggagaaatgggcgaagaatctctacatagcctcgatctgctacggacgaacagtgtgctgatagtcgaagagaggggcggccgcgctgactcaatacggtggcttgcgtcaagagattagagatgtgagatgaacattaaatcaaaaccagttctaatgatgataggatcagtagatctgatgatacggtatggtatcctaccgtagctgtaaagaaatgttgtacccagtgccggccgcgagaccgttactgccatgaagtgaagctaatgcattttggagtctcttcccgggaaaatggaacacaatataatgctcatgtgcaaatcatataggtttaatttcttgcgcactagagtttgc

SEQ ID NO: 64719 - DNA, 2559 bp, Zea Mays
gcagctccacaacaattcgtgcctgcctgccctgcctctcggacacctccctcgtcctccccctcctacgccgcccccgtcctcggcccccacgcgctcgcgcggcgcacgaggcgacgaacccgacctcctcctccgcgcccgtccctgccaccggtcgccgatgagctcggagggctggggcgctgacctgagttttatggagagaggatgccagagctgcgaagcagtactcgccaagcatgcctaaggtcgaagaagcttgaagatctgcagctaggagagccgcctgcgaaaccggtctcacctgctccgccgagggcaggaaagcgtgctcctacacgtgctgctaggggcagaaagggtgccactgggaaaggagtgccccctgcacctacgactagaagaaagcggggtaatattgtcgacttggaagctgatccagcttgtgaagacccccctaaagctgtcaagggactggaagttgctgctgctgctgcacccaagaaccttcctttgaaggaggtagccgaggttggtgttctgaaaatgaatggtgtgagtgcagagaagattattggggctgaagatgaatcaacagcgacacctgtgccagagagggttcaagtaggtaattctccagagtacataactgacaggaagttaggtaaaggtggttttggtcaggtctatgttggtcgaagggtttctggtggagctgcccgcactggtcctgatgcatatgaggtcgcattgaaattagagcatcgaaacagtaaaggatgcaattatggccctccatatgagtggcaggtttataacactctcaatggttgctatggcataccatcggtccactacaagggtcgtcagggcgactactatatacttgtaatggatatgcttggtcccagcctttgggacgtgtggaattcaatggggcaggcgatgactccaaatatggctgcttgcattgctgtagagagcatatcgattcttgagaagctccattctaaagggtttgtgcatggtgatgtgaaaccagagaattttctgcttggtcagcctggatcgcctgacgataagaaactttaccttatagatctcggtttagcatccaagtggaaagagaataatggtcatcatgttgattatgatcaacggcctgatatctttaggggaacaattagatatgcgagtgtccatgctcatttggggcgcactggtagtaggagggatgatttagagtcactggcatacacccttattttcctgattagaggaagattgccttggcaaggctaccagggagataccaagagtttccttgtttgcaagaagaaaatggctacttctccagagatgctttgttgtttctgtccagctccattcaaacagtttcttgagattgtcacaaatatgaaatttgatgaagagccaaattatgccaagcttatctctatttttgatggtttgattgaagcacctgcgtcgagaccagtcagaattgatggggccctcaaggttggacagaaacgtggaagattgcatgcaaatctagaagatgaacaacctaaaaagaaggtaccattacaatgtggctgactcaaggctaagtcaacatatagaaaagggtaatgatgacgggctttacgttagttgtgtggcttcctcggcaaacctttgggcactcatcatggacgctggaactggtttctgttctcaagtttacgagctctcaccagtttttctccacaaggactggataatggagcagtgggagaaaagttactacataacagcaattgctggatcaaccaatgggagttcattggttgtcatgtccaaaggaactccttacacacagcaatcatacaaggttagcgaatcgttcccttacaagtggatcaataaaaagtggaaagaagggttccatgtaacatctatggccactgctggaaatcgctggggcgtagttatgtcaaggaactcagggttttctactcaggttgtagagttggacttcctgtaccctagcgaaggcattcatcggcgatgggagagtggttacaggataacttccacagcggccaccaatgaccaagctgctttcatcttgagcatgccaaagcggaagccgatggacgagacgcaagaaaccctccggacctctgcctttcccagttcacatgtcaaggagaaatgggcgaagaatctctacatagcctcgatctgctacggacgaacagtgtgctgatagtcgaagagaggggcggccgcgctgactcaatacggtggcttgcgtcaagagattagagatgtgagatgaacattaaatcaaaaccagttctaatgatgataggatcagtagatctgatgatacggtatggtatcctaccgtagctgtaaagaaatgttgtacccagtgccggccgcgagaccgttactgccatgaagtgaagctaatgcattttggagtctcttcccgggaaaatggaacacaatataatgctcatgtgcaaatcatataggtttaatttcttgcgcactagagtttgc

SEQ ID NO: 64720 - DNA, 2507 bp, Zea Mays
gcagctccacaacaattcgtgcctgcctgccctgcctctcggacacctccctcgtcctccccctcctacgccgcccccgtcctcggcccccacgcgctcgcgcggcgcacgaggcgacgaacccgacctcctcctccgcgcccgtccctgccaccggtcgccgatattggaaggagctcggagggctggggcgctgacctgagttttatggagagaggatgccagagctgcgaagcagtactcgccaagcatgcctaaggtcgaagaagcttgaagatctgcagctaggagagccgcctgcgaaaccggtctcacctgctccgccgagggcaggaaagcgtgctcctacacgtgctgctaggggcagaaagggtgccactgggaaaggagtgccccctgcacctacgactagaagaaagcggggtaatattgtcgacttggaagctgatccagcttgtgaagacccccctaaagctgtcaagggactggaagttgctgctgctgctgcacccaagaaccttcctttgaaggaggtagccgaggttggtgttctgaaaatgaatggtgtgagtgcagagaagattattggggctgaagatgaatcaacagcgacacctgtgccagagagggttcaagtaggtaattctccagagtacataactgacaggaagttaggtaaaggtggttttggtcaggtctatgttggtcgaagggtttctggtggagctgcccgcactggtcctgatgcatatgaggtcgcattgaaattagagcatcgaaacagtaaaggatgcaattatggccctccatatgagtggcaggtttataacactctcaatggttgctatggcataccatcggtccactacaagggtcgtcagggcgactactatatacttgtaatggatatgcttggtcccagcctttgggacgtgtggaattcaatggggcaggcgatgactccaaatatggctgcttgcattgctgtagagagcatatcgattcttgagaagctccattctaaagggtttgtgcatggtgatgtgaaaccagagaattttctgcttggtcagcctggatcgcctgacgataagaaactttaccttatagatctcggtttagcatccaagtggaaagagaataatggtcatcatgttgattatgatcaacggcctgatatctttaggggaacaattagatatgcgagtgtccatgctcatttggggcgcactggtagtaggagggatgatttagagtcactggcatacacccttattttcctgattagaggaagattgccttggcaaggctaccagggagataccaagagtttccttgtttgcaagaagaaaatggctacttctccagagatgctttgttgtttctgtccagctccattcaaacagtttcttgagattgtcacaaatatgaaatttgatgaagagccaaattatgccaagcttatctctatttttgatggtttgattgaagcacctgcgtcgagaccagtcagaattgatggggccctcaaggtaccattacaatgtggctgactcaaggctaagtcaacatatagaaaagggtaatgatgacgggctttacgttagttgtgtggcttcctcggcaaacctttgggcactcatcatggacgctggaactggtttctgttctcaagtttacgagctctcaccagtttttctccacaaggactggataatggagcagtgggagaaaagttactacataacagcaattgctggatcaaccaatgggagttcattggttgtcatgtccaaaggaactccttacacacagcaatcatacaaggttagcgaatcgttcccttacaagtggatcaataaaaagtggaaagaagggttccatgtaacatctatggccactgctggaaatcgctggggcgtagttatgtcaaggaactcagggttttctactcaggttgtagagttggacttcctgtaccctagcgaaggcattcatcggcgatgggagagtggttacaggataacttccacagcggccaccaatgaccaagctgctttcatcttgagcatgccaaagcggaagccgatggacgagacgcaagaaaccctccggacctctgcctttcccagttcacatgtcaaggagaaatgggcgaagaatctctacatagcctcgatctgctacggacgaacagtgtgctgatagtcgaagagaggggcggccgcgctgactcaatacggtggcttgcgtcaagagattagagatgtgagatgaacattaaatcaaaaccagttctaatgatgataggatcagtagatctgatgatacggtatggtatcctaccgtagctgtaaagaaatgttgtacccagtgccggccgcgagaccgttactgccatgaagtgaagctaatgcattttggagtctcttcccgggaaaatggaacacaatataatgctcatgtgcaaatcatataggtttaatttcttgcgcactagagtttgc

SEQ ID NO: 64721 - DNA, 2625 bp, Zea Mays
gcagctccacaacaattcgtgcctgcctgccctgcctctcggacacctccctcgtcctccccctcctacgccgcccccgtcctcggcccccacgcgctcgcgcggcgcacgaggcgacgaacccgacctcctcctccgcgcccgtccctgccaccggtcgccgatattggaaggagctcggagggctggggcgctgacctgagttttatggagagaggatgccagagctgcgaagcagtactcgccaagcatgcctaaggtcgaagaagcttgaagatctgcagctaggagagccgcctgcgaaaccggtctcacctgctccgccgagggcaggaaagcgtgctcctacacgtgctgctaggggcagaaagggtgccactgggaaaggagtgccccctgcacctacgactagaagaaagcggggtaatattgtcgacttggaagctgatccagcttgtgaagacccccctaaagctgtcaagggactggaagttgctgctgctgctgcacccaagaaccttcctttgaaggaggtagccgaggttggtgttctgaaaatgaatggtgtgagtgcagagaagattattggggctgaagatgaatcaacagcgacacctgtgccagagagggtaattctccagagtacataactgacaggaagttaggtaaaggtggttttggtcaggtctatgttggtcgaagggtttctggtggagctgcccgcactggtcctgatgcatatgaggtcgcattgaaattagagcatcgaaacagtaaaggatgcaattatggccctccatatgagtggcaggtttataacactctcaatggttgctatggcataccatcggtccactacaagggtcgtcagggcgactactatatacttgtaatggatatgcttggtcccagcctttgggacgtgtggaattcaatggggcaggcgatgactccaaatatggctgcttgcattgctgtagagagcatatcgattcttgagaagctccattctaaagggtttgtgcatggtgatgtgaaaccagagaattttctgcttggtcagcctggatcgcctgacgataagaaactttaccttatagatctcggtttagcatccaagtggaaagagaataatggtcatcatgttgattatgatcaacggcctgatatctttaggggaacaattagatatgcgagtgtccatgctcatttggggcgcactggtagtaggagggatgatttagagtcactggcatacacccttattttcctgattagaggaagattgccttggcaaggctaccagggagataccaagagtttccttgtttgcaagaagaaaatggctacttctccagagatgctttgttgtttctgtccagctccattcaaacagtttcttgagattgtcacaaatatgaaatttgatgaagagccaaattatgccaagcttatctctatttttgatggtttgattgaagcacctgcgtcgagaccagtcagaattgatggggccctcaaggttggacagaaacgtggaagattgcatgcaaatctagaagatgaacaacctaaaaagaaggttagattagggagcccagcggctcaatggatttcagtttataatgctaggcgacccatgaagcagaggtaccattacaatgtggctgactcaaggctaagtcaacatatagaaaagggtaatgatgacgggctttacgttagttgtgtggcttcctcggcaaacctttgggcactcatcatggacgctggaactggtttctgttctcaagtttacgagctctcaccagtttttctccacaaggactggataatggagcagtgggagaaaagttactacataacagcaattgctggatcaaccaatgggagttcattggttgtcatgtccaaaggaactccttacacacagcaatcatacaaggttagcgaatcgttcccttacaagtggatcaataaaaagtggaaagaagggttccatgtaacatctatggccactgctggaaatcgctggggcgtagttatgtcaaggaactcagggttttctactcaggttgtagagttggacttcctgtaccctagcgaaggcattcatcggcgatgggagagtggttacaggataacttccacagcggccaccaatgaccaagctgctttcatcttgagcatgccaaagcggaagccgatggacgagacgcaagaaaccctccggacctctgcctttcccagttcacatgtcaaggagaaatgggcgaagaatctctacatagcctcgatctgctacggacgaacagtgtgctgatagtcgaagagaggggcggccgcgctgactcaatacggtggcttgcgtcaagagattagagatgtgagatgaacattaaatcaaaaccagttctaatgatgataggatcagtagatctgatgatacggtatggtatcctaccgtagctgtaaagaaatgttgtacccagtgccggccgcgagaccgttactgccatgaagtgaagctaatgcattttggagtctcttcccgggaaaatggaacacaatataatgctcatgtgcaaatcatataggtttaatttcttgcgcactagagtttgc

SEQ ID NO: 64722 - DNA, 2707 bp, Zea Mays
ctttttacctctattggtcgccgaccctggccatgcccagtgagctcggagggctggggcgctgacctgagttttatggagagaggatgccagagctgcgaagcagtactcgccaagcatgcctaaggtcgaagaagcttgaagatctgcagctaggagagccgcctgcgaaaccggtctcacctgctccgccgagggcaggaaagcgtgctcctacacgtgctgctaggggcagaaagggtgccactgggaaaggagtgccccctgcacctacgactagaagaaagcggggtaatattgtcgacttggaagctgatccagcttgtgaagacccccctaaagctgtcaagggactggaagttgctgctgctgctgcacccaagaaccttcctttgaaggaggtagccgaggttggtgttctgaaaatgaatggtgtgagtgcagagaagattattggggctgaagatgaatcaacagcgacacctgtgccagagagggttcaagtaggtaattctccagagtacataactgacaggaagttaggtaaaggtggttttggtcaggtctatgttggtcgaagggtttctggtggagctgcccgcactggtcctgatgcatatgaggtcgcattgaaattagagcatcgaaacagtaaaggatgcaattatggccctccatatgagtggcaggtttataacactctcaatggttgctatggcataccatcggtccactacaagggtcgtcagggcgactactatatacttgtaatggatatgcttggtcccagcctttgggacgtgtggaattcaatggggcaggcgatgactccaaatatggctgcttgcattgctgtagagagcatatcgattcttgagaagctccattctaaagggtttgtgcatggtgatgtgaaaccagagaattttctgcttggtcagcctggatcgcctgacgataagaaactttaccttatagatctcggtttagcatccaagtggaaagagaataatggtcatcatgttgattatgatcaacggcctgatatctttaggggaacaattagatatgcgagtgtccatgctcatttggggcgcactggtagtaggagggatgatttagagtcactggcatacacccttattttcctgattagaggaagattgccttggcaaggctaccagggagataccaagagtttccttgtttgcaagaagaaaatggctacttctccagagatgctttgttgtttctgtccagctccattcaaacagtttcttgagattgtcacaaatatgaaatttgatgaagagccaaattatgccaagcttatctctatttttgatggtttgattgaagcacctgcgtcgagaccagtcagaattgatggggccctcaaggttggacagaaacgtggaagattgcatgcaaatctagaagatgaacaacctaaaaagaaggttagattagggagcccagcggctcaatggatttcagtttataatgctaggcgacccatgaagcagaggtaccattacaatgtggctgactcaaggctaagtcaacatatagaaaagggtaatgatgacgggctttacgttagttgtgtggcttcctcggcaaacctttgggcactcatcatggacgctggaactggtttctgttctcaagtttacgagctctcaccagtttttctccacaaggactggataatggagcagtgggagaaaagttactacataacagcaattgctggatcaaccaatgggagttcattggttgtcatgtccaaaggtctgaattttacttttcttattattgctcacacgtgcatattgaccctccattttctcaccattttcccagtagcagtacaaaatcctaatgtttctcttgtatgtcctatgcaatttccattttaagccccgtttgcatcgctcattaattatcatggtctgctatgatataatttggggtaatatattttcactactgcaggaactccttacacacagcaatcatacaaggttagcgaatcgttcccttacaagtggatcaataaaaagtggaaagaagggttccatgtaacatctatggccactgctggaaatcgctggggcgtagttatgtcaaggaactcagggttttctactcaggttgtagagttggacttcctgtaccctagcgaaggcattcatcggcgatgggagagtggttacaggataacttccacagcggccaccaatgaccaagctgctttcatcttgagcatgccaaagcggaagccgatggacgagacgcaagaaaccctccggacctctgcctttcccagttcacatgtcaaggagaaatgggcgaagaatctctacatagcctcgatctgctacggacgaacagtgtgctgatagtcgaagagaggggcggccgcgctgactcaatacggtggcttgcgtcaagagattagagatgtgagatgaacattaaatcaaaaccagttctaatgatgataggatcagtagatctgatgatacggtatggtatcctaccgtagctgtaaagaaatgttgtacccagtgccggccgcgagaccgttactgccatgaagtgaagctaatgcattttggagtctcttcccgggaaaatggaacacaatataatgctcatgtgcaaatcatataggtttaatttcttgcgcactagagtttgc

SEQ ID NO: 64723 - DNA, 2336 bp, Zea Mays
cccacgtcgttttctaccggcacttgtcttcttccataccacatttccactggagcgaaaaatggtgatgctacctctccagcactcgtaggccgccacaattatgcgcttccatttccacttctctgagaccagacagctcgagtctttatccgtcgcccccacttgacccctctcgccactccctcccctccatcaacaattcggtttcttgggtgattttttttcttgcttgctcggtttcttgtggggcgggccgcgaaccggcgaggcgggggcgcggggcaacgcaaagcagcgcaggggcaacgcagtgcagcaaaagcttcgatctttatccgccggattcctctcctcccctttcctctctctccgtctccccgcttgctttgtgcttcgttgttgagaggaggggagaggaggggagacccacatccacttgcctttctcctctctcctctcgcagccccccttccaactcctcctggtccctggaaaaaggagaccttttggtgcaagattcgatctgctgtggctgcctcgaccttgctgcgtgcgcggagatttggtttcttggctggcgcgcgcgggcagttggagctctttgattcaacaggttcagattgcagcggcgagcgactgctctgcggtcgaggctgctgctcgccgggtgattccgtgcccgctcttggtggcggcgggcggtgtcctcgtctgatccgtttcttcgggaggctttggttgatgtgctgggtttcctcggagctcagttccccaattcgccattttgatgaggagctcttcccactgtgagagctactgcgctcctcccctgtgctacctcccctgcctccccaaatccaaagacgttgcagtcggtgacccggagtccgggtccccgagccctgccgctgtcgccgaggacaagccgcccgtggtccagaagatcgaggaatctgtggcggcaaccggcggcgatggcgtcggtgatggtgacaagtgctatcgggaggtggcggtggctcccaagagttgcttgaagagggctaattgcgaggacagcagtaagaatgcggtgaaaggcaatgtgaagtggaaggatttgctggggaaggatctcacgctcacgcaggtcaaggaattcgagccaagcgaatctggagactcagacgacgaagagtacgctggcgcctgcgcctgcgtaatccaatgaggccagggatctttagtgtaaattctgtgaagaaaaaaaatcaaaacaaacaaacagaacgctctcagtcagccattagtcctggtcagtagagggtagggagcagctgtgttggtaattggtatgtggatgccatggctcgtgttgtgttctgtcagcagcttcaactgtaaaatgttgttacaaatgcatagctttagaagatattattattatctgccaaatgtgatatgttctcctgtctgaaatcttcttgtaactggtgtgctgcgccttccgttttttttaattttttttttctattgagctctatcttttccaggtggacgcaattggtactactactagtcaatggcgtgcgccagcgcacgcgtggaaattaaatacttaacattaacatatagtgatacagatactatattacacatacatatgtagagtgatatggatgaccatgatcattacaaaatatacatggtcattacataataggtgagttacaaatagtgcatttttggtagtttagtaatgttgatgtgaactatagagtattccttctgaaacatgggaaagcacttaaatcttatggtgtataccttctagcgctgcaatatgttcatcagagaaataaccatattgcataggaatcctaatgttacgtggagagcgtgcacataaaatagcagtggtttcttgtgtttccttttaccaaatttttttattccttaacagtataaaaaggggagcttgcaaacaaataatgagaagacaaaaaacaatcagcaatgaagtagcatgcatgaacctatataaatcactatcaacataaatagtaggcattacctctaaaaactaatcgatgttgatttagcactcgcttacgatattttcatgctaagtttgtatttctatgtgaacccacaatatatattgttaatccaaggtcaacattaggcgtcggtgatatcaacgtggagctagatgtcccttgcaatggtatgtatatatgatcctagttggttatgcccactacatctgtgaatatataaaaaaggatcatctcctgcagaagaccaagataagaaatgttagcaagaactcttacttttttaggaaaatattg

SEQ ID NO: 64724 - DNA, 1599 bp, Zea Mays
ctcccacatctaattctttctgatggttacttggagcactttcatggagcttaatggccacagtagtgagcagtaaatacagcgcagcattctctattcttcttggctcactttctgttgccttctcagatgttgtagtggattctatggttgttgagagagcccgtggagaatctcaaagtacatctggatcactccagtcactctgttggggatcttctgcctttggaggaattgtgagtgcttatttcagtggttcacttgtggatacttatggagtaagatttgtctttggtgttacagcgtttttacccctgatgacatctgctgttgcagttcttgtaaatgaacatggcattccttctggagaacacaatacctttctctctggttccggatttgttgagagctctaagcagcatgtcaggcagctttgggcttcagtaaagcaacctaacattttgttgccgaccttgtttatatttctttggcaagcaacaccgcagtcagattctgctatgtttttcttcatcacaaataagcttggattcactccggagtttctagggcgcgtgaagcttgtaacctcttttgcatccctgcttggtgttgggctctacaactattttctgaaggaagttgctctgaggaagatttttcttgtgacaaccattataggttcagctcttgggatgacacaggtgcttcttgtaactgggctaaatcggcagcttgggatcagcgatgagtggttttctattggtgattcattaatcatcacagtccttggtcaggcatcgtttatgccagtcttggtgttagctgcaaagttgtgccctccaggaatggaagccactttatttgcaactttgatgtccatttctaatgctggaagtgttactggtggtctggttggtgctggtctaactcggatatttggggtcactagggatacctttgggaacctacctctgttgattgtcgtctgcaatcttagttcattgctgcccttacctcttttaggtctccttccagagggatcaggtgacaccgataacggagaaacaaaaaataactgatttactgagggttttatctccattgttctggtactcaagtatagcataccacagtgcccagcttcaactcagatatggcccatcgagttgaaattcaaaaggccagtagagaaatacggaaatcacactggatttaagttcagtcggtcaccgccatcatcaggcagtatctcctgtgactattaacctgtgtgatggaagtgattcattgatgatctgcaaatgatctatggcgcacaggtactcacctctttttagtttctaagctaccttgtacacgaagacaaggtaggttttatctttctctagagtctttgagtttttgttgttaatgcgaccccatgaaaattagactagtggtcaaaggctattaattggggattaccttgcgaagtcaaatgtattgtgccaaaaaaaggagggagtatgtatacattattggaaacctagagtacggaaatgtaaagaaaaatacttgcacacagtttgacttgtcgtacagtgtcaggttctgcttaca

SEQ ID NO: 64725 - DNA, 1495 bp, Zea Mays
attttataggagacgggtgaaaaacgccctgaatcctaatccctatctagaggccccacggtttcccgcacaacagagcgcttccaattctttttcttccctccggtcgtcttctccctcccctgccccaattccccaacacagcgcaagggccagacgcccagaaccagacgagcacggacggacctccgcaggccgcatccctccacgtgcacgagttccgaggcgccccttcgatccgcccggcccggccctctccaccgcgcgcgcgcgtccgtcgctagcgtttggccgtctccctcttgagccccgagtacccccacgacgcggcaaggaacctcgccatgagggtccacccggctccgcggaagcgcaccatcgccgtgcagcgctgcgccacggcggcggcggcggcggcggcgggcgcactcggcgggaagaagctgcgccgcctgccgcacatcttcgccaaggtgctggagctccccttcgcggccgacgcggacgtgtccgtcgaggaggacgcggcggcgctgcggttcgtcgccgcggccgtcgacggggtctcccccgatggcgcccgcgctcacgccgtcgagatccacccgggggtcaccaaggtcgtcgtccggggcctctcccccgccgacggcggcggcggggtcgacgacgatggggccgccgctttcgagctcgaccgctggcgcttccgcctcccgccctgcacgcgccctgccatggccacggccacctactcccagggcgagctcgtcgtcactgtccccaagggcgccggccccgacgacgcggccgctgtcctcggtggcacggagcgcgtcctcgtgcttgtatagtatatctacatgtcccgtccatgactcatctccactgctttgctgattcgcctgtttctattcctactactatactaataccaaatatttatttatatgacgcgcgagatgatgataaacgatgcacttagagtagtagtaataataataatgcctgtggatccgcccttgctgctaattctctgagcgtgtgcacttggtcaggagtttcttccacccagcttcaatacaacacctttggcaagcagttcatctgtttgtgaaccatgcatgtacatcatcacctgccgtgctgaatggatggacatgattgtgttgtgatttggaggtgattggaggagccttggagaaggattcctgaacgagaaggtgattggaggattattttctcttttttctgggtaaaaagtagctaggcattctggtgctccaaaatattaggtctttaaaaaaaactggttaaaagtaaccgctaactaggctgtgatgctcctacgtcgctggcactttgcagctgctaaagcatttgcaaagaagatacacgcatcgcccttctccttttctctctcctatgtagaaacatttggaggtggggggaggacgaattttttgcattttctcggaaaaaaatcacgtttgga

SEQ ID NO: 64726 - DNA, 4825 bp, Zea Mays
tacaaatatcatctgtcaaatagccccttacccgtctcccgttttaatccgtagacccgcccccggacgacgaacacgagaagcagcaggccaaaccaatcccgttcccgtcggcctctagcaggtcctccccaaatcccccgcgatccccgaaaccctaccctccagcgccgcaagcccgcaacacgacccttccgccacctccgtcgcgctcccgcaatccagggtcgcccggcattggttttggagcgggaggtttgagctcttctaagaatcggttttgcgaggctttcgatgggttcggaccgtgaaggccgcggctcggaggccgtggcggcgagtaagccgcggaagaggcaactggtgatggagtccagcgattccgaggccgacgagttctgcatctccacgcggcagaatgctagtggtgccgcgtcgttgggcaatgctggtgtcagcagccaaggcagtggcgatcggtcggaggagaaacctgtgacttctagtcctgagaagcttccaggggttaagtccagtgatgtagatggttcagacaagaaaacgggagttcagctggagagcagtagttcgcagcctgctgtcaagaggatcagagttgagactgtccatggtgatggcaatggatgcagtggaggcgcatctaagtgtgggactggtggaaaaatgctgcctcgggggctcccagcatggcggtttgagaggccagaagtaaggggagggcgtgttctggatgacaaaggtggggtgagtatgaaagcaagcagtgcttcaaagatgaaggagcaggtatcaagtttgggtgacaagagacaggcagagctgcagaaacatgaaagaaggacaccattgaagactgatcagggcaaagcaatcgattctggccaacaggaggttttaaggttgcaagggaaaaggggtgttttaaggatattgccaaagaatgataaggtgaccagggatactggtgatggtaagattctgtcaaggcaaactgaggtggatgaggagactggtaatggcaggattccaacaaagcgaggtgttttaaagctcctgccgaagaacaatggtgctgtgatggagagtaatgaatgcaagcttctgtccaagaaggttaaggtggatgaggaaactggggatgacaagatgccaatgaagaaaactaaggtggttgataaggagaccagtgatggcaagattcttgcaattacaactaacttggatgcagagtttggtggccataagttgccaatgaagaactgtactgtggacatggaaactgttgctgggaagtttcagcaaaagaacagtaaggcagatggagaaaccaaagggagatataaaggatatgaagagaaaagtggcgcccctgcagaatttcagaagcatgatgcaaatggtgagaagagagttctgggaaagctactctctcccgttgcgctgaggaaaagtgatccaagcgtagtgggagtttctttgggccagagaatgaaacaacaaaattcaaagcaacaactgaagaactattctctgagcttgaaagatgatagcactaaatcaagtgaacagaagaatctgaaaaaaagattgcttgagcataaagggtcatcagagagtttgtcaaagaaggcacaactgaaagctgttgatcagcaagccacatctggccctgtgctcaacaagcttgaaaagaagccaagaggaggacccctcaacaaacataagcaggatctcaggaacaagataaaacatgtgcttttagataatgggtggaaaattgacctaaggcagaggaaaaacaaagattatgaagactcagtctatgtttctcctaccgggactggctattggtcaatcactaaggcttatgcagttttccaagaacagtttcaaaatatgggtcgctcatctaaacttaataatactaaaccaggtgcttcagatgctatatcgaaggatgatctagcattgctaaaaaagaatatagtaaagagaaggactaataaggaaatttgtggtgctgaaaagaaacctggggttagcagaaacagaagctctaaagatatccttgctaatagagattttagaaacaagcatcagaacaaggaggatagggtaaaaattaaagatcggagatgtgggcttcttgtccgtgggagtacccatgatactgaagataacatggatggctatattccatatgaatggaagcgtacattatgttcatggatgatagatctgggggttatttctgaagacatgcatgtcaaatacatgaacagcaatagaaccagggaaatgttggcaggtaaaattaccagggagggtattttctgtgggtgctgttccaagattctcacaatagcgaagtttgaacttcatgctggttcaaaagagaagaagccctatgcaaacatctttctggaaggtggtaaggtatctttgttgcaatgcttacttgatgcatgggagaagcacacacaaagtgaaaataagggattttacaagatagataaaggcgacgatgaacatgatgatacttgtgctatttgtggggatggtggcgatttggtgtgctgtgatcactgtgcttccacttttcatttggactgtttgggaattaagcttccctctggcgattggtattgtcgcagctgtttatgtaggttctgtggttttccccaagaaaagccatcatcttctcctgagttattactttcttgtttgcaatgttcaaggaaatatcaccaaacttgttcatctggaaccgggacagactctggttgtaccatgcctggtacctctattgattgcttttgcagtccaggatgtagaaagatttataaacgattaaacaagcttcttgggataaagaatcatatggaggctggattttcatggagtctggttcactgttttgctaatgatcaggccatgcccaataaaaataaagaaaagttggcacagtgcaactccaagacagcccttgctttcacagttctggatgagtgctttcagccacacattgacgatagaagtggaattaatatgattcacaatgttgcatataattgtggttctgatttcagtcgtttagacttcagtggtttctatgcatttatcctggaacggggtgatgaagtaatagctgcagcatctgtaaggattcatggaactgatttagcagaaatgccattcataggcacaagaggcatgtataggcaccaagggatgtgtcgtcgactactgaatggaattgaatcggccctcggttccctcagtgttcagaaactagtagtatctgctgtgactgaaatggagaatacttggacaactggttttggttttaagcctgttgcaccttccaagaaacaaagaatgaagtcgttaaatctcttgattatgaatgggaccggtctactagagaagaggttgctgccaacacaaacagttgatggacagatcactaccaagacagctaatgctgttggatctgataagatggatgctaaaatgcttggtgaagcaagtggatctgtgacacccattcatgtttctagtgaacccgatgcctctgacaatcgtgaaattaatcgccatgagagtcctcatcctttaggaaactctgcaggcttgacattggaccagtctcctgctgcagacgaaaatgaagcgaaaataactacagaaaggacacccccagtatccataggtgatgctaagacagtcaaggtgcatacacttcctggagctacttgtggagttaacttgcagtgcatggttgaagcagagaacattcaacaagagaaatacaaagaaaccaatgggagattgattgctgaaaatactatttcagagcagaagtgtgaagatagatctaattccagtcgttcaaattcatgtgctactccggtgactgtggatcaatgttctcatttatctaatgagattgggaaaggtgacaactgtttatctagtgaagtttctgttggagctgctcccataacaggcaaaactgaatctagtttgacatctgttcattgcgctaaccaagaggatgagaaagcttacgcagcccctgtggacactaaaatacctttagtcattatggatgaaaagcctgataagcatgagtttaaaactatggttgtagggtgtagtcaaggctcaatggaacctaaaagtttggaaaatagaactagtattgtaaatggaacctcaatggacgcctatagagataaaatacctaatgaagatcacagtgcttctgcagttgacactggagtatctgtgaagctatatgctcagcaaatggagacgattgaggaaaaaactggctcagttttaccagattcggaacactcttctagttgcaaagatgtgttggtgaccttgactgagtcaaagccacttaaaaatgacattcttgaaatggatgatgcagttattaaggtaggaatgactggtcagagtttcaatgaagcaggaataacagctcctgcgctcaacatttcagatcctgttggtgaaaatgtggttaagcctactcaaacttgtggggagggtcaacttcgtggagaggatgtcatatacagtaataacgtcatggaagatgacctaacttctagagcatgctgatgtatgatcattgtattttctgctagaaaagttctagtcaagcttcatctgaaatcaggcggtgagtcatgaaaatgtcagttcacagttatgatgaagtcaccaaatcggacaatcctgtcacggtttctaaatctcagctttatataaaaaaactggaaaaaag

SEQ ID NO: 64727 - DNA, 5113 bp, Zea Mays
cccgttttaatccgtagacccgcccccggacgacgaacacgagaagcagcaggccaaaccaatcccgttcccgtcggcctctagcaggtcctccccaaatcccccgcgatccccgaaaccctaccctccagcgccgcaagcccgcaacacgacccttccgccacctccgtcgcgctcccgcaatccagggtcgcccggcattggttttggagcgggaggtttgagctcttctaagaatcggttttgcgaggctttcgatgggttcggaccgtgaaggccgcggctcggaggccgtggcggcgagtaagccgcggaagaggcaactggtgatggagtccagcgattccgaggccgacgagttctgcatctccacgcggcagaatgctagtggtgccgcgtcgttgggcaatgctggtgtcagcagccaaggcagtggcgatcggtcggaggagaaacctgtgacttctagtcctgagaagcttccaggggttaagtccagtgatgtagatggttcagacaagaaaacgggagttcagctggagagcagtagttcgcagcctgctgtcaagaggatcagagttgagactgtccatggtgatggcaatggatgcagtggaggcgcatctaagtgtgggactggtggaaaaatgctgcctcgggggctcccagcatggcggtttgagaggccagaagtaaggggagggcgtgttctggatgacaaaggtggggtgagtatgaaagcaagcagtgcttcaaagatgaaggagcaggtatcaagtttgggtgacaagagacaggcagagctgcagaaacatgaaagaaggacaccattgaagactgatcagggcaaagcaatcgattctggccaacaggaggttttaaggttgcaagggaaaaggggtgttttaaggatattgccaaagaatgataaggtgaccagggatactggtgatggtaagattctgtcaaggcaaactgaggtggatgaggagactggtaatggcaggattccaacaaagcgaggtgttttaaagctcctgccgaagaacaatggtgctgtgatggagagtaatgaatgcaagcttctgtccaagaaggttaaggtggatgaggaaactggggatgacaagatgccaatgaagaaaactaaggtggttgataaggagaccagtgatggcaagattcttgcaattacaactaacttggatgcagagtttggtggccataagttgccaatgaagaactgtactgtggacatggaaactgttgctgggaagtttcagcaaaagaacagtaaggcagatggagaaaccaaagggagatataaaggatatgaagagaaaagtggcgcccctgcagaatttcagaagcatgatgcaaatggtgagaagagagttctgggaaagctactctctcccgttgcgctgaggaaaagtgatccaagcgtagtgggagtttctttgggccagagaatgaaacaacaaaattcaaagcaacaactgaagaactattctctgagcttgaaagatgatagcactaaatcaagtgaacagaagaatctgaaaaaaagattgcttgagcataaagggtcatcagagagtttgtcaaagaaggcacaactgaaagctgttgatcagcaagccacatctggccctgtgctcaacaagcttgaaaagaagccaagaggaggacccctcaacaaacataagcaggatctcaggaacaagataaaacatgtgcttttagataatgggtggaaaattgacctaaggcagaggaaaaacaaagattatgaagactcagtctatgtttctcctaccgggactggctattggtcaatcactaaggcttatgcagttttccaagaacagtttcaaaatatgggtcgctcatctaaacttaataatactaaaccaggtgcttcagatgctatatcgaaggatgatctagcattgctaaaaaagaatatagtaaagagaaggactaataaggaaatttgtggtgctgaaaagaaacctggggttagcagaaacagaagctctaaagatatccttgctaatagagattttagaaacaagcatcagaacaaggaggatagggtaaaaattaaagatcggagatgtgggcttcttgtccgtgggagtacccatgatactgaagataacatggatggctatattccatatgaatggaagcgtacattatgttcatggatgatagatctgggggttatttctgaagacatgcatgtcaaatacatgaacagcaatagaaccagggaaatgttggcaggtaaaattaccagggagggtattttctgtgggtgctgttccaagattctcacaatagcgaagtttgaacttcatgctggttcaaaagagaagaagccctatgcaaacatctttctggaaggtggtaaggtatctttgttgcaatgcttacttgatgcatgggagaagcacacacaaagtgaaaataagggattttacaagatagataaaggcgacgatgaacatgatgatacttgtgctatttgtggggatggtggcgatttggtgtgctgtgatcactgtgcttccacttttcatttggactgtttgggaattaagcttccctctggcgattggtattgtcgcagctgtttatgtaggttctgtggttttccccaagaaaagccatcatcttctcctgagttattactttcttgtttgcaatgttcaaggaaatatcaccaaacttgttcatctggaaccgggacagactctggttgtaccatgcctggtacctctattgattgcttttgcagtccaggatgtagaaagatttataaacgattaaacaagcttcttgggataaagaatcatatggaggctggattttcatggagtctggttcactgttttgctaatgatcaggccatgcccaataaaaataaagaaaagttggcacagtgcaactccaagacagcccttgctttcacagttctggatgagtgctttcagccacacattgacgatagaagtggaattaatatgattcacaatgttgcatataattgtggttctgatttcagtcgtttagacttcagtggtttctatgcatttatcctggaacggggtgatgaagtaatagctgcagcatctgtaaggattcatggaactgatttagcagaaatgccattcataggcacaagaggcatgtataggcaccaagggatgtgtcgtcgactactgaatggaattgaatcggccctcggttccctcagtgttcagaaactagtagtatctgctgtgactgaaatggagaatacttggacaactggttttggttttaagcctgttgcaccttccaagaaacaaagaatgaagtcgttaaatctcttgattatgaatgggaccggtctactagagaagaggttgctgccaacacaaacagttgatggacagatcactaccaagacagctaatgctgttggatctgataagatggatgctaaaatgcttggtgaagcaagtggatctgtgacacccattcatgtttctagtgaacccgatgcctctgacaatcgtgaaattaatcgccatgagagtcctcatcctttaggaaactctgcaggcttgacattggaccagtctcctgctgcagacgaaaatgaagcgaaaataactacagaaaggacacccccagtatccataggtgatgctaagacagtcaaggtgcatacacttcctggagctacttgtggagttaacttgcagtgcatggttgaagcagagaacattcaacaagagaaatacaaagaaaccaatgggagattgattgctgaaaatactatttcagagcagaagtgtgaagatagatctaattccagtcgttcaaattcatgtgctactccggtgactgtggatcaatgttctcatttatctaatgagattgggaaaggtgacaactgtttatctagtgaagtttctgttggagctgctcccataacaggcaaaactgaatctagtttgacatctgttcattgcgctaaccaagaggatgagaaagcttacgcagcccctgtggacactaaaatacctttagtcattatggatgaaaagcctgataagcatgagtttaaaactatggttgtagggtgtagtcaaggctcaatggaacctaaaagtttggaaaatagaactagtattgtaaatggaacctcaatggacgcctatagagataaaatacctaatgaagatcacagtgcttctgcagttgacactggagtatctgtgaagctatatgctcagcaaatggagacgattgaggaaaaaactggctcagttttaccagattcggaacactcttctagttgcaaagatgtgttggtgaccttgactgagtcaaagccacttaaaaatgacattcttgaaatggatgatgcagttattaaggtaggaatgactggtcagagtttcaatgaagcaggaataacagctcctgcgctcaacatttcagatcctgttggtgaaaatgtggttaagcctactcaaacttgtggggagggtcaacttcgtggagaggatgtcatatacagtaataacgtcatggaagatgacctaacttctagagcatgctgatgtatgatcattgtattttctgctagaaaaggaactattttagtggacatcaagaatagctggtagtgggcactcattggtataaaggagagatcgttgggctggcgactggcatggatggatttttactgtgtgcgaggcacttctgggagcgcggggaccgtccgcgggaaggcatgacacagttggctcttaagctttcctgacttttggttcttctacattgaggctgttgaccatggagcctttttttagtagtagaagtaagcaaattgaaccatggaagttctatacgacccacaatccgggtcaacattttgttgtagatatacatgtctggtagttttctgttgtcctcctggtcgacccgaactccttattaagagctggtacttggtacccatggtatgcatgtgaaattctgttccttgtacagagagtagaaaagaaaatgaaagccgtgccagcggttataagccgtcgcttgttta

SEQ ID NO: 64728 - DNA, 5229 bp, Zea Mays
cccgttttaatccgtagacccgcccccggacgacgaacacgagaagcagcaggccaaaccaatcccgttcccgtcggcctctagcaggtcctccccaaatcccccgcgatccccgaaaccctaccctccagcgccgcaagcccgcaacacgacccttccgccacctccgtcgcgctcccgcaatccagggtcgcccggcattggttttggagcgggaggtttgagctcttctaagaatcggttttgcgaggctttcgatgggttcggaccgtgaaggccgcggctcggaggccgtggcggcgagtaagccgcggaagaggcaactggtgatggagtccagcgattccgaggccgacgagttctgcatctccacgcggcagaatgctagtggtgccgcgtcgttgggcaatgctggtgtcagcagccaaggcagtggcgatcggtcggaggagaaacctgtgacttctagtcctgagaagcttccaggggttaagtccagtgatgtagatggttcagacaagaaaacgggagttcagctggagagcagtagttcgcagcctgctgtcaagaggatcagagttgagactgtccatggtgatggcaatggatgcagtggaggcgcatctaagtgtgggactggtggaaaaatgctgcctcgggggctcccagcatggcggtttgagaggccagaagtaaggggagggcgtgttctggatgacaaaggtggggtgagtatgaaagcaagcagtgcttcaaagatgaaggagcaggtatcaagtttgggtgacaagagacaggcagagctgcagaaacatgaaagaaggacaccattgaagactgatcagggcaaagcaatcgattctggccaacaggaggttttaaggttgcaagggaaaaggggtgttttaaggatattgccaaagaatgataaggtgaccagggatactggtgatggtaagattctgtcaaggcaaactgaggtggatgaggagactggtaatggcaggattccaacaaagcgaggtgttttaaagctcctgccgaagaacaatggtgctgtgatggagagtaatgaatgcaagcttctgtccaagaaggttaaggtggatgaggaaactggggatgacaagatgccaatgaagaaaactaaggtggttgataaggagaccagtgatggcaagattcttgcaattacaactaacttggatgcagagtttggtggccataagttgccaatgaagaactgtactgtggacatggaaactgttgctgggaagtttcagcaaaagaacagtaaggcagatggagaaaccaaagggagatataaaggatatgaagagaaaagtggcgcccctgcagaatttcagaagcatgatgcaaatggtgagaagagagttctgggaaagctactctctcccgttgcgctgaggaaaagtgatccaagcgtagtgggagtttctttgggccagagaatgaaacaacaaaattcaaagcaacaactgaagaactattctctgagcttgaaagatgatagcactaaatcaagtgaacagaagaatctgaaaaaaagattgcttgagcataaagggtcatcagagagtttgtcaaagaaggcacaactgaaagctgttgatcagcaagccacatctggccctgtgctcaacaagcttgaaaagaagccaagaggaggacccctcaacaaacataagcaggatctcaggaacaagataaaacatgtgcttttagataatgggtggaaaattgacctaaggcagaggaaaaacaaagattatgaagactcagtctatgtttctcctaccgggactggctattggtcaatcactaaggcttatgcagttttccaagaacagtttcaaaatatgggtcgctcatctaaacttaataatactaaaccaggtgcttcagatgctatatcgaaggatgatctagcattgctaaaaaagaatatagtaaagagaaggactaataaggaaatttgtggtgctgaaaagaaacctggggttagcagaaacagaagctctaaagatatccttgctaatagagattttagaaacaagcatcagaacaaggaggatagggtaaaaattaaagatcggagatgtgggcttcttgtccgtgggagtacccatgatactgaagataacatggatggctatattccatatgaatggaagcgtacattatgttcatggatgatagatctgggggttatttctgaagacatgcatgtcaaatacatgaacagcaatagaaccagggaaatgttggcaggtaaaattaccagggagggtattttctgtgggtgctgttccaagattctcacaatagcgaagtttgaacttcatgctggttcaaaagagaagaagccctatgcaaacatctttctggaaggtggtaaggtatctttgttgcaatgcttacttgatgcatgggagaagcacacacaaagtgaaaataagggattttacaagatagataaaggcgacgatgaacatgatgatacttgtgctatttgtggggatggtggcgatttggtgtgctgtgatcactgtgcttccacttttcatttggactgtttgggaattaagcttccctctggcgattggtattgtcgcagctgtttatgtaggttctgtggttttccccaagaaaagccatcatcttctcctgagttattactttcttgtttgcaatgttcaaggaaatatcaccaaacttgttcatctggaaccgggacagactctggttgtaccatgcctggtacctctattgattgcttttgcagtccaggatgtagaaagatttataaacgattaaacaagcttcttgggataaagaatcatatggaggctggattttcatggagtctggttcactgttttgctaatgatcaggccatgcccaataaaaataaagaaaagttggcacagtgcaactccaagacagcccttgctttcacagttctggatgagtgctttcagccacacattgacgatagaagtggaattaatatgattcacaatgttgcatataattgtggttctgatttcagtcgtttagacttcagtggtttctatgcatttatcctggaacggggtgatgaagtaatagctgcagcatctgtaaggattcatggaactgatttagcagaaatgccattcataggcacaagaggcatgtataggcaccaagggatgtgtcgtcgactactgaatggaattgaatcggccctcggttccctcagtgttcagaaactagtagtatctgctgtgactgaaatggagaatacttggacaactggttttggttttaagcctgttgcaccttccaagaaacaaagaatgaagtcgttaaatctcttgattatgaatgggaccggtctactagagaagaggttgctgccaacacaaacagttgatggacagatcactaccaagacagctaatgctgttggatctgataagatggatgctaaaatgcttggtgaagcaagtggatctgtgacacccattcatgtttctagtgaacccgatgcctctgacaatcgtgaaattaatcgccatgagagtcctcatcctttaggaaactctgcaggcttgacattggaccagtctcctgctgcagacgaaaatgaagcgaaaataactacagaaaggacacccccagtatccataggtgatgctaagacagtcaaggtgcatacacttcctggagctacttgtggagttaacttgcagtgcatggttgaagcagagaacattcaacaagagaaatacaaagaaaccaatgggagattgattgctgaaaatactatttcagagcagaagtgtgaagatagatctaattccagtcgttcaaattcatgtgctactccggtgactgtggatcaatgttctcatttatctaatgagattgggaaaggtgacaactgtttatctagtgaagtttctgttggagctgctcccataacaggcaaaactgaatctagtttgacatctgttcattgcgctaaccaagaggatgagaaagcttacgcagcccctgtggacactaaaatacctttagtcattatggatgaaaagcctgataagcatgagtttaaaactatggttgtagggtgtagtcaaggctcaatggaacctaaaagtttggaaaatagaactagtattgtaaatggaacctcaatggacgcctatagagataaaatacctaatgaagatcacagtgcttctgcagttgacactggagtatctgtgaagctatatgctcagcaaatggagacgattgaggaaaaaactggctcagttttaccagattcggaacactcttctagttgcaaagatgtgttggtgaccttgactgagtcaaagccacttaaaaatgacattcttgaaatggatgatgcagttattaaggtaggaatgactggtcagagtttcaatgaagcaggaataacagctcctgcgctcaacatttcagatcctgttggtgaaaatgtggttaagcctactcaaacttgtggggagggtcaacttcgtggagaggatgtcatatacagtaataacgtcatggaagatgacctaacttctagagcatgctgatgtatgatcattgtattttctgctagaaaaggaactattttagtggacatcaagaatagctggtagtgggcactcattggtataaaggagagatcgttgggctggcgactggcatggatggatttttactgtgtgcgaggcacttctgggagcgcggggaccgtccgcgggaaggcatgacacagttggctcttaagctttcctgacttttggttcttctacattgaggctgttgaccatggagcctttttttagtagtagaacgtgactcgtgcgaaggacactgcagaggatcagccgaagggatgatgggtgtatctgtagaatgtctgtatctgaatggagtcgatgcgcccttgtcgccacatttcgacctttcaagcagtctgatccggcagtgtaaagatttgccttcaatatcttccactttgtgcaccttcggctcgcttacatgttccaaagcttttcaaagagcaatagtttttctttacctctcattagcatgcttgacctagaagatcatctaagcattgattttgtcattttagacctccaactagaaaccttctccccaacaatctccaaattcatggggtgccaatttatc

SEQ ID NO: 64729 - DNA, 4809 bp, Zea Mays
aacacgagaagcagcaggccaaaccaatcccgttcccgtcggcctctagcaggtcctccccaaatcccccgcgatccccgaaaccctaccctccagcgccgcaagcccgcaacacgacccttccgccacctccgtcgcgctcccgcaatccagggtcgcccggcattggttttggagcgggaggtttgagctcttctaagaatcggttttgcgaggctttcgatgggttcggaccgtgaaggccgcggctcggaggccgtggcggcgagtaagccgcggaagaggcaactggtgatggagtccagcgattccgaggccgacgagttctgcatctccacgcggcagaatgctagtggtgccgcgtcgttgggcaatgctggtgtcagcagccaaggcagtggcgatcggtcggaggagaaacctgtgacttctagtcctgagaagcttccaggggttaagtccagtgatgtagatggttcagacaagaaaacgggagttcagctggagagcagtagttcgcagcctgctgtcaagaggatcagagttgagactgtccatggtgatggcaatggatgcagtggaggcgcatctaagtgtgggactggtggaaaaatgctgcctcgggggctcccagcatggcggtttgagaggccagaagtaaggggagggcgtgttctggatgacaaaggtggggtgagtatgaaagcaagcagtgcttcaaagatgaaggagcaggtatcaagtttgggtgacaagagacaggcagagctgcagaaacatgaaagaaggacaccattgaagactgatcagggcaaagcaatcgattctggccaacaggaggttttaaggttgcaagggaaaaggggtgttttaaggatattgccaaagaatgataaggtgaccagggatactggtgatggtaagattctgtcaaggcaaactgaggtggatgaggagactggtaatggcaggattccaacaaagcgaggtgttttaaagctcctgccgaagaacaatggtgctgtgatggagagtaatgaatgcaagcttctgtccaagaaggttaaggtggatgaggaaactggggatgacaagatgccaatgaagaaaactaaggtggttgataaggagaccagtgatggcaagattcttgcaattacaactaacttggatgcagagtttggtggccataagttgccaatgaagaactgtactgtggacatggaaactgttgctgggaagtttcagcaaaagaacagtaaggcagatggagaaaccaaagggagatataaaggatatgaagagaaaagtggcgcccctgcagaatttcagaagcatgatgcaaatggtgagaagagagttctgggaaagctactctctcccgttgcgctgaggaaaagtgatccaagcgtagtgggagtttctttgggccagagaatgaaacaacaaaattcaaagcaacaactgaagaactattctctgagcttgaaagatgatagcactaaatcaagtgaacagaagaatctgaaaaaaagattgcttgagcataaagggtcatcagagagtttgtcaaagaaggcacaactgaaagctgttgatcagcaagccacatctggccctgtgctcaacaagcttgaaaagaagccaagaggaggacccctcaacaaacataagcaggatctcaggaacaagataaaacatgtgcttttagataatgggtggaaaattgacctaaggcagaggaaaaacaaagattatgaagactcagtctatgtttctcctaccgggactggctattggtcaatcactaaggcttatgcagttttccaagaacagtttcaaaatatgggtcgctcatctaaacttaataatactaaaccaggtgcttcagatgctatatcgaaggatgatctagcattgctaaaaaagaatatagtaaagagaaggactaataaggaaatttgtggtgctgaaaagaaacctggggttagcagaaacagaagctctaaagatatccttgctaatagagattttagaaacaagcatcagaacaaggaggatagggtaaaaattaaagatcggagatgtgggcttcttgtccgtgggagtacccatgatactgaagataacatggatggctatattccatatgaatggaagcgtacattatgttcatggatgatagatctgggggttatttctgaagacatgcatgtcaaatacatgaacagcaatagaaccagggaaatgttggcaggtaaaattaccagggagggtattttctgtgggtgctgttccaagattctcacaatagcgaagtttgaacttcatgctggttcaaaagagaagaagccctatgcaaacatctttctggaaggtggtaaggtatctttgttgcaatgcttacttgatgcatgggagaagcacacacaaagtgaaaataagggattttacaagatagataaaggcgacgatgaacatgatgatacttgtgctatttgtggggatggtggcgatttggtgtgctgtgatcactgtgcttccacttttcatttggactgtttgggaattaagcttccctctggcgattggtattgtcgcagctgtttatgtaggttctgtggttttccccaagaaaagccatcatcttctcctgagttattactttcttgtttgcaatgttcaaggaaatatcaccaaacttgttcatctggaaccgggacagactctggttgtaccatgcctggtacctctattgattgcttttgcagtccaggatgtagaaagatttataaacgattaaacaagcttcttgggataaagaatcatatggaggctggattttcatggagtctggttcactgttttgctaatgatcaggccatgcccaataaaaataaagaaaagttggcacagtgcaactccaagacagcccttgctttcacagttctggatgagtgctttcagccacacattgacgatagaagtggaattaatatgattcacaatgttgcatataattgtggttctgatttcagtcgtttagacttcagtggtttctatgcatttatcctggaacggggtgatgaagtaatagctgcagcatctgtaaggattcatggaactgatttagcagaaatgccattcataggcacaagaggcatgtataggcaccaagggatgtgtcgtcgactactgaatggaattgaatcggccctcggttccctcagtgttcagaaactagtagtatctgctgtgactgaaatggagaatacttggacaactggttttggttttaagcctgttgcaccttccaagaaacaaagaatgaagtcgttaaatctcttgattatgaatgggaccggtctactagagaagaggttgctgccaacacaaacagttgatggacagatcactaccaagacaggtctaaatactaaactgttccaacaaaagttttctctgttcagatattgtgatgctctaatgctgttggatctgataagatggatgctaaaatgcttggtgaagcaagtggatctgtgacacccattcatgtttctagtgaacccgatgcctctgacaatcgtgaaattaatcgccatgagagtcctcatcctttaggaaactctgcaggcttgacattggaccagtctcctgctgcagacgaaaatgaagcgaaaataactacagaaaggacacccccagtatccataggtgatgctaagacagtcaaggtgcatacacttcctggagctacttgtggagttaacttgcagtgcatggttgaagcagagaacattcaacaagagaaatacaaagaaaccaatgggagattgattgctgaaaatactatttcagagcagaagtgtgaagatagatctaattccagtcgttcaaattcatgtgctactccggtgactgtggatcaatgttctcatttatctaatgagattgggaaaggtgacaactgtttatctagtgaagtttctgttggagctgctcccataacaggcaaaactgaatctagtttgacatctgttcattgcgctaaccaagaggatgagaaagcttacgcagcccctgtggacactaaaatacctttagtcattatggatgaaaagcctgataagcatgagtttaaaactatggttgtagggtgtagtcaaggctcaatggaacctaaaagtttggaaaatagaactagtattgtaaatggaacctcaatggacgcctatagagataaaatacctaatgaagatcacagtgcttctgcagttgacactggagtatctgtgaagctatatgctcagcaaatggagacgattgaggaaaaaactggctcagttttaccagattcggaacactcttctagttgcaaagatgtgttggtgaccttgactgagtcaaagccacttaaaaatgacattcttgaaatggatgatgcagttattaaggtaggaatgactggtcagagtttcaatgaagcaggaataacagctcctgcgctcaacatttcagatcctgttggtgaaaatgtggttaagcctactcaaacttgtggggagggtcaacttcgtggagaggatgtcatatacagtaataacgtcatggaagatgacctaacttctagagcatgctgatgtatgatcattgtattttctgctagaaaagttctagtcaagcttcatctgaaatcaggcggtgagtcatgaaaatgtcagttcacagttatgatgaagtcaccaaatcggacaatcctgtcacggtttctaaatctcagctttatataaaaaaactggaaaaaag

SEQ ID NO: 64730 - DNA, 5036 bp, Zea Mays
aacacgagaagcagcaggccaaaccaatcccgttcccgtcggcctctagcaggtcctccccaaatcccccgcgatccccgaaaccctaccctccagcgccgcaagcccgcaacacgacccttccgccacctccgtcgcgctcccgcaatccagggtcgcccggcattggttttggagcgggaggtttgagctcttctaagaatcggttttgcgaggctttcgatgggttcggaccgtgaaggccgcggctcggaggccgtggcggcgagtaagccgcggaagaggcaactggtgatggagtccagcgattccgaggccgacgagttctgcatctccacgcggcagaatgctagtggtgccgcgtcgttgggcaatgctggtgtcagcagccaaggcagtggcgatcggtcggaggagaaacctgtgacttctagtcctgagaagcttccaggggttaagtccagtgatgtagatggttcagacaagaaaacgggagttcagctggagagcagtagttcgcagcctgctgtcaagaggatcagagttgagactgtccatggtgatggcaatggatgcagtggaggcgcatctaagtgtgggactggtggaaaaatgctgcctcgggggctcccagcatggcggtttgagaggccagaagtaaggggagggcgtgttctggatgacaaaggtggggtgagtatgaaagcaagcagtgcttcaaagatgaaggagcaggtatcaagtttgggtgacaagagacaggcagagctgcagaaacatgaaagaaggacaccattgaagactgatcagggcaaagcaatcgattctggccaacaggaggttttaaggttgcaagggaaaaggggtgttttaaggatattgccaaagaatgataaggtgaccagggatactggtgatggtaagattctgtcaaggcaaactgaggtggatgaggagactggtaatggcaggattccaacaaagcgaggtgttttaaagctcctgccgaagaacaatggtgctgtgatggagagtaatgaatgcaagcttctgtccaagaaggttaaggtggatgaggaaactggggatgacaagatgccaatgaagaaaactaaggtggttgataaggagaccagtgatggcaagattcttgcaattacaactaacttggatgcagagtttggtggccataagttgccaatgaagaactgtactgtggacatggaaactgttgctgggaagtttcagcaaaagaacagtaaggcagatggagaaaccaaagggagatataaaggatatgaagagaaaagtggcgcccctgcagaatttcagaagcatgatgcaaatggtgagaagagagttctgggaaagctactctctcccgttgcgctgaggaaaagtgatccaagcgtagtgggagtttctttgggccagagaatgaaacaacaaaattcaaagcaacaactgaagaactattctctgagcttgaaagatgatagcactaaatcaagtgaacagaagaatctgaaaaaaagattgcttgagcataaagggtcatcagagagtttgtcaaagaaggcacaactgaaagctgttgatcagcaagccacatctggccctgtgctcaacaagcttgaaaagaagccaagaggaggacccctcaacaaacataagcaggatctcaggaacaagataaaacatgtgcttttagataatgggtggaaaattgacctaaggcagaggaaaaacaaagattatgaagactcagtctatgtttctcctaccgggactggctattggtcaatcactaaggcttatgcagttttccaagaacagtttcaaaatatgggtcgctcatctaaacttaataatactaaaccaggtgcttcagatgctatatcgaaggatgatctagcattgctaaaaaagaatatagtaaagagaaggactaataaggaaatttgtggtgctgaaaagaaacctggggttagcagaaacagaagctctaaagatatccttgctaatagagattttagaaacaagcatcagaacaaggaggatagggtaaaaattaaagatcggagatgtgggcttcttgtccgtgggagtacccatgatactgaagataacatggatggctatattccatatgaatggaagcgtacattatgttcatggatgatagatctgggggttatttctgaagacatgcatgtcaaatacatgaacagcaatagaaccagggaaatgttggcaggtaaaattaccagggagggtattttctgtgggtgctgttccaagattctcacaatagcgaagtttgaacttcatgctggttcaaaagagaagaagccctatgcaaacatctttctggaaggtggtaaggtatctttgttgcaatgcttacttgatgcatgggagaagcacacacaaagtgaaaataagggattttacaagatagataaaggcgacgatgaacatgatgatacttgtgctatttgtggggatggtggcgatttggtgtgctgtgatcactgtgcttccacttttcatttggactgtttgggaattaagcttccctctggcgattggtattgtcgcagctgtttatgtaggttctgtggttttccccaagaaaagccatcatcttctcctgagttattactttcttgtttgcaatgttcaaggaaatatcaccaaacttgttcatctggaaccgggacagactctggttgtaccatgcctggtacctctattgattgcttttgcagtccaggatgtagaaagatttataaacgattaaacaagcttcttgggataaagaatcatatggaggctggattttcatggagtctggttcactgttttgctaatgatcaggccatgcccaataaaaataaagaaaagttggcacagtgcaactccaagacagcccttgctttcacagttctggatgagtgctttcagccacacattgacgatagaagtggaattaatatgattcacaatgttgcatataattgtggttctgatttcagtcgtttagacttcagtggtttctatgcatttatcctggaacggggtgatgaagtaatagctgcagcatctgtaaggattcatggaactgatttagcagaaatgccattcataggcacaagaggcatgtataggcaccaagggatgtgtcgtcgactactgaatggaattgaatcggccctcggttccctcagtgttcagaaactagtagtatctgctgtgactgaaatggagaatacttggacaactggttttggttttaagcctgttgcaccttccaagaaacaaagaatgaagtcgttaaatctcttgattatgaatgggaccggtctactagagaagaggttgctgccaacacaaacagttgatggacagatcactaccaagacagctaatgctgttggatctgataagatggatgctaaaatgcttggtgaagcaagtggatctgtgacacccattcatgtttctagtgaacccgatgcctctgacaatcgtgaaattaatcgccatgagagtcctcatcctttaggaaactctgcaggcttgacattggaccagtctcctgctgcagacgaaaatgaagcgaaaataactacagaaaggacacccccagtatccataggtgatgctaagacagtcaaggtgcatacacttcctggagctacttgtggagttaacttgcagtgcatggttgaagcagagaacattcaacaagagaaatacaaagaaaccaatgggagattgattgctgaaaatactatttcagagcagaagtgtgaagatagatctaattccagtcgttcaaattcatgtgctactccggtgactgtggatcaatgttctcatttatctaatgagattgggaaaggtgacaactgtttatctagtgaagtttctgttggagctgctcccataacaggcaaaactgaatctagtttgacatctgttcattgcgctaaccaagaggatgagaaagcttacgcagcccctgtggacactaaaatacctttagtcattatggatgaaaagcctgataagcatgagtttaaaactatggttgtagggtgtagtcaaggctcaatggaacctaaaagtttggaaaatagaactagtattgtaaatggaacctcaatggacgcctatagagataaaatacctaatgaagatcacagtgcttctgcagttgacactggagtatctgtgaagctatatgctcagcaaatggagacgattgaggaaaaaactggctcagttttaccagattcggaacactcttctagttgcaaagatgtgttggtgaccttgactgagtcaaagccacttaaaaatgacattcttgaaatggatgatgcagttattaaggtaggaatgactggtcagagtttcaatgaagcaggaataacagctcctgcgctcaacatttcagatcctgttggtgaaaatgtggttaagcctactcaaacttgtggggagggtcaacttcgtggagaggatgtcatatacagtaataacgtcatggaagatgacctaacttctagagcatgctgattggacatcaagaatagctggtagtgggcactcattggtataaaggagagatcgttgggctggcgactggcatggatggatttttactgtgtgcgaggcacttctgggagcgcggggaccgtccgcgggaaggcatgacacagttggctcttaagctttcctgacttttggttcttctacattgaggctgttgaccatggagcctttttttagtagtagaagtaagcaaattgaaccatggaagttctatacgacccacaatccgggtcaacattttgttgtagatatacatgtctggtagttttctgttgtcctcctggtcgacccgaactccttattaagagctggtacttggtacccatggtatgcatgtgaaattctgttccttgtacagagagtagaaaagaaaatgaaagccgtgccagcggttataagccgtcgcttgttta

SEQ ID NO: 64731 - DNA, 5066 bp, Zea Mays
aacacgagaagcagcaggccaaaccaatcccgttcccgtcggcctctagcaggtcctccccaaatcccccgcgatccccgaaaccctaccctccagcgccgcaagcccgcaacacgacccttccgccacctccgtcgcgctcccgcaatccagggtcgcccggcattggttttggagcgggaggtttgagctcttctaagaatcggttttgcgaggctttcgatgggttcggaccgtgaaggccgcggctcggaggccgtggcggcgagtaagccgcggaagaggcaactggtgatggagtccagcgattccgaggccgacgagttctgcatctccacgcggcagaatgctagtggtgccgcgtcgttgggcaatgctggtgtcagcagccaaggcagtggcgatcggtcggaggagaaacctgtgacttctagtcctgagaagcttccaggggttaagtccagtgatgtagatggttcagacaagaaaacgggagttcagctggagagcagtagttcgcagcctgctgtcaagaggatcagagttgagactgtccatggtgatggcaatggatgcagtggaggcgcatctaagtgtgggactggtggaaaaatgctgcctcgggggctcccagcatggcggtttgagaggccagaagtaaggggagggcgtgttctggatgacaaaggtggggtgagtatgaaagcaagcagtgcttcaaagatgaaggagcaggtatcaagtttgggtgacaagagacaggcagagctgcagaaacatgaaagaaggacaccattgaagactgatcagggcaaagcaatcgattctggccaacaggaggttttaaggttgcaagggaaaaggggtgttttaaggatattgccaaagaatgataaggtgaccagggatactggtgatggtaagattctgtcaaggcaaactgaggtggatgaggagactggtaatggcaggattccaacaaagcgaggtgttttaaagctcctgccgaagaacaatggtgctgtgatggagagtaatgaatgcaagcttctgtccaagaaggttaaggtggatgaggaaactggggatgacaagatgccaatgaagaaaactaaggtggttgataaggagaccagtgatggcaagattcttgcaattacaactaacttggatgcagagtttggtggccataagttgccaatgaagaactgtactgtggacatggaaactgttgctgggaagtttcagcaaaagaacagtaaggcagatggagaaaccaaagggagatataaaggatatgaagagaaaagtggcgcccctgcagaatttcagaagcatgatgcaaatggtgagaagagagttctgggaaagctactctctcccgttgcgctgaggaaaagtgatccaagcgtagtgggagtttctttgggccagagaatgaaacaacaaaattcaaagcaacaactgaagaactattctctgagcttgaaagatgatagcactaaatcaagtgaacagaagaatctgaaaaaaagattgcttgagcataaagggtcatcagagagtttgtcaaagaaggcacaactgaaagctgttgatcagcaagccacatctggccctgtgctcaacaagcttgaaaagaagccaagaggaggacccctcaacaaacataagcaggatctcaggaacaagataaaacatgtgcttttagataatgggtggaaaattgacctaaggcagaggaaaaacaaagattatgaagactcagtctatgtttctcctaccgggactggctattggtcaatcactaaggcttatgcagttttccaagaacagtttcaaaatatgggtcgctcatctaaacttaataatactaaaccaggtgcttcagatgctatatcgaaggatgatctagcattgctaaaaaagaatatagtaaagagaaggactaataaggaaatttgtggtgctgaaaagaaacctggggttagcagaaacagaagctctaaagatatccttgctaatagagattttagaaacaagcatcagaacaaggaggatagggtaaaaattaaagatcggagatgtgggcttcttgtccgtgggagtacccatgatactgaagataacatggatggctatattccatatgaatggaagcgtacattatgttcatggatgatagatctgggggttatttctgaagacatgcatgtcaaatacatgaacagcaatagaaccagggaaatgttggcaggtaaaattaccagggagggtattttctgtgggtgctgttccaagattctcacaatagcgaagtttgaacttcatgctggttcaaaagagaagaagccctatgcaaacatctttctggaaggtggtaaggtatctttgttgcaatgcttacttgatgcatgggagaagcacacacaaagtgaaaataagggattttacaagatagataaaggcgacgatgaacatgatgatacttgtgctatttgtggggatggtggcgatttggtgtgctgtgatcactgtgcttccacttttcatttggactgtttgggaattaagcttccctctggcgattggtattgtcgcagctgtttatgtaggttctgtggttttccccaagaaaagccatcatcttctcctgagttattactttcttgtttgcaatgttcaaggaaatatcaccaaacttgttcatctggaaccgggacagactctggttgtaccatgcctggtacctctattgattgcttttgcagtccaggatgtagaaagatttataaacgattaaacaagcttcttgggataaagaatcatatggaggctggattttcatggagtctggttcactgttttgctaatgatcaggccatgcccaataaaaataaagaaaagttggcacagtgcaactccaagacagcccttgctttcacagttctggatgagtgctttcagccacacattgacgatagaagtggaattaatatgattcacaatgttgcatataattgtggttctgatttcagtcgtttagacttcagtggtttctatgcatttatcctggaacggggtgatgaagtaatagctgcagcatctgtaaggattcatggaactgatttagcagaaatgccattcataggcacaagaggcatgtataggcaccaagggatgtgtcgtcgactactgaatggaattgaatcggccctcggttccctcagtgttcagaaactagtagtatctgctgtgactgaaatggagaatacttggacaactggttttggttttaagcctgttgcaccttccaagaaacaaagaatgaagtcgttaaatctcttgattatgaatgggaccggtctactagagaagaggttgctgccaacacaaacagttgatggacagatcactaccaagacagctaatgctgttggatctgataagatggatgctaaaatgcttggtgaagcaagtggatctgtgacacccattcatgtttctagtgaacccgatgcctctgacaatcgtgaaattaatcgccatgagagtcctcatcctttaggaaactctgcaggcttgacattggaccagtctcctgctgcagacgaaaatgaagcgaaaataactacagaaaggacacccccagtatccataggtgatgctaagacagtcaaggtgcatacacttcctggagctacttgtggagttaacttgcagtgcatggttgaagcagagaacattcaacaagagaaatacaaagaaaccaatgggagattgattgctgaaaatactatttcagagcagaagtgtgaagatagatctaattccagtcgttcaaattcatgtgctactccggtgactgtggatcaatgttctcatttatctaatgagattgggaaaggtgacaactgtttatctagtgaagtttctgttggagctgctcccataacaggcaaaactgaatctagtttgacatctgttcattgcgctaaccaagaggatgagaaagcttacgcagcccctgtggacactaaaatacctttagtcattatggatgaaaagcctgataagcatgagtttaaaactatggttgtagggtgtagtcaaggctcaatggaacctaaaagtttggaaaatagaactagtattgtaaatggaacctcaatggacgcctatagagataaaatacctaatgaagatcacagtgcttctgcagttgacactggagtatctgtgaagctatatgctcagcaaatggagacgattgaggaaaaaactggctcagttttaccagattcggaacactcttctagttgcaaagatgtgttggtgaccttgactgagtcaaagccacttaaaaatgacattcttgaaatggatgatgcagttattaaggtaggaatgactggtcagagtttcaatgaagcaggaataacagctcctgcgctcaacatttcagatcctgttggtgaaaatgtggttaagcctactcaaacttgtggggagggtcaacttcgtggagaggatgtcatatacagtaataacgtcatggaagatgacctaacttctagagcatgctgatgtatgatcattgtattttctgctagaaaagtggacatcaagaatagctggtagtgggcactcattggtataaaggagagatcgttgggctggcgactggcatggatggatttttactgtgtgcgaggcacttctgggagcgcggggaccgtccgcgggaaggcatgacacagttggctcttaagctttcctgacttttggttcttctacattgaggctgttgaccatggagcctttttttagtagtagaagtaagcaaattgaaccatggaagttctatacgacccacaatccgggtcaacattttgttgtagatatacatgtctggtagttttctgttgtcctcctggtcgacccgaactccttattaagagctggtacttggtacccatggtatgcatgtgaaattctgttccttgtacagagagtagaaaagaaaatgaaagccgtgccagcggttataagccgtcgcttgttta

SEQ ID NO: 64732 - DNA, 1196 bp, Zea Mays
cgcgcctattgatctagtatatatacaatgcaaaatcaacaaccaccaacccagagccagaaaagaaccaagaaagaaccgagtggctggatcagcctgagacgagctttgagcaaccaagacccttccatttattttccataaataggatgctgcaagcgaaggccaccaggattcaccaccatggccaaccacctgtgcggcgccggggagagcatgagcatggcgccttcctgcctgcatcgatcgacgagggctgcacgaacgatggggtccgcctccgcctcagtgatgacgaccagcctgctggcgctggcgctggcagcgctggctttcgtctccagggccgcggcgcagggcaacggctgttccagcgtgatgatgaccctggccccgtgcatggacttcatctccagcaaggcgtcggagccggggatctcctgctgctcggtgctggctggagtcgtgcagaccgacccccgctgcctctgcatggtcctggacggcaccgccacgtccttcggcatcgccatcaaccagaccagggcactggagctccccggcgtctgcaaggtcaaggcgccgccgctcagccagtgcacaggcgtccctgcggcacctgcaccgacgcctcccgacgaaccagcagcggcagcggaggaagaagccgacacagctgcagatgccccttcagcaaatggagcctcaagctccacaaactcaaagaatgcagcgagcttactgcttctcatctgcgcattgctgtatgccttctaataagtggtgatacaacttcgctggccatgtcaccgtgcaggaattaggacaaaatctactgtatcattttgatagactacgaagaccaacgacgagatgtaaagccatatcattctctttcactaaaggatagatgaagcctcaagaccaatgaagcctccgtgatgaagactatccccctcggagatcaagcgaagccactaggtatctgtctccctgatgaagactcttcgctcttcccctcagagatcaagcgaagccactaggtgaactttgctgagaagcaaagtcaaaaaagaaataaggagaaattggctcattcacaagacatggagctctgtctacgatgactgtgtaaacactagacagaaccatatagcatgaaatggaaagcaaataactgaaccaccttttattgg

SEQ ID NO: 64733 - DNA, 4345 bp, Zea Mays
aagatttcgggttgcgtccaccgcccttgtagccctacccagtgcatataagcaagcccctgcgacctccccttggccataggcgagcagaaacatcggagtgcgcagtaagtaccctcgccggagcaaacagagaaaaagaagccgccgccatgggaccgtgtccctattgccgctcgaagcgcggtctctgccccagggtgcttcaactcagccctaggaatgtgtccgtgcattgcccagatggggagatgcaccgggctcactggaatctctcgctggagtaaaaccaccgccgcatgccgcgcgcgggcatgactgggggactgcgcggctcaaccaccgatatgatcatccccatcaggttcgccgcatactctactgccttttgcacatcatcgtgtttgaggtgggcgccgaatggtcgaaccatcgctcgtcggcatgctcgcatccatgggatgcccggcgccgccgcaccgtggatcgagatgggagaaactacgccagccgtcggatgtaggacttgtggccgagattaggccggggtaatggttctactagatccgttatccgccattggtctctgtgtcgacggctcggatctaatgatagcaataccccttcacagcattaaaaactagttcttgatcgtccatcctgcggcttgggatatcacgcgtatctcgttcgttcgtcgtgaatctcacggttcaggctacgtaccggttcagatgggtttggatctaatctgatccgtagattggtgatccaaccgccaaaatataaccataccccttcggtggccgttttcttaaaaagaccctagatgtctagataatggtgatcgcccatccgagagattcatatttaattaaaataaattagggataatattttccatataggaataaatccaataaactttggaaaaatgataacggagtcgttttaactccattttagtccgttcaagttgtgttggctccgtatgaatatctactacacagtaacaacattaattatacgatatcacatacttttataattaggtaactaatttgattagtctatgtttattggattagcttttctaagattaatatagtattctgatctgatagttataatttgactgaaatatgttttctaatcaaattataacttggattagaattaaattaatggtttcttaggaatatcttcctctcatgatttataataatcaacatagaacatagttttcctgtttaatcacataaaccttcgataagtcataactatataactgtaactccgaatttagtgattcttgaacccacgatcttggtacagcgcgtagaatattattatgcagtatgttcttatgtttggtatgatgttaattttgcatataccatgtttgtttgtattgctacaactagcagtgaggtcacaggaatctaaagatcatcctggtacttggaatctcaagtcccaggcaagttgtgccattgaccacttttatttacccaataatgttctttataatcatttattcatgcataggcttaatttttatggaacccaataggtcaccctagcttggttatctttatatcttgtttacccctgaactatttgggcagttttttatattgctctttatggttttgggattaatattacattatgatcatgttccaattatactattgttttatttattgttcatgacaagatcattatattaattggaacatggagcttaacttgagaaacacgtgccaccacaagggtggaatgggacgtccttggctgactaattagaaaagctagtggaagactaccttacccgaaaggggcaagggcagtagtaggcgtgtaggtaggttctcgggttgattttgctgcgatggcggtcagacgagagattcctacattgctcttcctagaaactgtagctggttttcggaagctagtggaactttgtaaaggcttcatagtggatccctagccattcacctcggaagtgtctaagggccttgcaaaccctggcgacatgggatacacgacttgtgggtacagggtacaacctctgcagagtgaaaaactggtatactagtcgtgctcgcggtcatgagcagctcagaactctcgcatgattaacttatggaattaaattcaatttgtcatatgcattgcatcacgggtgttgttatcagttttgatctattattactctggtttggtattacttacacttagtaattgctaataaaattttgacaaactttaaaacaatgctcagctttaaccatcctctttggtaagccttacacttcacatgagctctcacctttggcgagttcatgcacattattccccacaacttgatgagcgataaacatatttgagctcacccttgctgtctcacacccccaaaggttaagaacaggtaccgtaggatgaggcgcatggaggatgttgtgatgagttcgtgagaggtctaggccgtcgtctcccagtcaactttgggttgctagatcattgcctccatttgatgtatttatttatttattttgtacataactcatattatatagtaaagatgtgacattcgtttatgtaccatgattcatcatatgtgtgagactttatcccagcacacctcgtgattatctcacgcccgggtcttggtggccccgaaacccaggtgtgacattgattgagcaactataaggaaggagaactatctttcgcactccgatttaattctaacactaactccatgccatagtacgtgttcaaagtttataatttttaggtttcgcctattcaccccctccaggcgactttcactaactatctaaagaagtgcatccacaattattacaattggttcaaagaccaaaaactttactaaccaaaagccgacctaggctaagtcaagacaaaataacattactcgcaacaaaatcaccgagcctacttcatcacttctgtcagatctcatcttgcgccacctcgtcctccgcattgttttcttcctagacatcatcttaagcaatcaacttagaattggccacgtgaaccagcaacttggcgccctcttgaataaagtcctgccccaatttcttagacctgcccagtaagacatcaacgcacaagcatggcaaattatgtcatgaggggactttatcaaaatctcttcgaagcatgctttgtttcgcgctttccaaatagcccaacatatagctgcaacacccaccatatgaattttctcaatttcaggagcaagattcagaagtctgacccgacattgagccatgtttttgggaatataatcagtgtttaagcacttggctacacaaccccaaatttttatcatttgatcaccaaaaccctcaattagaggttgattgcacttacaatctcctccttttttggtgattgatgccaaaaccaataaagttggaagagaataaaagcatgcaatctcataagcttttgaataattgtgtatttgtggctccccctaaatgtgtgcatatggtttgaactacattgttgactttatacaaatcgtatacaaattgtgatgcaaatgataatatatcgacatagctcatcacatatcatccaagaagttctaatagctatcacaaatagattttcatggacccatggccatcatacatcaacatcatcataaaatgttcaaaccacatcacatagagttattacagaccaaaggttcaaatacataaatatatagtgttgggggcctatattgccaaaggtcctttgtttagttgtgtcacatgattgccttaagggtacaaggaaaggctttgtcgaagatcacttgaatgttgaagatcatttgtctaacatctggcttcgtcaattaacaagtgtatttcaagggtgtcctcactggcgtatgaagctgagcttcaacagaaagcaacatacaaaagcacttcatctatgctcaagtaataaggacaatggccgaggggatgactttggccacaaatcaaaaggaggaagtagctagttggcgaaggctggaacttgtgaagacaagaatgaagagaagtacattattgtcctagtaccatttgtaaatgacttatgtaaaaatagatggtcattattgtaaatccgcacaaggacggtttgtctcccctgtaaatagatgaacagtgccctgcataaagtacctttggctaggggctacaactttgtattgcttagcctctgaaactccttcgtgctatcttacatctagaggtcgaaggtatgactgtaatctcgtttcatatggagagaagaaataaaatgctaaggcatatgagat

SEQ ID NO: 64734 - DNA, 367 bp, Zea Mays
cccctgcgacctccccttggccataggcgagcagaaacatcggagtgcgcagtaagtaccctcgccggagcaaacagagaaaaagaagccgccgccatgggaccgtgtccctattgccgctcgaagcgcggtctctgccccagggtgcttcaactcagccctaggaatgtgtccgtgcattgcccagatggggagatgcaccgggctcactggaatctctcgctggagtaaaaccaccgccgcatgccgcgcgcgggcatgactgggggactgcgcggctcaaccaccgatatgatcatccccatcaggagcaagattcagaagtctgacccgacattgagccatgtttttgggaatataatcagtg

SEQ ID NO: 64735 - DNA, 1245 bp, Zea Mays
cacaattgttgtcgtaatccatccaggagacagagacagcaccatgtagagctgaataataataataataataataataataataataataataataataataataataataataataataataataataataataataataataataataataataataataataataataataataataataataataataataataatgctggaatgaggaacgtaaattaccgagcccatttcgtccaggaaactgaacagacaatatctacggtccatctcaatctcaccagggaccccgtggaaagaaaagaaaaaaacggagacaaattcagggctggcaacaaagatcggggaccccggatccatggccacaacctgtgtgtatcagtgtcatgtcacggttcatggaccacacacaaaaaaaaggaggcctattttggaacgcgggaatttatcctgtttcctgtgtgttgcaaaggaacctgagaggctacatcctggagactgatttggtggatatagatcacgagtgatttcatgagagaggaattcccttgtcatttaattttaaatagcaaagggattccgcatagatcctctcccctcgtgttccctatccaccaaatcagtagcaagacaatttctaccatatatgttttcttgtgttacctatccaccaaatcagcgtgcgtgccattcacagtcacaggctatcccaagctgcagatagatactcttgctctacgaggcgggcggtgctgaagcttgaactaccgcctgtttcctgtgtttttttctttgaaaataaactggttcccatgaaattcatggaccatttctatgaaattcggagacgttgctgaagtgggtcgagtgactggcaaagtcgcaagagagacgatgagcagctacggtcgcggtcgctgacaaaggcgtcgctgtcggactaacaaggttggttgacagtaaactatgaccgtgatcttatcttgtgtcctactcctacaccactgcctctgcctcggtggaaccggtccaaggcacctaaaccattcactagtcgtcatcagtcacaaggaagccactaacgacgatgatgatcccccaatgctcatgactatcccggatcgaacgggacactgaaacgctcttggtgcactgactgcagatgaggagaaatgggtgtttttttttgatttttttttttacctttccagcaccagcaagagagcagcatccttgttgcac

SEQ ID NO: 64736 - DNA, 583 bp, Zea Mays
cgcgccccgtcgcggccgcagctcttcctgctgacgctttcttcagcattgcgggcgagaaaccggagcccgagcctctgatccgatgaacttcagccgagcgagcctgatcgacccgatcgatctacgcagagtagtagctagaaacagcaagatgtgtgggacgaaacggtcagctcagctggccacggaggagagacgagcagagaagggaggagcaggaggaggaggaggcaaagcaaatgatcaggaacatacagtagtagttcgacaggattgatcaggaacaactgatcgcggcggaaaacgatggattacgcgagcgaggagataatagcaatggtgtcgagcaaacggataaactggaggctgtggagtcgagtgaagtgtggtggtgtggtggtggtgaccatgagtccatgacaatggtgtgtggaggcagtgggacaggggggcaggcaagggcctgtagaagaagcgtacgggctaccagaaggagattgtgcctgccgctcctccccgagccccgagggacgctagaatccgagggccttattttaaaggcacccttctcaaaactagg

SEQ ID NO: 64737 - DNA, 2385 bp, Zea Mays
cccgcttcccttttgctgatggaatcccggctgcagtggccagtgctatcaaaaagggaaaggtgatcgtctatatatggatccatgccgaggaaggagttcgtcaaggaggggctccattgctgctggagctggacatggtcactttgatgcagacgacgatgcagcagcactagttcctcctccttaccgcctgttcccggagccggaggagacggccgcccgcgacatccagctccgtcagttcttctccgtggatcggcgccagccgccgcagctggaggccagctggcgacaacaactaccagcattttatcctggaggcggcgtcaccgtcgccgatccctcctctcaactggcaacaatgggtgcacaggatgcaactgccctgagtgttcagcagggccgagcgaggacagctgctgaaaacctcgtccacgtccctgccgcccaggtttcacttccaggtgccctagccctagggaactttgagcaagagctcggagaagacgcgctgctgccgccggtgctgagccaggagcagcaggacgccgtgaagagatacaaccatctgatgggggtccacgtggcgtacttccgcgtgtgcatcgaccctacggtggccagttccaggcggctcctccagcaggcaatccaggatctcaagaaccactgtgctggcgatgctctggtggcgcattattacgtgaacaacaggaacaacaacgacccagcagatcagccagacactactacggccattcggcagcaagcaattgctcgctctgctgatgcctcctctcggcagcatcatggcgcctgcagaggattcaacgaccatcatggcggcggcgttgttccttccgttcaccgggaggaggaggaagctctggcggctccggtggtggcgatgagcatgagccccgccttgcggctcgtggacatcaagggcaaagtcgcagctttctgtgccgatcgcaacgggagccgcttcgtgcagcaggcgcttgaggcggcagcgccggaggagatcgccatggtttacaaggagatcatgccctgcgtgcgcacgcttgccgtcgacatgtttggaaaccatgccatccagaagattcttgagcatgggccgaggtcctgcaagcgaggggtcatcagtaatctgatcggccatttgttgcccctaagccttgacaagtacagctgccgggtggtacagaagtctttcgacgtaggggagcacgaccagaaggtggcgatggccaaggagctcggcagcaaagtgctgaggtgtgtccgcgaccagttcgcgaaccacgtcgtccagaagtgcgtcgagtgcctgccgtccaaggacatccactccatcctccgaagcttctacggccgggccaaggcgctgtccacccatcccttcggctgccacgtcatccagaaagtgctggcccgctgcaaagaccacgagatctaccacgcgctgacggcggagatcatggagaacgtgaacaagctggcggcggacaggttcggcaactacgtggtgcagcagctggtggagcacggaggcggcgccatgcggtccgcgatggtcaggaggttcgccggccgcgtcgtcggcatgagctaccacaagttcgcctccaacgtggtggagaagtgcctggcgttcgggagccaggaggaccgccggctcatcgccgacgagatcgtcgccggcggcggcggcggccagcagcagcacttggaccatctcgtggacatgatgatcaacccgtacgcgaactttgtgatccagaagatggtggtgacggcggaggagcggcaggtgaggttgctgctggaggtggcaagtagcaacgcggcgagcctggcgaggtacgcgcatggacggcacgtcatcgacgccatggagaggttccttggcggcgccaaggctgttgtgcacgcagaccctgctgcactaccctgccgccgccgatgatgagctcggcggctagcgacaccgccgactgcaatggctcctctcgatcgatcgtcgatgctgcagcaaggaccactagtactgtccaccctgtacgtgaagctgggctggcacatatgcatgcatggcaaaaacaagccatatcataataagaccaaaggaatatgaaggctgcttagcgtcttcatatatcatatcgcatcagtatactcaattcgtccgctcggtttctccttggtgtagagtataatataggtgaattgtccatctcctctcgtcagcttaaacttttgtgttaaattggttgatgcttagaacttaatatggtatcagagctatatatatgcctcgagtccaaaaatactggttatcacaattaaataaaaataattattgctcgctcttat

SEQ ID NO: 64738 - DNA, 2559 bp, Zea Mays
cggtttatgtcgcctactgcctgctttgacgcaccctctctctctctcttctctctctctcctctctctctctctctctgactctgagaaaagcatatattgtattcatctattagtacccagaccgaattctgttctagctatatatatgtgcttcttccagcatcaggctgcttaaggctttaccggccagtcaattcaagcagagagtggccagtgctatcaaaaagggaaaggtgatcgtctatatatggatccatgccgaggaaggagttcgtcaaggaggggctccattgctgctggagctggacatggtcactttgatgcagacgacgatgcagcagcactagttcctcctccttaccgcctgttcccggagccggaggagacggccgcccgcgacatccagctccgtcagttcttctccgtggatcggcgccagccgccgcagctggaggccagctggcgacaacaactaccagcattttatcctggaggcggcgtcaccgtcgccgatccctcctctcaactggcaacaatgggtgcacaggatgcaactgccctgagtgttcagcagggccgagcgaggacagctgctgaaaacctcgtccacgtccctgccgcccaggtttcacttccaggtgccctagccctagggaactttgagcaagagctcggagaagacgcgctgctgccgccggtgctgagccaggagcagcaggacgccgtgaagagatacaaccatctgatgggggtccacgtggcgtacttccgcgtgtgcatcgaccctacggtggccagttccaggcggctcctccagcaggcaatccaggatctcaagaaccactgtgctggcgatgctctggtggcgcattattacgtgaacaacaggaacaacaacgacccagcagatcagccagacactactacggccattcggcagcaagcaattgctcgctctgctgatgcctcctctcggcagcatcatggcgcctgcagaggattcaacgaccatcatggcggcggcgttgttccttccgttcaccgggaggaggaggaagctctggcggctccggtggtggcgatgagcatgagccccgccttgcggctcgtggacatcaagggcaaagtcgcagctttctgtgccgatcgcaacgggagccgcttcgtgcagcaggcgcttgaggcggcagcgccggaggagatcgccatggtttacaaggagatcatgccctgcgtgcgcacgcttgccgtcgacatgtttggaaaccatgccatccagaagattcttgagcatgggccgaggtcctgcaagcgaggggtcatcagtaatctgatcggccatttgttgcccctaagccttgacaagtacagctgccgggtggtacagaagtctttcgacgtaggggagcacgaccagaaggtggcgatggccaaggagctcggcagcaaagtgctgaggtgtgtccgcgaccagttcgcgaaccacgtcgtccagaagtgcgtcgagtgcctgccgtccaaggacatccactccatcctccgaagcttctacggccgggccaaggcgctgtccacccatcccttcggctgccacgtcatccagaaagtgctggcccgctgcaaagaccacgagatctaccacgcgctgacggcggagatcatggagaacgtgaacaagctggcggcggacaggttcggcaactacgtggtgcagcagctggtggagcacggaggcggcgccatgcggtccgcgatggtcaggaggttcgccggccgcgtcgtcggcatgagctaccacaagttcgcctccaacgtggtggagaagtgcctggcgttcgggagccaggaggaccgccggctcatcgccgacgagatcgtcgccggcggcggcggcggccagcagcagcacttggaccatctcgtggacatgatgatcaacccgtacgcgaactttgtgatccagaagatggtggtgacggcggaggagcggcaggtgaggttgctgctggaggtggcaagtagcaacgcggcgagcctggcgaggtacgcgcatggacggcacgtcatcgacgccatggagaggttccttggcggcgccaaggctgttgtgcacgcagaccctgctgcactaccctgccgccgccgatgatgagctcggcggctagcgacaccgccgactgcaatggctcctctcgatcgatcgtcgatgctgcagcaaggaccactagtactgtccaccctgtacgtgaagctgggctggcacatatgcatgcatggcaaaaacaagccatatcataataagaccaaaggaatatgaaggctgcttagcgtcttcatatatcatatcgcatcagtatactcaattcgtccgctcggtttctccttggtgtagagtataatataggtgaattgtccatctcctctcgtcagcttaaacttttgtgttaaattggttgatgcttagaacttaatatggtatcagagctatatatatgcctcgagtccaaaaatactggttatcacaattaaataaaaataattattgctcgctcttat

SEQ ID NO: 64739 - DNA, 988 bp, Zea Mays
gtttatgtcgcctactgcctgctttgacgcaccctctctctctctcttctctctctctcctctctctctctctctctgactctgagaaaagcatatattgtattcatctattagtacccagaccgaattctgttctagctatatatatgtgcttcttccagcatcaggctgcttaaggctttaccggccagtcaattcaagcagagagtggccagtgctatcaaaaagggaaaggtgatcgtctatatatggatccatgccgaggaaggagttcgtcaaggaggggctccattgctgctggagctggacatggtcactttgatgcagacgacgatgcagcagcactagttcctcctccttaccgcctgttcccggagccggaggagacggccgcccgcgacatccagctccgtcagttcttctccgtggatcggcgccagccgccgcagctggagtgtgttgcaggtggaacgttcatacctattaggcaaaaatgataagctccgtccgtctagcttcggcgaaggagtaaccgaagggaagataatcatttgtcgaacttgatgttaccttcagacagagaagggccatgaaggatgaaaacgagagatatatggaacatttctcatattaaaagtcgtacatacctttcccgactatgtacgtcatttgtacatggtgaggcatgctcccgtaactatgtacaaatatgtatactggccgatcctacaaataggtgtttagtgccactgctatagggttaaccaattgtaaccccatgtttgtatcaccttcgtgcaagaccacctccaaaaggcattcgtccttgtgtacttgtcaacaactgagatctttgaaggttcagcattctaaaggtctcctatgtaatgtagtatctcttgttactccttcgtgtgtaaaggataatgaagcggcttgttttcttacaagcctaacatacaacttgctgaaatgatttcacttcgta

SEQ ID NO: 64740 - DNA, 477 bp, Zea Mays
ctctctcttctctctctctcctctctctctctctctctgactctgagaaaagcatatattgtattcatctattagtacccagaccgaattctgttctagctatatatatgtgcttcttccagcatcaggctgcttaaggctttaccggccagtcaattcaagcagagagtggccagtgctatcaaaaagggaaaggtgatcgtctatatatggatccatgccgaggaaggagttcgtcaaggaggggctccattgctgctggagctggacatggtcactttgatgcagacgacgatgcagcagcactagttcctcctccttaccgcctgttcccggagccggaggagacggccgcccgcgacatccagctccgtcagttcttctccgtggatcggcgccagccgccgcagctggagtctaatatggagcttctccactaaggatgggctctcctacacaaagttcatgttggtccac

SEQ ID NO: 64741 - DNA, 2241 bp, Zea Mays
acctattacactatcctccgcaaggccgaaactcggaatttgaaggaatttatacttacatatgggtgattgcttattgtcttgtttgttgggaacaaataacggatcgtggagactatacttttcatcatatatagaggccagctggcgacaacaactaccagcattttatcctggaggcggcgtcaccgtcgccgatccctcctctcaactggcaacaatgggtgcacaggatgcaactgccctgagtgttcagcagggccgagcgaggacagctgctgaaaacctcgtccacgtccctgccgcccaggtttcacttccaggtgccctagccctagggaactttgagcaagagctcggagaagacgcgctgctgccgccggtgctgagccaggagcagcaggacgccgtgaagagatacaaccatctgatgggggtccacgtggcgtacttccgcgtgtgcatcgaccctacggtggccagttccaggcggctcctccagcaggcaatccaggatctcaagaaccactgtgctggcgatgctctggtggcgcattattacgtgaacaacaggaacaacaacgacccagcagatcagccagacactactacggccattcggcagcaagcaattgctcgctctgctgatgcctcctctcggcagcatcatggcgcctgcagaggattcaacgaccatcatggcggcggcgttgttccttccgttcaccgggaggaggaggaagctctggcggctccggtggtggcgatgagcatgagccccgccttgcggctcgtggacatcaagggcaaagtcgcagctttctgtgccgatcgcaacgggagccgcttcgtgcagcaggcgcttgaggcggcagcgccggaggagatcgccatggtttacaaggagatcatgccctgcgtgcgcacgcttgccgtcgacatgtttggaaaccatgccatccagaagattcttgagcatgggccgaggtcctgcaagcgaggggtcatcagtaatctgatcggccatttgttgcccctaagccttgacaagtacagctgccgggtggtacagaagtctttcgacgtaggggagcacgaccagaaggtggcgatggccaaggagctcggcagcaaagtgctgaggtgtgtccgcgaccagttcgcgaaccacgtcgtccagaagtgcgtcgagtgcctgccgtccaaggacatccactccatcctccgaagcttctacggccgggccaaggcgctgtccacccatcccttcggctgccacgtcatccagaaagtgctggcccgctgcaaagaccacgagatctaccacgcgctgacggcggagatcatggagaacgtgaacaagctggcggcggacaggttcggcaactacgtggtgcagcagctggtggagcacggaggcggcgccatgcggtccgcgatggtcaggaggttcgccggccgcgtcgtcggcatgagctaccacaagttcgcctccaacgtggtggagaagtgcctggcgttcgggagccaggaggaccgccggctcatcgccgacgagatcgtcgccggcggcggcggcggccagcagcagcacttggaccatctcgtggacatgatgatcaacccgtacgcgaactttgtgatccagaagatggtggtgacggcggaggagcggcaggtgaggttgctgctggaggtggcaagtagcaacgcggcgagcctggcgaggtacgcgcatggacggcacgtcatcgacgccatggagaggttccttggcggcgccaaggctgttgtgcacgcagaccctgctgcactaccctgccgccgccgatgatgagctcggcggctagcgacaccgccgactgcaatggctcctctcgatcgatcgtcgatgctgcagcaaggaccactagtactgtccaccctgtacgtgaagctgggctggcacatatgcatgcatggcaaaaacaagccatatcataataagaccaaaggaatatgaaggctgcttagcgtcttcatatatcatatcgcatcagtatactcaattcgtccgctcggtttctccttggtgtagagtataatataggtgaattgtccatctcctctcgtcagcttaaacttttgtgttaaattggttgatgcttagaacttaatatggtatcagagctatatatatgcctcgagtccaaaaatactggttatcacaattaaataaaaataattattgctcgctcttat

SEQ ID NO: 64742 - DNA, 2611 bp, Zea Mays
cgacttcgatccgggtgccgttgcttcgttgctacaccaccgagcccgcttggtgaaatttctgacaaggaggttcgtgccgacgccgccggtacgaacgagccacccgagccttcgaacgcggccaggttgtttgcctgcactagcaccgtgactcgagaaacgcgcacgggtacatgtacgggcgtggctggtcctcctcccaccaccggggggccatgtgatctggccctgcctcgtcagttcgacaataacggcagtccagaccacaacacgacgccctgccacggtgtcaggtcagaccttaaacaggacaaggctaggaagctgctacaagctgcacagaacgctaaaaaaaacgcgctggagaagaggaagtgcttgttttccaccgaagtccggctcctggacggcggcggcggcggcggcggagagcctgggagtgacagtgatggagtcttgggatgcgagtggtccgacttagtctccccgacctcagcgaagcttttggccttcgacgccacgatggacgagcatcacagaggagtgcatttggcggctcagaacgcagagtcgtgtgggtatttgctgtcgaaacttgccggagacggtggcgtatcggacggagcatatcctactgcgtctgctcaggtatactatcaggaacttgtgatgggagaagatcagtcagagaacgccgctcctcaaatggacgctcaggaaaccatctcagccgaagaaacccaggataatatctatgaagcggatgtgtgtgttccattagagtacaaggtagtggagagccaacagcagcgtggcatacggagacgctgcctggtcttcgaggcagctggtgggttttcgaatagcgctgtgaaaagggggactattgaagatcgctcggtctcaacatgtagtaagggcaaaagccctgcggaaagccagccgcgtggactgcgaggcatcgggcttcatctgaatgcgcttgcgttaacaccaaaggggaaaatggcctgtcaggatcctcctcctacggcttctgctctccttccatcgtcagcgtctgaaaaggatgcgcgtggcgagctgctttgtgcaggagagaatttcgcacactcgggcggtgagctgttggagtttcccttggatggttgttcggctggaggagggtttcctgtaaatgaccatcatgtctcaggtcagagcgtcagccctcaaaagaagagacggaaaacggataatggcgatgatggtgaggcatgcaagcgatgcagctgtaagaagtcgaagtgcctgaaactttactgcgagtgtttcgctgctggtgtgtactgctcagaaccttgttcgtgccaaggatgtatgaacaagcccatacacgaggaaaccgtcctctccactcggaagcagatagagtttcgtaacccgctagcgtttgctccgaaagtgatccgcatgtctgatgccggtctggaaacaggggaagatcctaacaacactccggcttcggctcgtcacaagagaggatgcaattgtaagaagtcaagctgtctcaagaaatactgtgaatgctaccagggaggtgttggatgctcgagcaactgcagatgtgagagttgcaaaaatgcttttggcagaagagatgccgagactgaactccctgaagaaatgaaacaagaagaaagtgaccagacagaaaatcctcaacaagaaaaggagaacgatcaacaaaaagcaaatgtacagggcgaggatcacccgctcctggaccttgtcccaataacaccgccttttgatttttgcagttctctgctcaaactgccaaatttctcaagcgcaaaaccgccgagaccgaccaaggctcgcagcgtgacctcccgctcgtctgcttcgaaagccactgcagcagtacagccttgtagatcatccaagcttgctgctagtgctagtgctagtggtatcgatgaggagacgccagatatcctgcacgaacctgactctctcagtaactgtgtcaagactactacttcaccgaacggaaaacgggtctcgccgccacataacgcgctcggcagctccccgaaccgaaaaggtggcaggaagttgatactcaagtcaattcccttgttcccgtcactcacgggagacacaaacagcggctctgcaatgaacagcactgatagcgcattctgcgcgtcacctctcactttaggaccatcttaaagctgtgaagttggtggccatgggaccggagtacgacttgtagtccgaacacgtgtgcctcgtatcctacggcaaggctcgaggtactgtagactgtagtaagttaggctttttaaagttgtagtaatctgtatttgtaaaatatgtagactcaataatctgtatgtaagatgctgcgatgggtgaagctgtttatctttatcaaattgtagcaacattacagatcacctcttgagtaggtttcacagttccaccccctgtctttctttttttttttttggaaaggaatccggtccatgttttccattgcaatctctgttgccagtctgaagccacctcttctagcactgaaccaaaaaaaaagaagtgctcatcagacagttcatgc

SEQ ID NO: 64743 - DNA, 2569 bp, Zea Mays
gtgccgttgcttcgttgctacaccaccgagcccgcttggtgaaatttctgacaaggaggttcgtgccgacgccgccggtacgaacgagccacccgagccttcgaacgcggccaggttgtttgcctgcactagcaccgtgactcgagaaacgcgcacgggtacatgtacgggcgtggctggtcctcctcccaccaccggggggccatgtgatctggccctgcctcgtcagttcgacaataacggcagtccagaccacaacacgacgccctgccacggtgtcaggtcagaccttaaacaggacaaggctaggaagctgctacaagctgcacagaacgctaaaaaaaacgcgctggagaagaggaagtgcttgttttccaccgaagtccggctcctggacggcggcggcggcggcggcggagagcctgggagtgacagtgatggagtcttgggatgcgagtggtccgacttagtctccccgacctcagcgaagcttttggccttcgacgccacgatggacgagcatcacagaggagtgcatttggcggctcagaacgcagagtcgtgtgggtatttgctgtcgaaacttgccggagacggtggcgtatcggacggagcatatcctactgcgtctgctcaggtatactatcaggaacttgtgatgggagaagatcagtcagagaacgccgctcctcaaatggacgctcaggaaaccatctcagccgaagaaacccaggataatatctatgaagcggatgtgtgtgttccattagagtacaaggtagtggagagccaacagcagcgtggcatacggagacgctgcctggtcttcgaggcagctggtgggttttcgaatagcgctgtgaaaagggggactattgaagatcgctcggtctcaacatgtagtaagggcaaaagccctgcggaaagccagccgcgtggactgcgaggcatcgggcttcatctgaatgcgcttgcgttaacaccaaaggggaaaatggcctgtcaggatcctcctcctacggcttctgctctccttccatcgtcagcgtctgaaaaggatgcgcgtggcgagctgctttgtgcaggagagaatttcgcacactcgggcggtgagctgttggagtttcccttggatggttgttcggctggaggagggtttcctgtaaatgaccatcatgtctcagacggaaaacggataatggcgatgatggtgaggcatgcaagcgatgcagctgtaagaagtcgaagtgcctgaaactttactgcgagtgtttcgctgctggtgtgtactgctcagaaccttgttcgtgccaaggatgtatgaacaagcccatacacgaggaaaccgtcctctccactcggaagcagatagagtttcgtaacccgctagcgtttgctccgaaagtgatccgcatgtctgatgccggtctggaaacaggggaagatcctaacaacactccggcttcggctcgtcacaagagaggatgcaattgtaagaagtcaagctgtctcaagaaatactgtgaatgctaccagggaggtgttggatgctcgagcaactgcagatgtgagagttgcaaaaatgcttttggcagaagagatgccgagactgaactccctgaagaaatgaaacaagaagaaagtgaccagacagaaaatcctcaacaagaaaaggagaacgatcaacaaaaagcaaatgtacagggcgaggatcacccgctcctggaccttgtcccaataacaccgccttttgatttttgcagttctctgctcaaactgccaaatttctcaagcgcaaaaccgccgagaccgaccaaggctcgcagcgtgacctcccgctcgtctgcttcgaaagccactgcagcagtacagccttgtagatcatccaagcttgctgctagtgctagtgctagtggtatcgatgaggagacgccagatatcctgcacgaacctgactctctcagtaactgtgtcaagactactacttcaccgaacggaaaacgggtctcgccgccacataacgcgctcggcagctccccgaaccgaaaaggtggcaggaagttgatactcaagtcaattcccttgttcccgtcactcacgggagacacaaacagcggctctgcaatgaacagcactgatagcgcattctgcgcgtcacctctcactttaggaccatcttaaagctgtgaagttggtggccatgggaccggagtacgacttgtagtccgaacacgtgtgcctcgtatcctacggcaaggctcgaggtactgtagactgtagtaagttaggctttttaaagttgtagtaatctgtatttgtaaaatatgtagactcaataatctgtatgtaagatgctgcgatgggtgaagctgtttatctttatcaaattgtagcaacattacagatcacctcttgagtaggtttcacagttccaccccctgtctttctttttttttttttggaaaggaatccggtccatgttttccattgcaatctctgttgccagtctgaagccacctcttctagcactgaaccaaaaaaaaagaagtgctcatcagacagttcatgc

SEQ ID NO: 64744 - DNA, 1839 bp, Zea Mays
gtctttatacaccgttgcccgtagtggagagccaacagcagcgtggcatacggagacgctgcctggtcttcgaggcagctggtgggttttcgaatagcgctgtgaaaagggggactattgaagatcgctcggtctcaacatgtagtaagggcaaaagccctgcggaaagccagccgcgtggactgcgaggcatcgggcttcatctgaatgcgcttgcgttaacaccaaaggggaaaatggcctgtcaggatcctcctcctacggcttctgctctccttccatcgtcagcgtctgaaaaggatgcgcgtggcgagctgctttgtgcaggagagaatttcgcacactcgggcggtgagctgttggagtttcccttggatggttgttcggctggaggagggtttcctgtaaatgaccatcatgtctcaggtcagagcgtcagccctcaaaagaagagacggaaaacggataatggcgatgatggtgaggcatgcaagcgatgcagctgtaagaagtcgaagtgcctgaaactttactgcgagtgtttcgctgctggtgtgtactgctcagaaccttgttcgtgccaaggatgtatgaacaagcccatacacgaggaaaccgtcctctccactcggaagcagatagagtttcgtaacccgctagcgtttgctccgaaagtgatccgcatgtctgatgccggtctggaaacaggggaagatcctaacaacactccggcttcggctcgtcacaagagaggatgcaattgtaagaagtcaagctgtctcaagaaatactgtgaatgctaccagggaggtgttggatgctcgagcaactgcagatgtgagagttgcaaaaatgcttttggcagaagagatgccgagactgaactccctgaagaaatgaaacaagaagaaagtgaccagacagaaaatcctcaacaagaaaaggagaacgatcaacaaaaagcaaatgtacagggcgaggatcacccgctcctggaccttgtcccaataacaccgccttttgatttttgcagttctctgctcaaactgccaaatttctcaagcgcaaaaccgccgagaccgaccaaggctcgcagcgtgacctcccgctcgtctgcttcgaaagccactgcagcagtacagccttgtagatcatccaagcttgctgctagtgctagtgctagtggtatcgatgaggagacgccagatatcctgcacgaacctgactctctcagtaactgtgtcaagactactacttcaccgaacggaaaacgggtctcgccgccacataacgcgctcggcagctccccgaaccgaaaaggtggcaggaagttgatactcaagtcaattcccttgttcccgtcactcacgggagacacaaacagcggctctgcaatgaacagcactgatagcgcattctgcgcgtcacctctcactttaggaccatcttaaagctgtgaagttggtggccatgggaccggagtacgacttgtagtccgaacacgtgtgcctcgtatcctacggcaaggctcgaggtactgtagactgtagtaagttaggctttttaaagttgtagtaatctgtatttgtaaaatatgtagactcaataatctgtatgtaagatgctgcgatgggtgaagctgtttatctttatcaaattgtagcaacattacagatcacctcttgagtaggtttcacagttccaccccctgtctttctttttttttttttggaaaggaatccggtccatgttttccattgcaatctctgttgccagtctgaagccacctcttctagcactgaaccaaaaaaaaagaagtgctcatcagacagttcatgc

SEQ ID NO: 64745 - DNA, 1152 bp, Zea Mays
gtacttctgttggagattgagatgaagatcctaacaacactccggcttcggctcgtcacaagagaggatgcaattgtaagaagtcaagctgtctcaagaaatactgtgaatgctaccagggaggtgttggatgctcgagcaactgcagatgtgagagttgcaaaaatgcttttggcagaagagatgccgagactgaactccctgaagaaatgaaacaagaagaaagtgaccagacagaaaatcctcaacaagaaaaggagaacgatcaacaaaaagcaaatgtacagggcgaggatcacccgctcctggaccttgtcccaataacaccgccttttgatttttgcagttctctgctcaaactgccaaatttctcaagcgcaaaaccgccgagaccgaccaaggctcgcagcgtgacctcccgctcgtctgcttcgaaagccactgcagcagtacagccttgtagatcatccaagcttgctgctagtgctagtgctagtggtatcgatgaggagacgccagatatcctgcacgaacctgactctctcagtaactgtgtcaagactactacttcaccgaacggaaaacgggtctcgccgccacataacgcgctcggcagctccccgaaccgaaaaggtggcaggaagttgatactcaagtcaattcccttgttcccgtcactcacgggagacacaaacagcggctctgcaatgaacagcactgatagcgcattctgcgcgtcacctctcactttaggaccatcttaaagctgtgaagttggtggccatgggaccggagtacgacttgtagtccgaacacgtgtgcctcgtatcctacggcaaggctcgaggtactgtagactgtagtaagttaggctttttaaagttgtagtaatctgtatttgtaaaatatgtagactcaataatctgtatgtaagatgctgcgatgggtgaagctgtttatctttatcaaattgtagcaacattacagatcacctcttgagtaggtttcacagttccaccccctgtctttctttttttttttttggaaaggaatccggtccatgttttccattgcaatctctgttgccagtctgaagccacctcttctagcactgaaccaaaaaaaaagaagtgctcatcagacagttcatgc

SEQ ID NO: 64746 - DNA, 1411 bp, Zea Mays
caggacccaatttcattaaaaacactggtccaaatgtcaaagacatcagaatgctcgaatattttttatgaatcaacagaagtttcaacctattaaaatggcttttttatcccacaataagtgatagtcaatccccacattgggggaacacctttattgaagcatcttatcagctgcttttacaccaatagcttgtacattaaattgtaaaactcaacacaaacaacaaagcaactcaaaaactcacttcgttttgacactgacaccgtccgttccagcaatgatcactgaactcgccatgttcaagaacaacccatggtcaacaactccttccagagctgcaatttcctgtcctgctgccaacgcatccttgattggcgtcttgaagtataaatcgacgatgtagtttgagttgtcagtaacatagggcttgtcgccttcaaaccttagctttgcctcgactccttcctccttaaacagttcctgcaatcttacaaggttgtacttccagcagaactgcacaacttccactggcatggctagaccactacctcctaacccatcaactagttttgtctcgtcaacaataacaataaacttgtccgatgctgcctcaaccatcttctcacgaagaagagcaccaccccgccctttcacaaggttgaggtcaggagcggacctcgtcggcaccgtcgatggcgaggtcgatgagcgggttgtcgtcgagcgtggagagcgggatgccgagcgactgcgcctgctcgaaggtgcgcttggatgtgggcacgccgacgatcttctcgagcttgcccgcggccaggagcgcgccgatctcggcgacggcgaaggcggccgtggagcccgtcccgagcccgagcaccatcccgctcttcacctgctcgacggcgcgcaccgccgccagccgcttgaggtcgtcctgcgtcagcgccgccgccgccgccgccggcgcggactgcgcgcggacggccccgaggcgggcgcggcgggcggaggccacatggcgcgcggcggttgggtggaggcggactgagatcgcggtggcggccatgggagcacgtgtgggtggcgggaggggaggtgctgcagttcggagaggtgaggtcaggagtgtggggagatgagggggaggcgatgggaagttggtggtggaggctagcggcgatggtgatcgtcagaggttgggttggtggtgacttggaaggccaggctttttcttcctataaagtacttgtttgaagctgctactgctggacgcgcagtcgaatcaacaagctgcctgctacccatacaggacgacaagtggagatcaacacaagagacaggacacggcagtggcggtctccggatagggggagggtcagtgcggggccggcgcgccatctgctagcag

SEQ ID NO: 64747 - DNA, 4606 bp, Zea Mays
atagcctgttaagagctactttgggaacaccgaagggaaaattagaatcccttgggaaaacggtgttcccaaagtagccctaaaagaccaaagaaaaaccgggaaaacacccgtcgcccgcccctcatccctccgtcgccgcgccgccgtcccatcgacgccacctgccgctgccgccgtccagcacacctcctccgcctcacgcgttcctgcagaaagcctctcctagaccacggcccaaggcccttcatatccacgcggcacccgagcagcagaaccctagataaaccctctcgggggctaagcaccggcggcggcgatggtgatggtccctcccggcgagtgggtcccccacgtcgaggcctacgtcgacgtctcccgccccgccgtgcagcattctgctagcgtggatgcacttgctgccctggtgaacaaagacaagttgaccctttttgatttggtgtccaagatggatctttatttgacgacaacagaccacattgtcagatcaagaggaatactgcttcttggggaaacattgtctcgaatttcatttaaatatttagatgttattaccattacaacattgtcagacttctttatatcaagattgtcagattggcaagcaatacgaggagcccttgttggttgcctggctttattgcacaggaaacatggtgttggttgtattgtgattgctgatgtcaaaagactagttgagtctttcttacagaatgttccagtgcagtcacttgcagctgctgaccgcaagctgtgctttgaaattctgagctgcatattggatcggtacccggaagctgtaaaacaaatggatggtgaacagctgtatgggatctgtgaagcaattgatgaagaaaaggatccagagtgcttgatgctttcttttcatgtagtggaagttgtcatgaagctgtttccagatccatctggtttggcagcacagtttgcaggggacgtttttgagattctgagcaaggagtgggtaatggtttggacactacacgggaagacctctctagagcattgatgcacgctttttgttcaacccaatattttgagccttttgtcatccctttgcttcttgacaaactttcttcctctcttccattggcaaagattgattccttaaaatatttggacaaatgcattcgcttctatggagctgatagaatggttagacatgcatcagctgtttggtacaagttgaaagaagtgatttttaacctttcttcagatcaattattaatatcagaggctctgaattgtttgaagactgctattatgtatactgattcttctgataaagatcttttcattaatttgatcttgttggatgaggatattgtgaacaagatccactctgtatcaagcgtggaaaagaccatattgagttcattagaggacctggcccaactgcatgcacttggaagtgttatttctatccttgctgaatcgtctacatatttctgtactagagttcttcaagagcactttgcacacttggtagatattgtgggaaccaaagctgactatgaatcctggcagttgaataattgtaatggatcatcttctgctcctgtcaactatggagcactctatttatctgttcaattgctttcatcctgtagagaagtggctttggtatcttatgaagatttttcttctgttaaattagcaaagggttcctggtggcttatcttgcagaaaaagctggagcagttaatccatctccttcgatccatttttgctatagcttctcaatctatgcagccaaatttcagacaagaatatgtctcttgtgctgtgaagggcttgctaacactagcaacattcccggaacaatgctcgcctctgccagcaaatgcttatgaggatattctgcttatgttcacgtcaataattataaataagtttgaaaatttagatctgtggagattgtcattgaaagcattggctagcattggttcatctattgccaagttccatgcttctgaaagggaagtagtttactacagaacggttgttgacaagattgtttctttggctgaatcttatgatacttcaatgcctctcggtctaagacttgaagcaagttatgaagttggaactgctgggttgaactatatgttaagagttgcgaaatcacttgaagtcgctgttgtcaccaatatttctgaatctgaggctaatggaagaatggaatgtgctgaccatgtggcccatttatttgagtgttactctaaccgggtccttccatggttattagcttctggtggtgtcaatgaacttgcattgagctttgcactgcatctattggatgagactgaggatttgactgtgttagatagaatcagctcacagggcctccttgactcactaatgactgggatgaagcttttagttggagtatgtacagaggagcaacaatcacttattgttcagaaagcacatagcacaatatcttcaatgctctcactcccaatggaattgatgacagaccgtcttttgcctgtagatgagttagttcctttacattctgtttcagaaacagctctcatcagcatgttttcgtcgattataataggccttcggcctcaaacacctgtaccagatatgatggtgatgattaaactctttactgtcttcctactaaatgggaaaatgccagctgcttatgcattagcttctattttcaataaatatctacataatccagagttttctcatgagaatcagatggataaaatacttgatgatattcttgagaggtgtttctcaactgtattagccaacagctgctcaaagacatctcaatcttgtgctggcacttcagatgttaatttctcagatgtttcgtctagaaacaagctttctaagattaatatcttgtctagcttggcttggattggcaaaggattacttatgagaggagacgagaaagtgaaggacatttcaatgtttcttcttaagatcctattctcagatgagattttgtctacagttccatcccaccaggaagaaccttatggcggtgattcatcagatacttctcttgcaatatctgcagctagtgcattccatgtgatgatgagtgattcagaaatgtgtctaaataaaaaatttcatgcaagaataaaaccattatacaagcagcgtttcttctcaataatgatgccgatcttcctctccaaaattaaagaaacaactgtggtcacgacaaaattggcactataccgagcttttgggcatatcatttccaatgctccagtaccagcagttataactgaagcacaccagattttactcgtgatggttgatagcttagctaaattaagtatggatgttggggataaggatctggtgtacagtttgttacttgtcttctctggaatgttgatggatgaaaaaggcaaagagtgcattctggacaacatccaaatcacaatcagcgttcttactgaacttgtttcctatcctcacatgatggttgtgcgggagacagcattacaatgtttagtagccttttcgacgtttcctcactcaaagatttatcctgtgcggcgaaaggttgtgcaggcagcagtcagggctctcgacgataagaaacgggctgttcgtcgagtggctgtccgatgccggcacacatggcagtccttcacttaaggggagtctctttcggtggtgtcaggtagtcgggggaggcaagcacaaaaaactggtcttactgggcgatcctgttgggagtcgatgagtgtacatggatctagagctgtcattgtaaggtgagagatactgggagcggggtctgctgacgagtttatgttcgagacctggtctttggatcagctgctgccaagttccagatgttcgaagttctccgaagagccatggggccatggggaggaatgtccctggaaattggccctcagtctgggttgccagctcttgtgcccttttcttttccttgatcctggacattgccttgtgtgtctgatacagatcagaaaactgatgcaggatcgcttgggagttgggaatgtaacctaaagtcccagtattcttggcctcccgatgttggagaattcaagcatgctggcatgcgtgcgtttgtgccaacagtttttagtttgctttcatgtttcaaccaggctctgccgctcagaacgtgtcgagtatactttccagttggccagatcgtgtcaggttgtgcagtacgtagaaatttgtcatcccatacagatttgtggccttcctggactgcgcagtactgctacgctggaaaacgctgcgatagccgtgccccgcggaatccacatctctcggtcgattgtgtaatgcgaagtatgcaacagagttaggtggcatttcttcatgacaattattctcgcctcttgtgtcgaagagtgggtttgaaaaagaaaagaatagagatagatggtgtttggtcgcgctgacctcgacaagcccatagcgcgtgagcagggatggaaacgagccgggctcggtgcctgagggctcgacattggctcgtgagagtcatattctgatacttattgttgtattatttagtaaattaatattatat

SEQ ID NO: 64748 - DNA, 4575 bp, Zea Mays
aaaacggtgttcccaaagtagccctaaaagaccaaagaaaaaccgggaaaacacccgtcgcccgcccctcatccctccgtcgccgcgccgccgtcccatcgacgccacctgccgctgccgccgtccagcacacctcctccgcctcacgcgttcctgcagaaagcctctcctagaccacggcccaaggcccttcatatccacgcggcacccgagcagcagaaccctagataaaccctctcgggggctaagcaccggcggcggcgatggtgatggtccctcccggcgagtgggtcccccacgtcgaggcctacgtcgacgtctcccgccccgccgtgcagcattctgctagcgtggatgcacttgctgccctggtgaacaaagacaagttgaccctttttgatttggtgtccaagatggatctttatttgacgacaacagaccacattgtcagatcaagaggaatactgcttcttggggaaacattgtctcgaatttcatttaaatatttagatgttattaccattacaacattgtcagacttctttatatcaagattgtcagattggcaagcaatacgaggagcccttgttggttgcctggctttattgcacaggaaacatggtgttggttgtattgtgattgctgatgtcaaaagactagttgagtctttcttacagaatgttccagtgcagtcacttgcagctgctgaccgcaagctgtgctttgaaattctgagctgcatattggatcggtacccggaagctgtaaaacaaatggatggtgaacagctgtatgggatctgtgaagcaattgatgaagaaaaggatccagagtgcttgatgctttcttttcatgtagtggaagttgtcatgaagctgtttccagatccatctggtttggcagcacagtttgcaggggacgtttttgagattctgagcaagtattttcctgtctacttcacacacggagtgggtaatggtttggacactacacgggaagacctctctagagcattgatgcacgctttttgttcaacccaatattttgagccttttgtcatccctttgcttcttgacaaactttcttcctctcttccattggcaaagattgattccttaaaatatttggacaaatgcattcgcttctatggagctgatagaatggttagacatgcatcagctgtttggtacaagttgaaagaagtgatttttaacctttcttcagatcaattattaatatcagaggctctgaattgtttgaagactgctattatgtatactgattcttctgataaagatcttttcattaatttgatcttgttggatgaggatattgtgaacaagatccactctgtatcaagcgtggaaaagaccatattgagttcattagaggacctggcccaactgcatgcacttggaagtgttatttctatccttgctgaatcgtctacatatttctgtactagagttcttcaagagcactttgcacacttggtagatattgtgggaaccaaagctgactatgaatcctggcagttgaataattgtaatggatcatcttctgctcctgtcaactatggagcactctatttatctgttcaattgctttcatcctgtagagaagtggctttggtatcttatgaagatttttcttctgttaaattagcaaagggttcctggtggcttatcttgcagaaaaagctggagcagttaatccatctccttcgatccatttttgctatagcttctcaatctatgcagccaaatttcagacaagaatatgtctcttgtgctgtgaagggcttgctaacactagcaacattcccggaacaatgctcgcctctgccagcaaatgcttatgaggatattctgcttatgttcacgtcaataattataaataagtttgaaaatttagatctgtggagattgtcattgaaagcattggctagcattggttcatctattgccaagttccatgcttctgaaagggaagtagtttactacagaacggttgttgacaagattgtttctttggctgaatcttatgatacttcaatgcctctcggtctaagacttgaagcaagttatgaagttggaactgctgggttgaactatatgttaagagttgcgaaatcacttgaagtcgctgttgtcaccaatatttctgaatctgaggctaatggaagaatggaatgtgctgaccatgtggcccatttatttgagtgttactctaaccgggtccttccatggttattagcttctggtggtgtcaatgaacttgcattgagctttgcactgcatctattggatgagactgaggatttgactgtgttagatagaatcagctcacagggcctccttgactcactaatgactgggatgaagcttttagttggagtatgtacagaggagcaacaatcacttattgttcagaaagcacatagcacaatatcttcaatgctctcactcccaatggaattgatgacagaccgtcttttgcctgtagatgagttagttcctttacattctgtttcagaaacagctctcatcagcatgttttcgtcgattataataggccttcggcctcaaacacctgtaccagatatgatggtgatgattaaactctttactgtcttcctactaaatgggaaaatgccagctgcttatgcattagcttctattttcaataaatatctacataatccagagttttctcatgagaatcagatggataaaatacttgatgatattcttgagaggtgtttctcaactgtattagccaacagctgctcaaagacatctcaatcttgtgctggcacttcagatgttaatttctcagatgtttcgtctagaaacaagctttctaagattaatatcttgtctagcttggcttggattggcaaaggattacttatgagaggagacgagaaagtgaaggacatttcaatgtttcttcttaagatcctattctcagatgagattttgtctacagttccatcccaccaggaagaaccttatggcggtgattcatcagatacttctcttgcaatatctgcagctagtgcattccatgtgatgatgagtgattcagaaatgtgtctaaataaaaaatttcatgcaagaataaaaccattatacaagcagcgtttcttctcaataatgatgccgatcttcctctccaaaattaaagaaacaactgtggtcacgacaaaattggcactataccgagcttttgggcatatcatttccaatgctccagtaccagcagttataactgaagcacaccagattttactcgtgatggttgatagcttagctaaattaagtatggatgttggggataaggatctggtgtacagtttgttacttgtcttctctggaatgttgatggatgaaaaaggcaaagagtgcattctggacaacatccaaatcacaatcagcgttcttactgaacttgtttcctatcctcacatgatggttgtgcgggagacagcattacaatgtttagtagccttttcgacgtttcctcactcaaagatttatcctgtgcggcgaaaggttgtgcaggcagcagtcagggctctcgacgataagaaacgggctgttcgtcgagtggctgtccgatgccggcacacatggcagtccttcacttaaggggagtctctttcggtggtgtcaggtagtcgggggaggcaagcacaaaaaactggtcttactgggcgatcctgttgggagtcgatgagtgtacatggatctagagctgtcattgtaaggtgagagatactgggagcggggtctgctgacgagtttatgttcgagacctggtctttggatcagctgctgccaagttccagatgttcgaagttctccgaagagccatggggccatggggaggaatgtccctggaaattggccctcagtctgggttgccagctcttgtgcccttttcttttccttgatcctggacattgccttgtgtgtctgatacagatcagaaaactgatgcaggatcgcttgggagttgggaatgtaacctaaagtcccagtattcttggcctcccgatgttggagaattcaagcatgctggcatgcgtgcgtttgtgccaacagtttttagtttgctttcatgtttcaaccaggctctgccgctcagaacgtgtcgagtatactttccagttggccagatcgtgtcaggttgtgcagtacgtagaaatttgtcatcccatacagatttgtggccttcctggactgcgcagtactgctacgctggaaaacgctgcgatagccgtgccccgcggaatccacatctctcggtcgattgtgtaatgcgaagtatgcaacagagttaggtggcatttcttcatgacaattattctcgcctcttgtgtcgaagagtgggtttgaaaaagaaaagaatagagatagatggtgtttggtcgcgctgacctcgacaagcccatagcgcgtgagcagggatggaaacgagccgggctcggtgcctgagggctcgacattggctcgtgagagtcatattctgatacttattgttgtattatttagtaaattaatattatat

SEQ ID NO: 64749 - DNA, 3202 bp, Zea Mays
acggtgttcccaaagtagccctaaaagaccaaagaaaaaccgggaaaacacccgtcgcccgcccctcatccctccgtcgccgcgccgccgtcccatcgacgccacctgccgctgccgccgtccagcacacctcctccgcctcacgcgttcctgcagaaagcctctcctagaccacggcccaaggcccttcatatccacgcggcacccgagcagcagaaccctagataaaccctctcgggggctaagcaccggcggcggcgatggtgatggtccctcccggcgagtgggtcccccacgtcgaggcctacgtcgacgtctcccgccccgccgtgcagcattctgctagcgtggatgcacttgctgccctggtgaacaaagacaagttgaccctttttgatttggtgtccaagatggatctttatttgacgacaacagaccacattgtcagatcaagaggaatactgcttcttggggaaacattgtctcgaatttcatttaaatatttagatgttattaccattacaacattgtcagacttctttatatcaagattgactgacatgtttatatttatatctggtattaagttagtaaatgttagaagggcaggtctgtcagattggcaagcaatacgaggagcccttgttggttgcctggctttattgcacaggaaacatggtgttggttgtattgtgattgctgatgtcaaaagactagttgagtctttcttacagaatgttccagtgcagtcacttgcagctgctgaccgcaagctgtgctttgaaattctgagctgcatattggatcggtacccggaagctgtaaaacaaatggatggtgaacagctgtatgggatctgtgaagcaattgatgaagaaaaggatccagagtgcttgatgctttcttttcatgtagtggaagttgtcatgaagctgtttccagatccatctggtttggcagcacagtttgcaggggacgtttttgagattctgagcaagtattttcctgtctacttcacacacggagtgggtaatggtttggacactacacgggaagacctctctagagcattgatgcacgctttttgttcaacccaatattttgagccttttgtcatccctttgcttcttgacaaactttcttcctctcttccattggcaaagatcaattattaatatcagaggctctgaattgtttgaagactgctattatgtatactgattcttctgataaagatcttttcattaatttgatcttgttggatgaggatattgtgaacaagatccactctgtatcaagcgtggaaaagaccatattgagttcattagaggacctggcccaactgcatgcacttggaagtgttatttctatccttgctgaatcgtctacatatttctgtactagagttcttcaagagcactttgcacacttggtagatattgtgggaaccaaagctgactatgaatcctggcagttgaataattgtaatggatcatcttctgctcctgtcaactatggagcactctatttatctgttcaattgctttcatcctgtagagaagtggctttggtatcttatgaagatttttcttctgttaaattagcaaagggttcctggtggcttatcttgcagaaaaagctggagcagttaatccatctccttcgatccatttttgctatagcttctcaatctatgcagccaaatttcagacaagaatatgtctcttgtgctgtgaagggcttgctaacactagcaacattcccggaacaatgctcgcctctgccagcaaatgcttatgaggatattctgcttatgttcacgtcaataattataaataagtttgaaaatttagatctgtggagattgtcattgaaagcattggctagcattggttcatctattgccaagttccatgcttctgaaagggaagtagtttactacagaacggttgttgacaagattgtttctttggctgaatcttatgatacttcaatgcctctcggtctaagacttgaagcaagttatgaagttggaactgctgggttgaactatatgttaagagttgcgaaatcacttgaagtcgctgttgtcaccaatatttctgaatctgaggctaatggaagaatggaatgtgctgaccatgtggcccatttatttgagtgttactctaaccgggtccttccatggttattagcttctggtggtgtcaatgaacttgcattgagctttgcactgcatctattggatgagactgaggatttgactgtgttagatagaatcagctcacagggcctccttgactcactaatgactgggatgaagcttttagttggagtatgtacagaggagcaacaatcacttattgttcagaaagcacatagcacaatatcttcaatgctctcactcccaatggaattgatgacagaccgtcttttgcctgtagatgagttagttcctttacattctgtttcagaaacagctctcatcagcatgttttcgtcgattataataggccttcggcctcaaacacctgtaccagatatgatggtgatgattaaactctttactgtcttcctactaaatgggaaaatgccagctgcttatgcattagcttctattttcaataaatatctacataatccagagttttctcatgagaatcagatggataaaatacttgatgatattcttgagaggtgtttctcaactgtattagccaacagctgctcaaagacatctcaatcttgtgctggcacttcagatgttaatttctcagatgtttcgtctagaaacaagctttctaagattaatatcttgtctagcttggcttggattggcaaaggattacttatgagaggagacgagaaagtgaaggacatttcaatgtttcttcttaagatcctattctcagatgagattttgtctacagttccatcccaccaggaagaaccttatggcggtgattcatcagatacttctcttgcaatatctgcagctagtgcattccatgtgatgatgagtgattcagaaatgtgtctaaataaaaaatttcatgcaagaataaaaccattatacaagcagcgtttcttctcaataatgatgccgatcttcctctccaaaattaaagaaacaactgtggtcacgacaaatcacacaattctcacaagttattctgctccagtgcatcattgctgttccccg

SEQ ID NO: 64750 - DNA, 4541 bp, Zea Mays
cccaaagtagccctaaaagaccaaagaaaaaccgggaaaacacccgtcgcccgcccctcatccctccgtcgccgcgccgccgtcccatcgacgccacctgccgctgccgccgtccagcacacctcctccgcctcacgcgttcctgcagaaagcctctcctagaccacggcccaaggcccttcatatccacgcggcacccgagcagcagaaccctagataaaccctctcgggggctaagcaccggcggcggcgatggtgatggtccctcccggcgagtgggtcccccacgtcgaggcctacgtcgacgtctcccgccccgccgtgcagcattctgctagcgtggatgcacttgctgccctggtgaacaaagacaagttgaccctttttgatttggtgtccaagatggatctttatttgacgacaacagaccacattgtcagatcaagaggaatactgcttcttggggaaacattgtctcgaatttcatttaaatatttagatgttattaccattacaacattgtcagacttctttatatcaagattgtcagattggcaagcaatacgaggagcccttgttggttgcctggctttattgcacaggaaacatggtgttggttgtattgtgattgctgatgtcaaaagactagttgagtctttcttacagaatgttccagtgcagtcacttgcagctgctgaccgcaaggttgatttgattattcagtgcaaagatggttagataggatggtgaacagctgtatgggatctgtgaagcaattgatgaagaaaaggatccagagtgcttgatgctttcttttcatgtagtggaagttgtcatgaagctgtttccagatccatctggtttggcagcacagtttgcaggggacgtttttgagattctgagcaagtattttcctgtctacttcacacacggagtgggtaatggtttggacactacacgggaagacctctctagagcattgatgcacgctttttgttcaacccaatattttgagccttttgtcatccctttgcttcttgacaaactttcttcctctcttccattggcaaagattgattccttaaaatatttggacaaatgcattcgcttctatggagctgatagaatggttagacatgcatcagctgtttggtacaagttgaaagaagtgatttttaacctttcttcagatcaattattaatatcagaggctctgaattgtttgaagactgctattatgtatactgattcttctgataaagatcttttcattaatttgatcttgttggatgaggatattgtgaacaagatccactctgtatcaagcgtggaaaagaccatattgagttcattagaggacctggcccaactgcatgcacttggaagtgttatttctatccttgctgaatcgtctacatatttctgtactagagttcttcaagagcactttgcacacttggtagatattgtgggaaccaaagctgactatgaatcctggcagttgaataattgtaatggatcatcttctgctcctgtcaactatggagcactctatttatctgttcaattgctttcatcctgtagagaagtggctttggtatcttatgaagatttttcttctgttaaattagcaaagggttcctggtggcttatcttgcagaaaaagctggagcagttaatccatctccttcgatccatttttgctatagcttctcaatctatgcagccaaatttcagacaagaatatgtctcttgtgctgtgaagggcttgctaacactagcaacattcccggaacaatgctcgcctctgccagcaaatgcttatgaggatattctgcttatgttcacgtcaataattataaataagtttgaaaatttagatctgtggagattgtcattgaaagcattggctagcattggttcatctattgccaagttccatgcttctgaaagggaagtagtttactacagaacggttgttgacaagattgtttctttggctgaatcttatgatacttcaatgcctctcggtctaagacttgaagcaagttatgaagttggaactgctgggttgaactatatgttaagagttgcgaaatcacttgaagtcgctgttgtcaccaatatttctgaatctgaggctaatggaagaatggaatgtgctgaccatgtggcccatttatttgagtgttactctaaccgggtccttccatggttattagcttctggtggtgtcaatgaacttgcattgagctttgcactgcatctattggatgagactgaggatttgactgtgttagatagaatcagctcacagggcctccttgactcactaatgactgggatgaagcttttagttggagtatgtacagaggagcaacaatcacttattgttcagaaagcacatagcacaatatcttcaatgctctcactcccaatggaattgatgacagaccgtcttttgcctgtagatgagttagttcctttacattctgtttcagaaacagctctcatcagcatgttttcgtcgattataataggccttcggcctcaaacacctgtaccagatatgatggtgatgattaaactctttactgtcttcctactaaatgggaaaatgccagctgcttatgcattagcttctattttcaataaatatctacataatccagagttttctcatgagaatcagatggataaaatacttgatgatattcttgagaggtgtttctcaactgtattagccaacagctgctcaaagacatctcaatcttgtgctggcacttcagatgttaatttctcagatgtttcgtctagaaacaagctttctaagattaatatcttgtctagcttggcttggattggcaaaggattacttatgagaggagacgagaaagtgaaggacatttcaatgtttcttcttaagatcctattctcagatgagattttgtctacagttccatcccaccaggaagaaccttatggcggtgattcatcagatacttctcttgcaatatctgcagctagtgcattccatgtgatgatgagtgattcagaaatgtgtctaaataaaaaatttcatgcaagaataaaaccattatacaagcagcgtttcttctcaataatgatgccgatcttcctctccaaaattaaagaaacaactgtggtcacgacaaaattggcactataccgagcttttgggcatatcatttccaatgctccagtaccagcagttataactgaagcacaccagattttactcgtgatggttgatagcttagctaaattaagtatggatgttggggataaggatctggtgtacagtttgttacttgtcttctctggaatgttgatggatgaaaaaggcaaagagtgcattctggacaacatccaaatcacaatcagcgttcttactgaacttgtttcctatcctcacatgatggttgtgcgggagacagcattacaatgtttagtagccttttcgacgtttcctcactcaaagatttatcctgtgcggcgaaaggttgtgcaggcagcagtcagggctctcgacgataagaaacgggctgttcgtcgagtggctgtccgatgccggcacacatggcagtccttcacttaaggggagtctctttcggtggtgtcaggtagtcgggggaggcaagcacaaaaaactggtcttactgggcgatcctgttgggagtcgatgagtgtacatggatctagagctgtcattgtaaggtgagagatactgggagcggggtctgctgacgagtttatgttcgagacctggtctttggatcagctgctgccaagttccagatgttcgaagttctccgaagagccatggggccatggggaggaatgtccctggaaattggccctcagtctgggttgccagctcttgtgcccttttcttttccttgatcctggacattgccttgtgtgtctgatacagatcagaaaactgatgcaggatcgcttgggagttgggaatgtaacctaaagtcccagtattcttggcctcccgatgttggagaattcaagcatgctggcatgcgtgcgtttgtgccaacagtttttagtttgctttcatgtttcaaccaggctctgccgctcagaacgtgtcgagtatactttccagttggccagatcgtgtcaggttgtgcagtacgtagaaatttgtcatcccatacagatttgtggccttcctggactgcgcagtactgctacgctggaaaacgctgcgatagccgtgccccgcggaatccacatctctcggtcgattgtgtaatgcgaagtatgcaacagagttaggtggcatttcttcatgacaattattctcgcctcttgtgtcgaagagtgggtttgaaaaagaaaagaatagagatagatggtgtttggtcgcgctgacctcgacaagcccatagcgcgtgagcagggatggaaacgagccgggctcggtgcctgagggctcgacattggctcgtgagagtcatattctgatacttattgttgtattatttagtaaattaatattatat

SEQ ID NO: 64751 - DNA, 4452 bp, Zea Mays
aaaagaccaaagaaaaaccgggaaaacacccgtcgcccgcccctcatccctccgtcgccgcgccgccgtcccatcgacgccacctgccgctgccgccgtccagcacacctcctccgcctcacgcgttcctgcagaaagcctctcctagaccacggcccaaggcccttcatatccacgcggcacccgagcagcagaaccctagataaaccctctcgggggctaagcaccggcggcggcgatggtgatggtccctcccggcgagtgggtcccccacgtcgaggcctacgtcgacgtctcccgccccgccgtgcagcattctgctagcgtggatgcacttgctgccctggtgaacaaagacaagttgaccctttttgatttggtgtccaagatggatctttatttgacgacaacagaccacattgtcagatcaagagtcagattggcaagcaatacgaggagcccttgttggttgcctggctttattgcacaggaaacatggtgttggttgtattgtgattgctgatgtcaaaagactagttgagtctttcttacagaatgttccagtgcagtcacttgcagctgctgaccgcaagctgtgctttgaaattctgagctgcatattggatcggtacccggaagctgtaaaacaaatggatggtgaacagctgtatgggatctgtgaagcaattgatgaagaaaaggatccagagtgcttgatgctttcttttcatgtagtggaagttgtcatgaagctgtttccagatccatctggtttggcagcacagtttgcaggggacgtttttgagattctgagcaagtattttcctgtctacttcacacacggagtgggtaatggtttggacactacacgggaagacctctctagagcattgatgcacgctttttgttcaacccaatattttgagccttttgtcatccctttgcttcttgacaaactttcttcctctcttccattggcaaagattgattccttaaaatatttggacaaatgcattcgcttctatggagctgatagaatggttagacatgcatcagctgtttggtacaagttgaaagaagtgatttttaacctttcttcagatcaattattaatatcagaggctctgaattgtttgaagactgctattatgtatactgattcttctgataaagatcttttcattaatttgatcttgttggatgaggatattgtgaacaagatccactctgtatcaagcgtggaaaagaccatattgagttcattagaggacctggcccaactgcatgcacttggaagtgttatttctatccttgctgaatcgtctacatatttctgtactagagttcttcaagagcactttgcacacttggtagatattgtgggaaccaaagctgactatgaatcctggcagttgaataattgtaatggatcatcttctgctcctgtcaactatggagcactctatttatctgttcaattgctttcatcctgtagagaagtggctttggtatcttatgaagatttttcttctgttaaattagcaaagggttcctggtggcttatcttgcagaaaaagctggagcagttaatccatctccttcgatccatttttgctatagcttctcaatctatgcagccaaatttcagacaagaatatgtctcttgtgctgtgaagggcttgctaacactagcaacattcccggaacaatgctcgcctctgccagcaaatgcttatgaggatattctgcttatgttcacgtcaataattataaataagtttgaaaatttagatctgtggagattgtcattgaaagcattggctagcattggttcatctattgccaagttccatgcttctgaaagggaagtagtttactacagaacggttgttgacaagattgtttctttggctgaatcttatgatacttcaatgcctctcggtctaagacttgaagcaagttatgaagttggaactgctgggttgaactatatgttaagagttgcgaaatcacttgaagtcgctgttgtcaccaatatttctgaatctgaggctaatggaagaatggaatgtgctgaccatgtggcccatttatttgagtgttactctaaccgggtccttccatggttattagcttctggtggtgtcaatgaacttgcattgagctttgcactgcatctattggatgagactgaggatttgactgtgttagatagaatcagctcacagggcctccttgactcactaatgactgggatgaagcttttagttggagtatgtacagaggagcaacaatcacttattgttcagaaagcacatagcacaatatcttcaatgctctcactcccaatggaattgatgacagaccgtcttttgcctgtagatgagttagttcctttacattctgtttcagaaacagctctcatcagcatgttttcgtcgattataataggccttcggcctcaaacacctgtaccagatatgatggtgatgattaaactctttactgtcttcctactaaatgggaaaatgccagctgcttatgcattagcttctattttcaataaatatctacataatccagagttttctcatgagaatcagatggataaaatacttgatgatattcttgagaggtgtttctcaactgtattagccaacagctgctcaaagacatctcaatcttgtgctggcacttcagatgttaatttctcagatgtttcgtctagaaacaagctttctaagattaatatcttgtctagcttggcttggattggcaaaggattacttatgagaggagacgagaaagtgaaggacatttcaatgtttcttcttaagatcctattctcagatgagattttgtctacagttccatcccaccaggaagaaccttatggcggtgattcatcagatacttctcttgcaatatctgcagctagtgcattccatgtgatgatgagtgattcagaaatgtgtctaaataaaaaatttcatgcaagaataaaaccattatacaagcagcgtttcttctcaataatgatgccgatcttcctctccaaaattaaagaaacaactgtggtcacgacaaaattggcactataccgagcttttgggcatatcatttccaatgctccagtaccagcagttataactgaagcacaccagattttactcgtgatggttgatagcttagctaaattaagtatggatgttggggataaggatctggtgtacagtttgttacttgtcttctctggaatgttgatggatgaaaaaggcaaagagtgcattctggacaacatccaaatcacaatcagcgttcttactgaacttgtttcctatcctcacatgatggttgtgcgggagacagcattacaatgtttagtagccttttcgacgtttcctcactcaaagatttatcctgtgcggcgaaaggttgtgcaggcagcagtcagggctctcgacgataagaaacgggctgttcgtcgagtggctgtccgatgccggcacacatggcagtccttcacttaaggggagtctctttcggtggtgtcaggtagtcgggggaggcaagcacaaaaaactggtcttactgggcgatcctgttgggagtcgatgagtgtacatggatctagagctgtcattgtaaggtgagagatactgggagcggggtctgctgacgagtttatgttcgagacctggtctttggatcagctgctgccaagttccagatgttcgaagttctccgaagagccatggggccatggggaggaatgtccctggaaattggccctcagtctgggttgccagctcttgtgcccttttcttttccttgatcctggacattgccttgtgtgtctgatacagatcagaaaactgatgcaggatcgcttgggagttgggaatgtaacctaaagtcccagtattcttggcctcccgatgttggagaattcaagcatgctggcatgcgtgcgtttgtgccaacagtttttagtttgctttcatgtttcaaccaggctctgccgctcagaacgtgtcgagtatactttccagttggccagatcgtgtcaggttgtgcagtacgtagaaatttgtcatcccatacagatttgtggccttcctggactgcgcagtactgctacgctggaaaacgctgcgatagccgtgccccgcggaatccacatctctcggtcgattgtgtaatgcgaagtatgcaacagagttaggtggcatttcttcatgacaattattctcgcctcttgtgtcgaagagtgggtttgaaaaagaaaagaatagagatagatggtgtttggtcgcgctgacctcgacaagcccatagcgcgtgagcagggatggaaacgagccgggctcggtgcctgagggctcgacattggctcgtgagagtcatattctgatacttattgttgtattatttagtaaattaatattatat

SEQ ID NO: 64752 - DNA, 4537 bp, Zea Mays
cgggaaaacacccgtcgcccgcccctcatccctccgtcgccgcgccgccgtcccatcgacgccacctgccgctgccgccgtccagcacacctcctccgcctcacgcgttcctgcagaaagcctctcctagaccacggcccaaggcccttcatatccacgcggcacccgagcagcagaaccctagataaaccctctcgggggctaagcaccggcggcggcgatggtgatggtccctcccggcgagtgggtcccccacgtcgaggcctacgtcgacgtctcccgccccgccgtgcagcattctgctagcgtggatgcacttgctgccctggtgaacaaagacaagttgaccctttttgatttggtgtccaagatggatctttatttgacgacaacagaccacattgtcagatcaagaggaatactgcttcttggggaaacattgtctcgaatttcatttaaatatttagatgttattaccattacaacattgtcagacttctttatatcaagattgtcagattggcaagcaatacgaggagcccttgttggttgcctggctttattgcacaggaaacatggtgttggttgtattgtgattgctgatgtcaaaagactagttgagtctttcttacagaatgttccagtgcagtcacttgcagctgctgaccgcaagctgtgctttgaaattctgagctgcatattggatcggtacccggaagctgtaaaacaaatggtgtggatggtgaacagctgtatgggatctgtgaagcaattgatgaagaaaaggatccagagtgcttgatgctttcttttcatgtagtggaagttgtcatgaagctgtttccagatccatctggtttggcagcacagtttgcaggggacgtttttgagattctgagcaagtattttcctgtctacttcacacacggagtgggtaatggtttggacactacacgggaagacctctctagagcattgatgcacgctttttgttcaacccaatattttgagccttttgtcatccctttgcttcttgacaaactttcttcctctcttccattggcaaagattgattccttaaaatatttggacaaatgcattcgcttctatggagctgatagaatggttagacatgcatcagctgtttggtacaagttgaaagaagtgatttttaacctttcttcagatcaattattaatatcagaggctctgaattgtttgaagactgctattatgtatactgattcttctgataaagatcttttcattaatttgatcttgttggatgaggatattgtgaacaagatccactctgtatcaagcgtggaaaagaccatattgagttcattagaggacctggcccaactgcatgcacttggaagtgttatttctatccttgctgaatcgtctacatatttctgtactagagttcttcaagagcactttgcacacttggtagatattgtgggaaccaaagctgactatgaatcctggcagttgaataattgtaatggatcatcttctgctcctgtcaactatggagcactctatttatctgttcaattgctttcatcctgtagagaagtggctttggtatcttatgaagatttttcttctgttaaattagcaaagggttcctggtggcttatcttgcagaaaaagctggagcagttaatccatctccttcgatccatttttgctatagcttctcaatctatgcagccaaatttcagacaagaatatgtctcttgtgctgtgaagggcttgctaacactagcaacattcccggaacaatgctcgcctctgccagcaaatgcttatgaggatattctgcttatgttcacgtcaataattataaataagtttgaaaatttagatctgtggagattgtcattgaaagcattggctagcattggttcatctattgccaagttccatgcttctgaaagggaagtagtttactacagaacggttgttgacaagattgtttctttggctgaatcttatgatacttcaatgcctctcggtctaagacttgaagcaagttatgaagttggaactgctgggttgaactatatgttaagagttgcgaaatcacttgaagtcgctgttgtcaccaatatttctgaatctgaggctaatggaagaatggaatgtgctgaccatgtggcccatttatttgagtgttactctaaccgggtccttccatggttattagcttctggtggtgtcaatgaacttgcattgagctttgcactgcatctattggatgagactgaggatttgactgtgttagatagaatcagctcacagggcctccttgactcactaatgactgggatgaagcttttagttggagtatgtacagaggagcaacaatcacttattgttcagaaagcacatagcacaatatcttcaatgctctcactcccaatggaattgatgacagaccgtcttttgcctgtagatgagttagttcctttacattctgtttcagaaacagctctcatcagcatgttttcgtcgattataataggccttcggcctcaaacacctgtaccagatatgatggtgatgattaaactctttactgtcttcctactaaatgggaaaatgccagctgcttatgcattagcttctattttcaataaatatctacataatccagagttttctcatgagaatcagatggataaaatacttgatgatattcttgagaggtgtttctcaactgtattagccaacagctgctcaaagacatctcaatcttgtgctggcacttcagatgttaatttctcagatgtttcgtctagaaacaagctttctaagattaatatcttgtctagcttggcttggattggcaaaggattacttatgagaggagacgagaaagtgaaggacatttcaatgtttcttcttaagatcctattctcagatgagattttgtctacagttccatcccaccaggaagaaccttatggcggtgattcatcagatacttctcttgcaatatctgcagctagtgcattccatgtgatgatgagtgattcagaaatgtgtctaaataaaaaatttcatgcaagaataaaaccattatacaagcagcgtttcttctcaataatgatgccgatcttcctctccaaaattaaagaaacaactgtggtcacgacaaaattggcactataccgagcttttgggcatatcatttccaatgctccagtaccagcagttataactgaagcacaccagattttactcgtgatggttgatagcttagctaaattaagtatggatgttggggataaggatctggtgtacagtttgttacttgtcttctctggaatgttgatggatgaaaaaggcaaagagtgcattctggacaacatccaaatcacaatcagcgttcttactgaacttgtttcctatcctcacatgatggttgtgcgggagacagcattacaatgtttagtagccttttcgacgtttcctcactcaaagatttatcctgtgcggcgaaaggttgtgcaggcagcagtcagggctctcgacgataagaaacgggctgttcgtcgagtggctgtccgatgccggcacacatggcagtccttcacttaaggggagtctctttcggtggtgtcaggtagtcgggggaggcaagcacaaaaaactggtcttactgggcgatcctgttgggagtcgatgagtgtacatggatctagagctgtcattgtaaggtgagagatactgggagcggggtctgctgacgagtttatgttcgagacctggtctttggatcagctgctgccaagttccagatgttcgaagttctccgaagagccatggggccatggggaggaatgtccctggaaattggccctcagtctgggttgccagctcttgtgcccttttcttttccttgatcctggacattgccttgtgtgtctgatacagatcagaaaactgatgcaggatcgcttgggagttgggaatgtaacctaaagtcccagtattcttggcctcccgatgttggagaattcaagcatgctggcatgcgtgcgtttgtgccaacagtttttagtttgctttcatgtttcaaccaggctctgccgctcagaacgtgtcgagtatactttccagttggccagatcgtgtcaggttgtgcagtacgtagaaatttgtcatcccatacagatttgtggccttcctggactgcgcagtactgctacgctggaaaacgctgcgatagccgtgccccgcggaatccacatctctcggtcgattgtgtaatgcgaagtatgcaacagagttaggtggcatttcttcatgacaattattctcgcctcttgtgtcgaagagtgggtttgaaaaagaaaagaatagagatagatggtgtttggtcgcgctgacctcgacaagcccatagcgcgtgagcagggatggaaacgagccgggctcggtgcctgagggctcgacattggctcgtgagagtcatattctgatacttattgttgtattatttagtaaattaatattatat

SEQ ID NO: 64753 - DNA, 4507 bp, Zea Mays
cccctcatccctccgtcgccgcgccgccgtcccatcgacgccacctgccgctgccgccgtccagcacacctcctccgcctcacgcgttcctgcagaaagcctctcctagaccacggcccaaggcccttcatatccacgcggcacccgagcagcagaaccctagataaaccctctcgggggctaagcaccggcggcggcgatggtgatggtccctcccggcgagtgggtcccccacgtcgaggcctacgtcgacgtctcccgccccgccgtgcagcattctgctagcgtggatgcacttgctgccctggtgaacaaagacaagttgaccctttttgatttggtgtccaagatggatctttatttgacgacaacagaccacattgtcagatcaagaggaatactgcttcttggggaaacattgtctcgaatttcatttaaatatttagatgttattaccattacaacattgtcagacttctttatatcaagattgattggcaagcaatacgaggagcccttgttggttgcctggctttattgcacaggaaacatggtgttggttgtattgtgattgctgatgtcaaaagactagttgagtctttcttacagaatgttccagtgcagtcacttgcagctgctgaccgcaagctgtgctttgaaattctgagctgcatattggatcggtacccggaagctgtaaaacaaatggatggtgaacagctgtatgggatctgtgaagcaattgatgaagaaaaggatccagagtgcttgatgctttcttttcatgtagtggaagttgtcatgaagctgtttccagatccatctggtttggcagcacagtttgcaggggacgtttttgagattctgagcaagtattttcctgtctacttcacacacggagtgggtaatggtttggacactacacgggaagacctctctagagcattgatgcacgctttttgttcaacccaatattttgagccttttgtcatccctttgcttcttgacaaactttcttcctctcttccattggcaaagattgattccttaaaatatttggacaaatgcattcgcttctatggagctgatagaatggttagacatgcatcagctgtttggtacaagttgaaagaagtgatttttaacctttcttcagatcaattattaatatcagaggctctgaattgtttgaagactgctattatgtatactgattcttctgataaagatcttttcattaatttgatcttgttggatgaggatattgtgaacaagatccactctgtatcaagcgtggaaaagaccatattgagttcattagaggacctggcccaactgcatgcacttggaagtgttatttctatccttgctgaatcgtctacatatttctgtactagagttcttcaagagcactttgcacacttggtagatattgtgggaaccaaagctgactatgaatcctggcagttgaataattgtaatggatcatcttctgctcctgtcaactatggagcactctatttatctgttcaattgctttcatcctgtagagaagtggctttggtatcttatgaagatttttcttctgttaaattagcaaagggttcctggtggcttatcttgcagaaaaagctggagcagttaatccatctccttcgatccatttttgctatagcttctcaatctatgcagccaaatttcagacaagaatatgtctcttgtgctgtgaagggcttgctaacactagcaacattcccggaacaatgctcgcctctgccagcaaatgcttatgaggatattctgcttatgttcacgtcaataattataaataagtttgaaaatttagatctgtggagattgtcattgaaagcattggctagcattggttcatctattgccaagttccatgcttctgaaagggaagtagtttactacagaacggttgttgacaagattgtttctttggctgaatcttatgatacttcaatgcctctcggtctaagacttgaagcaagttatgaagttggaactgctgggttgaactatatgttaagagttgcgaaatcacttgaagtcgctgttgtcaccaatatttctgaatctgaggctaatggaagaatggaatgtgctgaccatgtggcccatttatttgagtgttactctaaccgggtccttccatggttattagcttctggtggtgtcaatgaacttgcattgagctttgcactgcatctattggatgagactgaggatttgactgtgttagatagaatcagctcacagggcctccttgactcactaatgactgggatgaagcttttagttggagtatgtacagaggagcaacaatcacttattgttcagaaagcacatagcacaatatcttcaatgctctcactcccaatggaattgatgacagaccgtcttttgcctgtagatgagttagttcctttacattctgtttcagaaacagctctcatcagcatgttttcgtcgattataataggccttcggcctcaaacacctgtaccagatatgatggtgatgattaaactctttactgtcttcctactaaatgggaaaatgccagctgcttatgcattagcttctattttcaataaatatctacataatccagagttttctcatgagaatcagatggataaaatacttgatgatattcttgagaggtgtttctcaactgtattagccaacagctgctcaaagacatctcaatcttgtgctggcacttcagatgttaatttctcagatgtttcgtctagaaacaagctttctaagattaatatcttgtctagcttggcttggattggcaaaggattacttatgagaggagacgagaaagtgaaggacatttcaatgtttcttcttaagatcctattctcagatgagattttgtctacagttccatcccaccaggaagaaccttatggcggtgattcatcagatacttctcttgcaatatctgcagctagtgcattccatgtgatgatgagtgattcagaaatgtgtctaaataaaaaatttcatgcaagaataaaaccattatacaagcagcgtttcttctcaataatgatgccgatcttcctctccaaaattaaagaaacaactgtggtcacgacaaaattggcactataccgagcttttgggcatatcatttccaatgctccagtaccagcagttataactgaagcacaccagattttactcgtgatggttgatagcttagctaaattaagtatggatgttggggataaggatctggtgtacagtttgttacttgtcttctctggaatgttgatggatgaaaaaggcaaagagtgcattctggacaacatccaaatcacaatcagcgttcttactgaacttgtttcctatcctcacatgatggttgtgcgggagacagcattacaatgtttagtagccttttcgacgtttcctcactcaaagatttatcctgtgcggcgaaaggttgtgcaggcagcagtcagggctctcgacgataagaaacgggctgttcgtcgagtggctgtccgatgccggcacacatggcagtccttcacttaaggggagtctctttcggtggtgtcaggtagtcgggggaggcaagcacaaaaaactggtcttactgggcgatcctgttgggagtcgatgagtgtacatggatctagagctgtcattgtaaggtgagagatactgggagcggggtctgctgacgagtttatgttcgagacctggtctttggatcagctgctgccaagttccagatgttcgaagttctccgaagagccatggggccatggggaggaatgtccctggaaattggccctcagtctgggttgccagctcttgtgcccttttcttttccttgatcctggacattgccttgtgtgtctgatacagatcagaaaactgatgcaggatcgcttgggagttgggaatgtaacctaaagtcccagtattcttggcctcccgatgttggagaattcaagcatgctggcatgcgtgcgtttgtgccaacagtttttagtttgctttcatgtttcaaccaggctctgccgctcagaacgtgtcgagtatactttccagttggccagatcgtgtcaggttgtgcagtacgtagaaatttgtcatcccatacagatttgtggccttcctggactgcgcagtactgctacgctggaaaacgctgcgatagccgtgccccgcggaatccacatctctcggtcgattgtgtaatgcgaagtatgcaacagagttaggtggcatttcttcatgacaattattctcgcctcttgtgtcgaagagtgggtttgaaaaagaaaagaatagagatagatggtgtttggtcgcgctgacctcgacaagcccatagcgcgtgagcagggatggaaacgagccgggctcggtgcctgagggctcgacattggctcgtgagagtcatattctgatacttattgttgtattatttagtaaattaatattatat

SEQ ID NO: 64754 - DNA, 4611 bp, Zea Mays
cgccgccgtcccatcgacgccacctgccgctgccgccgtccagcacacctcctccgcctcacgcgttcctgcagaaagcctctcctagaccacggcccaaggcccttcatatccacgcggcacccgagcagcagaaccctagataaaccctctcgggggctaagcaccggcggcggcgatggtgatggtccctcccggcgagtgggtcccccacgtcgaggcctacgtcgacgtctcccgccccgccgtgcagcattctgctagcgtggatgcacttgctgccctggtgaacaaagacaagttgaccctttttgatttggtgtccaagatggatctttatttgacgacaacagaccacattgtcagatcaagaggaatactgcttcttggggaaacattgtctcgaatttcatttaaatatttagatgttattaccattacaacattgtcagacttctttatatcaagattgactgacatgtttatatttatatctggtattaagttagtaaatgttagaagggcaggtctgtcagattggcaagcaatacgaggagcccttgttggttgcctggctttattgcacaggaaacatggtgttggttgtattgtgattgctgatgtcaaaagactagttgagtctttcttacagaatgttccagtgcagtcacttgcagctgctgaccgcaaggttgatttgattattcagtgcaaagatggttagataggatggtgaacagctgtatgggatctgtgaagcaattgatgaagaaaaggatccagagtgcttgatgctttcttttcatgtagtggaagttgtcatgaagctgtttccagatccatctggtttggcagcacagtttgcaggggacgtttttgagattctgagcaagtattttcctgtctacttcacacacggagtgggtaatggtttggacactacacgggaagacctctctagagcattgatgcacgctttttgttcaacccaatattttgagccttttgtcatccctttgcttcttgacaaactttcttcctctcttccattggcaaagattgattccttaaaatatttggacaaatgcattcgcttctatggagctgatagaatggttagacatgcatcagctgtttggtacaagttgaaagaagtgatttttaacctttcttcagatcaattattaatatcagaggctctgaattgtttgaagactgctattatgtatactgattcttctgataaagatcttttcattaatttgatcttgttggatgaggatattgtgaacaagatccactctgtatcaagcgtggaaaagaccatattgagttcattagaggacctggcccaactgcatgcacttggaagtgttatttctatccttgctgaatcgtctacatatttctgtactagagttcttcaagagcactttgcacacttggtagatattgtgggaaccaaagctgactatgaatcctggcagttgaataattgtaatggatcatcttctgctcctgtcaactatggagcactctatttatctgttcaattgctttcatcctgtagagaagtggctttggtatcttatgaagatttttcttctgttaaattagcaaagggttcctggtggcttatcttgcagaaaaagctggagcagttaatccatctccttcgatccatttttgctatagcttctcaatctatgcagccaaatttcagacaagaatatgtctcttgtgctgtgaagggcttgctaacactagcaacattcccggaacaatgctcgcctctgccagcaaatgcttatgaggatattctgcttatgttcacgtcaataattataaataagtttgaaaatttagatctgtggagattgtcattgaaagcattggctagcattggttcatctattgccaagttccatgcttctgaaagggaagtagtttactacagaacggttgttgacaagattgtttctttggctgaatcttatgatacttcaatgcctctcggtctaagacttgaagcaagttatgaagttggaactgctgggttgaactatatgttaagagttgcgaaatcacttgaagtcgctgttgtcaccaatatttctgaatctgaggctaatggaagaatggaatgtgctgaccatgtggcccatttatttgagtgttactctaaccgggtccttccatggttattagcttctggtggtgtcaatgaacttgcattgagctttgcactgcatctattggatgagactgaggatttgactgtgttagatagaatcagctcacagggcctccttgactcactaatgactgggatgaagcttttagttggagtatgtacagaggagcaacaatcacttattgttcagaaagcacatagcacaatatcttcaatgctctcactcccaatggaattgatgacagaccgtcttttgcctgtagatgagttagttcctttacattctgtttcagaaacagctctcatcagcatgttttcgtcgattataataggccttcggcctcaaacacctgtaccagatatgatggtgatgattaaactctttactgtcttcctactaaatgggaaaatgccagctgcttatgcattagcttctattttcaataaatatctacataatccagagttttctcatgagaatcagatggataaaatacttgatgatattcttgagaggtgtttctcaactgtattagccaacagctgctcaaagacatctcaatcttgtgctggcacttcagatgttaatttctcagatgtttcgtctagaaacaagctttctaagattaatatcttgtctagcttggcttggattggcaaaggattacttatgagaggagacgagaaagtgaaggacatttcaatgtttcttcttaagatcctattctcagatgagattttgtctacagttccatcccaccaggaagaaccttatggcggtgattcatcagatacttctcttgcaatatctgcagctagtgcattccatgtgatgatgagtgattcagaaatgtgtctaaataaaaaatttcatgcaagaataaaaccattatacaagcagcgtttcttctcaataatgatgccgatcttcctctccaaaattaaagaaacaactgtggtcacgacaaaattggcactataccgagcttttgggcatatcatttccaatgctccagtaccagcagttataactgaagcacaccagattttactcgtgatggttgatagcttagctaaattaagtatggatgttggggataaggatctggtgtacagtttgttacttgtcttctctggaatgttgatggatgaaaaaggcaaagagtgcattctggacaacatccaaatcacaatcagcgttcttactgaacttgtttcctatcctcacatgatggttgtgcgggagacagcattacaatgtttagtagccttttcgacgtttcctcactcaaagatttatcctgtgcggcgaaaggttgtgcaggcagcagtcagggctctcgacgataagaaacgggctgttcgtcgagtggctgtccgatgccggcacacatggcagtccttcacttaaggggagtctctttcggtggtgtcaggtagtcgggggaggcaagcacaaaaaactggtcttactgggcgatcctgttgggagtcgatgagtgtacatggtcggtttgcatgctccactgttgtggttgtttcaacttgaggtttgagcatttcataggctattcacctttctgtgcggacaggatctagagctgtcattgtaaggtgagagatactgggagcggggtctgctgacgagtttatgttcgagacctggtctttggatcagctgctgccaagttccagatgttcgaagttctccgaagagccatggggccatggggaggaatgtccctggaaattggccctcagtctgggttgccagctcttgtgcccttttcttttccttgatcctggacattgccttgtgtgtctgatacagatcagaaaactgatgcaggatcgcttgggagttgggaatgtaacctaaagtcccagtattcttggcctcccgatgttggagaattcaagcatgctggcatgcgtgcgtttgtgccaacagtttttagtttgctttcatgtttcaaccaggctctgccgctcagaacgtgtcgagtatactttccagttggccagatcgtgtcaggttgtgcagtacgtagaaatttgtcatcccatacagatttgtggccttcctggactgcgcagtactgctacgctggaaaacgctgcgatagccgtgccccgcggaatccacatctctcggtcgattgtgtaatgcgaagtatgcaacagagttaggtggcatttcttcatgacaattattctcgcctcttgtgtcgaagagtgggtttgaaaaagaaaagaatagagatagatggtgtttggtcgcgctgacctcgacaagcccatagcgcgtgagcagggatggaaacgagccgggctcggtgcctgagggctcgacattggctcgtgagagtcatattctgatacttattgttgtattatttagtaaattaatattatat

SEQ ID NO: 64755 - DNA, 3696 bp, Zea Mays
atggtggaagttgtcatgaagctgtttccagatccatctggtttggcagcacagtttgcaggggacgtttttgagattctgagcaaggagtgggtaatggtttggacactacacgggaagacctctctagagcattgatgcacgctttttgttcaacccaatattttgagccttttgtcatccctttgcttcttgacaaactttcttcctctcttccattggcaaagattgattccttaaaatatttggacaaatgcattcgcttctatggagctgatagaatggttagacatgcatcagctgtttggtacaagttgaaagaagtgatttttaacctttcttcagatcaattattaatatcagaggctctgaattgtttgaagactgctattatgtatactgattcttctgataaagatcttttcattaatttgatcttgttggatgaggatattgtgaacaagatccactctgtatcaagcgtggaaaagaccatattgagttcattagaggacctggcccaactgcatgcacttggaagtgttatttctatccttgctgaatcgtctacatatttctgtactagagttcttcaagagcactttgcacacttggtagatattgtgggaaccaaagctgactatgaatcctggcagttgaataattgtaatggatcatcttctgctcctgtcaactatggagcactctatttatctgttcaattgctttcatcctgtagagaagtggctttggtatcttatgaagatttttcttctgttaaattagcaaagggttcctggtggcttatcttgcagaaaaagctggagcagttaatccatctccttcgatccatttttgctatagcttctcaatctatgcagccaaatttcagacaagaatatgtctcttgtgctgtgaagggcttgctaacactagcaacattcccggaacaatgctcgcctctgccagcaaatgcttatgaggatattctgcttatgttcacgtcaataattataaataagtttgaaaatttagatctgtggagattgtcattgaaagcattggctagcattggttcatctattgccaagttccatgcttctgaaagggaagtagtttactacagaacggttgttgacaagattgtttctttggctgaatcttatgatacttcaatgcctctcggtctaagacttgaagcaagttatgaagttggaactgctgggttgaactatatgttaagagttgcgaaatcacttgaagtcgctgttgtcaccaatatttctgaatctgaggctaatggaagaatggaatgtgctgaccatgtggcccatttatttgagtgttactctaaccgggtccttccatggttattagcttctggtggtgtcaatgaacttgcattgagctttgcactgcatctattggatgagactgaggatttgactgtgttagatagaatcagctcacagggcctccttgactcactaatgactgggatgaagcttttagttggagtatgtacagaggagcaacaatcacttattgttcagaaagcacatagcacaatatcttcaatgctctcactcccaatggaattgatgacagaccgtcttttgcctgtagatgagttagttcctttacattctgtttcagaaacagctctcatcagcatgttttcgtcgattataataggccttcggcctcaaacacctgtaccagatatgatggtgatgattaaactctttactgtcttcctactaaatgggaaaatgccagctgcttatgcattagcttctattttcaataaatatctacataatccagagttttctcatgagaatcagatggataaaatacttgatgatattcttgagaggtgtttctcaactgtattagccaacagctgctcaaagacatctcaatcttgtgctggcacttcagatgttaatttctcagatgtttcgtctagaaacaagctttctaagattaatatcttgtctagcttggcttggattggcaaaggattacttatgagaggagacgagaaagtgaaggacatttcaatgtttcttcttaagatcctattctcagatgagattttgtctacagttccatcccaccaggaagaaccttatggcggtgattcatcagatacttctcttgcaatatctgcagctagtgcattccatgtgatgatgagtgattcagaaatgtgtctaaataaaaaatttcatgcaagaataaaaccattatacaagcagcgtttcttctcaataatgatgccgatcttcctctccaaaattaaagaaacaactgtggtcacgacaaaattggcactataccgagcttttgggcatatcatttccaatgctccagtaccagcagttataactgaagcacaccagattttactcgtgatggttgatagcttagctaaattaagtatggatgttggggataaggatctggtgtacagtttgttacttgtcttctctggaatgttgatggatgaaaaaggcaaagagtgcattctggacaacatccaaatcacaatcagcgttcttactgaacttgtttcctatcctcacatgatggttgtgcgggagacagcattacaatgtttagtagccttttcgacgtttcctcactcaaagatttatcctgtgcggcgaaaggttgtgcaggcagcagtcagggctctcgacgataagaaacgggctgttcgtcgagtggctgtccgatgccggcacacatggcagtccttcacttaaggggagtctctttcggtggtgtcaggtagtcgggggaggcaagcacaaaaaactggtcttactgggcgatcctgttgggagtcgatgagtgtacatggatctagagctgtcattgtaaggtgagagatactgggagcggggtctgctgacgagtttatgttcgagacctggtctttggatcagctgctgccaagttccagatgttcgaagttctccgaagagccatggggccatggggaggaatgtccctggaaattggccctcagtctgggttgccagctcttgtgcccttttcttttccttgatcctggacattgccttgtgtgtctgatacagatcagaaaactgatgcaggatcgcttgggagttgggaatgtaacctaaagtcccagtattcttggcctcccgatgttggagaattcaagcatgctggcatgcgtgcgtttgtgccaacagtttttagtttgctttcatgtttcaaccaggctctgccgctcagaacgtgtcgagtatactttccagttggccagatcgtgtcaggttgtgcagtacgtagaaatttgtcatcccatacagatttgtggccttcctggactgcgcagtactgctacgctggaaaacgctgcgatagccgtgccccgcggaatccacatctctcggtcgattgtgtaatgcgaagtatgcaacagagttaggtggcatttcttcatgacaattattctcgcctcttgtgtcgaagagtgggtttgaaaaagaaaagaatagagatagatggtgtttggtcgcgctgacctcgacaagcccatagcgcgtgagcagggatggaaacgagccgggctcggtgcctgagggctcgacattggctcgtgagagtcatattctgatacttattgttgtattatttagtaaattaatattatat

SEQ ID NO: 64756 - DNA, 3578 bp, Zea Mays
ctccctttctcttttctctcttcgtcttcctgctctcgctgagcctgcaggatctgaatccgagctcgctcgcatccactatctgcaggccccacgcgccctgttccttcctcccgctaacaatcgccctgttcccggtttgatccgttgaattctgcccggcgcgcgggggcttgcgggttcatttcctggtttcctccgtgagcttctgcggttggcgtggttacgccagtccctcgcgatttacatctgtgattcgtttgaaaatctgggagtgtggagatttgggaggtcttctcgctcctgtgctctatgaggagcagcttcctgtcggagtcgccgtgcgacgagcagcgcatccatggatatggtttcaacccgcagtcatggctgcaggtggagcgagggaagctgcccaagtcgtcctactcgccttcctccattgagtcacttatcaagattgctgagccacatgtagtgccattgtataagcctttggattatgttgaggtgctgtcaaggatccacgaggagcttgaacaatgtaggccgagcgagctgccaggcctgtacttggtccagtcccaggtgtttcggggccttggagaagcaaaattgcgccagaggagcctccactctgcctggcgttgtgcaagcagcgtccatgagaaagtcatatttggggcatggttgcggtacgagaagcagggggaggagatcatatctgacgtccttgcatcatgtcagaaatgctgtcgagagtttggtttacttgatgttgcctctgagatgcctgtgcggaattttgaggtaattggttcatgggagacaggctcctcgtctcaagtttcttccatggtaaccttccaagtacaggatggtagggtgacatgtgataggtgcaagattgcgtctttgtcaataccattttgctccatgcttaatggaccgttcaatgagtcacagcttgagcttgttgatttgtcagagaatggtatttcgttggagggcatgagagctgtttctgagtttagttctacatgtagtttaggggatcttcctgtggaaatcttattggagatcctggtgtttgcaaacacattttgttgtgacaggctaaaagatgcttgtgataggaaactggcttcatttgtttcaacaaggcaggatgctgttgagctcatgccgttggcatttgaagaaaatgcgccagttcttgctgcttcttgcttgcaaatttttttacaggaacttcccgattgtctagctgatgatctagtaattagcctcttcttaggtgcaactgcacaacaacaacttatcatggttggacatgcatcctttttgctgtactgcttgcttagtgaagtagcaatgaacattgatccgaggacagaaacaactgtattattgttagagaagcttgtgcagctagcagttacccctactcagaagcaaatagcttttcatcaacttgcatgcattagacttttgagaaaggaatatagtgaagctgaacaccaatttgaggttgccttctctgccggtcatgtgtattcaattgctggtattgctagagtcgctggcattcaaggccaaaaggctttggcttatgagaagctcagttcagtgataacatcaaatttgccactggggtggatgtatctggagaggtctttgtattctgaaggtgatagaaagctggcagaccttgacaaagcaagcgagctggatcctactctcacttacccttacatgtatcgagctgcatccttgatgagaaaaaaagatgctaaacatgccttagaggaaattaaccgactcttgggtttcaagttagcattggagtgcctggagctacggatctgtctatacctggctcttgaagactataagtctgctatctgtgatatccatgcgattcttactctttcacctgattatcggatgttggaaggacgtgtagctgcttccaaaataggcactcttcttggtgcacatgtcgagcagtggaatacggctgagtgttggctacaactttatgagcgctggtcatcagttgatgatattggctccctttcagtgatctatcggatgcttgagtcagatgcagcaaaaggtgtcctctactttaggcaatctttgctgctccttaggttgaactgtcccgaggcagcgatgcgcagtttgcaattggcaaggcatcatgcagcaactgagcatgaacgactagtatatgaggggtggctcttatatgacacggggcactatggggaggccctacaaaaagcggaagaatctatttccattcaaagatcatttgaagctttctttctgaaagcctatgttttggctgattcaggagttgatccttcttattctgcgacagttatctcacttcttgaagatgcattgaaatgcccttcagaccggcttcggaagggtcaggcattgaataaccttggtggtgtctatgttgattgtggaaagttagattcagcagctgattgctatacaagtgcattgaaaattcgacacactagagcccatcaaggtcttgctcgtgtacattttctgaggaacaacagggaagctgcatatgaagagatgacaaagttgatagaaaaagctaaaaacaatgcttcggcttatgagaaacgctcagaatattgtgaacgagaacaaactatgacagatttgcaaacagtgacccaattggatcctttgcgtgtttatccatacagatatcgagcagcagtgctgatggatagccacaaggagaatgatgcaatagcggagctcagccgtgcgatatccttcaaagcggacctgcatttgctgcatctccgtgcggctttccacgagcacattggagatgtacccagcgctctccgtgattgtagagccgccctctccttggacccgaatcaccaggagatgttggagcttcagaaacgtgtgaacagccaagagccctgacacattgtggtgctgtattgtgtattgtacaccacgactcatgccactttggtttgcctcgtgacagacagccttgacctgattcattttttttcgtttttccgttaattaattaatcaatcactgtaatacgaagttttcaggaagaaagtaacagagagcaagagagagaactagttatatgaaagcaggcattgataaagcctttttaactcgatgcctgtggcctctgtagaagtattgtgctaatccctgaactgtatcttgaaaaagtgattcgtgcataatgtatttttcagttctgttctctttatccagattttactgaaattaaccttgagtgaattgtgctccatcaaagatctacctgcctgtgtttttttagtggcatcgagtgtttataactttttgattcgtggtgtcttattcagcgaacccttggagttgtaactgcatgatcacagtttgaacaacgttttcttgttttgtttcttttaccaatcataaagtattcataatgaaacctgttcattttgtttgaatctgtaacttgtattcagcttttcgatgccttacaaacgaatgcaggtcctatgaaa

SEQ ID NO: 64757 - DNA, 3787 bp, Zea Mays
ctccctttctcttttctctcttcgtcttcctgctctcgctgagcctgcaggatctgaatccgagctcgctcgcatccactatctgcaggccccacgcgccctgttccttcctcccgctaacaatcgccctgttcccggtttgatccgttgaattctgcccggcgcgcgggggcttgcgggtgcgcaccggaggctgcatcttttcccggccaagattcggtccggtggggccgttcttggcacgatttcacgggccgtttggccttccctcgccggatttgttccggctccaggcaccaaattccaatcttttcctgctgctgctgcctctgcgacactttattcttctcccccaattagcggcggttagtgtggattctgatttgtaggttcatttcctggtttcctccgtgagcttctgcggttggcgtggttacgccagtccctcgcgatttacatctgtgattcgtttgaaaatctgggagtgtggagatttgggaggtcttctcgctcctgtgctctatgaggagcagcttcctgtcggagtcgccgtgcgacgagcagcgcatccatggatatggtttcaacccgcagtcatggctgcaggtggagcgagggaagctgcccaagtcgtcctactcgccttcctccattgagtcacttatcaagattgctgagccacatgtagtgccattgtataagcctttggattatgttgaggtgctgtcaaggatccacgaggagcttgaacaatgtaggccgagcgagctgccaggcctgtacttggtccagtcccaggtgtttcggggccttggagaagcaaaattgcgccagaggagcctccactctgcctggcgttgtgcaagcagcgtccatgagaaagtcatatttggggcatggttgcggtacgagaagcagggggaggagatcatatctgacgtccttgcatcatgtcagaaatgctgtcgagagtttggtttacttgatgttgcctctgagatgcctgtgcggaattttgaggtaattggttcatgggagacaggctcctcgtctcaagtttcttccatggtaaccttccaagtacaggatggtagggtgacatgtgataggtgcaagattgcgtctttgtcaataccattttgctccatgcttaatggaccgttcaatgagtcacagcttgagcttgttgatttgtcagagaatggtatttcgttggagggcatgagagctgtttctgagtttagttctacatgtagtttaggggatcttcctgtggaaatcttattggagatcctggtgtttgcaaacacattttgttgtgacaggctaaaagatgcttgtgataggaaactggcttcatttgtttcaacaaggcaggatgctgttgagctcatgccgttggcatttgaagaaaatgcgccagttcttgctgcttcttgcttgcaaatttttttacaggaacttcccgattgtctagctgatgatctagtaattagcctcttcttaggtgcaactgcacaacaacaacttatcatggttggacatgcatcctttttgctgtactgcttgcttagtgaagtagcaatgaacattgatccgaggacagaaacaactgtattattgttagagaagcttgtgcagctagcagttacccctactcagaagcaaatagcttttcatcaacttgcatgcattagacttttgagaaaggaatatagtgaagctgaacaccaatttgaggttgccttctctgccggtcatgtgtattcaattgctggtattgctagagtcgctggcattcaaggccaaaaggctttggcttatgagaagctcagttcagtgataacatcaaatttgccactggggtggatgtatctggagaggtctttgtattctgaaggtgatagaaagctggcagaccttgacaaagcaagcgagctggatcctactctcacttacccttacatgtatcgagctgcatccttgatgagaaaaaaagatgctaaacatgccttagaggaaattaaccgactcttgggtttcaagttagcattggagtgcctggagctacggatctgtctatacctggctcttgaagactataagtctgctatctgtgatatccatgcgattcttactctttcacctgattatcggatgttggaaggacgtgtagctgcttccaaaataggcactcttcttggtgcacatgtcgagcagtggaatacggctgagtgttggctacaactttatgagcgctggtcatcagttgatgatattggctccctttcagtgatctatcggatgcttgagtcagatgcagcaaaaggtgtcctctactttaggcaatctttgctgctccttaggttgaactgtcccgaggcagcgatgcgcagtttgcaattggcaaggcatcatgcagcaactgagcatgaacgactagtatatgaggggtggctcttatatgacacggggcactatggggaggccctacaaaaagcggaagaatctatttccattcaaagatcatttgaagctttctttctgaaagcctatgttttggctgattcaggagttgatccttcttattctgcgacagttatctcacttcttgaagatgcattgaaatgcccttcagaccggcttcggaagggtcaggcattgaataaccttggtggtgtctatgttgattgtggaaagttagattcagcagctgattgctatacaagtgcattgaaaattcgacacactagagcccatcaaggtcttgctcgtgtacattttctgaggaacaacagggaagctgcatatgaagagatgacaaagttgatagaaaaagctaaaaacaatgcttcggcttatgagaaacgctcagaatattgtgaacgagaacaaactatgacagatttgcaaacagtgacccaattggatcctttgcgtgtttatccatacagatatcgagcagcaggctgatggatagccacaaggagaatgatgcaatagcggagctcagccgtgcgatatccttcaaagcggacctgcatttgctgcatctccgtgcggctttccacgagcacattggagatgtacccagcgctctccgtgattgtagagccgccctctccttggacccgaatcaccaggagatgttggagcttcagaaacgtgtgaacagccaagagccctgacacattgtggtgctgtattgtgtattgtacaccacgactcatgccactttggtttgcctcgtgacagacagccttgacctgattcattttttttcgtttttccgttaattaattaatcaatcactgtaatacgaagttttcaggaagaaagtaacagagagcaagagagagaactagttatatgaaagcaggcattgataaagcctttttaactcgatgcctgtggcctctgtagaagtattgtgctaatccctgaactgtatcttgaaaaagtgattcgtgcataatgtatttttcagttctgttctctttatccagattttactgaaattaaccttgagtgaattgtgctccatcaaagatctacctgcctgtgtttttttagtggcatcgagtgtttataactttttgattcgtggtgtcttattcagcgaacccttggagttgtaactgcatgatcacagtttgaacaacgttttcttgttttgtttcttttaccaatcataaagtattcataatgaaacctgttcattttgtttgaatctgtaacttgtattcagcttttcgatgccttacaaacgaatgcaggtcctatgaaa

SEQ ID NO: 64758 - DNA, 3895 bp, Zea Mays
ctccctttctcttttctctcttcgtcttcctgctctcgctgagcctgcaggatctgaatccgagctcgctcgcatccactatctgcaggccccacgcgccctgttccttcctcccgctaacaatcgccctgttcccggtttgatccgttgaattctgcccggcgcgcgggggcttgcgggtgcgcaccggaggctgcatcttttcccggccaagattcggtccggtggggccgttcttggcacgatttcacgggccgtttggccttccctcgccggatttgttccggctccaggcaccaaattccaatcttttcctgctgctgctgcctctgcgacactttattcttctcccccaattagcggcggttagtgtggattctgatttgtaggttcatttcctggtttcctccgtgagcttctgcggttggcgtggttacgccagtccctcgcgatttacatctgtgattcgtttgaaaatctgggagtgtggagatttgggaggtcttctcgctcctgtgctctatgaggagcagcttcctgtcggagtcgccgtgcgacgagcagcgcatccatggatatggtttcaacccgcagtcatggctgcaggtggagcgagggaagctgcccaagtcgtcctactcgccttcctccattgagtcacttatcaagattgctgagccacatgtagtgccattgtataagcctttggattatgttgaggtgctgtcaaggatccacgaggagcttgaacaatgtaggccgagcgagctgccaggcctgtacttggtccagtcccaggtgtttcggggccttggagaagcaaaattgcgccagaggagcctccactctgcctggcgttgtgcaagcagcgtccatgagaaagtcatatttggggcatggttgcggtacgagaagcagggggaggagatcatatctgacgtccttgcatcatgtcagaaatgctgtcgagagtttggtttacttgatgttgcctctgagatgcctgtgcggaattttgaggtaattggttcatgggagacaggctcctcgtctcaagtttcttccatggtaaccttccaagtacaggatggtagggtgacatgtgataggtgcaagattgcgtctttgtcaataccattttgctccatgcttaatggaccgttcaatgagtcacagcttgagcttgttgatttgtcagagaatggtatttcgttggagggcatgagagctgtttctgagtttagttctacatgtagtttaggggatcttcctgtggaaatcttattggagatcctggtgtttgcaaacacattttgttgtgacaggctaaaagatgcttgtgataggaaactggcttcatttgtttcaacaaggcaggatgctgttgagctcatgccgttggcatttgaagaaaatgcgccagttcttgctgcttcttgcttgcaaatttttttacaggaacttcccgattgtctagctgatgatctagtaattagcctcttcttaggtgcaactgcacaacaacaacttatcatggttggacatgcatcctttttgctgtactgcttgcttagtgaagtagcaatgaacattgatccgaggacagaaacaactgtattattgttagagaagcttgtgcagctagcagttacccctactcagaagcaaatagcttttcatcaacttgcatgcattagacttttgagaaaggaatatagtgaagctgaacaccaatttgaggttgccttctctgccggtcatgtgtattcaattgctggtattgctagagtcgctggcattcaaggccaaaaggctttggcttatgagaagctcagttcagtgataacatcaaatttgccactggggtggatgtatctggagaggtctttgtattctgaaggtgatagaaagctggcagaccttgacaaagcaagcgagctggatcctactctcacttacccttacatgtatcgagctgcatccttgatgagaaaaaaagatgctaaacatgccttagaggaaattaaccgactcttgggtttcaagttagcattggagtgcctggagctacggatctgtctatacctggctcttgaagactataagtctgctatctgtgatatccatgcgattcttactctttcacctgattatcggatgttggaaggacgtgtagctgcttccaaaataggcactcttcttggtgcacatgtcgagcagtggaatacggctgagtgttggctacaactttatgagcgctggtcatcagttgatgatattggctccctttcagtgatctatcggatgcttgagtcagatgcagcaaaaggtgtcctctactttaggcaatctttgctgctccttaggttgaactgtcccgaggcagcgatgcgcagtttgcaattggcaaggcatcatgcagcaactgagcatgaacgactagtatatgaggggtggctcttatatgacacggggcactatggggaggccctacaaaaagcggaagaatctatttccattcaaagatcatttgaagctttctttctgaaagcctatgttttggctgattcaggagttgatccttcttattctgcgacagttatctcacttcttgaagatgcattgaaatgcccttcagaccggcttcggaagggtcaggcattgaataaccttggtggtgtctatgttgattgtggaaagttagattcagcagctgattgctatacaagtgcattgaaaattcgacacactagagcccatcaaggtcttgctcgtgtacattttctgaggaacaacagggaagctgcatatgaagagatgacaaagttgatagaaaaagctaaaaacaatgcttcggcttatgagaaacgctcagaatattgtgaacgagaacaaactatgacagatttgcaaacagtgacccaattggatcctttgcgtgtttatccatacagatatcgagcagcagtgctgatggatagccacaaggagaatgatgcaatagcggagctcagccgtgcgatatccttcaaagcggacctgcatttgctgcatctccgtgcggctttccacgagcacattggagatgtacccagcgctctccgtgattgtagagccgccctctccttggacccgaatcaccaggagatgttggagcttcagaaacgtgtgaacagccaagagccctgacacattgtggtgctgtattgtgtattgtacaccacgactcatgccactttggtttgcctcgtgacagacagccttgacctgattcattttttttcgtttttccgttaattaattaatcaatcactgtaatacgaagttttcaggaagaaagtaacagagagcaagagagagaactagttatatgaaagcaggcattgataaagcctttttaactcgatgcctgtggcctctgtagaagtattgtgctaatccctgaactgtatcttgaaaaagtgattcgtgcataatgtatttttcagttctgttctctttatccagattttactgaaattaaccttgagtgaattgtgctccatcaaagatctacctgcctgtgtttttttagtggcatcgagtgtttataactttttgattcgtggtgtcttattcagcgaacccttggagttgtaactgcatgatcacagtttgaacaacgttttcttgttttgtttcttttaccaatcataaagtattcataatgaaacctgttcattttgtttgaatctgtaacttgtattcagcttttcgatgccttacaaacgaatgcaggtcctatgaaaacaatatggctctgtatggttggtgtccgcagcttgccataaggatagggagttgggcgaggcacacgcgaacataaaggcgctgcggctctcggagagggcatggg

SEQ ID NO: 64759 - DNA, 1012 bp, Zea Mays
atgacagccggggtcgggatcttacttgtcacaaatgttgaggatagtgccaatagattcatctgcgcttgtgtggtagtgttctacacatcactttaacatattgtgagctcttttcctttttcaccagtcttcttgctagcctttttgtattgtgtactccattatgatatggagaattctaattttgacctctataatgctattctgcaatttattgcaacgagtttttgttatgtgattacgaatttgagttatcaatcttatttaatgaaactaatatggcaggagaaagtggagtttttgaggggccagaattggagcgttacactgactaggagcagggcttcaccctcctcaagccagcctcctggcccaaggagggtgaagggagcaacaatattgggtttgtcgtcaaccttcggcttaattcgctgacggagttcgggacgccgccagttcatcgcgggcaaacttctgcaagcagagaagaaaaaggatgttctcagtgggagagagatcaggtcatggcggcctggcagtgtatgaaattgagtacacactggatagcactaggtgagggatgaaacagatcttctcgggtgcatttgttgcttcaaggaagctttatctgctcaacatagcctattcagacacccggacagtgagtcaagaattgttctggacaaagcattccattcttttgattatgtatagtttatattttctatggcagaaaatatagtcgtgagtatttgtttgtttgtaaaaagagtgctaatcaaaaggttgcattgtcgtcttgtccagtactattgcacctttatcagtgatgtcaggctataagtaatttcagtttagataatgaacttcatcttgcacatattggtaacattatttgtgtcgaaagcagtaaaatgtcgtgatcttaattcctagcctaacactactgcatttgtaatatcttggacttgaaattttatacagtggagtacatctatatttttttgag

SEQ ID NO: 64760 - DNA, 2857 bp, Zea Mays
agccaacttagagtagactgcatacgaactccaaggctctctatgagagagagagaggtaggctaagtattaaatatacaacttatctcatgtgagagttattatataaatagatttttaggtgattatatatgacacgagaatattataaggcctgctatattattaaccatttctacttgctctcaagcatacaaagcgcacatggggtctcaccttagctcggtttgggcttgggggaacaataaattaattaataaaaaagaaaaaaaatgaaaggaagataggccaggccggagttgactacggccacggcccacgaggcatgatcggcccaacagagcgcacaggcaaggcaaaccgtcagcactcagtggagccctggcgggctggcctcccctcttcttcgcctgcacctgcacgcgcccccgacctcaccctctgctgacctcgctcccctcccgtagccgccggagccctcatcggtttatcctcccgctgccacctgcaacagccccgggcggagatccatcctaactctacgtgcaggtgaccccaagtcctcaagtgggtggcgcaaccatgcccaaggttaagaatccccacgttttcatggacatatcaatcggtggaggtagcgccgagaggatcacattcgagctatttgcaaatgtagttccaaagaccgcggagaacttcagagcactatgtactggtgaaagaggccttggagcgtctacacagaaaccactctattataagggaacatatattcatcgcatagttaaagggtttgttgctcagggtggtgatttttcaagcggagatggaaaaggtggagagagcatttatggtggaaaatttccagatgaaaacttcaagctactgcacaatcagcctggtgtcctgtccatggcaaattctggaccaggcaccaatgggtcacagttttttattacattcaaggctctacctcatcttgatggcaaacatgtggtctttgggaaggtggtcagtggaatagctttgcttaaaaatcttgaagcagctggcagtgaaactggaaatccttcttgtcaagtgaaaattgtagactgtggtgaagtttccaacacaaattctcaagatctgctaaagggagagaaagaaaaaaactaagaacagcagatggtaactccaatgctgaagggagagccaaattaaaaaaagcatctggtgattataagcaaagaaagaagagaaaacattattcatctgattcatatagctcagatacttcagactcgtcgtcctattcttcagatagtggctctgattcagaatcacagtcatcaatgaatactagctcgtccagtgatcataggcgtaagagaagaaagggatctaagaaggataagcgcaagctcacgaagaggaagggtaagcatacaaggagtaagagaaagagtagaggatccaaaaggcgtcctagacggagctatgggagttccagtgatgattcagtaagctcaaagacagataacagcagttctgacagtgaaaatggtggtcattataccaagcgttccttgccgaaagataaagagagtaccaaaatgacaaattcagaacaaggaagaacgtttccagatgtagacaaagtcaaacaaacagttactaccatcaaccgatcacaatcacatgatggaagtaaaccctcaaacaaagatgacaatggggctgatgacagatctggaaattacagttcaaaagataggaatgatccaggtgcaagctctaggatcagtcctatacagactgatgtaaatttaacgaaaccagtaaatgtatatggcaacattggtggtgataatgcagatgctggcatgtctataactggtacagaaaggcacctgccaagcaatgaacctgtgtccaccaatggtaaagatttagctgtgggttctgcagacaatgggcagcctcagcgaatcaggaaagggcgtggttttactcagaagtatgggtttgcacgccggtacaggacaccatctcccgagcgcccccctgttcgaccccgctacgatggagggagagaggataggtggaacaatttcaataggtatggaagaactggtccttatagtagacgctctccagtaaggagataccatggctcgccaagagccaatagcccatccaggtaccaaagaagaggacggagcaggtcacgcagcccggcgacgcgtcatgaccgtggagggtatcgccgccccagcccaaggcgcagccgcagccctgcagacccgagacgtgatgcgaacgataggcctcgatcaggtcacggtggaggcggtcctgaccaccgtggccacatcccccctgccaacaacaggtccaggtcgaagagccgggatcccttgagatccaggtctcctgatgctgccccagccaagagggagagctcgagatacaaccgcaggcgcagcagcagctcgaggtccagcagccctgatgctgatggaaacaaaggcttggtctcgtactgagatgtaacgccacaacgatttacatgcgccaagaaccatctttcttgctagtttagcgttatgtacgcttttgtaatggcttctaaacttgtttttttgatgtagctgtacatttggatgtcctgttagacgtgaaatgttttttacgtcagatatttataactacttctgagtcagtataacgcgaagagtgctatgcgttcttaggtcgaggcatgaatgttcgagtgtggttttgggtaaaactgaaacgtgttggtcatctctgttcaacagactttctgttgaaaacggctgaacatggtgatatacatgtacgcacacagctg

SEQ ID NO: 64761 - DNA, 2852 bp, Zea Mays
agccaacttagagtagactgcatacgaactccaaggctctctatgagagagagagaggtaggctaagtattaaatatacaacttatctcatgtgagagttattatataaatagatttttaggtgattatatatgacacgagaatattataaggcctgctatattattaaccatttctacttgctctcaagcatacaaagcgcacatggggtctcaccttagctcggtttgggcttgggggaacaataaattaattaataaaaaagaaaaaaaatgaaaggaagataggccaggccggagttgactacggccacggcccacgaggcatgatcggcccaacagagcgcacaggcaaggcaaaccgtcagcactcagtggagccctggcgggctggcctcccctcttcttcgcctgcacctgcacgcgcccccgacctcaccctctgctgacctcgctcccctcccgtagccgccggagccctcatcggtttatcctcccgctgccacctgcaacagccccgggcggagatccatcctaactctacgtgcaggtgaccccaagtcctcaagtgggtggcgcaaccatgcccaaggttaagaatccccacgttttcatggacatatcaatcggtggaggtagcgccgagaggatcacattcgagctatttgcaaatgtagttccaaagaccgcggagaacttcagagcactatgtgaaagaggccttggagcgtctacacagaaaccactctattataagggaacatatattcatcgcatagttaaagggtttgttgctcagggtggtgatttttcaagcggagatggaaaaggtggagagagcatttatggtggaaaatttccagatgaaaacttcaagctactgcacaatcagcctggtgtcctgtccatggcaaattctggaccaggcaccaatgggtcacagttttttattacattcaaggctctacctcatcttgatggcaaacatgtggtctttgggaaggtggtcagtggaatagctttgcttaaaaatcttgaagcagctggcagtgaaactggaaatccttcttgtcaagtgaaaattgtagactgtggtgaagtttccaacacaaattctcaagatctgctaaagggagagaaagaaaaaaaactaagaacagcagatggtaactccaatgctgaagggagagccaaattaaaaaaagcatctggtgattataagcaaagaaagaagagaaaacattattcatctgattcatatagctcagatacttcagactcgtcgtcctattcttcagatagtggctctgattcagaatcacagtcatcaatgaatactagctcgtccagtgatcataggcgtaagagaagaaagggatctaagaaggataagcgcaagctcacgaagaggaagggtaagcatacaaggagtaagagaaagagtagaggatccaaaaggcgtcctagacggagctatgggagttccagtgatgattcagtaagctcaaagacagataacagcagttctgacagtgaaaatggtggtcattataccaagcgttccttgccgaaagataaagagagtaccaaaatgacaaattcagaacaaggaagaacgtttccagatgtagacaaagtcaaacaaacagttactaccatcaaccgatcacaatcacatgatggaagtaaaccctcaaacaaagatgacaatggggctgatgacagatctggaaattacagttcaaaagataggaatgatccaggtgcaagctctaggatcagtcctatacagactgatgtaaatttaacgaaaccagtaaatgtatatggcaacattggtggtgataatgcagatgctggcatgtctataactggtacagaaaggcacctgccaagcaatgaacctgtgtccaccaatggtaaagatttagctgtgggttctgcagacaatgggcagcctcagcgaatcaggaaagggcgtggttttactcagaagtatgggtttgcacgccggtacaggacaccatctcccgagcgcccccctgttcgaccccgctacgatggagggagagaggataggtggaacaatttcaataggtatggaagaactggtccttatagtagacgctctccagtaaggagataccatggctcgccaagagccaatagcccatccaggtaccaaagaagaggacggagcaggtcacgcagcccggcgacgcgtcatgaccgtggagggtatcgccgccccagcccaaggcgcagccgcagccctgcagacccgagacgtgatgcgaacgataggcctcgatcaggtcacggtggaggcggtcctgaccaccgtggccacatcccccctgccaacaacaggtccaggtcgaagagccgggatcccttgagatccaggtctcctgatgctgccccagccaagagggagagctcgagatacaaccgcaggcgcagcagcagctcgaggtccagcagccctgatgctgatggaaacaaaggcttggtctcgtactgagatgtaacgccacaacgatttacatgcgccaagaaccatctttcttgctagtttagcgttatgtacgcttttgtaatggcttctaaacttgtttttttgatgtagctgtacatttggatgtcctgttagacgtgaaatgttttttacgtcagatatttataactacttctgagtcagtataacgcgaagagtgctatgcgttcttaggtcgaggcatgaatgttcgagtgtggttttgggtaaaactgaaacgtgttggtcatctctgttcaacagactttctgttgaaaacggctgaacatggtgatatacatgtacgcacacagctg

SEQ ID NO: 64762 - DNA, 1537 bp, Zea Mays
attcgcaccaccgccgcgccgcccaaaccctagccgccgccgccgccgccgccgccatggtcgccgtcaaccgccccctcgtctccgtgaaggccctagagggcgacatggtaaccgacgcccccggcatcgccttaccgcccgtcttcggggcgccgatccgccccgacgtggtcaggttcacccacaagctgctgtcctgcaacaagcgccagccctacgcagtctcccgccgcgccggccaccagacgtcggccgagtcctggggtaccggccgcgccgtgtctcgtatcccccgcgtccccggcggcggcacccaccgcgccggccagggagcgttcggcaacatgtgccgcggcgggcgcatgttcgcgcccaccaagatctggcgcaagtggcaccgccgcgtcaacatcaaccaccgccgtcccggccctcgtccaggcgcgcggccaccgcatcgagtctgtccccgagatgccccttgtcatttccgactccgcggagtccattgagaagacctcccaggcgctcaagatcctcaagcagatcggcgcccacgccgacgccgagaaggccaaggactccgtcggcatccgccccggcaagggtaagatgcgcaaccgtcgctacatcaaccgcaagggcccgctcatcgtctacggcaccgagggctccaaggtcgtcaaggccttccgcaaccttcccggtgtggatgttgccaacgtcgagcgcctcaacctactagaccttgcccccggtggccaccttgggcgctttgtgatctggacccagagcgcgttcaataagctcgaggaggtgtatgggagctatgacgccccgtcgcagaagaagaagggcttcgtgctgccgaggcctaagatgtccaacgctgacctgggcaggatcatcaactctgacgaggtgcagtctgtggtgaagccactcaacaaggaagtgaagcgcagggagaagaggaagaacccactcaagaacatggctgctgtgctcaaactcaacccctacctcggcactgcccggaagatggccacccttgctgaggctgctcgtgtgaaggccaggaaggcgaagctcgactccaagaggaccaagcttaccccggagactgccaaggttaaggctgctggcaaggcatggtacaagaccatggtctcggacagcgactacaccgagtttgagaacttctcaaagtggctcggcgtgactcagtgagcggcaagggtagttaagttttgagtagctcagcttatgttgagaggaaagaggatccatcaaatctgttttatcctgcatcatcataacaagttgctacaagtcttgcatgttcgtgttgtttgtgcatttccgcgagaacatagtatttttatattcgaaccagttgtctgaactgtgcttggatttgtgcactgatgcttggctcaacctttctgtatcacgaatgagctggtccttgctgaaaatggtttacagaaaaagaaaacaggaatactcgttacaagaaaagatgaaattagaa

SEQ ID NO: 64763 - DNA, 2421 bp, Zea Mays
gatctcctttttcctcccctcgacccctcgtatatccaaaatcctccggtccacaaaaatccccgatctactttactcccctggccctaagccaaacccaaattcccccatcccacgacgccgccgctgccaccaccaccaccatgggaagaaaggacacctcgtcctcctccgcggccgccggcggcgggaaaaaggagaaacctatgtcggtgtcagccatgctcgcctccatggacgcccccgcggcgaagcccaagtcctccaagtcggcggcgccgtccaaggccaaggcgaagccctccaaggcgccggcgtcctcgtacatgggcgacatcgacctgcccccctccgacgacgaggaccaagaggaggcccagctcgccgccgccaagcccaagccggcccgcgccgccgtcgacctcagcgccggcgctgcgccgtcgcacaaggacgccaagaagaaggacaagcgcgaggccgtggcggccgcagccgccgaggccgccaggcaggaggcgctgcgcgacgaccgcgacgccttctccgtcgtcatcggcgcgcgcgtcccgggctcctccgccgccgacggcaccgtcgacgacaacgtcagggacgtcgtgctcgagaacttctccgtctccgcgcgcgggaaggagctgctcaagagcgcctccctccggatctcgcacggccgcaggtccccgtgccgcggaacatcgatgtcctgctcgtcgagcaggagatcatcggcgatgaccgctcggccctcgaggccgtggtcgccgccgacgaggagctcaccgccctccaggccgagcaggcgaggcttgaggcctctaatgatgctgatgacaacgagcggcttgtggaggtgtatgagaagctgaatctcgtgggctctgacgtcgcccgtgcccgagcgtccaagattcttgcggggctggggtttgatcaggcgatgcaggccagatccacaaagtccttcagtggtggctggaggatgcgtatttcgcttgcccgtgcgctcttcatgcagccaactctgctgctgctcgatgagccgactaatcacctggatctgcgcgctgtgctatggctggaggaatacttgtgctcccagtggaagaagacattgattgttgtttcccatgaccgtgacttcctgaatacagtgtgcaatgagatcatacacttgcatgataaaagtcttcatgtgtaccgtggaaattttaatgattttgagagtgggtatgagcagaaaaggaaggagatgaaccgaaagttcgaggtgtatgagaagcagatgaaagcggccaggaagtctgggagcaaggccgcacaggataaggttaagggccaggcgctatcaaaggctgctaaagaggccgccaagaacaaggggaaagggaagagtgctgcagatgacgatgatgaccagaaacaggtagctgtgccgcggaagtggcgtgactacagtgttgagttccatttcccagagcctacagagctcacaccacctctccttcagctcattgagaaggggaggcaaggaggagccagaagctgaggattggacgatactcgcagcattttgttgacttgctgacaatggaggaaaatgcagttcaatatttgttgaggctccacccagatcaggagggaatgagcaaagcagaggctgtccgtgctaagctcgggaagtttgggttacctggacacaaccatctcactccaattgtcaaattatctggcgggcagaaggcccgagttgtgttcacttctatatcaatgtctcaacctcacatactcctgcttgacgagccaacgaatcacttggacatgcaaagtatcgatgcattggcagacgcgctggatgaattcactggaggtgtcgtcttggttagccatgactcacgattgatatctcgtgtttgtgaggatgagcaaaggagcgagatatgggttgtggaggatgggactgtgaacagatatgatggcacatttgaggattacaaggatgaactcatggaagaaataaagaaggaagttgaagaataatgctgctccaaagtattcatatatggttccaactttgtaaaaatggggcatgcttgttttatgttatacaagagaaacctgagaatatggtattatttgtttgtatattttgttgtgacatatatgtgactggacgaccggtgcagcacttctcaatcttctctcaagattatagaagccgaacaacgataatataacaatttttgcttgctgctggtttcttcaatggagtccccgactattactagcttctatcagtcttgtgtggttctgcccctgctgttgggctggtcctgctactggatagtgggtactgcttagtgaagtctgaacttatgtttgctgtgttcttcaattaag

SEQ ID NO: 64764 - DNA, 1624 bp, Zea Mays
gggcacctaacttttttatataatagtgttgattgacctctggtttggctgctacactttgcattcaggctaacaaggcagagaataagatttcatggtacatgtcttggaaagaggcatatcctgctgccttattcagacaatacataaactacagatgccatgcagaagccaccaacttgctggtggagtatctagagtcgttcgcattgactacttgatcatgtttgtttttgcgcttatccttataataggtgaggacattatttagagtacttgtctttttctgtaaagtagtggccattggtcaacaaaatattacctttgccaaagaattaggagatgcaactgcatgttggtcacttctctttttttccttgaaaacctgaaagttcaatttacttagaaactagatgaaacacaagttgttatttatcctcaagtagattaattaccactaagataactaaacaccatataggtattcaccaaacagtcactgtaagtcgataactctgaagtccaaaataaggcatgttgtagcaagcaatcattcaacttttttactgatattagttcagttctcactagctgatgggcagaggtttgatctatggtgtaaatagctattttttcttgtttattgtgtagtcgtgatcttgttttatgcaatcatatgtacttaccattttgcatcttttgaggtgcagatcagtggagtgcactcaaaactgagaattttttccccaagaagattctttatttgttttaacaaactagattcatccatgttgttttaagattcatccatgttgtttgcatactgaatattacttctaaagaaacatgttacatccataatttttgttttgggctattacacaagagaccgttttcactgcactgttctatccagatttttatcgactacaattttgtactaaccaactctacctacagaaacaagacctgcctacagtgatgaacttgcttaatataaaacacacgagccctcctcatccaccaccgatggaggatggatggcatatatgattctctaggcacctgttatgtactaattgaattttaatttcagtatacactgtgtaatggtcaaaggagaaaacttgatgaatggagaatgtacaaagatcaaagtatggctaaatgaccttgctggaagtgaatgggcaacaaagacatatgcacagggagaaaggttgaaacaagcacagaacgtaaacagttcactttctacacttggtgatgtcatatgcactctttaggtggagattccaaaactttgatgttagcagagtacggagcatagagcttggacaggctaaaaaacaagtcgatgttggagaattgtcaagatacaagctcatgcctggtgatcgggagttgactggatgaatgaaccacagctgtgtttacattaatggtggccgtcatgtttggtgcttctccagttgcagagaaatgtttggtcctccggttacagtgaagtggttcagtatgtaatatgactgattttcattgactactagggagcaaggcttccgtcccctaatttcatgatcagtttcctaagaaccggtactaaacttaaggaaagaaagcc

SEQ ID NO: 64765 - DNA, 2204 bp, Zea Mays
ccacagcaaactgtgagcccgcctcgcaatctccgccaacgcacacggcacaacaaaaccaaaaagttctcacacgctgacgccaccgcaccgcatctccctcccattccactccagtccaccaccgctcccattccccagccgccgtcgccatggccagcgccgcccactcccttctgcacacaccggaggcccacagggccgccacccgctcgcccttctctcctcccgcgcccactcccttcctccatctccgccctcaccgcctccccctccgcctccgctccacctccccgaccgcctccgacctcaccgccttccccccgaacccgaacgggatctttgcgtccgaccggcccatcgacgtggacgccgccacggaggccgagctgcgggagaacgggttccggagcacgcgccgcaccaagctcgtctgcaccgtgggccccgccacctcgcgcccggaccagctcgaggcgctcgccgtcggcgggatgaacgtggcccggctcaacatgtgccacggcgacagggagtggcatagggccgccatccgcgccgtcaggagcctcaacgaggagaagggcttcgccgtcgccgtcatgatggacaccgagggcagcgagatccacatgggggacctcggcggcgcatcctcggtcaaggcggagatgtgagagttggtgatgagctccttgtggatggtggaatggctcggtttgaggtgattgagaagataggaccagatgttaagtgccgttgcacagatcctggtttattgttgccacgtgccaatcttacattctggcgtgacggcagtatcgtccgtgagaggaatgctatgcttcctacaatttcatcaaaggattggcttgacatagactttgggattgccgaaggtgtagatttcatcgctgtttcatttgtcaagtctgcagaagtaattaggcacttgaaaagctacatagctgcaaggagccgtggaagtgacatggcagtcattgcgaaaatcgagagcatcgactctctaaagaacctggaggagatcatccgagcgtcagacggcgccatggtagccagaggggacatgggggcgcaggttcccctggagcaggtcccctcgatacagcaaaagatcgttcagctctgcaggcagctgaacaagccggtcatcgtcgcctcccagctcctcgagtcgatgatagagtaccccacgcccaccagggccgaggtcgcggacgtctccgaagccgtccgccagcgcgccgacgccctgatgctttccggcgagtcggcaatggggaggtacccggacaaggctctcagcgttctgaggagcgtcagcctgaggatcgagaagtggtggagggaggagaagcggcacgaggcgctggagctccggagcgtctcgtcctccttctccgacaagatatcggaggagatctgcaactcagcagctaaaatggctaatggcctgggagtggacgccgtctttgtgttcaccaagaccgggcacatggcctccctgctctcgcggtgccgccccgactgcccggtcttcgccttcacgacgtcgacgtccgtcaggaggcggctgaacctgcagtggggcctgatccccttccgcctcgccttctcggacgacatggagagcaacctgaaccgcaccttctccctgctcaaggccaggggcatgatccagtctggggacctcgtgatcgccctctcggacatgctgcagtccatccaggtgatgaacgtaccctgaggtagaagagccttacctttacctccatgccgcacggtcccgtatcggaaggaacacgcgtgttatcggcaccttggaaggacggtttcttccttccctgcgcctaaatcgctgccctttgttttcgctgtatcagatgctgctatgctatgctaggctctagtctggcccagggaactgtggcaataatctgtggctttcaggctggtgttagaactcttgtactacttgtaggcttaggtgatttttatcgtgcaagtagttggtttgatgtttttgtgtggtataaaagcgactcaagctatgggcctaggcctctttggtataccttttttttctgaagagtttttttagagaatctggattcgttgataacctagctctcacgagaatctcaatattacggggggcttacttacagagaaatatgaagggg

SEQ ID NO: 64766 - DNA, 1486 bp, Zea Mays
ctggccgctagctagggtttggtctttacggccgccgccgcttctgcagacgtcccgtgccctttgctgtttcagcgttctttcttgtagtttcatgaagcatcttggttggtttgtttcttgagtgtctcttccttttctcccctttgctcctctttgtgcagttttgttcagagagacgatgttttcctcttttttgtcgtccttaagaatttatttctctcttctgttgcgagctctgatgaggactgtgatgaaaaacacaatcaaaacacaccatctttcgggactgattggctcgatacgagccatgctgccaactctgcaattctgacgtccccattccagcccgcagattttcttttgcatttccacgcttttattcatgcgtctgtatgctgcatcgtaaaaaaattgatctgaaatactttgacagtggcctgtgacgaaactcagcaatcaaaaacaccatctttcggggctgattggcgcgagccatgctgtcacactgcaaagaattctgaggccaaacagagtataaccacttttgagtctgataccgcattggccatattttttttttcaggaaaatggtaacagcaaatcagaccagaaagacttcttggttcttaggcgtttcaaaatattgtagcctagtattttcatggatgtaatgtgctgcagaatttgagatggaattggatacctgcagattatgattacttacactgcttgtgggtacaagtcctatggatcgcccttgccggtgatgacgcggaagtgcagcaggatgctgctgctaggctcaatgaagctgaagcccgatgtccacttggcagtcgcagagtgggtgaaatattgatctacgacccatgtaggcctcggcatggctgtaaaaatgacttcggctcttgtcctcttgagctagtgttatcttaacatattgtttggcaaaacgactcattgatgtggagggagccctcccaaatagacccgtaataaccagatacatacactgcttgaatctactttgagagtagaacaaagaatgaaatactcaaccgcatgcctcctcttcgcccaatcccacccctgaccaatggaatgctctgagtttgatgctcccacaatctccgctaaagtaatcaaatagaaagcaccatttgtttggacgaggctggtaacgtggggagaggagccgtgggagagtaaaacgatcaaaaggggcggtatcagtttgtacaggcattgcattcgattgcgtgtaacagctctacgcaaacaaacaggtgtagccttgcctatctgtattcaggtcgcgttacaaacatcgtaccaaaacaccaccttaattattcaaatgtagatcctcacatgtggatttttgttgcagtttatggcttctcgcattaagttctgtaattggtttgaattcagtcattttgattctggagcattttgggtgcgtccaacatgaacatttgat

SEQ ID NO: 64767 - DNA, 874 bp, Zea Mays
ctagctagggtttggtctttacggccgccgccgcttctgcagacgtcccgtgccctttgctgtttcagcgttctttcttgtagtttcatgaagcatcttgattatgattacttacactgcttgtgggtacaagtcctatggatcgcccttgccggtgatgacgcggaagtgcagcaggatgctgctgctaggctcaatgaagctgaagcccgatgtccacttggcagtcgcagagtgggtgaaatattgatctacgacccatgtaggcctcggcatggctgtaaaaatgacttcggctcttgtcctcttgagctagtgttatcttaacatattgtttggcaaaacgactcattgatgtggagggagccctcccaaatagacccgtaataaccagatacatacactgcttgaatctactttgagagtagaacaaagaatgaaatactcaaccgcatgcctcctcttcgcccaatcccacccctgaccaatggaatgctctgagtttgatgctcccacaatctccgctaaagtaatcaaatagaaagcaccatttgtttggacgaggctggtaacgtggggagaggagccgtgggagagtaaaacgatcaaaaggggcggtatcagtttgtacaggcattgcattcgattgcgtgtaacagctctacgcaaacaaacaggtgtagccttgcctatctgtattcaggtcgcgttacaaacatcgtaccaaaacaccaccttaattattcaaatgtagatcctcacatgtggatttttgttgcagtttatggcttctcgcattaagttctgtaattggtttgaattcagtcattttgattctggagcattttgggtgcgtccaacatgaacatttgat

SEQ ID NO: 64768 - DNA, 1302 bp, Zea Mays
ctagctagggtttggtctttacggccgccgccgcttctgcagacgtcccgtgccctttgctgtttcagcgttctttcttgtagtttcatgaagcatcttggttggtttgtttcttgagtgtctcttccttttctcccctttgctcctctttgtgcagttttgttcagagagacgatgttttcctcttttttgtcgtccttaagaatttatttctctcttctgttgcgagctctgatgaggactgtgatgaaaaacacaatcaaaacacaccatctttcgggactgattggctcgatacgagccatgctgccaactctgcaattctgacgtccccattccagcccgcagattttcttttgcatttccacgcttttattcatgcgtctgtatgctgcatcgtaaaaaaattgatctgaaatactttgacagtggcctgtgacgaaactcagcaatcaaaaacaccatctttcggggctgattggcgcgagccatgctgtcacactgcaaagaattctgaggccaaacagaattatgattacttacactgcttgtgggtacaagtcctatggatcgcccttgccggtgatgacgcggaagtgcagcaggatgctgctgctaggctcaatgaagctgaagcccgatgtccacttggcagtcgcagagtgggtgaaatattgatctacgacccatgtaggcctcggcatggctgtaaaaatgacttcggctcttgtcctcttgagctagtgttatcttaacatattgtttggcaaaacgactcattgatgtggagggagccctcccaaatagacccgtaataaccagatacatacactgcttgaatctactttgagagtagaacaaagaatgaaatactcaaccgcatgcctcctcttcgcccaatcccacccctgaccaatggaatgctctgagtttgatgctcccacaatctccgctaaagtaatcaaatagaaagcaccatttgtttggacgaggctggtaacgtggggagaggagccgtgggagagtaaaacgatcaaaaggggcggtatcagtttgtacaggcattgcattcgattgcgtgtaacagctctacgcaaacaaacaggtgtagccttgcctatctgtattcaggtcgcgttacaaacatcgtaccaaaacaccaccttaattattcaaatgtagatcctcacatgtggatttttgttgcagtttatggcttctcgcattaagttctgtaattggtttgaattcagtcattttgattctggagcattttgggtgcgtccaacatgaacatttgat

SEQ ID NO: 64769 - DNA, 3417 bp, Zea Mays
ctcgacctcgcctcgcctccacgtctccttcctacctcgcgccaagcaaaggccaccgccaccgcgcgtccggcggagccctttatcaggccgcgcccgctgctgggcgggacctctccctccctccctttccactccacctccaatcctcctccccgtccacagtccacagcagaacccgttgccgttgcaggcgtaagggggcgatcgcgcttgatttttagcgctctcctgtgagcctccggctgcggcgtcgcagagatgggctgtgccccggtggtgtgggccgcggtgtggttgcttgctgccgcggtggcagggttcgccgatcccggcggcctcgagcgcgcgtttccaatagtgaagccagactacgggcacacgaaactccaactcgcaaaagaaggtctggaagcaattcagaggatcagaactccaatagctgctgtttctgttattggcccctatcggtcgggcaaatcttttcttctcaaccaacttctctccctatcatgtgacaatggttttggagttggacacatgcgggatacaaaaacaaaaggtatatgggtatggggttcccccgttgaggtggatatcggtggctccaaggtgtctgttctatacctggacaccgaaggatttgagagtgttggaaaatcaaatgtatatgatgataggatatttgctctggcaactgttttaagttctgttctgatctacaatcttcctgaaacaattcgtgaagccgatatatcgagactttcatttgccgtcgaaattgctgaagaattctatggaagagtcaaggggcaagatgttgcttttgagccagccaaacttctgtggttgatccagagggattttctccaaggaaaatcggttcagcagatggttgatgaagctctccaacgggtacctaacaacaatggagacacaaatattgacgagctcaaccaaatcagagactctttggcggttatgggagataacagtacagcttttagcttaccacagcctcatctgcaaaggacaaagttatgtgatatggaggaccaggaacttgatccgttgtatgtaaagaagagggatcagttgaaagaagtcgttgcatccatgataaaaccaaaaattgtgcagggtagaactctgaatggaacagagtttgtatccttcctagggcagatagttgatgctttgaataaaggtgaaattccatcagccgggtcgctggttgaaattttcaataaggccattcttgaacgttgcttgaaggtgtacagtgaaataatgggcagagcaggtctaccagtgtcagtggatgaacttcgggagttccacgacctggcaaaagatgaagctagaaggcttttcaacaagcagcatttcgaaacttgggccaagctaacgagtatcagtcatcaaagctgtgcgaagcacggttctcagagtgcgaagataaaatggaacgactccaagtcttgaagcttccgtccatggcgaaatttgatgccggattccttctctgcaatcgaagttttgaaacggactgtgtggggccagccaaggaaagctatcgacaccggatgtcaaagatgctggcaaggtcccgtgctcttttcatcaaggagtacaacaacaagctcttcaactggctcgccatattctccctggccatggttgtcgttgggcgcttcttggtcaagttcttcctgctcgaagttgctgcgtgggtgatgtttgccttcctagagacatacacgaggctgttctggtcgtcggagtccctgtactacaaccccgcctggcacgcgatcgtctcttcttgggaaaccgtcgtctacagccccgttcttgatcttgacagatgggcgttcccgatctgcgctgtcctgttgtttttggcgttttattggcgttgcctcggtggaaggaggggaattgcccggtcactgctacctctgtacaacggggcttattacagaagctccagtcgcacaagaacagactgatccctcgaaccatgcgcacaatcacaccattagcgtgcacatatagttgtatcatgcttattccaacactgcattcttcgattatgagtcaaaactcgggtgttgctgtaaatatgaaacccagaaggtttgtcaattgtataaatatatggctgcttgctaaacttcttggatttatttgtttgtttatttattaagctctgatcctctggggtttgtctccgtagtgtcaagcccattgaatggcgtagctgctgtagttggtctgcttgtcggcgtagcggtcccagatcatgatcccggcgtagctgggcgccttctgcaccaccgggaggacgccgtagtacaggttcttggggtgcacgtacccgaccgtccgctccgacgccggcaggccgacgtagagcccggagcccgggtacgccgcggcccacttgtcccactcctgctgccagtacgcggcgcagcgcgcgtcgccgtagagcctgacgttgacgcgggtaacgagccccgtggcgagcagccgcagcgccggcccgtccggcgggaacgcgcaccgcggcgtcgccgacagctgcacgggcgtgcgggcgcggaactgccggttgtagctccacaggcgcgcggccagcgcgtcgaggtggtccggcggcgggcggccgccgcggtcgaggaagaagtcgaggccgtcgacgtacgcgtcgccgaacgggcggcgcacgccggcgcgcggcgccggcgccgggaagtaggcgtaccagaggtagtcggcgaggtccgcggcggcctcggcgctcggcagggagtgctgccggccgccgagggagaggaacaccatgatgctcttcgactggcagtgcttgatgtcggcgccgatgccggcgacggggtggcccgagaggtccaggctcggcgggctgttgccggggccggccgagacgttgaggaaggagatgacgacgatggtgtacgtgcccgtgtcgcaggcctctcggagcgtgccctcggccttgttccggccccagaagacagtcacctgcccggtcttccccgcggccgcggccgggccggcgaggaagagggagccagcgacggccacaagggccgccaggggcagtagagtggttgctggtctattacttgcgaccgccattggtgtctcgttggttaattgctgctaccactactcgtcactactcttgcgtgtgcgtgtagcagcagtcacccatcacccattatatgcctttcatttggtgttcgtcttagacttgtcttgttttggatcgaatcgggaaagaggaggacagctcaccgagctagaaggacgtggacgtggtacatagcatggcggcgaatcgactatgcatgctgttgtgtttgaccgacgcacgacgcagtgtctcgt

SEQ ID NO: 64770 - DNA, 3440 bp, Zea Mays
cctacctcgcgccaagcaaaggccaccgccaccgcgcgtccggcggagccctttatcaggccgcgcccgctgctgggcgggacctctccctccctccctttccactccacctccaatcctcctccccgtccacagtccacagcagaacccgttgccgttgcaggcgtaagggggcgatcgcgcttgatttttagcgctctcctgtgagcctccggctgcggcgtcgcagagatgggctgtgccccggtggtgtgggccgcggtgtggttgcttgctgccgcggtggcagggttcgccgatcccggcggcctcgagcgcgcgtttccaatagtgaagccagactacgggcacacgaaactccaactcgcaaaagaaggtctggaagcaattcagaggatcagaactccaatagctgctgtttctgttattggcccctatcggtcgggcaaatcttttcttctcaaccaacttctctccctatcatgtgacaatggttttggagttggacacatgcgggatacaaaaacaaaaggtatatgggtatggggttcccccgttgaggtggatatcggtggctccaaggtgtctgttctatacctggacaccgaaggatttgagagtgttggaaaatcaaatgtatatgatgataggatatttgctctggcaactgttttaagttctgttctgatctacaatcttcctgaaacaattcgtgaagccgatatatcgagactttcatttgccgtcgaaattgctgaagaattctatggaagagtcaaggggcaagatgttgcttttgagccagccaaacttctgtggttgatccagagggattttctccaaggaaaatcggttcagcagatggttgatgaagctctccaacgggtacctaacaacaatggagacacaaatattgacgagctcaaccaaatcagagactctttggcggttatgggagataacagtacagcttttagcttaccacagcctcatctgcaaaggacaaagttatgtgatatggaggaccaggaacttgatccgttgtatgtaaagaagagggatcagttgaaagaagtcgttgcatccatgataaaaccaaaaattgtgcagggtagaactctgaatggaacagagtttgtatccttcctagggcagatagttgatgctttgaataaaggtgaaattccatcagccgggtcgctggttgaaattttcaataaggccattcttgaacgttgcttgaaggtgtacagtgaaataatgggcagagcaggtctaccagtgtcagtggatgaacttcgggagttccacgacctggcaaaagatgaagctagaaggcttttcaacaagcagcatttcggtaaacatcatgctgctcggtccatcctcaagcttgatgaagagattaaaaagaaacttgggccaagctaacgagtatcagtcatcaaagctgtgcgaagcacggttctcagagtgcgaagataaaatggaacgactccaagtcttgaagcttccgtccatggcgaaatttgatgccggattccttctctgcaatcgaagttttgaaacggactgtgtggggccagccaaggaaagctatcgacaccggatgtcaaagatgctggcaaggtcccgtgctcttttcatcaaggagtacaacaacaagctcttcaactggctcgccatattctccctggccatggttgtcgttgggcgcttcttggtcaagttcttcctgctcgaagttgctgcgtgggtgatgtttgccttcctagagacatacacgaggctgttctggtcgtcggagtccctgtactacaaccccgcctggcacgcgatcgtctcttcttgggaaaccgtcgtctacagccccgttcttgatcttgacagatgggcgttcccgatctgcgctgtcctgttgtttttggcgttttattggcgttgcctcggtggaaggaggggaattgcccggtcactgctacctctgtacaacggggcttattacagaagctccagtcgcacaagaacagactgatccctcgaaccatgcgcacaatcacaccattagcgtgcacatatagttgtatcatgcttattccaacactgcattcttcgattatgagtcaaaactcgggtgttgctgtaaatatgaaacccagaaggtttgtcaattgtataaatatatggctgcttgctaaacttcttggatttatttgtttgtttatttattaagctctgatcctctggggtttgtctccgtagtgtcaagcccattgaatggcgtagctgctgtagttggtctgcttgtcggcgtagcggtcccagatcatgatcccggcgtagctgggcgccttctgcaccaccgggaggacgccgtagtacaggttcttggggtgcacgtacccgaccgtccgctccgacgccggcaggccgacgtagagcccggagcccgggtacgccgcggcccacttgtcccactcctgctgccagtacgcggcgcagcgcgcgtcgccgtagagcctgacgttgacgcgggtaacgagccccgtggcgagcagccgcagcgccggcccgtccggcgggaacgcgcaccgcggcgtcgccgacagctgcacgggcgtgcgggcgcggaactgccggttgtagctccacaggcgcgcggccagcgcgtcgaggtggtccggcggcgggcggccgccgcggtcgaggaagaagtcgaggccgtcgacgtacgcgtcgccgaacgggcggcgcacgccggcgcgcggcgccggcgccgggaagtaggcgtaccagaggtagtcggcgaggtccgcggcggcctcggcgctcggcagggagtgctgccggccgccgagggagaggaacaccatgatgctcttcgactggcagtgcttgatgtcggcgccgatgccggcgacggggtggcccgagaggtccaggctcggcgggctgttgccggggccggccgagacgttgaggaaggagatgacgacgatggtgtacgtgcccgtgtcgcaggcctctcggagcgtgccctcggccttgttccggccccagaagacagtcacctgcccggtcttccccgcggccgcggccgggccggcgaggaagagggagccagcgacggccacaagggccgccaggggcagtagagtggttgctggtctattacttgcgaccgccattggtgtctcgttggttaattgctgctaccactactcgtcactactcttgcgtgtgcgtgtagcagcagtcacccatcacccattatatgcctttcatttggtgttcgtcttagacttgtcttgttttggatcgaatcgggaaagaggaggacagctcaccgagctagaaggacgtggacgtggtacatagcatggcggcgaatcgactatgcatgctgttgtgtttgaccgacgcacgacgcagtgtctcgt

SEQ ID NO: 64771 - DNA, 3390 bp, Zea Mays
tccactccacctccaatcctcctccccgtccacagtccacagcagaacccgttgccgttgcaggcgtaagggggcgatcgcgcttgatttttagcgctctcctgtgagcctccggctgcggcgtcgcagagatgggctgtgccccggtggtgtgggccgcggtgtggttgcttgctgccgcggtggcagggttcgccgatcccggcggcctcgagcgcgcgtttccaatagtgaagccagactacgggcacacgaaactccaactcgcaaaagaaggtctggaagcaattcagaggatcagaactccaatagctgctgtttctgttattggcccctatcggtcgggcaaatcttttcttctcaaccaacttctctccctatcatgtgacaatggttttggagttggacacatgcgggatacaaaaacaaaaggtatatgggtatggggttcccccgttgaggtggatatcggtggctccaaggtgtctgttctatacctggacaccgaaggatttgagagtgttggaaaatcaaatgtatatgatgataggatatttgctctggcaactgttttaagttctgttctgatctacaatcttcctgaaacaattcgtgaagccgatatatcgagactttcatttgccgtcgaaattgctgaagaattctatggaagagtcaaggggcaagatgttgcttttgagccagccaaacttctgtggttgatccagagggattttctcctaactggttgatgctctttctaggtacctacatttttgaaagaaggaaaatcggttcagcagatggttgatgaagctctccaacgggtacctaacaacaatggagacacaaatattgacgagctcaaccaaatcagagactctttggcggttatgggagataacagtacagcttttagcttaccacagcctcatctgcaaaggacaaagttatgtgatatggaggaccaggaacttgatccgttgtatgtaaagaagagggatcagttgaaagaagtcgttgcatccatgataaaaccaaaaattgtgcagggtagaactctgaatggaacagagtttgtatccttcctagggcagatagttgatgctttgaataaaggtgaaattccatcagccgggtcgctggttgaaattttcaataaggccattcttgaacgttgcttgaaggtgtacagtgaaataatgggcagagcaggtctaccagtgtcagtggatgaacttcgggagttccacgacctggcaaaagatgaagctagaaggcttttcaacaagcagcatttcggtaaacatcatgctgctcggtccatcctcaagcttgatgaagagattaaaaaggtgtacagaaacttgggccaagctaacgagtatcagtcatcaaagctgtgcgaagcacggttctcagagtgcgaagataaaatggaacgactccaagtcttgaagcttccgtccatggcgaaatttgatgccggattccttctctgcaatcgaagttttgaaacggactgtgtggggccagccaaggaaagctatcgacaccggatgtcaaagatgctggcaaggtcccgtgctcttttcatcaaggagtacaacaacaagctcttcaactggctcgccatattctccctggccatggttgtcgttgggcgcttcttggtcaagttcttcctgctcgaagttgctgcgtgggtgatgtttgccttcctagagacatacacgaggctgttctggtcgtcggagtccctgtactacaaccccgcctggcacgcgatcgtctcttcttgggaaaccgtcgtctacagccccgttcttgatcttgacagatgggcgttcccgatctgcgctgtcctgttgtttttggcgttttattggcgttgcctcggtggaaggaggggaattgcccggtcactgctacctctgtacaacggggcttattacagaagctccagtcgcacaagaacagactgatccctcgaaccatgcgcacaatcacaccattagcgtgcacatatagttgtatcatgcttattccaacactgcattcttcgattatgagtcaaaactcgggtgttgctgtaaatatgaaacccagaaggtttgtcaattgtataaatatatggctgcttgctaaacttcttggatttatttgtttgtttatttattaagctctgatcctctggggtttgtctccgtagtgtcaagcccattgaatggcgtagctgctgtagttggtctgcttgtcggcgtagcggtcccagatcatgatcccggcgtagctgggcgccttctgcaccaccgggaggacgccgtagtacaggttcttggggtgcacgtacccgaccgtccgctccgacgccggcaggccgacgtagagcccggagcccgggtacgccgcggcccacttgtcccactcctgctgccagtacgcggcgcagcgcgcgtcgccgtagagcctgacgttgacgcgggtaacgagccccgtggcgagcagccgcagcgccggcccgtccggcgggaacgcgcaccgcggcgtcgccgacagctgcacgggcgtgcgggcgcggaactgccggttgtagctccacaggcgcgcggccagcgcgtcgaggtggtccggcggcgggcggccgccgcggtcgaggaagaagtcgaggccgtcgacgtacgcgtcgccgaacgggcggcgcacgccggcgcgcggcgccggcgccgggaagtaggcgtaccagaggtagtcggcgaggtccgcggcggcctcggcgctcggcagggagtgctgccggccgccgagggagaggaacaccatgatgctcttcgactggcagtgcttgatgtcggcgccgatgccggcgacggggtggcccgagaggtccaggctcggcgggctgttgccggggccggccgagacgttgaggaaggagatgacgacgatggtgtacgtgcccgtgtcgcaggcctctcggagcgtgccctcggccttgttccggccccagaagacagtcacctgcccggtcttccccgcggccgcggccgggccggcgaggaagagggagccagcgacggccacaagggccgccaggggcagtagagtggttgctggtctattacttgcgaccgccattggtgtctcgttggttaattgctgctaccactactcgtcactactcttgcgtgtgcgtgtagcagcagtcacccatcacccattatatgcctttcatttggtgttcgtcttagacttgtcttgttttggatcgaatcgggaaagaggaggacagctcaccgagctagaaggacgtggacgtggtacatagcatggcggcgaatcgactatgcatgctgttgtgtttgaccgacgcacgacgcagtgtctcgt

SEQ ID NO: 64772 - DNA, 3460 bp, Zea Mays
ctccaatcctcctccccgtccacagtccacagcagaacccgttgccgttgcaggcgtaagggggcgatcgcgcttgatttttagcgctctcctgtgagcctccggctgcggcgtcgcagagatgggctgtgccccggtggtgtgggccgcggtgtggttgcttgctgccgcggtggcagggttcgccgatcccggcggcctcgagcgcgcagatagctacacaggtttccaatagtgaagccagactacgggcacacgaaactccaactcgcaaaagaaggtctggaagcaattcagaggatcagaactccaatagctgctgtttctgttattggcccctatcggtcgggcaaatcttttcttctcaaccaacttctctccctatcatgtgacaatggttttggagttggacacatgcgggatacaaaaacaaaaggtatatgggtatggggttcccccgttgaggtggatatcggtggctccaaggtgtctgttctatacctggacaccgaaggatttgagagtgttggaaaatcaaatgtatatgatgataggatatttgctctggcaactgttttaagttctgttctgatctacaatcttcctgaaacaattcgtgaagccgatatatcgagactttcatttgccgtcgaaattgctgaagaattctatggaagagtcaaggggcaagatgttgcttttgagccagccaaacttctgtggttgatccagagggattttctccaaggaaaatcggttcagcagatggttgatgaagctctccaacgggtacctaacaacaatggagacacaaatattgacgagctcaaccaaatcagagactctttggcggttatgggagataacagtacagcttttagcttaccacagcctcatctgcaaaggacaaagttatgtgatatggaggaccaggaacttgatccgttgtatgtaaagaagagggatcagttgaaagaagtcgttgcatccatgataaaaccaaaaattgtgcagggtagaactctgaatggaacagagtttgtatccttcctagggcagatagttgatgctttgaataaaggtgaaattccatcagccgggtcgctggttgaaattttcaataaggccattcttgaacgttgcttgaaggtgtacagtgaaataatgggcagagcaggtctaccagtgtcagtggatgaacttcgggagttccacgacctggcaaaagatgaagctagaaggcttttcaacaagcagcatttcggtaaacatcatgctgctcggtccatcctcaagcttgatgaagagattaaaaaggtgtacagaaacttgggccaagctaacgagtatcagtcatcaaagctgtgcgaagcacggttctcagagtgcgaagataaaatggaacgactccaagtcttgaagcttccgtccatggcgaaatttgatgccggattccttctctgcaatcgaagttttgaaacggactgtgtggggccagccaaggaaagctatcgacaccggatgtcaaagatgctggcaaggtcccgtgctcttttcatcaaggagtacaacaacaagctcttcaactggctcgccatattctccctggccatggttgtcgttgggcgcttcttggtcaagttcttcctgctcgaagttgctgcgtgggtgatgtttgccttcctagagacatacacgaggctgttctggtcgtcggagtccctgtactacaaccccgcctggcacgcgatcgtctcttcttgggaaaccgtcgtctacagccccgttcttgatcttgacaggtcaggagttctccctcccttcccaactctacgctgcccatgcatggcatctctctatctactgtctgctgctatactactgtgatgttactacccttatatgcacagatgggcgttcccgatctgcgctgtcctgttgtttttggcgttttattggcgttgcctcggtggaaggaggggaattgcccggtcactgctacctctgtacaacggggcttattacagaagctccagtcgcacaagaacagactgatccctcgaaccatgcgcacaatcacaccattagcgtgcacatatagttgtatcatgcttattccaacactgcattcttcgattatgagtcaaaactcgggtgttgctgtaaatatgaaacccagaaggtttgtcaattgtataaatatatggctgcttgctaaacttcttggatttatttgtttgtttatttattaagctctgatcctctggggtttgtctccgtagtgtcaagcccattgaatggcgtagctgctgtagttggtctgcttgtcggcgtagcggtcccagatcatgatcccggcgtagctgggcgccttctgcaccaccgggaggacgccgtagtacaggttcttggggtgcacgtacccgaccgtccgctccgacgccggcaggccgacgtagagcccggagcccgggtacgccgcggcccacttgtcccactcctgctgccagtacgcggcgcagcgcgcgtcgccgtagagcctgacgttgacgcgggtaacgagccccgtggcgagcagccgcagcgccggcccgtccggcgggaacgcgcaccgcggcgtcgccgacagctgcacgggcgtgcgggcgcggaactgccggttgtagctccacaggcgcgcggccagcgcgtcgaggtggtccggcggcgggcggccgccgcggtcgaggaagaagtcgaggccgtcgacgtacgcgtcgccgaacgggcggcgcacgccggcgcgcggcgccggcgccgggaagtaggcgtaccagaggtagtcggcgaggtccgcggcggcctcggcgctcggcagggagtgctgccggccgccgagggagaggaacaccatgatgctcttcgactggcagtgcttgatgtcggcgccgatgccggcgacggggtggcccgagaggtccaggctcggcgggctgttgccggggccggccgagacgttgaggaaggagatgacgacgatggtgtacgtgcccgtgtcgcaggcctctcggagcgtgccctcggccttgttccggccccagaagacagtcacctgcccggtcttccccgcggccgcggccgggccggcgaggaagagggagccagcgacggccacaagggccgccaggggcagtagagtggttgctggtctattacttgcgaccgccattggtgtctcgttggttaattgctgctaccactactcgtcactactcttgcgtgtgcgtgtagcagcagtcacccatcacccattatatgcctttcatttggtgttcgtcttagacttgtcttgttttggatcgaatcgggaaagaggaggacagctcaccgagctagaaggacgtggacgtggtacatagcatggcggcgaatcgactatgcatgctgttgtgtttgaccgacgcacgacgcagtgtctcgt

SEQ ID NO: 64773 - DNA, 2873 bp, Zea Mays
tccacagcagaacccgttgccgttgcaggcgtaagggggcgatcgcgcttgatttttagcgctctcctgtgagcctccggctgcggcgtcgcagagatgggctgtgccccggtggtgtgggccgcggtgtggttgcttgctgccgcggtggcagggttcgccgatcccggcggcctcgagcgcgcgtttccaatagtgaagccagactacgggcacacgaaactccaactcgcaaaagaaggtctggaagcaattcagaggatcagaactccaatagctgctgtttctgttattggcccctatcggtcgggcaaatcttttcttctcaaccaacttctctccctatcatgtgacaatggttttggagttggacacatgcgggatacaaaaacaaaaggtatatgggtatggggttcccccgttgaggtggatatcggtggctccaaggtgtctgttctatacctggacaccgaaggatttgagagtgttggaaaatcaaatgtatatgatgataggatatttgctctggcaactgttttaagttctgttctgatctacaatcttcctgaaacaattcgtgaagccgatatatcgagactttcatttgccgtcgaaattgctgaagaattctatggaagagtcaaggggcaagatgttgcttttgagccagccaaacttctgtggttgatccagagggattttctccaaggaaaatcggttcagcagatggttgatgaagctctccaacgggtacctaacaacaatggagacacaaatattgacgagctcaaccaaatcagagactctttggcggttatgggagataacagtacagcttttagcttaccacagcctcatctgcaaaggacaaagttatgtgatatggaggaccaggaacttgatccgttgtatgtaaagaagagggatcagttgaaagaagtcgttgcatccatgataaaaccaaaaattgtgcagggtagaactctgaatggaacagagtttgtatccttcctagggcagatagttgatgctttgaataaaggtgaaattccatcagccgggtcgctggttgaaattttcaataaggccattcttgaacgttgcttgaaggtgtacagtgaaataatgggcagagcaggtctaccagtgtcagtggatgaacttcgggagttccacgacctggcaaaagatgaagctagaaggcttttcaacaagcagcatttcggtaaacatcatgctgctcggtccatcctcaagcttgatgaagagattaaaaaggtgtacagaaacttgggccaagctaacgagtatcagtcatcaaagctgtgcgaagcacggttctcagagtgcgaagataaaatggaacgactccaagtcttgaagcttccgtccatggcgaaatttgatgccggattccttctctgcaatcgaagttttgaaacggactgtgtggggccagccaaggaaagctatcgacaccggatgtcaaagatgctggcaaggtcccgtgctcttttcatcaaggagtacaacaacaagctcttcaactggctcgccatattctccctggccatggttgtcgttgggcgcttcttggtcaagttcttcctgctcgaagttgctgcgtgggtgatgtttgccttcctagagacatacacgaggctgttctggtcgtcggagtccctgtactacaaccccgcctggcacgcgatcgtctcttcttgggaaaccgtcgtctacagccccgttcttgatcttgacagatgggcgttcccgatctgcgctgtcctgttgtttttggcgttttattggcgttgcctcggtggaaggaggggaattgcccggtcactgctacctctgtacaacggggcttattacagaagctccagtcgcacaagaacagactgatccctcgaaccatgcgcacaatcacaccattagcgtgcacatatagttgtatcatgcttattccaacactgcattcttcgattatgagtcaaaactcgggtgttgctgtaaatatgaaacccagaaggtttgtcaattgtataaatatatggctgcttgctaaacttcttggatttatttgtttgtttatttattaagctctgatcctctggggtttgtctccgtagtgtcaagcccattgaatggcgtagctgctgtagttggtctgcttgtcggcgtagcggtcccagatcatgatcccggcgtagctgggcgtaccagaggtagtcggcgaggtccgcggcggcctcggcgctcggcagggagtgctgccggccgccgagggagaggaacaccatgatgctcttcgactggcagtgcttgatgtcggcgccgatgccggcgacggggtggcccgagaggtccaggctcggcgggctgttgccggggccggccgagacgttgaggaaggagatgacgacgatggtgtacgtgcccgtgtcgcaggcctctcggagcgtgccctcggccttgttccggccccagaagacagtcacctgcccggtcttccccgcggccgcggccgggccggcgaggaagagggagccagcgacggccacaagggccgccaggggcagtagagtggttgctggtctattacttgcgaccgccattggtgtctcgttggttaattgctgctaccactactcgtcactactcttgcgtgtgcgtgtagcagcagtcacccatcacccattatatgcctttcatttggtgttcgtcttagacttgtcttgttttggatcgaatcgggaaagaggaggacagctcaccgagctagaaggacgtggacgtggtacatagcatggcggcgaatcgactatgcatgctgttgtgtttgaccgacgcacgacgcagtgtctcgt

SEQ ID NO: 64774 - DNA, 3294 bp, Zea Mays
ggcgatcgcgcttgatttttagcgctctcctgtgagcctccggctgcggcgtcgcagagatgggctgtgccccggtggtgtgggccgcggtgtggttgcttgctgccgcggtggcagggttcgccgatcccggcggcctcgagcgcgcgtttccaatagtgaagccagactacgggcacacgaaactccaactcgcaaaagaaggtctggaagcaattcagaggatcagaactccaatagctgctgtttctgttattggcccctatcggtcgggcaaatcttttcttctcaaccaacttctctccctatcatgtgacaatggttttggagttggacacatgcgggatacaaaaacaaaaggtatatgggtatggggttcccccgttgaggtggatatcggtggctccaaggtgtctgttctatacctggacaccgaaggatttgagagtgttggaaaatcaaatgtatatgatgataggatatttgctctggcaactgttttaagttctgttctgatctacaatcttcctgaaacaattcgtgaagccgatatatcgagactttcatttgccgtcgaaattgctgaagaattctatggaagagtcaaggggcaagatgttgcttttgagccagccaaacttctgtggttgatccagagggattttctccaaggaaaatcggttcagcagatggttgatgaagctctccaacgggtacctaacaacaatggagacacaaatattgacgagctcaaccaaatcagagactctttggcggttatgggagataacagtacagcttttagcttaccacagcctcatctgcaaaggacaaagttatgtgatatggaggaccaggaacttgatccgttgtatgtaaagaagagggatcagttgaaagaagtcgttgcatccatgataaaaccaaaaattgtgcagggtagaactctgaatggaacagagtttgtatccttcctagggcaggtgtacagtgaaataatgggcagagcaggtctaccagtgtcagtggatgaacttcgggagttccacgacctggcaaaagatgaagctagaaggcttttcaacaagcagcatttcggtaaacatcatgctgctcggtccatcctcaagcttgatgaagagattaaaaaggtgtacagaaacttgggccaagctaacgagtatcagtcatcaaagctgtgcgaagcacggttctcagagtgcgaagataaaatggaacgactccaagtcttgaagcttccgtccatggcgaaatttgatgccggattccttctctgcaatcgaagttttgaaacggactgtgtggggccagccaaggaaagctatcgacaccggatgtcaaagatgctggcaaggtcccgtgctcttttcatcaaggagtacaacaacaagctcttcaactggctcgccatattctccctggccatggttgtcgttgggcgcttcttggtcaagttcttcctgctcgaagttgctgcgtgggtgatgtttgccttcctagagacatacacgaggctgttctggtcgtcggagtccctgtactacaaccccgcctggcacgcgatcgtctcttcttgggaaaccgtcgtctacagccccgttcttgatcttgacaggtcaggagttctccctcccttcccaactctacgctgcccatgcatggcatctctctatctactgtctgctgctatactactgtgatgttactacccttatatgcacagatgggcgttcccgatctgcgctgtcctgttgtttttggcgttttattggcgttgcctcggtggaaggaggggaattgcccggtcactgctacctctgtacaacggggcttattacagaagctccagtcgcacaagaacagactgatccctcgaaccatgcgcacaatcacaccattagcgtgcacatatagttgtatcatgcttattccaacactgcattcttcgattatgagtcaaaactcgggtgttgctgtaaatatgaaacccagaaggtttgtcaattgtataaatatatggctgcttgctaaacttcttggatttatttgtttgtttatttattaagctctgatcctctggggtttgtctccgtagtgtcaagcccattgaatggcgtagctgctgtagttggtctgcttgtcggcgtagcggtcccagatcatgatcccggcgtagctgggcgccttctgcaccaccgggaggacgccgtagtacaggttcttggggtgcacgtacccgaccgtccgctccgacgccggcaggccgacgtagagcccggagcccgggtacgccgcggcccacttgtcccactcctgctgccagtacgcggcgcagcgcgcgtcgccgtagagcctgacgttgacgcgggtaacgagccccgtggcgagcagccgcagcgccggcccgtccggcgggaacgcgcaccgcggcgtcgccgacagctgcacgggcgtgcgggcgcggaactgccggttgtagctccacaggcgcgcggccagcgcgtcgaggtggtccggcggcgggcggccgccgcggtcgaggaagaagtcgaggccgtcgacgtacgcgtcgccgaacgggcggcgcacgccggcgcgcggcgccggcgccgggaagtaggcgtaccagaggtagtcggcgaggtccgcggcggcctcggcgctcggcagggagtgctgccggccgccgagggagaggaacaccatgatgctcttcgactggcagtgcttgatgtcggcgccgatgccggcgacggggtggcccgagaggtccaggctcggcgggctgttgccggggccggccgagacgttgaggaaggagatgacgacgatggtgtacgtgcccgtgtcgcaggcctctcggagcgtgccctcggccttgttccggccccagaagacagtcacctgcccggtcttccccgcggccgcggccgggccggcgaggaagagggagccagcgacggccacaagggccgccaggggcagtagagtggttgctggtctattacttgcgaccgccattggtgtctcgttggttaattgctgctaccactactcgtcactactcttgcgtgtgcgtgtagcagcagtcacccatcacccattatatgcctttcatttggtgttcgtcttagacttgtcttgttttggatcgaatcgggaaagaggaggacagctcaccgagctagaaggacgtggacgtggtacatagcatggcggcgaatcgactatgcatgctgttgtgtttgaccgacgcacgacgcagtgtctcgt

SEQ ID NO: 64775 - DNA, 2581 bp, Zea Mays
ctttctaggtacctacatttttgaaagaaggaaaatcggttcagcagatggttgatgaagctctccaacgggtacctaacaacaatggagacacaaatattgacgagctcaaccaaatcagagactctttggcggttatgggagataacagtacagcttttagcttaccacagcctcatctgcaaaggacaaagttatgtgatatggaggaccaggaacttgatccgttgtatgtaaagaagagggatcagttgaaagaagtcgttgcatccatgataaaaccaaaaattgtgcagggtagaactctgaatggaacagagtttgtatccttcctagggcagatagttgatgctttgaataaaggtgaaattccatcagccgggtcgctggttgaaattttcaataaggccattcttgaacgttgcttgaaggtgtacagtgaaataatgggcagagcaggtctaccagtgtcagtggatgaacttcgggagttccacgacctggcaaaagatgaagctagaaggcttttcaacaagcagcatttcggtgtacagaaacttgggccaagctaacgagtatcagtcatcaaagctgtgcgaagcacggttctcagagtgcgaagataaaatggaacgactccaagtcttgaagcttccgtccatggcgaaatttgatgccggattccttctctgcaatcgaagttttgaaacggactgtgtggggccagccaaggaaagctatcgacaccggatgtcaaagatgctggcaaggtcccgtgctcttttcatcaaggagtacaacaacaagctcttcaactggctcgccatattctccctggccatggttgtcgttgggcgcttcttggtcaagttcttcctgctcgaagttgctgcgtgggtgatgtttgccttcctagagacatacacgaggctgttctggtcgtcggagtccctgtactacaaccccgcctggcacgcgatcgtctcttcttgggaaaccgtcgtctacagccccgttcttgatcttgacagatgggcgttcccgatctgcgctgtcctgttgtttttggcgttttattggcgttgcctcggtggaaggaggggaattgcccggtcactgctacctctgtacaacggggcttattacagaagctccagtcgcacaagaacagactgatccctcgaaccatgcgcacaatcacaccattagcgtgcacatatagttgtatcatgcttattccaacactgcattcttcgattatgagtcaaaactcgggtgttgctgtaaatatgaaacccagaaggtttgtcaattgtataaatatatggctgcttgctaaacttcttggatttatttgtttgtttatttattaagctctgatcctctggggtttgtctccgtagtgtcaagcccattgaatggcgtagctgctgtagttggtctgcttgtcggcgtagcggtcccagatcatgatcccggcgtagctgggcgccttctgcaccaccgggaggacgccgtagtacaggttcttggggtgcacgtacccgaccgtccgctccgacgccggcaggccgacgtagagcccggagcccgggtacgccgcggcccacttgtcccactcctgctgccagtacgcggcgcagcgcgcgtcgccgtagagcctgacgttgacgcgggtaacgagccccgtggcgagcagccgcagcgccggcccgtccggcgggaacgcgcaccgcggcgtcgccgacagctgcacgggcgtgcgggcgcggaactgccggttgtagctccacaggcgcgcggccagcgcgtcgaggtggtccggcggcgggcggccgccgcggtcgaggaagaagtcgaggccgtcgacgtacgcgtcgccgaacgggcggcgcacgccggcgcgcggcgccggcgccgggaagtaggcgtaccagaggtagtcggcgaggtccgcggcggcctcggcgctcggcagggagtgctgccggccgccgagggagaggaacaccatgatgctcttcgactggcagtgcttgatgtcggcgccgatgccggcgacggggtggcccgagaggtccaggctcggcgggctgttgccggggccggccgagacgttgaggaaggagatgacgacgatggtgtacgtgcccgtgtcgcaggcctctcggagcgtgccctcggccttgttccggccccagaagacagtcacctgcccggtcttccccgcggccgcggccgggccggcgaggaagagggagccagcgacggccacaagggccgccaggggcagtagagtggttgctggtctattacttgcgaccgccattggtgtctcgttggttaattgctgctaccactactcgtcactactcttgcgtgtgcgtgtagcagcagtcacccatcacccattatatgcctttcatttggtgttcgtcttagacttgtcttgttttggatcgaatcgggaaagaggaggacagctcaccgagctagaaggacgtggacgtggtacatagcatggcggcgaatcgactatgcatgctgttgtgtttgaccgacgcacgacgcagtgtctcgt

SEQ ID NO: 64776 - DNA, 989 bp, Zea Mays
atccactcgtgatccctggtcaccaaatcagcccttagatttttgtagtgcaataggagcagtactaaagactgccttgattcccttcatcactgctggagaccctgacttggccaccacagcaaaagcactcaggatccttgatgcgtgtggttcagacgtgatcgaactgggtgtgccttactccgatccattggctgacggccctgttattcaggcctccgcgacgcgcgctctggcaaagggcaccacatttgaggatgtcatctccatggtaaagggggtgatacctgatctgtcctgccctgtagcgcttttcacatattacaacccgatcctgaagcgtggtgtccccaacttcatgagtattgttaaagaagctggggtacacggtcttgtggtaccagatgttcctttggaagagacagatgtcttgaggagtgaggctgccaaaaacaacctagagctggtgctattgacaacaccgactacaccaaatgaaagaatggagaaaattgcacaggcttcagaaggatttatttatcttgtaagcactgttggagttactggtacacgtgcaaatgtaagcggcaaggtgcaatctcttcttcaggatatcaagaaggtgacagaaaaacccgtggctgttggctttggtgtgtcgactccagagcatgtccggcagattgcaggatggggcgcagatggtgtgattatcggtagcgcagtgatgaagacgttggaggaagctgcttctccagaagaaggattgaagaagctagaagagttcgccaagaacctgaaggccgcattgccgtgaaccaaccattttcgttagcaaagaaattaagattttttttttcctttcaatcttggctttcagggttgttggttgttgtgtagtgaaaataattgtgtccctatgttgaatgctcaaatgaataaatcaagatcccatatattatattagcagagcagaaggcagtgtt

SEQ ID NO: 64777 - DNA, 1657 bp, Zea Mays
ttctttttttttgcctctccagaagtttctgcagggaggcacagcaagagagagagcccagcactagataagtagggggggaaagaagagcatccaagcgtactcctcgatctccttcaagcagctaacataattaactcatgggtgcatagagatatgccgccgacgacccatcatatctatggttacttattattgggcatggagcacgtcatctcaatggaggagatcctcgggcccttctgggagctgctaccaccgccagcgccagagccagagccagagcgagagcagcctccggtaaccggcatcgtcgtcggcagtgtcatagacgttgctgctgctggtcacggtcatggtggcggcgacatgatggatcagcagcacgccacagagtggacctttgagaggttactggaagaggaggctctgacgacaagcacaccgccgccggtggtggtggtgccgaactcttgttgctcaggcgccctaaatgttgaccggccgccggtgatggaagaggcggtaatgatggcgcctgcggcggtgagtagtgccgtagtaggggaccccatggagtacaatgccatactgaggaggaagctggaggaggacctcgaggccttcaaaatgtggagggcggcctccagtgttgtgacctcagatcaacgttctcaaggctcaaacaatcacactggaggtagcagcatcaggaataatccagtgcagaacaagctgatgaacggcgaagatccaatcaacaataaccacgctcaaaccgcaggccttggcgtgaggcttgctactagctcttcctcgagagatccttcaccatcagacgaagacggttcaagatgcctaccgaggaaagagtgaggaaaagaaaggaatccaatagagaatcagccagacgctcgagatacaggaaagccgctcacctgaaagaactggaggaccaggtagcacagctaaaagccgagaattcttgcctgctgaggcgcattgccgctctgaaccagaagtacaacgacgctaacgtcgacaacagggtgctgagagcggacatggagaccctaagagctaaggtgaagatgggagaggactccctgaagcgggtgatagagatgagctcatcagtgccgtcgtccatgcccatctcggcgccgacccccagctccgacgctccagtgccgccgccgcctatccgagacagcatcgtcggctacttctccgccacagccgcagacgacgatgcttcggtcggcaacggtttcttgcgactgcaagctcatcaagagcctgcatccatggtcgtcggtggaactctgagcgccacagagatgaaccgagtagcagcagccacgcattgcgcgggggccatggagctcatccagacggcgatgggatccatgccgccgacctccgcctccggatctacaccgccgccgcaggattatgagctgctgggtccaaatggggccatacacatggacatgtattaggcactgcgggtttcgtgatcgctgggaacattttatttgcaggcgtcgctgaataaggctggttgtctcgatctcccttgacatgaaatccaaataactcacaattaaccatgagtgttccgtttggtcccagtttcgaaggtattgttaatcat

SEQ ID NO: 64778 - DNA, 1962 bp, Zea Mays
gttaagctggttgccgttctcttgtcccatattttttttataagagattccttatttctattattagaaatacagcagaaactaagataacagagtaggattgcaacccaggaatcagagaaacatgcagatgaacatgatcaccgcaaaacgagacctactggactaacaacagttttccagctaggcatgcaggcctgattcaggacccaggaacaaacaagaaccaagatcagcaatgacctaaaatcacaaatcacaaacgagctaacacactagttttgacaaaatgcaaatccacttgagatacaggacagagggacacccaggcaagacatgttttccttattcatgctgacgatccctttcctcgtcatcatcttcatcgcggtcttcatctccatttcccagcttagcacaagcagctttcatcaacaactttgcgccctcctgcacgagatcttgaagctcctttttactaagacctgcccaatgcgtcataagagcgcgagcgtgacacaaatttcatcaggagatttaattaaaacattttcaaaacacattttgtttctggctttccagatggcctagcatatagcagagacacctataatgtgaatgatgtctaaccctggtaaatgtttttttaaccaaagccaacattgatcaatatcaccaaggatgtccttcttgttaatgatcttcgcaaccattccccaaataactttggcaatagaacacctaaagaagagtggtcaatggtttcaatctgattacaaaagtaacagttataatcacccacccacttttcttacacatattgtccttggtaaaaaaactattttcaagggaccacatgaaaattttaatcttaggaggaattttccccttccatgtatgtttcatatatgggccatagacccatagttacaaggatccgcatgagcatacatagattccacagaaaatttcttatgtgttccccatttccagattatctgatcagatgtatcaaaatccaacttgaattttcttgctttatcacaaacctcattccacttctcagctattcatgtaaccatcttatgaaacaaagctgccagtctttcttttgagcttccaaaactaagatatttttatcttcacaggtctcataaaggagaatcctgattccacatcggaccttgtgttgcatcaggttcaagcagaatggaatttacatttatcttgatacgcccaacggagcagagtacacaacagaacggacgaaccgaccaccttctaagaagcaagctacaactgaacagaaggaagcgacactatactgtactgctgcaacctgaggaagaaacagtccaaaacatcacctgaagctagacaaaataaaacgccaattatcaccacctggacagcgagctgggaagtcgctcaacaccgcccacaggttcagtcaaagaagtcctaaagggctatcagaaataagattaggtccaaactcttaaggatcagctgcctgtgggggctggccgttagccatggccagcctgtggctggctaacagatccccgacgtgcaccgcgatctcggcagagcatcggagttgccgagttgatcggctccaagtcgttagggatggctcttgctgcgtccaagaccttacggacatatgctgcatgctctttcctagtacacttcaactcctcgttaagatggtcgacttggttttctagatctagaaaaaatgaaaggtggttaagatttaactcgtgacagagatatgaagggtttaaagagctggaacttttacatgtcttctctgactcaagcaggttagaataatatgtgagcgtagcgagttcctcgcttttctccaaaatatctgacatcagagcctggttgtatgctcttccatgttccaattccctgaaatcaagatcgagtaataggtaaattattgttccc

SEQ ID NO: 64779 - DNA, 454 bp, Zea Mays
  misc_feature (1)..(2): n is a, c, g, or t
nntctttggagtctctcgtcaagaactcttgttctctcaatagcagcttctcgttcatgttccagttctctttggagcttcttttcaagaagtcttgtcctctcagcagcaactgtcctttcgttttccaactcttgctggagcctctcttcaaggattcttgtcctctcaagtgcagctgctctttcattttccagttgcctaagatgtggtcaagtaacaagcatagacaatcacacatatagttcggaaggggggaatttgttgaagaaaatcttaaggaagcccactctattagttttatgttccctgccttcagtttgctgatgtgggcatcatacatttccatgattcttgcattgctctggcattcatgttagaaaataagaaagccataattactgcttcaattacaacttgtaagaaatgtgtgtacctcattgatcaatgtgag

SEQ ID NO: 64780 - DNA, 9108 bp, Zea Mays
atacccgcaggattaccaatacccgcccgcgaacatacccacgggtaaaatcttgtactcgtacccatcgggtatcgggcggatatcaagtacccgcaggtacaattatgtgtttataagatatgcatgtatagttataattttagctcattgttcacataattcaaatcacaataattagaagtaatgatcattgttcacatcacaatacaaatagttcaaacaaaataggtaaaatttagtttagttccctgttcacataattcaaagtttcaaacgcttggacataaactgatggacaacacagttgtaacattacaaggcttacagcagaagcaccagcacggttgttttgcatggtcagctcaaggcagcagcaccaggcaccagcatggttgtagggatacgggcagcacacacgaccaacaactgaacaaagggacaccctaggaacaaaacagtaaggcacaaaacttggactgttggtcggcgagcccgaggtcgcagggcaacgtgcttgcaacttactggatctgtaggcctggagggcggcttcacggcaccagctcgtcgcagcagggatgaccggcaccagctggtcgctaatggctggggacggagagggctcgtccgctgcctggatctctggtctcgcacgcgcagggagccagggactcgccggtgggcgggggctggccgccggactccggtggcgcggtggcggcgtggtatgggatctgggtgttggcggctgctgcgacctgcgaataggggtctaggggctagggcatgggcgccgtgcttgaacgcctgggggagtggccgagtgggggtgggtggcggcctggcggagtggcgggtgggggcctgggtgtggccggatggcctagggttacggttagaggagtagtgtgggctgggctatttgcctaccaagtgggccgcaattagctatttggctattttctgatatccgccagggaccaacgggtaaagtataatatccgaacctgacccgactttaccacgggttgggtacggataagacccacgggtgaattattatacccgaatccgaatccaactggtcagatatccagcggatatccaaacccgcgagtaaaattgtcatccctacaggaaacccacctgccactcagataataagaactatgtgaaatgacaaaataataagggggcatatttctatgctactcactcaaaaataaagtagtcaaatggttcagccaggcatagtctaagttagggttttattgacagcacatcaacaaagtgtccttttgtgtttagatggcatgcaacagatatctgatgcaatgcaagctgcagacaagcagtatattgtatgaataaaatccacaaaaagtttgaactacaaggtcacagcaataaatagcagaatatttctttttgtaaaagcatgcatagaaatcaaacataacatatattctgaatagaactaactacacctactacttcaggcagaactataacaggtcatacagcagattgctggcaaatcattatcaagacataaagcagaggtaggcactcaatattaacagaaaaacttgcacaagaaacagatacatgagtcatcctcaactgctctgcactctaaatcatgtagaagcacaagaataattactcacaggcattagctataaaaacagaagaatagagagcaacattatagcattaaccacataaatgataagtttagtgagaagatagaaatcatacaatcacgaggaaaaactggaagggaagtgataagtgctgctattgtaactgtgctgaaactgtttatcacttgttctttaattgtgggtttgcaaattttatttggagaattatagaaatagcaactggactgcaagccccatttggttcagtacagttctttgggcagtggctcaatgctttcaaaccagatttaaaaagaatgatttgtgtggatgctgctgctgtgacttggtctctgtggctgtgtagaaatgatctggtttttaataatgttacaatccaatctcctctacaggtaattttcaggagtaccttctagatcaggaactgggctgcccttcagacagaggagaaccaaaggcagctaaaggctgtgtgctcatgactggaaattattgcaatggagatgtttgccaaaaatggctggaagtttagcaataggctagaactatgggtctattctgttatctagctttggtgtttatctgaatggttgtctgttatgggtcgaatactttgtagagaccgggtcgtttcataagcttaatgaaataaatccattaaccataaaaatgaaagtagcatataactaatttggccccatttggtatatttcacgcccaaggcaaatgatttagagaaagcagaataaaaatcaacctaatgacaagaactgggaaattacaacaaaatgtaatacaatggcactatagtttctgtcttatatagcaatactggcctgctacagtgctctggttacctacaactccctctgttccgaattataagtcattttggctttagatacatagctattttatgtgtctagacatagcctatatggagatacataggaaaaacaatgtatctagaaaaaatagagctgacataatttggaacagaggaagtaggagataagagctcaaataaatcactacacttgagcttcagaaaagaagagatcatttaaattggacaccatttggggggaaagacccagctaacccagctcgggtcggcctccacctaaatacattcattttgttttttatttttcaagtatcaaacaccccacgccacaaccccaattcccagtatagagcggcactcatgtcatgttacagcctctaaaatggcatgtaaaagccagagcattccactgtaaacaaagcacactcagacagttcatgggttattggtggcaagcccacattcaccacatctaaacagcacaacaaaaatcactgaaacagctcagcagcttgagaaaacagggcaaagtgcaaataccgactagaataaagaagaaaatcaccagctgaaggcaattagtgctgggatactggcgcagcaagcaattgatggggaagaacaggaatcccccacgcaaaaatctgctgctcctgcagtgcagtaacattacaatatcaaaagtagtgcactgtacactaggataaatatctacttaaccgtacactaggagataacaaataaggcaaaagcagcctacgctattagtgaggaagacataatgggcgaaaggttaatcaatgcagtgcaaacctccactcaacagctccaaaatatctattcctagacttctaggaagaatataccagacaagtgaaaaggactttaaggtttataaaagaattacagatagcagccactgccagaaggagcgttagactcacacagatttaagacctgtacgaacatgaggcaatggcaaccccaaacatgaagaattacaggcactctagcccctttggcagcaagggtgttgaaagggctaaatctgcttgccgctcaaaatggaataacaggatcttatccaccccattcccaatgctcccaatagtggcagttgtgaacttcacaaacttaagcatatggaaacccagggccctacacccaagaaccacgaatactctttacaaatctccagagctcacgccagaaacaacagcgttcaagcacggcgcccatgccctaggccccagacccctattcgcaggtcgcagcagccgccaacacccagatcctagaccacgccgccaccgcgccaccggagtccggcggccagccaccgcccccgcccacccgcgtgccagcgagcgcgagccggcgagtccctggttccctgcgcgtgcgagaccagagatccaggcagcggacgagccctgtccgtccccagccatcagcgaccagctggtgccggtcatccctgctgcgacgagctggtgccgtgaagctgccctccaggcctacagatccaggtgacatggtgaaaactccgagatctcctgttaccacaggaacaagaagatgcagagcaaagccacaaaagaaggaagaggaatccacagaaaacaacaagctggagaatggacctctggatgcaacagaagaggtgcatcatggagtcgaaaaaggtgatggacatgttacccgcaagagaccaaggagagcagcggcctgttctgatttcaaagagaaatccatacgcttatccgaaaaaaaatctgttgttatggtcaagaagaatcggatggaggaggaagaagtagatgctgtcaatcttacaaaacttggaccagaagatccaccaccttgccggaagttgatcgattttatcttgcatgatgcagaagggaacccacaaccctttgaaatgtcagaaattgatgacttctttataacagctcttatcatgcccatggatgatgatctagaaaaagagcgtgaaaaaggagtacgctgtgaaggatttgggcgaattgaggactggaatatttctggttatgatgaaggtactcctgtaatctgggtgtcaactgatgttgctgactatgaatgtgtgaaaccatcaaccaattacaaatcttattttgaccacttctatgagaaggctcaggtgtgtgttgaagttttcaaaaagcttgcaaaatcagttggtgggaatcctaaccagggcctggatgaattgcttgctagtgttgttcggtcaaccaatgccatgaaaggatatagtggaaccatgagcaaagatttggtgatatccattggagaatttgtatacaatcaacttgttggtttggatgagacatcaaacaatgatgatgaaaagtttgctaccctgccagttcttctttctctaagagaccagtgcagatctagggtggaactgaccaagttgccctctaacttctcgaacacaagtctgaaaattaaggactcagagtgtgatgagacagcagaagacgatgatgatgcaaaattagctagattacttcaacaagaagaagaatggaaaatgatgaagaaacagaggggtaggcgtggaacaccatcccagaaaaatgtctacataaaaatcagtgaagctgagattgccaatgactatccccttcctgcatactataagccatttagccaggaaatggatgaatacatatttgatagtgatgacagcatattttctgatgatgtgccagttaggatactcaataactggacactgtacaatgcagattccaggcttatatctttggaattgatccctatgaaatcaggggcagaaaatgatgtggttgtctttggatctggtttcatgagagatgatgatggcagttgctgttctacagctgagtctgtgaaatcttcgtcttcctccagcaaagctgaccaactggatgcgggaatccctatttatctgagcccaatcaaagaatggattatagagtttggtggctcaatgatttgtataaccattcggactgatgtggcctggtacaagctacgccaaccaacaaaacaatatgctccatggtgtgagcctgtactgaaaacagcaaggcttgctgttagcatcattaccctgttgaaagagcagagtcgtgcctcaaagctttcttttgcagatgtcataagaaaagtagctgaatttgacaaaggaaaccctgcatttatatcttcaaacatcacacttgttgagagatatattgtggtgcatggacagataatactccagcagtttgcagattttccagatgagactatccgtcggagtgcatttgtcagtggtcttttattgaagatggaacagaggaggcatacaaagttagttatgaagaaaaaaactcaagtgatgaggggagagaatctgaatccaagtgcagcaatgggtccagcatcgaggaaaaaagcaatgcgtgcaacaacaaccaggctcatcaacagaatctggagtgattactatgcacatcatttccctgaagattccaaggagggagatggaaatgaaataaaagaaattgatgatgaacaagaagaaaatgaagatgaggatgctgaagatgaaggacagattgaagagaacatctcaaagactcctccatcaacacggtcccggaagttgctatcacaaacttgtaaggaaatcagatgggaaggtgaaacatctgggaaaacattgtctggagaaactctatataaatgtgcttatgttagggaactcagaatacctgttggtggaacagtagctctagaagatgattcaggagacacagtcatgtgttttgttgagtacatgttccagaaagttgatggttcaaaaatggttcatgggaggattctgcaaaaaggttcacagacaattcttgacaatgcggcaaatgagagggaggttttcttaactaatgactgcttagaattcaaattagatgacatcaaagaattggtaatggttgatatccaatcaaggccttggggtcacaagtacagaaaagagaattctgaagctgataaagttgagcaggtcaaagcagaagagagaaagaaaaagggccagcccatggtatatttctgcaaaagcttgtactggcctgagaagggtgccttctttgccctctcccgagataaaatgggtcttggtagtggtttatgtagttcttgtgataatatagagccagattctgatgaattaaaaatattctcgaagaccagctttgtctacagaaaggttacatataatgtcaatgagtttttatacataagccctgatttttttgctgaagatgaggatcgtgcaaccttcaaggctggccgaaatgtgggtctaaagccctatgcagtttgtcaaatattatccatccctgaaggggctggatctaaaaaactcaatccagcatcagcaaatatcagtgctagaagattttacagaccagatgacatttcatcagccaaagcctatgcttctgacatcagagaggtctactatagtgaggatgtaattgatgtgcctgtggatatgatagagggaaaatgtgaggttagaaagaagaacgatcttgcaagttcagaccttccagtgatgtttgaacatgtatttttctgtgaacttatatatgaccgtgccagtggagctctcaagcagttgcctccaaatgttaggtttatgtctatggtgcaaaggacaagtgcgttgaaaaagaacaaaggaaagcagatctgtgagcctgatcaaatagattcaggtaaatggttggatgtgcctaaagagaaccgtctagctactcttgacatttttgctggctgtggaggtttatcagaagggctgcagcaagctggtgtatcttttacaaaatgggcgattgaatacgaagagcctgctggtgaagcatttaataaaaatcatccagaggctgtggtctttgtagataactgcaatgtgattctaaaggcgattatggataaatgtggggatactgatgattgtgtttcaacttctgaagctgctgaacaagcagcaaaacttccagaagtgaacattaataatcttccagtccctggcgaagttgaattcataaatggtggtcctccgtgtcagggattctctgggatgaatagattcaaccaaagcccatggagtaaagttcagtgtgagatgattctagcattcctctcattcgctgagtatttccgtcccagattctttctgttagaaaatgttcggaactttgtttccttcaacaaagggcagaccttccgtttggcagttgcatctcttctggagatgggataccaggtccggtttggaattctagaagcaggggcttttggtgttgcccagtccaggaaaagggcgtttatttgggctgctgcacctggagagatgcttcctgattggccagagccgatgcatgtgtttgctagccctgagctgaagataacactgcctgatggccaatactatgcagctgcaagaagcactgctggtggagcgcctttccgagcgattactgttagagatacagttggggatctgcctaaagtgggaaatggtgccagcaaactcacgcttgagtatggaggtgagcctgtgtcttggttccagaagaagataagagggaatatgatggtactgaatgatcacatatctaaggagatgaatgagctgaacctaataaggtgtcaacacattccgaaacggccgggttgtgattggcatgacctaccggacgagaaggttaagctgtcaaatgggcagatggctgacctgataccttggtgcctgcccaacacagccaagaggcacaatcagtggaaaggactgtacgggaggctggactgggaaggcaacttccccacatccgtcactgatccccagccaatgggcaaggtcggcatgtgcttccaccctgatcaagacaggatcatcacagtccgggaatgtgctcggtcacagggctttcctgacagctatgaatttgcgggcaacatccagaacaagcaccggcagattggcaatgccgtgcccccgcctcttgcctatgcacttgggaggaagctgaaggaagccgttgacaagcgtcaggaagccagcgcaggcgtgcctgcaccatgagaagttttccttccatcaaaccatgacccatgaagctaagcgctgaggtcgtccttgaggaccagttaattttggttttatcagtcttaatggactcctgaatgtatatgttagagaagtgtcgattgctgattgttaccctgattcagggtagcggttatatctaaaaacttgagaaaatctagtgtactctagttgccatgtgttccattttgttggctctaaactttcaactagtgttggtgattaatgacaacatgagattaacttaaattttgtagaggcatttaaattatgccactaatagtgactatttagtcgctcaatttttttgcccctaattatggaatttattttttaaaggatgaacaacaagattaaatggattagttcaagtgtcgattggggctaagactattcgtagcggttttttc

SEQ ID NO: 64781 - DNA, 5383 bp, Zea Mays
acacccccaggcgttcaagcacggcgcccatgccctaggccccagacccctattcgcaggtcgcagcagccgccaacacccagatcctagaccacgccgccaccgcgccaccggagtccggcggccagccaccgcccccgcccacccgcgtgccagcgagcgcgagccggcgagtccctggttccctgcgcgtgcgagaccagagatccaggcagcggacgagccctgtccgtccccagccatcagcgaccagctggtgccggtcatccctgctgcgacgagctggtgccgtgaagctgccctccaggcctacagatccaggtgacatggtgaaaactccgagatctcctgttaccacaggaacaagaagatgcagagcaaagccacaaaagaaggaagaggaatccacagaaaacaacaagctggagaatggacctctggatgcaacagaagaggtgcatcatggagtcgaaaaaggtgatggacatgttacccgcaagagaccaaggagagcagcggcctgttctgatttcaaagagaaatccatacgcttatccgaaaaaaaatctgttgttatggtcaagaagaatcggatggaggaggaagaagtagatgctgtcaatcttacaaaacttggaccagaagatccaccaccttgccggaagttgatcgattttatcttgcatgatgcagaagggaacccacaaccctttgaaatgtcagaaattgatgacttctttataacagctcttatcatgcccatggatgatgatctagaaaaagagcgtgaaaaaggagtacgctgtgaaggatttgggcgaattgaggactggaatatttctggttatgatgaaggtactcctgtaatctgggtgtcaactgatgttgctgactatgaatgtgtgaaaccatcaaccaattacaaatcttattttgaccacttctatgagaaggctcaggtgtgtgttgaagttttcaaaaagcttgcaaaatcagttggtgggaatcctaaccagggcctggatgaattgcttgctagtgttgttcggtcaaccaatgccatgaaaggatatagtggaaccatgagcaaagatttggtgatatccattggagaatttgtatacaatcaacttgttggtttggatgagacatcaaacaatgatgatgaaaagtttgctaccctgccagttcttctttctctaagagaccagtgcagatctagggtggaactgaccaagttgccctctaacttctcgaacacaagtctgaaaattaaggactcagagtgtgatgagacagcagaagacgatgatgatgcaaaattagctagattacttcaacaagaagaagaatggaaaatgatgaagaaacagaggggtaggcgtggaacaccatcccagaaaaatgtctacataaaaatcagtgaagctgagattgccaatgactatccccttcctgcatactataagccatttagccaggaaatggatgaatacatatttgatagtgatgacagcatattttctgatgatgtgccagttaggatactcaataactggacactgtacaatgcagattccaggcttatatctttggaattgatccctatgaaatcaggggcagaaaatgatgtggttgtctttggatctggtttcatgagagatgatgatggcagttgctgttctacagctgagtctgtgaaatcttcgtcttcctccagcaaagctgaccaactggatgcgggaatccctatttatctgagcccaatcaaagaatggattatagagtttggtggctcaatgatttgtataaccattcggactgatgtggcctggtacaagctacgccaaccaacaaaacaatatgctccatggtgtgagcctgtactgaaaacagcaaggcttgctgttagcatcattaccctgttgaaagagcagagtcgtgcctcaaagctttcttttgcagatgtcataagaaaagtagctgaatttgacaaaggaaaccctgcatttatatcttcaaacatcacacttgttgagagatatattgtggtgcatggacagataatactccagcagtttgcagattttccagatgagactatccgtcggagtgcatttgtcagtggtcttttattgaagatggaacagaggaggcatacaaagttagttatgaagaaaaaaactcaagtgatgaggggagagaatctgaatccaagtgcagcaatgggtccagcatcgaggaaaaaagcaatgcgtgcaacaacaaccaggctcatcaacagaatctggagtgattactatgcacatcatttccctgaagattccaaggagggagatggaaatgaaataaaagaaattgatgatgaacaagaagaaaatgaagatgaggatgctgaagatgaaggacagattgaagagaacatctcaaagactcctccatcaacacggtcccggaagttgctatcacaaacttgtaaggaaatcagatgggaaggtgaaacatctgggaaaacattgtctggagaaactctatataaatgtgcttatgttagggaactcagaatacctgttggtggaacagtagctctagaagatgattcaggagacacagtcatgtgttttgttgagtacatgttccagaaagttgatggttcaaaaatggttcatgggaggattctgcaaaaaggttcacagacaattcttgacaatgcggcaaatgagagggaggttttcttaactaatgactgcttagaattcaaattagatgacatcaaagaattggtaatggttgatatccaatcaaggccttggggtcacaagtacagaaaagagaattctgaagctgataaagttgagcaggtcaaagcagaagagagaaagaaaaagggccagcccatggtatatttctgcaaaagcttgtactggcctgagaagggtgccttctttgccctctcccgagataaaatgggtcttggtagtggtttatgtagttcttgtgataatatagagccagattctgatgaattaaaaatattctcgaagaccagctttgtctacagaaaggttacatataatgtcaatgagtttttatacataagccctgatttttttgctgaagatgaggatcgtgcaaccttcaaggctggccgaaatgtgggtctaaagccctatgcagtttgtcaaatattatccatccctgaaggggctggatctaaaaaactcaatccagcatcagcaaatatcagtgctagaagattttacagaccagatgacatttcatcagccaaagcctatgcttctgacatcagagaggtctactatagtgaggatgtaattgatgtgcctgtggatatgatagagggaaaatgtgaggttagaaagaagaacgatcttgcaagttcagaccttccagtgatgtttgaacatgtatttttctgtgaacttatatatgaccgtgccagtggagctctcaagcagttgcctccaaatgttaggtttatgtctatggtgcaaaggacaagtgcgttgaaaaagaacaaaggaaagcagatctgtgagcctgatcaaatagattcaggtaaatggttggatgtgcctaaagagaaccgtctagctactcttgacatttttgctggctgtggaggtttatcagaagggctgcagcaagctggtgtatcttttacaaaatgggcgattgaatacgaagagcctgctggtgaagcatttaataaaaatcatccagaggctgtggtctttgtagataactgcaatgtgattctaaaggcgattatggataaatgtggggatactgatgattgtgtttcaacttctgaagctgctgaacaagcagcaaaacttccagaagtgaacattaataatcttccagtccctggcgaagttgaattcataaatggtggtcctccgtgtcagggattctctgggatgaatagattcaaccaaagcccatggagtaaagttcagtgtgagatgattctagcattcctctcattcgctgagtatttccgtcccagattctttctgttagaaaatgttcggaactttgtttccttcaacaaagggcagaccttccgtttggcagttgcatctcttctggagatgggataccaggtccggtttggaattctagaagcaggggcttttggtgttgcccagtccaggaaaagggcgtttatttgggctgctgcacctggagagatgcttcctgattggccagagccgatgcatgtgtttgctagccctgagctgaagataacactgcctgatggccaatactatgcagctgcaagaagcactgctggtggagcgcctttccgagcgattactgttagagatacagttggggatctgcctaaagtgggaaatggtgccagcaaactcacgcttgagtatggaggtgagcctgtgtcttggttccagaagaagataagagggaatatgatggtactgaatgatcacatatctaaggagatgaatgagctgaacctaataaggtgtcaacacattccgaaacggccgggttgtgattggcatgacctaccggacgagaaggttaagctgtcaaatgggcagatggctgacctgataccttggtgcctgcccaacacagccaagaggcacaatcagtggaaaggactgtacgggaggctggactgggaaggcaacttccccacatccgtcactgatccccagccaatgggcaaggtcggcatgtgcttccaccctgatcaagacaggatcatcacagtccgggaatgtgctcggtcacagggctttcctgacagctatgaatttgcgggcaacatccagaacaagcaccggcagattggcaatgccgtgcccccgcctcttgcctatgcacttgggaggaagctgaaggaagccgttgacaagcgtcaggaagccagcgcaggcgtgcctgcaccatgagaagttttccttccatcaaaccatgacccatgaagctaagcgctgaggtcgtccttgaggaccagttaattttggttttatcagtcttaatggactcctgaatgtatatgttagagaagtgtcgattgctgattgttaccctgattcagggtagcggttatatctaaaaacttgagaaaatctagtgtactctagttgccatgtgttccattttgttggctctaaactttcaactagtgttggtgattaatgacaacatgagattaacttaaattttgtagaggcatttaaattatgccactaatagtgactatttagtcgctcaatttttttgcccctaattatggaatttattttttaaaggatgaacaacaagattaaatggattagttcaagtgtcgattggggctaagactattcgtagcggttttttc

SEQ ID NO: 64782 - DNA, 670 bp, Zea Mays
gtttcatttgttcgttatgcaacctgccgtcttacaacctgccttgccccaattaacagtattgttgtgtatgttgaagacttgggtgatgaaaaaggatgctcctgtcggcgagaagccagagccagtgaagacccatctccgcaacatgatcattgtccccgagatgattgggagcattgttggtgtctacaatggcaagaccttcaaccaggttgagatcaagcctgagatgattggccactatcttgcagagttctccatttcctacaagccggtcaagcacgggaggcccggtattggtgccactcactcctcgcggtttatccctctgaaatgagttgttacccagatctgtagcgtcccaagggtgtccagtggcattgccctttcagctttgctgcttgtttcgaacaagttacatacccaagacattttgttctgtttccagcactagatttcaaagctaagcattgcataactatgctgttttgttggaagtatgtgagtataatcttatctaatatgtgatgttacgttctttgttgtttccttgattttgggttgcttatttctgaaattctgaagatgaggcttacaactctggtgtttgctgttagtggtttcattggatttaaatttgaagatgtcaatttattgggcgctcgtt

SEQ ID NO: 64783 - DNA, 119 bp, Zea Mays
tcacaaagatcaaaagtaaagagcacttaagaaaaatgaaagagtgtttgaactgcacaacccaacactatatgtcatccaaaagaacccaacccaacctgcagtaggatgcatcttct

SEQ ID NO: 64784 - DNA, 941 bp, Zea Mays
aggtaatatctcaatatctaataaagaatgactcatagtacattagatctgacataagttactatacagatatacaaacttctcatgctaatatctaatatgtagaaataaaagaccaaaaaaatcaggtatgcacaagaacaaataaacataccacattctcaactcactgtatccaaatgtagacaccgaccatttatattcatttccaaacaacactatcctgaccctgcaaaggtattcaccaacaaagcacacaatacaaggttggacaagcattctatcaacacctagttatctgatgacaacataagataacttgttttgtatgcgaaatgctttaaacatgatgactgctttttttgaactccattgccaggttttgcaggtctgtagcaagagtccactgcacataacaaccaagagtatgttgtccgtcaaactgtcactcttcaacttttaactggctaactgtctgataaataaggttatatcataacctggccaatacccaaagatggcagaatgatgtaggaaactaacatactacatatgtagcaacaatcaaccaaaaaattctaaacaaattcctctagtgtctatgtcttttttccccttgccttattttcatgccctcacactaccaaaagtcagaagtattgcactacacaagaaataatactactggtcctaacctaatcagtaaatactggagagcgctgaaatcaggagttcatccttgcaacacaagattttcagttttgttaataaaacgccgcccataaatcctcctaaacactaaattctaacatgatgaaaaaatgtaaaaacaacaccaatgcgaagacagtccaaatccccaatgtcatcctttgataccatctaaggttaatatcatcaggttcaatttagttatgctcatagatgaactagccactcac

SEQ ID NO: 64785 - DNA, 2593 bp, Zea Mays
  misc_feature (1)..(1): n is a, c, g, or t
nctccaagccctacaaaaacattgcgccagaggactattattgacaacccgggtttaaaagaccatgtgttatttttttagacgcgcaggagaactgcgccccattatatattaagcagaagaaaaaagaaaaaacatatacttaaacaaccatgtccattggtgttgcatagtatggaaatggggcggttctcctatgaagatacttccttttattgccaaactgcttatgagacacaagatataatccaaacttgtgtgttgtagacagtggtaaaccttaaaatgccaataaaacctcattatacaaaaaagagattatcaagcagatgaattataggataataggagcaagaggacaccaaaaaataacaataatgatccagggtgccggtggtgcacctagaagatttgttgttttttagcagagaaactataagtgttgtgtcaatcgtaacactaacatggcagttggtagaattaaattgctaataaaattgattaaagatataaacataagagcacgacgtagatttgaaccttgtcaccttcagtattgtatggcctgttatagaatcatgtacatgccaatgtctacgcattccatttttaccattagcactaatccatgtatctacttcaacaatatcacccctgcagtagattagaggagcgagttagagcgcatggtaggagaattagaatgcatggctgatgttacataccttgctagaatctgggagtaaatcatagcacgtatgcaaactcaaatatttagaaatgcagcacctaaattcagaaactcagaatctgggagaaaatcatagcatctaggcatttcgtcaggcatctattaggcactaaaatatgagcgcaacaattaacaaatactacctgttaattggtaatttctccgggctgttagaggtgtttaaggaaggaggttgtaatactaaccttttgaatctaaaaaggtgttttggagagtaatggtggctgttttatgttactgtaacggtggagcatacttttttttgaaagagttagaaatgggttatatctttaaaaaaatatttgattggtgtcttgttaataaattcattcctcaatggaacagctaactttttgtagtacaaaaacattgtttcaagaattgtacagatcatatgtaccgaggaaaaaataatatgagaatcagttgttgtgtaatcatgtctgcaggtgttaaaacagaagagtattgaaacagcttgatgactaatttgattggtgtcttgttaataaattcattcctcaatggaacagctaattttttgcagtagaaaacattgtttcaagaattgtacagatcatatgtaccgaggaaaaaataatatgagaatcagttgttgtgtaatcatgtctgcaggtgttaaaacagaagagtattgaaatagctcgatgactaaaatctaagcaattatatgtctaggtatctttttttaagcaaatctgtgttccttctaatgtttgttcaaatatgatatacaaattgtatatttcatatagaaggaacacatgaagctagacatctctcaagtaaaaatatgggccgcaaattttagtatgtatgcaagcggatttctgattatgatgaataagatttttaggtgcaaactgtatattggttatagaaggtatgtgtgcaaacggattagtgtttacgatgaataatatttttagcttattaatttttgcgtctgcagataatgttttagctgcaagcaattgttctacttcaaaagtacaaatctgtctccaaacaacacctaaacggtttgtaatgacaacatggtttgtaatgacagcagctagagtagcaaaattgacagatgatgtatcattagcatgcaacctttttttgtgcaaaattataattccgatgctaaaattacttccaaagcagcacttaaacggcttgcggaaacgataattggattagcaacattgaaagcttatcaaacaatagcacacattcatgtttttttgtgcaaaagtaaaatattgtctatgaacttacttgtgaaagatgcggacagtacacttagaagtttggaaatggattgacgcaggtccttgtaaattcttgacatgtgaagaaaagaaaagtatatgagtactcgtagaactaactatggtgatccaaagatcagtatagaagtacacaattgatcatgcatcttgatatagattgtactgtggaagttaatgtttgaagttaatgctttggataatagctcacgacacagaagtccaaagatccatttgatggcaaaggagatagccaaattacattgcgcaaatccattgaatcatcatgtggtacattagatcctgtaaattaaggagggaaaaacaaattcaatgaagtacttgaaagtacagtacccaaatttccaacaatggaatctcgtgaagcctgtaccttaatggcgctcccatttcagtctaggcctgaaacttcaacatctcaacactggcatctagggaagagaagcatgagatcatcatacataacacaatttggtaccgctgttgtattcatagaataaaa

SEQ ID NO: 64786 - DNA, 1194 bp, Zea Mays
gaccgccttatcgtcaccatcttcttcggtccggtcccagccaaaccttcctcttcttcggtctcctcgtcgccatctcgtttgtggccgccaccgcgccccatccctaccctacccgggacatacatttgctatttaaaagcctagcgacagagccgagtgtgcctctgcttcctcctccctccccccctcgtctgccctcgagatcccacaccgcgcgcgtgccacgttgtcttcgtcctctgcgcgccttcggtcaccccgccgcctgtactgtacatgcggtagtacggcgcaggaacaagaaggatttgccagcatgagcggggagctgcaggtgcatgcatctatcgttgggttcttggcttggttggggggtgaactgagtctggatgcgccgaacgggatgttgggggaggcgagagtgagagcacggtcgctcgcttgaggtgcggcgccgtctgccgtgcggtgtcgtggcggtctagtagaggaagctaggaagaggatgatgggagctctgcagctgcagagcaatggcgacggcgctgctgagggactcttaccggacccgggctacgtcgaggttgatcctaccgggaggtatggcaggtacaacgagattctcggcaaggggtcctcaaagactgtgtaccgggccttcgacgagcaccggggcatggaggtggcgtggaaccaggtgcagctgcacgacttcctgcgcggcccggcggagctggagcgcctctacggcgagatccacctgctcaagtccctccgccaccgcgccgtcatgcggctccacgcgtcctgggccgacgccgccgcgccccgcctcgccgtcaacttcgtcaccgagctcttcacctccggctgagcagtgcgccggggacggaggcagtactgtaactgaacgttcagaccagccatgacctggttcctcgcaggagcaactcctgttttaaaaatctgaaaatgtcaccagtgcagccgcacagctgcttgtaagtgaacttttttgtggctctggttgagcatacgatcgttaagacggatatagtttgaagtttcaacaggcaggtgctttccctgatctttgttgttgtttttttttccactctaaaactgttttgtagaactcacacagaatgacagaatagtgtattataaatagataaccaaagacagttggat

SEQ ID NO: 64787 - DNA, 2492 bp, Zea Mays
gaccgccttatcgtcaccatcttcttcggtccggtcccagccaaaccttcctcttcttcggtctcctcgtcgccatctcgtttgtggccgccaccgcgccccatccctaccctacccgggacatacatttgctatttaaaagcctagcgacagagccgagtgtgcctctgcttcctcctccctccccccctcgtctgccctcgagatcccacaccgcgcgcgtgccacgttgtcttcgtcctctgcgcgccttcggtcaccccgccgcctgtactgtacatgcggtagtacggcgcaggaacaagaaggatttgccagcatgagcggggagctgcaggtgcatgcatctatcgttgggttcttggcttggttggggggtgaactgagtctggatgcgccgaacgggatgttgggggaggcgagagtgagagcacggtcgctcgcttgaggtgcggcgccgtctgccgtgcggtgtcgtggcggtctagtagaggaagctaggaagaggatgatgggagctctgcagctgcagagcaatggcgacggcgctgctgagggactcttaccggacccgggctacgtcgaggttgatcctaccgggaggtatggcaggtacaacgagattctcggcaaggggtcctcaaagactgtgtaccgggccttcgacgagcaccggggcatggaggtggcgtggaaccaggtgcagctgcacgacttcctgcgcggcccggcggagctggagcgcctctacggcgagatccacctgctcaagtccctccgccaccgcgccgtcatgcggctccacgcgtcctgggccgacgccgccgcgccccgcctcgccgtcaacttcgtcaccgagctcttcacctccggcacgctgcgccagtaccgcctccggcacccgcgggccggcgccgccgcggtccggcgctggtgccggcagatcctcgacggcctcgcctacctccacgcgcgcggcgtcatccaccgcgacctcaagtgcgacaacatcttcgtcaacggcagccagggccaggtcaagatcggcgacttcggcctcgccaccgtggcccgccgccgcggctcgccgcacgcggcgcgctgcgtcgtgggcacgccggagttcatggcgcccgaggtgtacgcggagggctacgacgagcgcgccgacgtctactcgttcggcatgtgcgtcctcgagatggtcacgctcgagtacccctacagcgagtgcgtgcaccccgtgcacatctacaagaaagtcacctccgggataaagccggcggctctgtacaaggtgaaagaccccgcggtgaggcggttcatcgacaggtgcctggcgccggcgtcgcggcggccgagcgcggccgagctgctcagcgacccgttcctgcagctggaagacggctgcggcctcggctacggagacgacgcggactacagcgccatgtacaactacctgcaccagcccgcgtgcctggaccaccaccaccatgccggcagcattggctccacggcgagcaacggggtggtgtccaatggcggcggcggcggcggcggcagatgggacgacgagtccgaggacgaggacgacgatggcagcatgttccaaggcatcgaccagctgttcaacgagcacgaagacgacgagctgcacgttgctggtgtcgacatcaccatcaagggcaagaggatgcaggacggacgcatcttcctccggctgcgtatcgccgacaaagatggcacagggagggtccggaacatctacttccccttcgacgcggacgcggacacggcgctgagcgtggccaccgagatggttgcggagctggacatcaccgaccacgaggtgacccacatcgccgagatgatcgacggcgaggtgggcgcgctgctgccgcactggaggccgggtcctggcatggacgacgacgacggcggcggcgccggtccggacacgtcgggcgctaccgaccgctgcaagaactgccggtccagcgcgtcctccgccgggtcgctggacgactacatgtcggcggcggcggcggcgcggcgcggctgccggtgcgcggagctgcacggccggttcgaggagatcacgttccaggccgacgaagagcaggtgcggttccagggctctgggtgcagctccgacgacggaggcgggcaggctgagcagtgcgccggggacggaggcagtactgtaactgaacgttcagaccagccatgacctggttcctcgcaggagcaactcctgttttaaaaatctgaaaatgtcaccagtgcagccgcacagctgcttgtaagtgaacttttttgtggctctggttgagcatacgatcgttaagacggatatagtttgaagtttcaacaggcaggtgctttccctgatctttgttgttgtttttttttccactctaaaactgttttgtagaactcacacagaatgacagaatagtgtattataaatagataaccaaagacagttggat

SEQ ID NO: 64788 - DNA, 1633 bp, Zea Mays
ctcaccttcacacctcattgtcccagacgcaccctcctcacctccgcccgcggccccgggcggtaccctcaccgccgggcccaccgcgccccctcgctgcctcgcccccacaaacagccgaccgccccgcgcccagacacacacacacgagcgcagcgcacgcagcctgcaggcagaggactgctctcctctgcgcgaagcgaggcggcgctgggatctgcccggcaaggtggccgggaacattgcaatggggaaaattgatatgtctactgacgaagaatcagattgtgtagctatatgtccacctaacagaaatgctggtcacgaggaagttgaagatgtgtctgtaaacctagacctgctcaagctgattcatcagcaggaatcttctgtcagcaattcaccaacaaagcctgcagtagctagacagcaagggtctggccatactgtccttgagccatgcgctgttgcacctgaaagaagatcatctggagcagggaatattgctcgaattcctcatcccaccagcagcggggaaaaactttcggataaaagtagctcctcaccaagaagcatggcaaagaagagtccatcattcacacccaggaagcctctccaatctgacaacacttctcacagtcaagatgatgactcatattctgtcacttcttcaactgtaacttcagcaagagctgggaaaactaagaagacaactgttgctgttgcacctacattcgtctgtgctaatcgtgctgagaagagaggagagttttacacaaaattagaagaaaaacgcaaggctttggaagaggagaaactccaagcagaggccagaaagagggaagaggaagaagaagctctaagacaactgaggaagaacttggtcgtccgagcaaaacccatgccaagcttctaccaagagggacccccaccaaaggttgaacttaagaaggtgcctccaactcgtgccaagtcaccaaaattgacacggagaaagagctgcagtgaaacccctcatacaccagagggaggaaatggcagtgcagtatgctgccggttgcatcgccacagcattgggaacgccagagatgttagcagcaaggcacaatgttctccaaagagcgcctcaaaggctggatcagctactagatccagggtcaccaaatccagggaagacctgaaggcttccgtgaagaaagtgggactgccaagcgccgcgaacttcgctgtacaaacctaactcatcaggcattcactcccatatgccatttttcattttaatttatacctcacatcaccaaaaagatggcctcgtgttatttttgcattgtccttgtaagaacctggctaccagagacctgcgctgttcccgtcctgtaaatttgttgaaggttttgtaagggggtaaccgagtcagtcctgtgagaaccaagcgggtgggcagctgatgggatattggagtgacatattgtcgttgtgtggcggcattcgcgcgttctatgtattgtatctgagctgtaacttattgtggacattggcaaagcgattctgattgttgtcgcaaaatttgatcaggtcgtgtttcgaacttttaatcaggtatccttatgaattggaaactgggttgtgtttt

SEQ ID NO: 64789 - DNA, 1506 bp, Zea Mays
cttagtgagacagctcagctctcaccatggcacccgtgcaatggggaaaattgatatgtctactgacgaagaatcagattgtgtagctatatgtccacctaacagaaatgctggtcacgaggaagttgtgagtggcagccatgatgaagattcttcaggaaagcaagagaacccttatgctgtgaactcacatatggacagcaatggccaggaagatgtgtctgtaaacctagacctgctcaagctgattcatcagcaggaatcttctgtcagcaattcaccaacaaagcctgcagtagctagacagcaagggtctggccatactgtccttgagccatgcgctgttgcacctgaaagaagatcatctggagcagggaatattgctcgaattcctcatcccaccagcagcggggaaaaactttcggataaaagtagctcctcaccaagaagcatggcaaagaagagtccatcattcacacccaggaagcctctccaatctgacaacacttctcacagtcaagatgatgactcatattctgtcacttcttcaactgtaacttcagcaagagctgggaaaactaagaagacaactgttgctgttgcacctacattcgtctgtgctaatcgtgctgagaagagaggagagttttacacaaaattagaagaaaaacgcaaggctttggaagaggagaaactccaagcagaggccagaaagaggaggaagaagaagctctaagacaactgaggaagaacttggtcgtccgagcaaaacccatgccaagcttctaccaagagggacccccaccaaaggttgaacttaagaaggtgcctccaactcgtgccaagtcaccaaaattgacacggagaaagagctgcagtgaaacccctcatacaccagagggaggaaatggcagtgcagtatgctgccggttgcatcgccacagcattgggaacgccagagatgttagcagcaaggcacaatgttctccaaagagcgcctcaaaggctggatcagctactagatccagggtcaccaaatccagggaagacctgaaggcttccgtgaagaaagtgggactgccaagcgccgcgaacttcgctgtacaaacctaactcatcaggcattcactcccatatgccatttttcattttaatttatacctcacatcaccaaaaagatggcctcgtgttatttttgcattgtccttgtaagaacctggctaccagagacctgcgctgttcccgtcctgtaaatttgttgaaggttttgtaagggggtaaccgagtcagtcctgtgagaaccaagcgggtgggcagctgatgggatattggagtgacatattgtcgttgtgtggcggcattcgcgcgttctatgtattgtatctgagctgtaacttattgtggacattggcaaagcgattctgattgttgtcgcaaaatttgatcaggtcgtgtttcgaacttttaatcaggtatccttatgaattggaaactgggttgtgtttt

SEQ ID NO: 64790 - DNA, 1074 bp, Zea Mays
ctttgaactgtaccctttaggcctcatagtccatcattcacacccaggaagcctctccaatctgacaacacttctcacagtcaagatgatgactcatattctgtcacttcttcaactgtaacttcagcaagagctgggaaaactaagaagacaactgttgctgttgcacctacattcgtctgtgctaatcgtgctgagaagagaggagagttttacacaaaattagaagaaaaacgcaaggctttggaagaggagaaactccaagcagaggccagaaagagggaagaggaagaagaagctctaagacaactgaggaagaacttggtcgtccgagcaaaacccatgccaagcttctaccaagagggacccccaccaaaggttgaacttaagaaggtgcctccaactcgtgccaagtcaccaaaattgacacggagaaagagctgcagtgaaacccctcatacaccagagggaggaaatggcagtgcagtatgctgccggttgcatcgccacagcattgggaacgccagagatgttagcagcaaggcacaatgttctccaaagagcgcctcaaaggctggatcagctactagatccagggtcaccaaatccagggaagacctgaaggcttccgtgaagaaagtgggactgccaagcgccgcgaacttcgctgtacaaacctaactcatcaggcattcactcccatatgccatttttcattttaatttatacctcacatcaccaaaaagatggcctcgtgttatttttgcattgtccttgtaagaacctggctaccagagacctgcgctgttcccgtcctgtaaatttgttgaaggttttgtaagggggtaaccgagtcagtcctgtgagaaccaagcgggtgggcagctgatgggatattggagtgacatattgtcgttgtgtggcggcattcgcgcgttctatgtattgtatctgagctgtaacttattgtggacattggcaaagcgattctgattgttgtcgcaaaatttgatcaggtcgtgtttcgaacttttaatcaggtatccttatgaattggaaactgggttgtgtttt

SEQ ID NO: 64791 - DNA, 2295 bp, Zea Mays
tacgagcagcttgaaatggaaggcaagttattgaagggggaagacttagattttgcttttgatcgtatttcggctttctcagacaatatggagaatcaggaatacatattcttgacggaagaaagtcttgaagacatctgtgagtcaaagcttgctcttagagctgaagtttctgatttggaaaggcagcttgcttctctggagtggaggcttgatatacttacagcacaagctaccaccattaaccagggaaagaagtcccgctcatctgctaatactagagctaatggacaacttactggcttagataagatgtttgctaagagaagtttagagaactctccgatagatgaatgcaatacttggaaaacttactgcatccacacaagagttgtcttactatcactcagaagctgatatcggggtctacctatcatactgtgacttccagccttatgtgaggagtgccctggcttgtaccaaggaactaaacaaatggttctctaagaagtttgagaagggaccactccaacttgttgttcaagatgacaagttaagaggagatccggtaaactcccaccattttgttgtcgaactgagccgaattaactccatatttgctaaaagtaagagacagtacatagaagcacaagtagaatatgctaaagaagaagctatactatcagttctgagaactcagttggcatcccaacagtcatatattcatcaggatagccattctctaaggaggaaaaactccgaacttgctgaagagcttaaagatctttcccatcaagtgcaggaatacttatctgagactgttacaggcctgtgtgcagaccttgctcggctttcaggtgcaaatattttggaaggagatcacaatttaaagcttctgcgccaggactgctacataagtcatcagaagaagttcatcaaccatcttgtcaatcaacttgctgctcacctatttctaaagatagcctgccagctcgaagaacagataaaaatatcgagtgcctactcatttctgaaagctgtagaattggaattgcagggctacttctcagcttttgatggccgcctgggccggtacaatttaattgatcaagcagcatctgaaatgtttgaagagggatcagttgacgacagtgattcttatcttcatgctgtgagggatatccttagcagtcactcgagttcccaagcaacgtcaccagaatatgtgtcatcatatggtttgatcgggcagataacagagctgcaggatgagctccagtaccttcagcatgagaccgaaaatgtccttccacgtgagcgaggaagatgcaccgacgaactatgcaggatgatccaaacactggagcaaattctcgctgtgtccctttctgatgagcaaccaaagctgacaccatggccattggcgcattcacttgaagacctcgaaatggtcagccagcaggtctccgcttccgttagtgaggtgacactagctcgagacgaaaaggccgagaagctgaaacagccttcacgcaacgcgcagcaggaaaggacagggaagccaagaaagaagcgttcaggaagtatcttgaatccagtggcgtgctcgataccctcacgaaagctcttgtggcgctgtacgaggagaacgataagccttcatctgcagtcgaatttgttcagcagaagctgggtggcccgtcaatctctgactatgaaaagctcaaggcagagaagctggacttgcaattgaagtatgataagcttttagagacccacaaggaaacatgcagacagctggaggaacttaagaatatgaagtacggtgcaccctggaactgaaataacgtgtgttgacattgtaaatgtatcatgaagcatgtactttttacacctctctgaagcattgctaagctctttatacaatggaaacatctctcatgtatctgattttagccatctggatcccttttggattatgaagacacccaactcactgtaggtcccaggtatcagatatcaccaatgcaggataaaggatgtgacaactatcatagttgaaccatgagcaattgtttaaccagtaatacagtatcgacaaagagtgtggtctattgacttgagacttctcttggcatggcttgtaagcagattttagtagatttcagtggaagagatatggcgtgcaacgatacgtgtcaagatcgttgggaaatttcgaataaaaacatgctcaaagaaatgttatctgtgagcaatgctaaagggtgatggtcggattaaccgttcgtcgat

SEQ ID NO: 64792 - DNA, 1613 bp, Zea Mays
aaaacttactgcatccacacaagagttgtcttactatcactcagaagctgatatcggggtctacctatcatactgtgacttccagccttatgtgaggagtgccctggcttgtaccaaggaactaaacaaatggttctctaagaagtttgagaagggaccactccaacttgttgttcaagatgacaagttaagaggagatccggtaaactcccaccattttgttgtcgaactgagccgaattaactccatatttgctaaaagtaagagacagtacatagaagcacaagtagaatatgctaaagaagaagctatactatcagttctgagaactcagttggcatcccaacagtcatatattcatcaggatagccattctctaaggaggaaaaactccgaacttgctgaagagcttaaagatctttcccatcaagtgcaggaatacttatctgagactgttacaggcctgtgtgcagaccttgctcggctttcaggtgcaaatattttggaaggagatcacaatttaaagcttctgcgccaggactgctacataagtcatcagaagaagttcatcaaccatcttgtcaatcaacttgctgctcacctatttctaaagatagcctgccagctcgaagaacagataaaaatatcgagtgcctactcatttctgaaagctgtagaattggaattgcagggctacttctcagcttttgatggccgcctgggccggtacaatttaattgatcaagcagcatctgaaatgtttgaagagggatcagttgacgacagtgattcttatcttcatgctgtgagggatatccttagcagtcactcgagttcccaagcaacgtcaccagaatatgtgtcatcatatggtttgatcgggcagataacagagctgcaggatgagctccagtaccttcagcatgagaccgaaaatgtccttccacgtgagcgaggaagatgcaccgacgaactatgcaggatgatccaaacactggagcaaattctcgctgtgtccctttctgatgagcaaccaaagctgacaccatggccattggcgcattcacttgaagacctcgaaatggtcagccagcaggtctccgcttccgttagtgaggtgacactagctcgagacgaaaaggccgagaagctgaaacagccttcacgcaacgcgcagcaggaaaggcaggtgttctcagatttcttctgccacccggaacgactcgagaatcgagtggaagagctgctctcccgctttagagctctccctgagtagtaccgtccatttcatttgccaagatgggtggaggaacccttggccctccgattttcaaacgggcatcgtgtctcattgcctattcgtttctttttctcgtgtctggacgactggaagtgcagttttttgcatatatatattcaaaagcacgcggcacagttttttttttgactaagataagacatcgtctgtggtttacccggcccggcgtgttcagttgataaaaggaagtgtatcagttgataaaagcgtaattcgttcaaatagtttactcaaatctttgaagtattgtttgtcgccaaaatgagagagcgcttaaaaagagaagtagcacgcc

SEQ ID NO: 64793 - DNA, 1434 bp, Zea Mays
aagaagtttgagaaggagatccggtaaactcccaccattttgttgtcgaactgagccgaattaactccatatttgctaaaagtaagagacagtacatagaagcacaagtagaatatgctaaagaagaagctatactatcagttctgagaactcagttggcatcccaacagtcatatattcatcaggatagccattctctaaggaggaaaaactccgaacttgctgaagagcttaaagatctttcccatcaagtgcaggaatacttatctgagactgttacaggcctgtgtgcagaccttgctcggctttcaggtgcaaatattttggaaggagatcacaatttaaagcttctgcgccaggactgctacataagtcatcagaagaagttcatcaaccatcttgtcaatcaacttgctgctcacctatttctaaagatagcctgccagctcgaagaacagataaaaatatcgagtgcctactcatttctgaaagctgtagaattggaattgcagggctacttctcagcttttgatggccgcctgggccggtacaatttaattgatcaagcagcatctgaaatgtttgaagagggatcagttgacgacagtgattcttatcttcatgctgtgagggatatccttagcagtcactcgagttcccaagcaacgtcaccagaatatgtgtcatcatatggtttgatcgggcagataacagagctgcaggatgagctccagtaccttcagcatgagaccgaaaatgtccttccacgtgagcgaggaagatgcaccgacgaactatgcaggatgatccaaacactggagcaaattctcgctgtgtccctttctgatgagcaaccaaagctgacaccatggccattggcgcattcacttgaagacctcgaaatggtcagccagcaggtctccgcttccgttagtgaggtgacactagctcgagacgaaaaggccgagaagctgaaacagccttcacgcaacgcgcagcaggaaaggcaggtgttctcagatttcttctgccacccggaacgactcgagaatcgagtggaagagctgctctcccgctttagagctctccctgagtagtaccgtccatttcatttgccaagatgggtggaggaacccttggccctccgattttcaaacgggcatcgtgtctcattgcctattcgtttctttttctcgtgtctggacgactggaagtgcagttttttgcatatatatattcaaaagcacgcggcacagttttttttttgactaagataagacatcgtctgtggtttacccggcccggcgtgttcagttgataaaaggaagtgtatcagttgataaaagcgtaattcgttcaaatagtttactcaaatctttgaagtattgtttgtcgccaaaatgagagagcgcttaaaaagagaagtagcacgcc

SEQ ID NO: 64794 - DNA, 1050 bp, Zea Mays
atcctgtaaacatggatctccttcatatgactatgttaaaatcaatacaaaatactaaatgctgcttagactgctagacggaggctataatctcactggccggttctgaacctgcccctaaaaagacacctattctacatgccgacacttcgtcgaggacatgagccagctacttactcggcttcgcggcagtacagatccggccgacacttcgtcgtcaagctctcgccatttgcaactccttgctccgccgacctcgacgcaaactacaacttctcgcttgcgcctgtccaggatctgctctcgccatgggaagccaagaaagaagcgttcaggaagtatcttgaatccagtggcgtgctcgataccctcacgaaagctcttgtggcgctgtacgaggagaacgataagccttcatctgcagtcgaatttgttcagcagaagctgggtggcccgtcaatctctgactatgaaaagctcaaggcagagaagctggacttgcaattgaagtatgataagcttttagagacccacaaggaaacatgcagacagctggaggaacttaagaatatgaagtacggtgcaccctggaactgaaataacgtgtgttgacattgtaaatgtatcatgaagcatgtactttttacacctctctgaagcattgctaagctctttatacaatggaaacatctctcatgtatctgattttagccatctggatcccttttggattatgaagacacccaactcactgtaggtcccaggtatcagatatcaccaatgcaggataaaggatgtgacaactatcatagttgaaccatgagcaattgtttaaccagtaatacagtatcgacaaagagtgtggtctattgacttgagacttctcttggcatggcttgtaagcagattttagtagatttcagtggaagagatatggcgtgcaacgatacgtgtcaagatcgttgggaaatttcgaataaaaacatgctcaaagaaatgttatctgtgagcaatgctaaagggtgatggtcggattaaccgttcgtcgat

SEQ ID NO: 64795 - DNA, 961 bp, Zea Mays
ctataatctcactggccggttctgaacctgcccctaaaaagacacctattctacatgccgacacttcgtcgaggacatgagccagctacttactcggcttcgcggcagtacagatccggccgacacttcgtcgtcaagctctcgccatttgcaactccttgctccgccgacctcgacgcaaactacaacttctcgcttgcgcctgtccaggatctgctctcgccatggacagggaagccaagaaagaagcgttcaggaagtatcttgaatccagtggcgtgctcgataccctcacgaaagctcttgtggcgctgtacgaggagaacgataagccttcatctgcagtcgacagaagctgggtggcccgtcaatctctgactatgaaaagctcaaggcagagaagctggacttgcaattgaagtatgataagcttttagagacccacaaggaaacatgcagacagctggaggaacttaagaatatgaagtacggtgcaccctggaactgaaataacgtgtgttgacattgtaaatgtatcatgaagcatgtactttttacacctctctgaagcattgctaagctctttatacaatggaaacatctctcatgtatctgattttagccatctggatcccttttggattatgaagacacccaactcactgtaggtcccaggtatcagatatcaccaatgcaggataaaggatgtgacaactatcatagttgaaccatgagcaattgtttaaccagtaatacagtatcgacaaagagtgtggtctattgacttgagacttctcttggcatggcttgtaagcagattttagtagatttcagtggaagagatatggcgtgcaacgatacgtgtcaagatcgttgggaaatttcgaataaaaacatgctcaaagaaatgttatctgtgagcaatgctaaagggtgatggtcggattaaccgttcgtcgat

SEQ ID NO: 64796 - DNA, 878 bp, Zea Mays
aattgttctgcatgcggcttgatttcctctagactgtagtagtttcacttcctcttgagttttaggcccaggataaacaaagctttcctttttccctgcaaacaagtactcctaaccattggaattgacagcatgacagggaagccaagaaagaagcgttcaggaagtatcttgaatccagtggcgtgctcgataccctcacgaaagctcttgtggcgctgtacgaggagaacgataagccttcatctgcagtcgaatttgttcagcagaagctgggtggcccgtcaatctctgactatgaaaagctcaaggcagagaagctggacttgcaattgaagtatgataagcttttagagacccacaaggaaacatgcagacagctggaggaacttaagaatatgaagtacggtgcaccctggaactgaaataacgtgtgttgacattgtaaatgtatcatgaagcatgtactttttacacctctctgaagcattgctaagctctttatacaatggaaacatctctcatgtatctgattttagccatctggatcccttttggattatgaagacacccaactcactgtaggtcccaggtatcagatatcaccaatgcaggataaaggatgtgacaactatcatagttgaaccatgagcaattgtttaaccagtaatacagtatcgacaaagagtgtggtctattgacttgagacttctcttggcatggcttgtaagcagattttagtagatttcagtggaagagatatggcgtgcaacgatacgtgtcaagatcgttgggaaatttcgaataaaaacatgctcaaagaaatgttatctgtgagcaatgctaaagggtgatggtcggattaaccgttcgtcgat

SEQ ID NO: 64797 - DNA, 1996 bp, Zea Mays
aatattttaatttttgtactttgttggaatactctctcatttagaactcacaaattttacatgaattacgcaacaaatttcatatgcagaaaaaggcactacgcaaaaaaaaataaacattccaatatcccaaaagtctcatagagcaaagatgattatttgctcgttccgtttttttcttagaacatttataaaacgcaaaaaaagggaccccagcacatttatgaaacggaccattgaatgtgctcaaggcttctttcctccagaatcccccatctgagcaagggcgccgtcggctagcgccgcagcattgacgtggacgccgaccctctccggcagccgcttgcagcgcgtcccttccccgctcccgcggcatggactgcgcaaagaggagggcggtggcggacctccacaacgagctgatggtggagatcttctcgcgcgtgcccgtcaaagacctccgccgttgcacgtgcgtgtgcaaatcttggtgcaacatcatcaccgaccccctcaacggcaagaagctgccccagaccctggaaggcttcttccaaggcgtcgtcggagggcctcacagctacggccaattcaccagcctgtcggggagcggagaacgcgtgcctccggtcgacccttccttctccttcatcacggcagtgctgcctggcgtggagcgcatggtcctcttggattcttgcaacgggctcctgctctttgggtgcacccgggaggacaagttcgggtacatcgtgacaaaccctgcgaccaaggaattgatgactgtgcccgccagctccggctcttgtcctcctccacctccatttgaaagggacatggatgctggggaaagatacgcgcacacctttctgatgattaaccctgctgtctcctcgcacttccacttggtccagatctgggagaatagggcggtgaaggaggtggaaacggtacactcttactcgtctgaaaccaaggcatggagtgacaggtcaagcaagtgggggcgaggtgaagagggcggtgaatgggagctgtggggtggaaacggtacactcttactcgtctgaaaccaaggcatggagtgacaggtcaagcaagtgggggcgaggtgaagagggcggtgaatggaagctgtggggtgaatccgtgattggattgacgcgtggctgggctttggtcgatggtctgctgcattttcttgtcttcgatcttcagaaacaagagaatgtgataattgcagtggatggggaagggaaaacttgtaggatcatcggctggcatggtaaggatgtgagaacaattgcttttattggtcaatcccaaaaccatctacactgcatcggtgtgaatttgcaattacatcaaggctcccaagtgcgcttcacgcaaatgtcgatctgggttcttgaggactatgatacagaagcatggatcctaaagcacaatgtgagctcttcgcagttctttgaattactgagtcacccaatcaaagacttccatattgtggccattcatccagatcacaattcgttcatccttgttcagcactggaaccagaaactggtatcatataacatggatactcaggaactgcatggtctctgcactcttggaaagggctatgtgattattaccccatatgttccctgtttcttggagtcatcggttcttgccaccaaacactgaggttgttgtttctggggacttctctgcatgttcaacaagagcctgatcatccaagtgtggggcaaggtgatctagtctgatggtgctttaatgtccttttgtaatgctttgagaaagctgtttacaggacaacatggttagttctatgatatatcagtgagaaagctgtttacaggacagtattgttagttctatgatatatcaaattagatcacacttaattgctggccaatataggtattagcttcggttttttgttgtgattattcaatattgaatgcgcacctgcgcacctatggtattgccc

SEQ ID NO: 64798 - DNA, 1539 bp, Zea Mays
cagcacatttatgaaacggaccattgaatgtgctcaagtcttctttcctccagaatcccccatctgagcaagggcgccgccgccgtcggctagcgccgcagcattgacgtggacgccgaccctctccggcagccgcttgcagcgcgtcccttccccgctcccgcggcatggactgcgcaaagaggagggcggtggcggacctccacgacgagctgatggtggagatcttctcgcgcgtgcccgtcaaagacctccgccgttgcacgtgcgtgtgcaaatcttggtgcaacatcatcaccgaccccctcaacggcaagaagctgccccagaccctggaaggcttcttccaaggcgtcgtcggagggcctcacaactacggccaattcaccagcctgtcggggagcggagaacgcgtgcctccggtcgacccttccttctccttcatcacggcaatgctgcctggcgtggagcacatggtcctcttggattcttgcaacgggctcctgctctttgggtgcacccgggaggacaagttcgggtacatcgtgacaaaccctgcgactgaggaattgatgactgtgcccaccagctcctgctcttgtcctcctccaccttcggttggtggggaaagatatgcgcacacctttctgatgtttaaccctgctgtctcctcgcacttccacttggtccagatctgggaggataatgcggtgaaggaggtggaaacggtacactcttactcgtctgaaaccaaggcatggagtgacaggtcaagcaagtgggggcgaggtgaagagggcggtgaatggaagctgtggggtgaatccgtgattggattgacgcgtggctgggctttggtcgatggtctgctgcattttcttgtcttcgatcttcagaaacaagagaatgtgataattgcagtggatggggaagggaaaacttgtaggatcatcggctggcatggtaaggatgtgagaacaattgcttttattggtcaatcccaaaaccatctacactgcatcggtgtgaatttgcaattacatcaaggctcccaagtgcgcttcacgcaaatgtcgatctgggttcttgaggactatgatacagaagcatggatcctaaagcacaatgtgagctcttcgcagttctttgaattactgagtcacccaatcaaagacttccatattgtggccattcatccagatcacaattcgttcatccttgttcagcactggaaccagaaactggtatcatataacatggatactcaggaactgcatggtctctgcactcttggaaagggctatgtgattattaccccatatgttccctgtttcttggagtcatcggttcttgccaccaaacactgaggttgttgtttctggggacttctctgcatgttcaacaagagcctgatcatccaagtgtggggcaaggtgatctagtctgatggtgctttaatgtccttttgtaatgctttgagaaagctgtttacaggacaacatggatgcatctgccttatgatctgagggccaagtggag

SEQ ID NO: 64799 - DNA, 1850 bp, Zea Mays
cagcacatttatgaaacggaccattgaatgtgctcaagtcttctttcctccagaatcccccatctgagcaagggcgccgccgccgtcggctagcgccgcagcattgacgtggacgccgaccctctccggcagccgcttgcagcgcgtcccttccccgctcccgcggcatggactgcgcaaagaggagggcggtggcggacctccacaacgagctgatggtggagatcttctcgcgcgtgcccgtcaaagacctccgccgttgcacgtgcgtgtgcaaatcttggtgcaacatcatcaccgacccccacaacggcaagaagctgccccagaccctggaaggcttcttccaaggcgtcgtcggagggcctcacagctacggccaattcaccagcctgtcggggagcggagaacgcgtgcctccggtcgacccttccttctccttcatcacggcagtgctgcctggcgtggagcgcatggtcctcttggattcttgcaacgggctcctgctctttgggtgcacccgggaggacaagttcgggtacatcgtgacaaaccctgcgaccaaggaattgatgactgtgcccgccagctccggctcttgtcctcctccacctccatttgaaagggacatggatgctggggaaagatacgcgcacacctttctgatgattaaccctgctgtctcctcgcacttccacttggtccagatctgggagaatagggcggtgaaggaggtggaaacggtacactcttactcgtctgaaaccaaggcatggagtgacaggtcaagcaagtgggggcgaggtggaaacggtacactcttactcgtctgaaaccaaggcatggagtgacaggtcaagcaagtgggggcgaggtgaagagggcggtgaatgggagctgtggggtgaatccgtgattggagtcatgtgtggctgggctttggtcgatggtctgctgcattttcttgccttagatcttcagaaacaagagaatgtgataattgcagtggatggggaaggggaaacttgtaggattatcggctggcatggtaaggatgtggaagcaattgtttttattggtcaatcccaagaccgtctacactgcatcggtgtgaatgcgcaattagatcaaggctctgaagtgcgcttcacgcggatgtctatctgggttcttgaggactatgatatacaagcatggatcctaaagcacaatgtgagctctttgcagttctttgaattactgagtcacccaatcaaagacttcgatattatggccattcatccagatcacaattcgttcatccttgttcagcactggaaccagaaacttgtatcatataacatggatactcaggaactgcgtggtctctgcactcttgaaaagggctatgtggttattaccccttacataccctgtttcttggagtcatcggttcttgccaccaaacactgaggttgttgtttctgggggacttctctgcatgttcaacaagagcttgatcatccaagtgtttggcaaactagcagtgtgggtaaatctactagaattaggtggtgcaaagttggattacatgtctttaggtgatctagtctgatgatgctttaatgtcctttcgtaatgctttgagaaagctgtttacaggacaacatggttagttccatgatatatcagtgagaaagctgtttacaggacagcatggttagttctatgatatatcaaattagatcacacttaattgcaggccaatttaggtattagcttcggtattttgttgtgtttatgcaatattgaatgcgcacctatggtattaccttgtgtcttgtgtgttctgcttgttggcttttctccct

SEQ ID NO: 64800 - DNA, 1744 bp, Zea Mays
cggcacatccataaaaggcaccattaaatctttggctattaggacgcttctctcctcccaaaccccacatctcagcaagggccccgtcggctagcgccgcatccgcagaccgcagccgtcgacgcagaccctcttcggcagccgcttgcagcgcgtcccttccccgctcccggcgccatggactgcgcaaaggggagggcggtggcggacctctacgacgaggtgatggtggagatcctctcgcgcgtgcccgtcaaagacctccgccgttgcacgtgcgtgtgcaaatcttggcgcaacctcatcaccgaccccctcaaccgcaagaagctgccccagaccctggaaggcttcttccacggcgtcgtcggagggcctcacagctacggccaattcaccagcctgtcggggagcggagaacgcgtggctccggtcgacccttccttctccttcatcacggcaatgctgcctggcgtggagcgcatggtcctcttggattcttgcaacgggctcctgctcttcgggtgcacccgggaggacaagttcggatctgggagaataaggcggcgaaggaggtggaaacggtgcactcttactcgtctgaaaccaaggcatggagtgacaggtcaagcaagtgggggcgaggtgaagagggcggtgaatgggagctgtggggtgaatccgtgattggattcatgtgtggctggacattggtcgatggtctgctgcattttcttgccttcgatcttcagaaagaagagactgtgataattgcagtggatggggaaggggaaactcgtaggatcatcggctggcatggtaaggatgtgagagcaattgtttttattggtgaatcccaagaccatctacactgcatcggtgtgaatgtgcaattagatcaaggctctgaagtgcgcttcacgcggatgtcgatctgggttcttgaggactatgatacacaagcatggatcttaaagcacaatgtgagctctttgcagttctttgaattactgagtcacccaatcaaagacttccatattgtggccattcatccatatcacaattcgttcatccttattcagcactggaaccagaaacttgtatcatataacatggatactcaggaactgcatggtctcggcactcttggaaagggctatgcggttattaccccttacataccctgtttcttggagtcatcggttcttgccaccaaacactgaggttgttgtttctcggggacttctctgcatgttcaacaagagcctgatcatccaagtgtggggcaaggtgatctagtatgatggtgctttaatgtccttttgtaatgctttgagaaagctgtttacagggcaacatggttagttccatgatatatcagtgagaaagctgtttacaggacagcatggttagttctatgatatatcaaattagatcacacttaattgctggtcagtataggtattagcttcgatattttgttgtgattattcaatattgaatgcgcacctatggtattaccctgtgtgttcagcttgttggcttttcccctctgttttttcttcttcttaatataatactccctccgctctaatttataattcatttgattttttaccctaagtttgactgttgtcttattaaaaaatcataattattgttgatctttgatgtgatattgtttagcatttaatatactttaaatgtggctttgaatttttcattttttcccgcaaaaaaataa

SEQ ID NO: 64801 - DNA, 1500 bp, Zea Mays
cggcacatccataaaaggcaccattaaatctttggctattaggacgcttctctcctcccaaaccccacatctcagcaagggccccgtcggctagcgccgcatccgcagaccgcagccgtcgacgcagaccctcttcggcagccgcttgcagcgcgtcccttccccgctcccggcgccatggactgcgcaaaggggagggcggtggcggacctctacgacgaggtgatggtggagatcctctcgcgcgtgcccgtcaaagacctccgccgttgcacgtgcgtgtgcaaatcttggcgcaacctcatcaccgaccccctcaaccgcaagaagctgccccagaccctggaaggcttcttccacggcgtcgtcggagggcctcacagctacggccaattcaccagcctgtcggggagcggagaacgcgtggctccggtcgacccttccttctccttcatcacggcaatgctgcctggcgtggagcgcatggtcctcttggattcttgcaacgggctcctgctcttcgggtgcacccgggaggacaagttcgggtacatcgtgacaaaccctgcgaccgaggaattgatgactgtgcccgccagctccggctcttgtccccttccacctccatttgaaagggacatggttggtggggaaagatatgcgcacacctttctgatgtttaaccctgctgtctcctcgcacttccacttggtccagatctgggagaataaggcggcgaaggaggtggaaacggtgcactcttactcgtctgaaaccaaggcatggagtgacaggtcaagcaagtgggggcgaggtgaagagggcggtgaatgggagctgtggggtgaatccgtgattggattcatgtgtggctggacattggtcgatggtctgctgcattttcttgccttcgatcttcagaaagaagagactgtgataattgcagtggatggggaaggggaaactcgtaggatcatcggctggcatggtaaggatgtgagagcaattgtttttattggtgaatcccaagaccatctacactgcatcggtgtgaatgtgcaattagatcaaggctctgaagtgcgcttcacgcggatgtcgatctgggttcttgaggactatgatacacaagcatggatcttaaagcacaatgtgagctctttgcagttctttgaattactgagtcacccaatcaaagacttccatattgtggccattcatccatatcacaattcgttcatccttattcagcactggaaccagaaacttgtatcatataacatggatactcaggaactgcatggtctcggcactcttggaaagggctatgcggttattaccccttacataccctgtttcttggagtcatcggttcttgccaccaaacactgaggttgttgtttctcggggacttctctgcatgttcaacaagagcctgatcatccaagtgtggggcaaggacgagccggtcaaatatggcacaaaaaagtcaacgatgta

SEQ ID NO: 64802 - DNA, 1275 bp, Zea Mays
ccaaattcagagcatctagggctattagaaaacgtgcaaggcttctttcctcccaaatcccctgagcaaggcccccgtcggctagcgccgcagccgtcgccgtcgacgccgactctcaccggcagccgatctggcaggatatgacggtggaggatgtggaaacggtgcactcttactcgtctgaaacgaaggcatggagtgacaggtcaagcaagtggcggcgaggtgaagagggcagtgaatgggggctgtggggtgaatgcctcatcaaattcaggatgggcagggctttgatcaacgatctgctgcattttgttggcttcgattctcagaaacaagaggatgtgatagttgcagtggatggggaagggaagacttgtaggatcatcgactggcatggtaaggatgtgagattaatcatttttattggtcaatcccaagaccgtctgcactgcatcggtgtcaatacgaaagcaggtcaagaccatatacacatcacgcggatgtcaatctgggttcttgaggactatgatacaaaagcatggatcctgaagcacagtgtgggctctttgcagttttttggattactgggtcgcctggtccatgatttcaatattgtggccattcatccagatcacaattctatcatcattgttcagcactggaaccagaaacttgtatcatataacatggatacccaggaactgcgtggtctccgcactcttgaaaatggctgtgcctatgtggctattaccccatacgttccctgtttcttggagtcatcagttcttgccaccaaaggttgaggttgttgctttttggagacttctctgcatgttcagcaatagcttgatcatccaagtgtggggcaaactagcagtgtgggtaaacctactagaatcaggtggtgcaaagttggattacatgtctttaggtgatctattctgatggtgctttaatgtcctcttgtaatgctgtgagaaagctctttacaagacagcatgcaggttagcattacatattactagttcgagctgcccaacacatgtaagttctcagttttgagtttcagatgctacactttgtgtttccagaatgatgtctccatcttttttgtgtgcttcctttttctcggcctatattagcgagccattactgactgaatttgtgcttggtcggtgctgtatatgtattttatgctgggaaatgcatttatcttccacatgtagcggatgtcatgtctctgaaatgtttgaactgagaacttgtcacatt

SEQ ID NO: 64803 - DNA, 2458 bp, Zea Mays
cgcttcttcttctccacgagctcatcttctccctccccagctcctctctgctcgctctccccagccgctccctctctgcttctctctttcagcacgccgcgctccctctgctggccagaggccccctccagccgagctcggcatctgtagcttcctcctccaccgcgcccctggctgagctctcccccatggccgccgtgggctcgccggcgttgcccctgtccatggccgccgtggtggcgcgcgcccctgctcctcgcgccccctgtttttctctccctctctcttctccatagccgcgcctacccctctgtttcccacgcgccaccgctctggttccagctctctggcttgccgcgtgcccatctccgcgactccgaccctggaactcgccctctgccgcgcgccgagcttctccctggtcgcccctttagccgagcgtcttcctggccggagctccctgctcggttttctccatggcggccgagatctctctttccctggtgccgtgtgtgctcgccctcgcctatgccgcgcccctgcgctcgtcgcggtgctccagctcgcccctgcgcgctcctctccccaagatccctccctgcatgccggacgtcgtccgttccctggtggccgagcatagcccttgcgctcgtaccttctctgttcaatttctagaacacctaggtctatccatggtcactcccttcgtcgttggtgttcggctccctgtttcagttgtttcagtttgtcgtgccgcgccatcatcacttctgtcgcgagctcgatcctcgttgtcatcacttcgccatgtttgacggtagccgccccgtcgtgctcgtctccggtgctcgcttcggccgcggacgctgtcgagcccgtcgttttccctgtcctgtgctcacgcggctttctgctcgccagcgcgccctctcggctcgctcggccttaatccctattgcgtcgtcgacctcgccgattgtcgtcgttcgttatcacgtcgtgcgtgcagcagccccggatctgtgcagccctggtcttgttgtcgacattgctcgccgtggctcaacttgctagttcgtcattgtttcgtcgtcacgtcgttcgccgttgagcctcactgcccatcgtgaagtcccctgctgtcagcctccgcactcgtcctaggccgtcgtagccagtttgcctctatctcgtggtggtgttgcgttgccgtcgagtcccgatatcgatctggcggtcgtcgaagtgaagctcagttcaatgctcgccaggtgttcgatcgaagattttattcggagactgtcgacattctcgcaagctttgagtcagagttgctttggatgagaaatccctgatgttcgagagaagcgaggcctataagcgctctcttaggactcgatcaaaggtctaagttataaaattgtcatcgccctagcggatatcgaatccatttggtcttggtaggccaatatattatttcggttaatcgaattggattaactagactcattagtcgtaataattttcgtgtttagcagatgcgtcatgtttgtgttagatgtttgctaaaatacctcagcccctccggtaatgtaatcgtgtgaaataaatgtgtaatatggtgcaccttaggactaaaatgcaggataaatgaaatatttaatttagtggaacttatgctgcataatagctgagaatagtaattctagaagttaatgtaatgatttctatttttagtctaagtttagatattgtgctctagtcaagagagatagagtgctcgtaaacggttctctatggtttatgatattcctatctatatgcattcatatgcataatgcatttcattcagatacgttaattaatggcgtaatgcggaagacaagccaagtcgaccccaagcgcgggctactccgtatggtggtgctggaagacgaacctgcccgatcaagtgctagcacaaggatgatcatcaagtggacgtcacctaacaacactaacctagtgttacctaggcaagccctggtgcattttccacctccttgtgttttaaaatctttatcaccttatttgatgcattaggtgataggagttgtgtgctaaaccgttgatccatttccttccttgaaagttgattacccttccttgatacccattttgaaaagaattttatgatgcttagccttgctttagcaaacaaaaatgttttgttttaaaacaaaagtgatgcttcagtgggtgggaatgttttcaaaaagaaaaacttgtgatggtggatccatcaaggccttgatgggttcaacatcgaaaaagatgtacctctgcgaggtaccaaactttgggttgaaaataataaagctgagaccaggcggttgacttgcacgagaagagagtctcggtgtagtgtctccgtctgagtcgattaaggaccttgtcgatgtaggcttgctgatcgagg

SEQ ID NO: 64804 - DNA, 387 bp, Zea Mays
caccgttggcgtgaacaccgagcgaagaaccaaaagaaagtcgccgccaccgctgtacttcctcctcaccgtcgttcaatgcgccgacattagctgttgggcttcgcgatgtcaacggggcgggaatcagagcctcgccaggggagattgggaagcggggttgaggtttcgctctcgaaattaagactcatgaccgattcgaccgagtcctagaccatcagcgtcgctgcttcctccgccgttgaggagaagaacaggtggttctggaggagccacaaagcgaggagtttgatctgttctaggtggcgtttccccagttgactcttgggccaaggattatccttagttcgttttatatttatcttttattttgtaataagaattccg

SEQ ID NO: 64805 - DNA, 211 bp, Zea Mays
gggcagccgaacaagtcgttggtgcgaggtcggagcggtggcaacctgatgctcaaggtggttttagatgtccactcagacagatgctagaggcttttggatgcgacatgcctcatcaggggaagtggctcctaaagccgatgttgcccgctaggagcagggtgctccaagccaagaaacatcccagaaagggaaggaggtggcgccgaac

SEQ ID NO: 64806 - DNA, 2518 bp, Zea Mays
tctcgttatgctactttcaagggaggtgctgccggattttgctttactttctgtctctttttttcttttcttatgttgtttaagttttgtgggaagggtatttggtaacattcattgtgtgggagcaatggggtgttacagcgaccaagagctctcgtcacaggcaggtagtagtagagccagaattgtaaccttgggttttcccacacctcaaatagatatagatatagggataaagatagatatagcaaattcaccaaataatataggggtatagatatagatataacaaggggtatagatatagatatatagaagatatagatagatagaatagataacttacaattttgtctaaaagaaactaaatcactgctaagtttggagtagcatatctttggtgaatacttgccagtgaattggtttccgctatagtgtatatatatatatatataagtatacactcttctaggatcatagtctatactacttattaagactgcaagggtagcctgcctctgactgttctgccacccaccatggttgtccctcccgcacgacaaaaatatgagacctgtagggatcgaactgtgaccaattctctacaggcgctagcgcttaaccactccaactaagtctgctttatgttacgtcaccacacaaggttatattgatattccgtaaatcgtgaatgcatacatcaatagaacgacatttcgacggtattcaaatgattaacatttgtaaaaggtcctacatcacacatcaagatatactcctctatttgatttttttcattgaacttcaagagagtgcctttagagtgattgcagataactatgtcacggatcattgtgtttgccttgctgttgggatatttgaggttggatttattcttctttaattcatttacatcctcactaactgatgtgccgctaatgctaagtattcacaggttgagagaaatgggaggatcagtaaaccagtaatatactaatctccttttcagaaacttggggaaatagtgctatgtatttaactaaaatgacactatcaaaccataggtcataggtctacctgggttaggcttggctcttgagttatgtcatttataggttggaaaacacaaactctgtaaatggggaatgattcttatcattgtgaatggcagtaccaacatgttatggtcgtggttgggtgtcaaacaatccttactcccaggtgatcaacatacatgaatgtgtctccctgttaccatatgttttgatcattgcatctttatagctcttctgtgagttgaccatcctccattttcaaaattatgttactatagttcagttaatatctatatccttcaattgaagctatctgaatgtaattagcatcttgcagtttcaagaatcatgtttcttgtcccagttttcttattaggtagcttaggaacttcatgcaatttttaatctacaagtggaagcatttttttaatatacaagtggaacacttaagtttggggaatctttttttaatccacatctgagtgaattcatgactggtgattttctttgtaaatacattttacttttcttacttctaaaatacatgttccatcactacttgactttacaactaagttgactcgattttgtgctgttagcatctatttacattggatgggaagatggccgaacaaaatctttggacacaaaatcatcgtatttcatagttgttctaaattgcacatagtaacgaacaaaattggatcataaaactacaattctatagtttgaactttgaagtactcatatcactttcttgataagattgaaattgccttgcagttgggtatgagccctacttcggcaagacagtgtacccggagcccaagcgatgccggcgtacggacgacaagaagtggcggtgctccaatgaggccgccccagtctccaagtactgcgagcgccagatgcaccgcgcccacaaccgttcaagaaagcatgtgaagaagtgaatgacgccatggagcggcacgacacgacgtgggatcaccaggaggaggataaccttgcagcgtggcggctgtcttgcagctcgtgagtcacgcgagagaataggttaacaacgggaataggttacagtgagcatcttcaagaggatgcttaaaaattttccccaaaatgtgattattagcgacaggcaaaaatttattagatgtagattataagtttactccatcagttcacagaatagaacacttaaatgaaaactgggccaactaataaatttccagagtatgaagtagtccacttgaaggaagggcttggcccatattcacgtacgtgattttcatgttatgttgtgcgctagaacagttgaacaggcaggatttatcgatactagctaacagacagcatatgtttcatcacgtactaagctacttgttaactttaattcagccaaaataatgtaataattgcagttctgttcatttatcgatgaagaagccacattacttccggaa

SEQ ID NO: 64807 - DNA, 1450 bp, Zea Mays
tctcgttatgctactttcaagggaggtgctgccggattttgctttactttctgtctctttttttcttttcttatgttgtttaagttttgtgggaagggtatttggtaacattcattgtgtgggagcaatggggtgttacagcgaccaagagctctcgtcacaggcaggtagtagtagagccagaattgtaaccttgggttttcccacacctcaaatagatatagatatagggataaagatagatatagcaaattcaccaaataatataggggtatagatatagatataacaaggggtatagatatagatatatagaagatatagatagatagaatagataacttacaattttgtctaaaagaaactaaatcactgctaagtttggagtagcatatctttggtgaatacttgccagtgaattggtttccgctatagtgtatatatatatatatataagtatacactcttctaggatcatagtctatactacttattaagactgcaagggtagcctgcctctgactgttctgccacccaccatggttgtccctcccgcacgacaaaaatatgagacctgtagggatcgaactgtgaccaattctctacaggcgctagcgcttaaccactccaactaagtctgctttatgttacgtcaccacacaaggttatattgatattccgtaaatcgtgaatgcatacatcaatagaacgacatttcgacggtattcaaatgattaacatttgtaaaaggtcctacatcacacatcaagttgggtatgagccctacttcggcaagacagtgtacccggagcccaagcgatgccggcgtacggacgacaagaagtggcggtgctccaatgaggccgccccagtctccaagtactgcgagcgccagatgcaccgcgcccacaaccgttcaagaaagcatgtgaagaagtgaatgacgccatggagcggcacgacacgacgtgggatcaccaggaggaggataaccttgcagcgtggcggctgtcttgcagctcgtgagtcacgcgagagaataggttaacaacgggaataggttacagtgagcatcttcaagaggatgcttaaaaattttccccaaaatgtgattattagcgacaggcaaaaatttattagatgtagattataagtttactccatcagttcacagaatagaacacttaaatgaaaactgggccaactaataaatttccagagtatgaagtagtccacttgaaggaagggcttggcccatattcacgtacgtgattttcatgttatgttgtgcgctagaacagttgaacaggcaggatttatcgatactagctaacagacagcatatgtttcatcacgtactaagctacttgttaactttaattcagccaaaataatgtaataattgcagttctgttcatttatcgatgaagaagccacattacttccggaa

SEQ ID NO: 64808 - DNA, 1759 bp, Zea Mays
aagaaactaaatcactgctaagtttggagtagcatatctttggtgaatacttgccagtgaattggtttccgctatagtgtatatatatatatatataagtatacactcttctaggatcatagtctatactacttattaagactgcaagggtagcctgcctctgactgttctgccacccaccatggttgtccctcccgcacgacaaaaatatgagacctgtagggatcgaactgtgaccaattctctacaggcgctagcgcttaaccactccaactaagtctgctttatgttacgtcaccacacaaggttatattgatattccgtaaatcgtgaatgcatacatcaatagaacgacatttcgacggtattcaaatgattaacatttgtaaaaggtcctacatcacacatcaagtaccaacatgttatggtcgtggttgggtgtcaaacaatccttactcccaggtgatcaacatacatgaatgtgtctccctgttaccatatgttttgatcattgcatctttatagctcttctgtgagttgaccatcctccattttcaaaattatgttactatagttcagttaatatctatatccttcaattgaagctatctgaatgtaattagcatcttgcagtttcaagaatcatgtttcttgtcccagttttcttattaggtagcttaggaacttcatgcaatttttaatctacaagtggaagcatttttttaatatacaagtggaacacttaagtttggggaatctttttttaatccacatctgagtgaattcatgactggtgattttctttgtaaatacattttacttttcttacttctaaaatacatgttccatcactacttgactttacaactaagttgactcgattttgtgctgttagcatctatttacattggatgggaagatggccgaacaaaatctttggacacaaaatcatcgtatttcatagttgttctaaattgcacatagtaacgaacaaaattggatcataaaactacaattctatagtttgaactttgaagtactcatatcactttcttgataagattgaaattgccttgcagttgggtatgagccctacttcggcaagacagtgtacccggagcccaagcgatgccggcgtacggacgacaagaagtggcggtgctccaatgaggccgccccagtctccaagtactgcgagcgccagatgcaccgcgcccacaaccgttcaagaaagcatgtgaagaagtgaatgacgccatggagcggcacgacacgacgtgggatcaccaggaggaggataaccttgcagcgtggcggctgtcttgcagctcgtgagtcacgcgagagaataggttaacaacgggaataggttacagtgagcatcttcaagaggatgcttaaaaattttccccaaaatgtgattattagcgacaggcaaaaatttattagatgtagattataagtttactccatcagttcacagaatagaacacttaaatgaaaactgggccaactaataaatttccagagtatgaagtagtccacttgaaggaagggcttggcccatattcacgtacgtgattttcatgttatgttgtgcgctagaacagttgaacaggcaggatttatcgatactagctaacagacagcatatgtttcatcacgtactaagctacttgttaactttaattcagccaaaataatgtaataattgcagttctgttcatttatcgatgaagaagccacattacttccggaa

SEQ ID NO: 64809 - DNA, 381 bp, Zea Mays
tgaggagttcctttagtttttcttgagacatggagtacagaaagcgggtggacgcgctagtgtttttctcgtttcttctcgtcggatattttgctgctcatgcgtatgatgagaagggtcatgtcacggatgaagtcgctgttcctgctccatctgaaggaggagttatgcgagcaacaggggcacattgtgaagtatctgttccgtgcaaagataaaaggtgctactgctgcgttgggggtagaattgatgagtgttacctaacaatgcctttctgtaattatgcctgcttctaaacacaaactaagatcgctattgttatacacaatgtaataacggtaggcaatgctattaataatatatagagggatttttaatttc

SEQ ID NO: 64810 - DNA, 997 bp, Zea Mays
ggcatcaaaatacctcaaaagtcctcctgctttagagcccataatgttctgctgatcacagaacagactgaagcctgaagtggcttattgtgcctgttatgccgaaagtaaatgataactaaatgaaccaaacaatgagtggcatgcatgtgcgtgtatgtgtggttacaggtttcttctcacaaaggtaaactacaccataaatgatagaacagaggaactgaggaagtggtaaattgtcaatgaaccaagccaaagcaagcaagcaagtctgccatgagaaacagttaggtggtcttcgacgacagatctcggttttttgtgcaaacaacgctaatcatcaggttgggagctcagaatccaacgagaaaatacattaatcatgtactaaactcgtgaatgaaactgaaaccctaaactatttgcaatatattaccctgatgcacgccgttacctgctgcgagcagcgtccgccgcctgctagtggttggtggcgatagagatgcccctcttttttcaggcgagaagacggcagcggagatctggggctcaccttctggagttgttctctacgtcctgtgtatgcgctgtggtagtacggttgctccaccaccgccagttgaaggactcatgcactgagcgtaggaccaacacgcgattgacggcgtggattgatgttgaccaccgcaccggggcgcatgatggctcggcaagctgcgacgaggtcgagcggctcgtcggcgagcgtggggtgcaggagggagcgggagcatggggaggaatactctctttgccaaatgctcatacttgcatcctaccgccggtcgtctccaccatcgtgcgacagtttcgcctttcatggggttgcatggcttctctccctgagatctcactgccgacccacgcagtggcgagtagcgtcttgttggccacaccctagggctggtggagcctcccatcggccatctccaccatcgcacgacgatttcacctttcc

SEQ ID NO: 64811 - DNA, 1835 bp, Zea Mays
aactgctgcgtctcagtactcagtagtcagaaagacgcaagccggcaaagttcatctgcggctgcttactgttcccaagcagttggcattggcaatccgccagacgcaagcgtccccctccgctcctctcaaccggcacggcgccaggtccgcggcgaaatcggtggacggcatgccgcggcgcgaggcggcgaggcttctccgccgcctgggcccgatcgctgtccagtcgccgaagcgaggcttttcaggcatgcctcataatcaatatgaatccacaaaccacgctgtgaattcttatagaagattccactggattcccagtgtacagcaccctctgtgtggacctacaagtagtgggggaatatatgaaggtcaacgcagtgctaacaaggcttgtgaagttcagaagcgcacatttggttctgctgcaacacagtttcagaggaatccagcctattcagtgctgaactctgatgacattgcttacttcaagagcatcttgggagaaaatggtgtagttcaggatgaagacagagttgcagttgcaaatgtagattggatgggtaaatacagaggtgcaagtcagctagtacttttaccaaaaactactactgaggtatctaagattctttcatattgcaacaccaaacgattggctgtggttccacaaggtggcaacacaggtcttgtaggtggaagtgtgcctgttttcgatgaggtgattgttggccttgcaggcatgaataaaattatttcctttgataacgtttattatgccacttgacttgggagcgaaaggtagttgccacatcggtggaaacatttcaactaatgctggcggcctgcgttttatacgctatggttcacttcatggaaatgttcttggtcttgaagttgtcctggctgatgggactatccttgatatgcttactactttaaggaaagacaatactgggtatgatctgaagcacttatttataggaagtgaaggctcgctaggagtagtcaccaaaatatcagtacttacacctgcaaagctatcttcaaccaatgttgcatttctttcctgcaatgattacacaagctgccagaaattactactggcagctaggaggagcttgggtgagatcttgtctgcatttgaattcatggatcatcactgtattgatctggctatgcaacatttggaaggagttcaaaatcctttacctgcatcaccgtacaaattttacgttctagttgaaacaacaggaagtgatgaatcatctgacaagacaaaactggaagcttttttgttgcgttcaatggaagatggtttagtagctgatggagttatcgcacaggatatcagccaagcatcaaacttttggaggatccgtgagggtatatcagaagcatccgtcaaagttggagctgtgtacaaatatgacttgtccataactgtagagaagctctatgatattgttgaagaaatgcgctgccgtcttggtaattgtcagattggatctgtcgataatctacagcttaattaactcaatatgttggttctctaggtgataatgcagaggtattgggctatggccaccttggagatgggaatctgcatttgaacattgtatcaagcaaatatgacgacaatattctcgcacaaattgaaccattcgtctatgagtggacatcagcacaaagaggaagcatcagcgcagagcatggtttggggctaatgaaagctgagaagattcactacagtaaatcacctgaagcagtgagtgtttccatactgccctgccaacacttggaagtatgttgtacataatgattaagaaaatgac

SEQ ID NO: 64812 - DNA, 2250 bp, Zea Mays
ctcagtactcagtagtcagaaagacgcaagccggcaaagttcatctgcggctgcttactgttcccaagcagttggcattggcaatccgccagacgcaagcgtccccctccgctcctctcaaccggcacggcgccaggtccgcggcgaaatcggtggacggcatgccgcggcgcgaggcggcgaggcttctccgccgcctgggcccgatcgctgtccagtcgccgaagcgaggcatgcctcataatcaatatgaatccacaaaccacgctgtgaattcttatagaagattccactggattcccagtgtacagcaccctctgtgtggacctacaagtagtgggggaatatatgaaggtcaacgcagtgctaacaaggcttgtgaagttcagaagcgcacatttggttctgctgcaacacagtttcagaggaatccagcctattcagtgctgaactctgatgacattgcttacttcaagagcatcttgggagaaaatggtgtagttcaggatgaagacagagttgcagttgcaaatgtagattggatgggtaaatacagaggtgcaagtcagctagtacttttaccaaaaactactactgaggtatctaagattctttcatattgcaacaccaaacgattggctgtggttccacaaggtggcaacacaggtcttgtaggtggaagtgtgcctgttttcgatgaggtgattgttggccttgcaggcatgaataaaattatttcctttgataacgtaaatggaattcttacttgtgaagctggttgtgtgttggagaatttaagtaccttcgtggaaaatgaagggtttattatgccacttgacttgggagcgaaaggtagttgccacatcggtggaaacatttcaactaatgctggcggcctgcgttttatacgctatggttcacttcatggaaatgttcttggtcttgaagttgtcctggctgatgggactatccttgatatgcttactactttaaggaaagacaatactgggtatgatctgaagcacttatttataggaagtgaaggctcgctaggagtagtcaccaaaatatcagtacttacacctgcaaagctatcttcaaccaatgttgcatttctttcctgcaatgattacacaagctgccagaaattactactggcagctaggaggagcttgggtgagatcttgtctgcatttgaattcatggatcatcactgtattgatctggtacttgcataagaaattctgtttgaaataattttcacattctagagagaattaagacacaaaattgttacttgagttgattaggtgctctgagtagcgctcctcagatcatgagttcgactccctatggtaacaaatttcagactgagttaaaaaaatcccctcggctctctcatgatgtctaagttccggttgtggtcacggtcgcagtcattctcacaaggactatggtgccgctgtgtatgggtggaacaggggttcaggggttttctcgacttgtgtgagaagagcttcttaatacaatacctggtggatttgctcaataagcccttaaaacaaacttgactaaggggttccttatccaaagttaatggaatatttcttttttactgttagattggtttttgatagattgcttttgttttggaggctatgcaacatttggaaggagttcaaaatcctttacctgcatcaccgtacaaattttacgttctagttgaaacaacaggaagtgatgaatcatctgacaagacaaaactggaagcttttttgttgcgttcaatggaagatggtttagtagctgatggagttatcgcacaggatatcagccaagcatcaaacttttggaggatccgtgagggtatatcagaagcatccgtcaaagttggagctgtgtacaaatatgacttgtccataactgtagagaagctctatgatattgttgaagaaatgcgctgccgtcttggtgataatgcagaggtattgggctatggccaccttggagatgggaatctgcatttgaacattgtatcaagcaaatatgacgacaatattctcgcacaaattgaaccattcgtctatgagtggacatcagcacaaagaggaagcatcagcgcagagcatggtttggggctaatgaaagctgagaagattcactacagtaaatcacctgaagcagtgagtgtttccatactgccctgccaacacttggaagtatgttgtacataatgattaagaaaatgac

SEQ ID NO: 64813 - DNA, 1746 bp, Zea Mays
gtactcagtagtcagaaagacgcaagccggcaaagttcatctgcggctgcttactgttcccaagcagttggcattggcaatccgccagacgcaagcgtccccctccgctcctctcaaccggcacggcgccaggtccgcggcgaaatcggtggacggcatgccgcggcgcgaggcggcgaggcttctccgccgcctgggcccgatcgctgtccagtcgccgaagcgaggcatgcctcataatcaatatgaatccacaaaccacgctgtgaattcttatagaagattccactggattcccagtgtacagcaccctctgtgtggacctacaagtagtgggggaatatatgaaggtcaacgcagtgctaacaaggcttgtgaagttcagaagcgcacatttggttctgctgcaacacagtttcagaggaatccagcctattcagtgctgaactctgatgacattgcttacttcaagagcatcttgggagaaaatggtgtagttcaggatgaagacagagttgcagttgcaaatgtagattggatgggtaaatacagaggtgcaagtcagctagtacttttaccaaaaactactactgaggtatctaagattctttcatattgcaacaccaaacgattggctgtggttccacaaggtggcaacacaggtcttgtaggtggaagtgtgcctgttttcgatgaggtgattgttggccttgcaggcatgaataaaattatttcctttgataacgtttattatgccacttgacttgggagcgaaaggtagttgccacatcggtggaaacatttcaactaatgctggcggcctgcgttttatacgctatggttcacttcatggaaatgttcttggtcttgaagttgtcctggctgatgggactatccttgatatgcttactactttaaggaaagacaatactgggtatgatctgaagcacttatttataggaagtgaaggctcgctaggagtagtcaccaaaatatcagtacttacacctgcaaagctatcttcaaccaatgttgcatttctttcctgcaatgattacacaagctgccagaaattactactggcagctaggaggagcttgggtgagatcttgtctgcatttgaattcatggatcatcactgtattgatctggctatgcaacatttggaaggagttcaaaatcctttacctgcatcaccgtacaaattttacgttctagttgaaacaacaggaagtgatgaatcatctgacaagacaaaactggaagcttttttgttgcgttcaatggaagatggtttagtagctgatggagttatcgcacaggatatcagccaagcatcaaacttttggaggatccgtgagggtatatcagaagcatccgtcaaagttggagctgtgtacaaatatgacttgtccataactgtagagaagctctatgatattgttgaagaaatgcgctgccgtcttggtgataatgcagaggtattgggctatggccaccttggagatgggaatctgcatttgaacattgtatcaagcaaatatgacgacaatattctcgcacaaattgaaccattcgtctatgagtggacatcagcacaaagaggaagcatcagcgcagagcatggtttggggctaatgaaagctgagaagattcactacagtaaatcacctgaagcagtgagtgtttccatactgccctgccaacacttggaagtatgttgtacataatgattaagaaaatgac

SEQ ID NO: 64814 - DNA, 2150 bp, Zea Mays
gtactcagtagtcagaaagacgcaagccggcaaagttcatctgcggctgcttactgttcccaagcagttggcattggcaatccgccagacgcaagcgtccccctccgctcctctcaaccggcacggcgccaggtccgcggcgaaatcggtggacggcatgccgcggcgcgaggcggcgaggcttctccgccgcctgggcccgatcgctgtccagtcgccgaagcgaggcttttcaggcatgcctcataatcaatatgaatccacaaaccacgctgtgaattcttatagaagattccactggattcccagtgtacagcaccctctgtgtggacctacaagtagtgggggaatatatgaaggtcaacgcagtgctaacaaggcttgtgaagttcagaagcgcacatttggttctgctgcaacacagtttcagaggaatccagcctattcagtgctgaactctgatgacattgcttacttcaagagcatcttgggagaaaatggtgtagttcaggatgaagacagagttgcagttgcaaatgtagattggatgggtaaatacagaggtgcaagtcagctagtacttttaccaaaaactactactgaggtatttcattagcaatctagtggaagcttaatttcctgaacatcatgtagctgcaattccatttcctgaaagtcatgtacggcttcacaatgtaggtaccattattttaaagaataatttactggtgttgttcagtctttatattgtacttctgcaaatacaagggtgttgcaaaatccatgcaaatgacatgcatgctgattctttcagtagcccacactttttcatgaagattttttaataatttatttttttagtcttgctactcctatccacacacaagaaaaaagtgtgcacattctttattcaatgctctctttacaggtatctaagattctttcatattgcaacaccaaacgattggctgtggttccacaaggtggcaacacaggtcttgtaggtggaagtgtgcctgttttcgatgaggtgattgttggccttgcaggcatgaataaaattatttcctttgataacgtaaatggaattcttacttgtgaagctggttgtgtgttggagaatttaagtaccttcgtggaaaatgaagggtttattatgccacttgacttgggagcgaaaggtagttgccacatcggtggaaacatttcaactaatgctggcggcctgcgttttatacgctatggttcacttcatggaaatgttcttggtcttgaagttgtcctggctgatgggactatccttgatatgcttactactttaaggaaagacaatactgggtatgatctgaagcacttatttataggaagtgaaggctcgctaggagtagtcaccaaaatatcagtacttacacctgcaaagctatcttcaaccaatgttgcatttctttcctgcaatgattacacaagctgccagaaattactactggcagctaggaggagcttgggtgagatcttgtctgcatttgaattcatggatcatcactgtattgatctggctatgcaacatttggaaggagttcaaaatcctttacctgcatcaccgtacaaattttacgttctagttgaaacaacaggaagtgatgaatcatctgacaagacaaaactggaagcttttttgttgcgttcaatggaagatggtttagtagctgatggagttatcgcacaggatatcagccaagcatcaaacttttggaggatccgtgagggtatatcagaagcatccgtcaaagttggagctgtgtacaaatatgacttgtccataactgtagagaagctctatgatattgttgaagaaatgcgctgccgtcttggtgataatgcagaggtattgggctatggccaccttggagatgggaatctgcatttgaacattgtatcaagcaaatatgacgacaatattctcgcacaaattgaaccattcgtctatgagtggacatcagcacaaagaggaagcatcagcgcagagcatggtttggggctaatgaaagctgagaagattcactacagtaaatcacctgaagcagtgagtgtttccatactgccctgccaacacttggaagtatgttgtacataatgattaagaaaatgac

SEQ ID NO: 64815 - DNA, 1776 bp, Zea Mays
gtactcagtagtcagaaagacgcaagccggcaaagttcatctgcggctgcttactgttcccaagcagttggcattggcaatccgccagacgcaagcgtccccctccgctcctctcaaccggcacggcgccaggtccgcggcgaaatcggtggacggcatgccgcggcgcgaggcggcgaggcttctccgccgcctgggcccgatcgctgtccagtcgccgaagcgaggcttttcaggcatgcctcataatcaatatgaatccacaaaccacgctgtgaattcttatagaagattccactggattcccagtgtacagcaccctctgtgtggacctacaagtagtgggggaatatatgaaggtcaacgcagtgctaacaaggcttgtgaagttcagaagcgcacatttggttctgctgcaacacagtttcagaggaatccagcctattcagtgctgaactctgatgacattgcttacttcaagagcatcttgggagaaaatggtgtagttcaggatgaagacagagttgcagttgcaaatgtagattggatgggtaaatacagaggtgcaagtcagctagtacttttaccaaaaactactactgaggtatctaagattctttcatattgcaacaccaaacgattggctgtggttccacaaggtggcaacacaggtcttgtaggtggaagtgtgcctgttttcgatgaggtgattgttggccttgcaggcatgaataaaattatttcctttgataacgtaaatggaattcttacttgtgaagctggttgtgtgttggagaatttaagtaccttcgtggaaaatgaagggtttattatgccacttgacttgggagcgaaaggtagttgccacatcggtggaaacatttcaactaatgctggcggcctgcgttttatacgctatggttcacttcatggaaatgttcttggtcttgaagttgtcctggctgatgggactatccttgatatgcttactactttaaggaaagacaatactgggtatgatctgaagcacttatttataggaagtgaaggctcgctaggagtagtcaccaaaatatcagtacttacacctgcaaagctatcttcaaccaatgttgcatttctttcctgcaatgattacacaagctgccagaaattactactggcagctaggaggagcttgggctatgcaacatttggaaggagttcaaaatcctttacctgcatcaccgtacaaattttacgttctagttgaaacaacaggaagtgatgaatcatctgacaagacaaaactggaagcttttttgttgcgttcaatggaagatggtttagtagctgatggagttatcgcacaggatatcagccaagcatcaaacttttggaggatccgtgagggtatatcagaagcatccgtcaaagttggagctgtgtacaaatatgacttgtccataactgtagagaagctctatgatattgttgaagaaatgcgctgccgtcttggtgataatgcagaggtattgggctatggccaccttggagatgggaatctgcatttgaacattgtatcaagcaaatatgacgacaatattctcgcacaaattgaaccattcgtctatgagtggacatcagcacaaagaggaagcatcagcgcagagcatggtttggggctaatgaaagctgagaagattcactacagtaaatcacctgaagcagtgagtgtttccatactgccctgccaacacttggaagtatgttgtacataatgattaagaaaatgac

SEQ ID NO: 64816 - DNA, 2255 bp, Zea Mays
gtactcagtagtcagaaagacgcaagccggcaaagttcatctgcggctgcttactgttcccaagcagttggcattggcaatccgccagacgcaagcgtccccctccgctcctctcaaccggcacggcgccaggtccgcggcgaaatcggtggacggcatgccgcggcgcgaggcggcgaggcttctccgccgcctgggcccgatcgctgtccagtcgccgaagcgaggcttttcaggcatgcctcataatcaatatgaatccacaaaccacgctgtgaattcttatagaagattccactggattcccagtgtacagcaccctctgtgtggacctacaagtagtgggggaatatatgaaggtcaacgcagtgctaacaaggcttgtgaagttcagaagcgcacatttggttctgctgcaacacagtttcagaggaatccagcctattcagtgctgaactctgatgacattgcttacttcaagagcatcttgggagaaaatggtgtagttcaggatgaagacagagttgcagttgcaaatgtagattggatgggtaaatacagaggtgcaagtcagctagtacttttaccaaaaactactactgaggtatctaagattctttcatattgcaacaccaaacgattggctgtggttccacaaggtggcaacacaggtcttgtaggtggaagtgtgcctgttttcgatgaggtgattgttggccttgcaggcatgaataaaattatttcctttgataacgtaaatggaattcttacttgtgaagctggttgtgtgttggagaatttaagtaccttcgtggaaaatgaagggtttattatgccacttgacttgggagcgaaaggtagttgccacatcggtggaaacatttcaactaatgctggcggcctgcgttttatacgctatggttcacttcatggaaatgttcttggtcttgaagttgtcctggctgatgggactatccttgatatgcttactactttaaggaaagacaatactgggtatgatctgaagcacttatttataggaagtgaaggctcgctaggagtagtcaccaaaatatcagtacttacacctgcaaagctatcttcaaccaatgttgcatttctttcctgcaatgattacacaagctgccagaaattactactggcagctaggaggagcttgggtgagatcttgtctgcatttgaattcatggatcatcactgtattgatctggtacttgcataagaaattctgtttgaaataattttcacattctagagagaattaagacacaaaattgttacttgagttgattaggtgctctgagtagcgctcctcagatcatgagttcgactccctatggtaacaaatttcagactgagttaaaaaaatcccctcggctctctcatgatgtctaagttccggttgtggtcacggtcgcagtcattctcacaaggactatggtgccgctgtgtatgggtggaacaggggttcaggggttttctcgacttgtgtgagaagagcttcttaatacaatacctggtggatttgctcaataagcccttaaaacaaacttgactaaggggttccttatccaaagttaatggaatatttcttttttactgttagattggtttttgatagattgcttttgttttggaggctatgcaacatttggaaggagttcaaaatcctttacctgcatcaccgtacaaattttacgttctagttgaaacaacaggaagtgatgaatcatctgacaagacaaaactggaagcttttttgttgcgttcaatggaagatggtttagtagctgatggagttatcgcacaggatatcagccaagcatcaaacttttggaggatccgtgagggtatatcagaagcatccgtcaaagttggagctgtgtacaaatatgacttgtccataactgtagagaagctctatgatattgttgaagaaatgcgctgccgtcttggtgataatgcagaggtattgggctatggccaccttggagatgggaatctgcatttgaacattgtatcaagcaaatatgacgacaatattctcgcacaaattgaaccattcgtctatgagtggacatcagcacaaagaggaagcatcagcgcagagcatggtttggggctaatgaaagctgagaagattcactacagtaaatcacctgaagcagtgagtgtttccatactgccctgccaacacttggaagtatgttgtacataatgattaagaaaatgac

SEQ ID NO: 64817 - DNA, 1272 bp, Zea Mays
ctgaacatcatgtagctgcaattccatttcctgaaagtcatgtacggcttcacaatgtatctaagattctttcatattgcaacaccaaacgattggctgtggttccacaaggtggcaacacaggtcttgtaggtggaagtgtgcctgttttcgatgaggtgattgttggccttgcaggcatgaataaaattatttcctttgataacgtttattatgccacttgacttgggagcgaaaggtagttgccacatcggtggaaacatttcaactaatgctggcggcctgcgttttatacgctatggttcacttcatggaaatgttcttggtcttgaagttgtcctggctgatgggactatccttgatatgcttactactttaaggaaagacaatactgggtatgatctgaagcacttatttataggaagtgaaggctcgctaggagtagtcaccaaaatatcagtacttacacctgcaaagctatcttcaaccaatgttgcatttctttcctgcaatgattacacaagctgccagaaattactactggcagctaggaggagcttgggtgagatcttgtctgcatttgaattcatggatcatcactgtattgatctggctatgcaacatttggaaggagttcaaaatcctttacctgcatcaccgtacaaattttacgttctagttgaaacaacaggaagtgatgaatcatctgacaagacaaaactggaagcttttttgttgcgttcaatggaagatggtttagtagctgatggagttatcgcacaggatatcagccaagcatcaaacttttggaggatccgtgagggtatatcagaagcatccgtcaaagttggagctgtgtacaaatatgacttgtccataactgtagagaagctctatgatattgttgaagaaatgcgctgccgtcttggtaattgtcagattggatctgtcgataatctacagcttaattaactcaatatgttggttctctaggtgataatgcagaggtattgggctatggccaccttggagatgggaatctgcatttgaacattgtatcaagcaaatatgacgacaatattctcgcacaaattgaaccattcgtctatgagtggacatcagcacaaagaggaagcatcagcgcagagcatggtttggggctaatgaaagctgagaagattcactacagtaaatcacctgaagcagtgagtgtttccatactgccctgccaacacttggaagtatgttgtacataatgattaagaaaatgac

SEQ ID NO: 64818 - DNA, 1262 bp, Zea Mays
tgcaattccatttcctgaaagtcatgtacggcttcacaatgtatctaagattctttcatattgcaacaccaaacgattggctgtggttccacaaggtggcaacacaggtcttgtaggtggaagtgtgcctgttttcgatgaggtgattgttggccttgcaggcatgaataaaattatttcctttgataacgtaaatggaattcttacttgtgaagctggttgtgtgttggagaatttaagtaccttcgtggaaaatgaagggtttattatgccacttgacttgggagcgaaaggtagttgccacatcggtggaaacatttcaactaatgctggcggcctgcgttttatacgctatggttcacttcatggaaatgttcttggtcttgaagttgtcctggctgatgggactatccttgatatgcttactactttaaggaaagacaatactgggtatgatctgaagcacttatttataggaagtgaaggctcgctaggagtagtcaccaaaatatcagtacttacacctgcaaagctatcttcaaccaatgttgcatttctttcctgcaatgattacacaagctgccagaaattactactggcagctaggaggagcttgggtgagatcttgtctgcatttgaattcatggatcatcactgtattgatctggctatgcaacatttggaaggagttcaaaatcctttacctgcatcaccgtacaaattttacgttctagttgaaacaacaggaagtgatgaatcatctgacaagacaaaactggaagcttttttgttgcgttcaatggaagatggtttagtagctgatggagttatcgcacaggatatcagccaagcatcaaacttttggaggatccgtgagggtatatcagaagcatccgtcaaagttggagctgtgtacaaatatgacttgtccataactgtagagaagctctatgatattgttgaagaaatgcgctgccgtcttggtgataatgcagaggtattgggctatggccaccttggagatgggaatctgcatttgaacattgtatcaagcaaatatgacgacaatattctcgcacaaattgaaccattcgtctatgagtggacatcagcacaaagaggaagcatcagcgcagagcatggtttggggctaatgaaagctgagaagattcactacagtaaatcacctgaagcagtgagtgtttccatactgccctgccaacacttggaagtatgttgtacataatgattaagaaaatgac

SEQ ID NO: 64819 - DNA, 1825 bp, Zea Mays
aacaaatggtcatctggctaatttaaagcgggcttaattttgctaatgtatattatttgtgcaatagaaattttttcttcctcagttttcttgttaatctaaccaattcacatttgttacttttcacatcaatttcattccttttagtttttattatattatatattaatattgaaaccttgtcccttgtctcattttatttgtttgtcctttgcttatattctatcaagtccatggcttaccataccatctttccaaactataggttattcaaactgatatttgatgagttcacagtacgcattattccaagagatgctcctctactagaatctgttggaccacaaaagtgtcttgctttcagcacagatggtgcaaaatttgcaattggtggagaggatggacatctcagaatattccattggccaagcataaaagtgcttttggatgagcccaaagctcataaatccttccgagacatggatatcagactcagagttcttagtttcaacatccattgatggatctgcgagaatatggaagatagatgagggcgcaccactggtcaatttgactcgatcctcggatgagaagatcgagtgctgccgcttttctagggatggcatgaaaccgttcctgttttgcactgttgcaaaaggtcccaaagttgttacagttgtctggaacataagcgattgggagagaattgggtacaaaagacttctggggaagcctatctccacactctcagttagcttggatgggaagtatctggcattaggaagccacgatggtgacttctgtgctgttgatgtgaagaaaatggaagtttcccactggagcaagaaggtccatcttggctccccagtcacctccattgaattttgtcctagtgaaagggttgtaatctccacatcacatcagtggggagcagagctcacgaaactgaacgtgcctgccgactggaaagaatggcaggtctggctcgtactcctggcgctcttcctagcctccgccgtcctgttctacgtgttcttcgagcgatcagacacgttctggaactttcccatggggcggcaccagccggcgaagccatggaacgtgctcaaggagtctcctccggtccccgaggaccagactccatggtgatggtattgcttccatcgcgtcatctgtgaagagaagagcgatactgtcccagacccaacaaagccaccgcgtgctgtttatcttgttacaattataaatcgtccatgcttgttctaccactctcagccagtgaccacgcaagtttgtaaccctggactgccataaaccaggtgatagtaattgaacattctgtcttcgtgcgagtgtctgagtgtgtatccaggtattaccatgccgaccactgtcctgcttcctgatgacgaggtggctgatttcctcgtctttatttatacgttttgggatcaagagaaataaaggagctaaaacctctttgctattcaattttgaatagcaagatgattttgtcccctagctcccaaagaagcccggtttggaaacactaatcgagattggagggcatggaattgaattgagttcaataccaaatcagccatggtatttaaatgcgatgtaattccaattctattgtttggatgtcacttaattagagtttggaatagtttgttacaattccaaacaatacagaggagtaatgtgagtttctagttatagcccaattccatggaattggacctctgatttcaaatctcaattccatgtgcaaccaaacaatagaattctggaaagttgattctaattcctaatttcgtgctcc

SEQ ID NO: 64820 - DNA, 1532 bp, Zea Mays
ccttgtcccttgtctcattttatttgtttgtcctttgcttatattctatcaagtccatggcttaccataccatctttccaaactataggttattcaaactgatatttgatgagttcacagtacgcattattccaagagatgctcctctactagaatctgttggaccacaaaagtgtcttgctttcagcacagatggtgcaaaatttgcaattggtggagaggatggacatctcagaatattccattggccaagcataaaagtgcttttggatgagcccaaagctcataaatccttccgagacatggatatcagcttagactcagagttcttagtttcaacatccattgatggatctgcgagaatatggaagatagatgagggcgcaccactggtcaatttgactcgatcctcggatgagaagatcgagtgctgccgcttttctagggatggcatgaaaccgttcctgttttgcactgttgcaaaagaggaagccacgatggtgacttctgtgctgttgatgtgaagaaaatggaagtttcccactggagcaagaaggtccatcttggctccccagtcacctccattgaattttgtcctagtgaaagggttgtaatctccacatcacatcagtggggagcagagctcacgaaactgaacgtgcctgccgactggaaagaatggcaggtctggctcgtactcctggcgctcttcctagcctccgccgtcctgttctacgtgttcttcgagcgatcagacacgttctggaactttcccatggggcggcaccagccggcgaagccatggaacgtgctcaaggagtctcctccggtccccgaggaccagactccatggtgatggtattgcttccatcgcgtcatctgtgaagagaagagcgatactgtcccagacccaacaaagccaccgcgtgctgtttatcttgttacaattataaatcgtccatgcttgttctaccactctcagccagtgaccacgcaagtttgtaaccctggactgccataaaccaggtgatagtaattgaacattctgtcttcgtgcgagtgtctgagtgtgtatccaggtattaccatgccgaccactgtcctgcttcctgatgacgaggtggctgatttcctcgtctttatttatacgttttgggatcaagagaaataaaggagctaaaacctctttgctattcaattttgaatagcaagatgattttgtcccctagctcccaaagaagcccggtttggaaacactaatcgagattggagggcatggaattgaattgagttcaataccaaatcagccatggtatttaaatgcgatgtaattccaattctattgtttggatgtcacttaattagagtttggaatagtttgttacaattccaaacaatacagaggagtaatgtgagtttctagttatagcccaattccatggaattggacctctgatttcaaatctcaattccatgtgcaaccaaacaatagaattctggaaagttgattctaattcctaatttcgtgctcc

SEQ ID NO: 64821 - DNA, 1469 bp, Zea Mays
agaaattggatcatgtttggacttgtctgcactgcagacaccttgcagtgtggctgaaattgaagcttctgattgccgccggtgtggagcgagcgacgcagacaccgacaattctaggatggaaggaaattcagaggccacgagcaccaaatccgctcgaagcgagccggaaatatcaaaatttccggaatccgccgccgccgccgccaggctgaccaatggacctctccgtcgtgccatccctctccctctccccgcgccgtgcccttccactcccggccaggagggctgcgcggcgtccggccttcgtctgccgctgcagttgctccctggacgcgtccccggtggccacccggcggttgttcgcctccctcctcgccaccgcagcagcggtgggggttggcgtggccggaggcggaggggaagccggcgcggtgtccacgagcaggagggcgctcagggcgtccaagattcctgagagcgaattcaccaccctgcccaatggcctcaagtactacgacatcaaggtaggaagtggggctgaagctgttaaaggatcccgtgttgcgtgtaggtacattatgtggccaagtggaagggcatcacattcatgacaagtaggcagggtcttggtgttggtggtggaacgccatatgggtttgacgtaggcaattctgagagaggcaatgttttaaaaggattggatcttggggttgagggaatgaaagtcggaggccagaggttgataatagttcctcctgaactggcgtatggaaagaagggtgtccaggaaattcctccaaacgcaactattgagctggatgtcgagcttctatcaatcaaacagagtccattcgggactcctgtgaagatcgttgaaggatagctttgcatagagttctgaaagaaatggtacatatctgcatggacagtagagtactagagtgttgctattgaaaaaggctagtttactaaaatatgctggttgtattctcttgatagtacactcttgtaagatttcgacttcactgaaacatagattttttttttcaccgcttatattcaacagttatctacgtgtctaaatcttaatttatggcttctgctatgtttgaacttcaatctactcttaacttatttgagagtaaaagatttttgttattgatgttatatttaataatgtatccttaccaatttcttcattacatgtattgcttagaagaatccttgtagtaaacatttagttgcaaagaaaaaaaaacataaatggttgcctaccatgaatccatgatagttatatgaataaagataaattggtgtttgggattccatgtgcagttagttattctagttaaaagaagtgaatgtatacttcctctgtctctaaaaaaatacgacgatcctcacttctcgagtagtcaaacaattttaagtttaatcaaatgtatataaaacctactaacatttat

SEQ ID NO: 64822 - DNA, 2324 bp, Zea Mays
tggatcatgtttggacttgtctgcactgcagacaccttgcagtgtggctgaaattgaagcttctgattgccgccggtgtggagcgagcgacgcagacaccgacaattctaggatggaaggaaattcagaggccacgagcaccaaatccgctcgaagcgagccggaaatatcaaaatttccggaatccgccgccgccgccgccaggctgaccaatggacctctccgtcgtgccatccctctccctctccccgcgccgtgcccttccactcccggccaggagggctgcgcggcgtccggccttcgtctgccgctgcagttgctccctggacgcgtccccggtggccacccggcggttgttcgcctccctcctcgccaccgcagcagcggtgggggttggcgtggccggaggcggaggggaagccggcgcggtgtccacgagcaggagggcgctcagggcgtccaagattcctgagagcgaattcaccaccctgcccaatggcctcaagtactacgacatcaaggtaggaagtggggctgaagctgttaaaggatcccgtgttgcggtaagtgccaccacaatttgtgtatctgggatctagcacgatgtagccataatagatgaatcatttgcatttgcatttgtactgcagtatgcaaaccatacatgttattgtgtctccctcaaaaatataaacgccactgaatgcagtgatccattgaatagataaaagatgatcatgaggtctcttgagtcttgagactgggaagtgggaagtctgaattatgttcatttgtttaccgacttgaagactgaaataatctcttattgttttctaatgtgctcttgttttttaaaatcttgtaaataaaataatgacttgcttgaaataagttagcatgctataactgattggccgcttaaatgtgtcctaaaactaagaggaccctgtttgaactttgattttatcatataccagtgttgtacaaaaaaaacattttttaactacttacgaacgatctgtatgaatgtttaccagctgcattgttattacagacaacagagctgcatttatcttgaataatgattgatgcttaagtcagtgtaggtacattatgtggccaagtggaagggcatcacattcatgacaagtaggcagggtcttggtgttggtggtggaacggtaatgctataacatattctgcctctttctccatataattgctacatgttgttctcacattggaatgcacttttaacttgtaccagtcagtggtggtactaagctaaattttctgacatcttatgaaattataatgctggagaagctccttgggtgaatctttatttgcataagtaaaattttcttgacagtttccatattgcaaatcctggttaattttttgattttggtatttatggagtgattatacattatatgcttgataatttcagatgtagttctttagtatttgctgcttttacaagtcttaagattatgtgcagccatatgggtttgacgtaggcaattctgagagaggcaatgttttaaaaggattggatcttggggttgagggaatgaaagtcggaggccagaggttgataatagttcctcctgaactggcgtatggaaagaagggtgtccaggaaattcctccaaacgcaactattgagctggatgtcgagcttctatcaatcaaacagagtccattcgggactcctgtgaagatcgttgaaggatagctttgcatagagttctgaaagaaatggtacatatctgcatggacagtagagtactagagtgttgctattgaaaaaggctagtttactaaaatatgctggttgtattctcttgatagtacactcttgtaagatttcgacttcactgaaacatagattttttttttcaccgcttatattcaacagttatctacgtgtctaaatcttaatttatggcttctgctatgtttgaacttcaatctactcttaacttatttgagagtaaaagatttttgttattgatgttatatttaataatgtatccttaccaatttcttcattacatgtattgcttagaagaatccttgtagtaaacatttagttgcaaagaaaaaaaaacataaatggttgcctaccatgaatccatgatagttatatgaataaagataaattggtgtttgggattccatgtgcagttagttattctagttaaaagaagtgaatgtatacttcctctgtctctaaaaaaatacgacgatcctcacttctcgagtagtcaaacaattttaagtttaatcaaatgtatataaaacctactaacatttat

SEQ ID NO: 64823 - DNA, 741 bp, Zea Mays
attctaggatggaaggaaattcagaggccacgagcaccaaatccgctcgaagcgagccggaaatatcaaaatttccggaatccgccgccgccgccgccaggctgaccaatggacctctccgtcgtgccatccctctccctctccccgcgccgtgcccttccactcccggccaggagggctgcgcggcgtccggccttcgtctgccgctgcagttgctccctggacgcgtccccggtggccacccggcggttgttcgcctccctcctcgccaccgcagcagcggtgggggttggcgtggccggaggcggaggggaagccggcgcggtgtccacgagcaggagggcgctcagggcgtccaagattcctgagagcgaattcaccaccctgcccaatggcctcaagtactacgacatcaaggtaggaagtggggctgaagctgttaaaggatcccgtgttgcggtacattatgtggccaagtggaagggcatcacattcatgacaagtaggcagggtcttggtgttggtggtggaacgccatatgggtttgacgtaggcaattctgagagaggcaatgttttaaaaggattggatcttggggttgagggaatgaaagtcggaggccagaggttgataatagttcctcctgaactggcgtatggaaagaagggtgtccaggaaattcctccaaacgcaactattgagttttggttttctccatctatttttttattgttcccattt

SEQ ID NO: 64824 - DNA, 2799 bp, Zea Mays
ctggctccacgtgtcagctcccgctcgtcgccgatggacaccgcgtcaccggctcaccgcctgccgtgaccgagaggccacgtcgtctcgtccgtctactgtctggggcagccgggcatgcacgcagaattgcaggtgcagtaaaggaagcaggagcaggacgagccccgagatctcgcctcaggattgatgcatcattggcgactgcactgcacttcttcgccatcgatcctgtgggtcccctgattctccactccactatggcgccactaatccactccactccatctaatcaatttccagtgtatcgccaaaacacgcatgctttccttcctcgccatgccaagcatcgcccgcccgccctcgcacaagagagcatgccatggcccatggcctccgcggcgcgccatgccatcctcatatatacgacgaacatgtgctaagcttgccgccgcgtgcgaccgcgcctctccctccgctcaagcaagcaagcaagctagctagctaccttccttttccttgtgatggatcggaggcatcgtccttagcttgccttcacagccagccagccaaaccagctagctagctagccatgcccgccagtgccgccaccaccacaaccacctcctccgcggctccctctccctcgttgttgccgtgcttgcatgtccatgcacacggcagggcctcggctgcggcggcctgctgcctactcgtgctcgtgactttcctggtggtggccgcctgctggtgggaccccaggacgcgagaagcttccagctggttcctgtcgccgccgcggtctgccccctcttccttctcgtccttgacgagtgccggtggagttggcggtggtggcgagcacctattggccaccgccagctcgtactactccgccgccgccggcttcaggaacagcactggcaaagaggtgcaccaggaggtccggggtcatggtggtgatgatcgtggcttcctctccttcgtcaactccagcttcggctatgacgaagcgccgccgccatccgcaccggctccggcgtctccagtgacgaacagcaggaactctgtttaaaaatgcccgttgagtcacgactgcacttgcaactgccaaattcactggtggtttacacacgtggaattcatgggaggctcagatgaggtgataatccagtccacgccgccacaggttgagaggagaagagacgacgtgaaactggagcgactagagcttggcctcgcgagagctcggtccgcgataatggaagccatcaggaagaaggacaaggtatctccgttgcctgacaaggactacgtgccgatgggaccggtgtacaggaacgcccacgtgttccacaggagctacctggagatggagaggcagctgaaggtgtacgtgtacgaggaaggcgagccgccggtgttccacgacgggccgtgccgcagcatatactcgacggagggcaggttcatccactccatggagacggagacggaggcggaggagggccggcggctgcggacccgggacccggcccgcgcccacgtcttcttcctcccgttcagcgtcgtcaagatggtgcagacgatctacgagcccggatcgcgcgacatggccccgctcaagcgcaccgtcgccgactacgtccgcgtgctctcctccaagtacccctactggaaccgcagcctcggcgcggaccacttcatgctctcctgccatgactggggcccgtacgtgtcgtcggcgaacgcgcagctgttcggcaactccatccgcgtgctgtgcaacgccaacacgtcggaggggttcgacccggccagggacgtgtcgctgccgcaggtcaacctgcggagcgacgcggtggagcggcaggtgggcgggccgtcggcgtcgcggcgcccggtcctggccttcttcgcgggcggcaaccacgggccggtccggccggcgctgctggcgcactggggccccggcgggcggcggggaggcgacccggacgtgcgggtcagcgagtacctgccccgcggcggcggcgcgccgtcgtacgcggacatgatgcggcgcagccgcttctgcctctgccccggcggctacgaggtggcgtccccgcgcctggcggaggccctgtacctgggctgcgtccccgtcgtggtggacgacggcgagtacgcgctgcccttcgccgacgtgctcgactgggacgccttcgcgctgcgcctgcgcgtcgccgacattccccgcctcaaggagatcctggcggccgtgtcgccgcggcagtacatccggatgcagcgccgggtgaggatggtgcgccgccacttcatgctgcacggcgggccgccccgccggtacgacgcgttccacatgatcctccactccgtctggctcaggaggctcaacgttaggatcgcagcagctgaatgatgcacatgactgactgactcactgaccaatgtaacgatggatcttgcttacagtttgcaggcgtcatgcgtgtctgatctttgagtctagcgtgcgttggttgcattttgacacgaaggttggaggaatcttggtgtgcaagtggtttttgtaccctgtattatacactactaattaatacacgctgtacgatcagaggaagtgcgtatggtggtttttgtaccctgtattatacactactaatccgttttgtatttttctagtctcttactctcatcatcaccattatccggaggaggggaatggtgatgcacgagacgacaggaggctcaccaccgtcgtcataataaaaaatagctttacgttgaccgttc

SEQ ID NO: 64825 - DNA, 2468 bp, Zea Mays
ccgagatctcgcctcaggattgatgcatcattggcgactgcactgcacttcttcgccatcgatcctgtgggtcccctgattctccactccactatggcgccactaatccactccactccatctaatcaatttccagtgtatcgccaaaacacgcatgctttccttcctcgccatgccaagcatcgcccgcccgccctcgcacaagagagcatgccatggcccatggcctccgcggcgcgccatgccatcctcatatatacgacgaacatgtgctaagcttgccgccgcgtgcgaccgcgcctctccctccgctcaagcaagcaagcaagctagctagctaccttccttttccttgtgatggatcggaggcatcgtccttagcttgccttcacagccagccagccaaaccagctagctagctagccatgcccgccagtgccgccaccaccacaaccacctcctccgcggctccctctccctcgttgttgccgtgcttgcatgtccatgcacacggcagggcctcggctgcggcggcctgctgcctactcgtgctcgtgactttcctggtggtggccgcctgctggtgggaccccaggacgcgagaagcttccagctggttcctgtcgccgccgcggtctgccccctcttccttctcgtccttgacgagtgccggtggagttggcggtggtggcgagcacctattggccaccgccagctcgtactactccgccgccgccggcttcaggaacagcactggcaaagaggtgcaccaggaggtccggggtcatggtggtgatgatcgtggcttcctctccttcgtcaactccagcttcggctatgacgaagcgccgccgccatccgcaccggctccggcgtctccagtgacgggaggctcagatgaggtgataatccagtccacgccgccacaggttgagaggagaagagacgacgtgaaactggagcgactagagcttggcctcgcgagagctcggtccgcgataatggaagccatcaggaagaaggacaaggagctacctggagatggagaggcagctgaaggtgtacgtgtacgaggaaggcgagccgccggtgttccacgacgggccgtgccgcagcatatactcgacggagggcaggttcatccactccatggagacggagacggaggcggaggagggccggcggctgcggacccgggacccggcccgcgcccacgtcttcttcctcccgttcagcgtcgtcaagatggtgcagacgatctacgagcccggatcgcgcgacatggccccgctcaagcgcaccgtcgccgactacgtccgcgtgctctcctccaagtacccctactggaaccgcagcctcggcgcggaccacttcatgctctcctgccatgactggggcccgtacgtgtcgtcggcgaacgcgcagctgttcggcaactccatccgcgtgctgtgcaacgccaacacgtcggaggggttcgacccggccagggacgtgtcgctgccgcaggtcaacctgcggagcgacgcggtggagcggcaggtgggcgggccgtcggcgtcgcggcgcccggtcctggccttcttcgcgggcggcaaccacgggccggtccggccggcgctgctggcgcactggggccccggcgggcggcggggaggcgacccggacgtgcgggtcagcgagtacctgccccgcggcggcggcgcgccgtcgtacgcggacatgatgcggcgcagccgcttctgcctctgccccggcggctacgaggtggcgtccccgcgcctggcggaggccctgtacctgggctgcgtccccgtcgtggtggacgacggcgagtacgcgctgcccttcgccgacgtgctcgactgggacgccttcgcgctgcgcctgcgcgtcgccgacattccccgcctcaaggagatcctggcggccgtgtcgccgcggcagtacatccggatgcagcgccgggtgaggatggtgcgccgccacttcatgctgcacggcgggccgccccgccggtacgacgcgttccacatgatcctccactccgtctggctcaggaggctcaacgttaggatcgcagcagctgaatgatgcacatgactgactgactcactgaccaatgtaacgatggatcttgcttacagtttgcaggcgtcatgcgtgtctgatctttgagtctagcgtgcgttggttgcattttgacacgaaggttggaggaatcttggtgtgcaagtggtttttgtaccctgtattatacactactaattaatacacgctgtacgatcagaggaagtgcgtatggtggtttttgtaccctgtattatacactactaatccgttttgtatttttctagtctcttactctcatcatcaccattatccggaggaggggaatggtgatgcacgagacgacaggaggctcaccaccgtcgtcataataaaaaatagctttacgttgaccgttc

SEQ ID NO: 64826 - DNA, 1623 bp, Zea Mays
ccactacacaccaccacgttggaaatatagcaaacaactagagacgttagattaaaaggagttgtgatgatttagtcgtgcttaacgttcggcaacgtcagctcgcacttcggctgattgcaaattctgataggcacgacaccgaccgactgacgcactgcacactcatcacgctagccgccgtctcgtcaccactaaccacgatctctatctctctctgccaggtgggtcccagagacgccggcgccgccgctatacaaaattacaggcacgacgacatccatcgcagtcacccacgagcccaacaaaccactcccacccggtggctcgtcctcggacgccaagccactccgcgccccaatccggaagcgccgccgccgccgatcgaccggccgtcgacccatgctccgctcggcgctcttccgctcagcccccgggctccgccggtctccggcgacggcccacttatccaccgccgccgccgccgccgcagcgtggctctccaacggccctgcctccgccccgtctagggtgcgcctcctcatcggcggggagttcgtcgagtcgcgcgccgacgagcacgtcgacgtcaccaaccccgaggtggtgtcccggatcccgctcaccacggccgatgagttcaaagctgccgtcgatgccgccaggacggccttccccggctggcggaacacgcccgtcacgacgcggcagcgcgtcatgttcaagttccaggagctcatccgggctaacatggacaagcttgcagagaacatcactacggagcaggggaagacgctaaaagatgcttggggcgacgtgttccgcggcctagaggtggtggagcatgcttgtggaatgggaacactgcaaatgggcgaatatgtatcaaatgtttctaatgggattgacaccttcagcattcgggagccacttggtgtttgcgctgggatatgcccatttaattttcctgctatgattcccctatggatgtttcccatagcagttacgtgtggcaatacttttgttcttaagccatcggaaaaggacccaggggctgctatgatgcttgcggagctagcaatggaagctggtttgcctaagggtgttttgaacatcgttcatggcaccaatgatgttgtcaataatatttgtgacgatgaggatattaaggctgtatcttttgttggttccaatacagctggtatgcatatttattctagagcatctgctgcaggcaagcgtgttcagtgcaatatgggagcaaagaatcatgcaattatccttcccgatgctgatagagatgctacattgaatgcccttattgctgctggatttggtgcagcagggcaaaggtgcatggcattgagcactgctgtttttgttggcggttcagaatcatgggaggatgaattagtcaaacgtgcaagtggccttgttgttagttcaggaatggttaatgatgcagaccttggtccagtgatcagccgacaggcaaaggatcgtatctgtaaattagttcaaagtggtgttgacctgtgtgctcgtatattgcttgatggaagaaagatagtggtgccttatccagttgtttattagcctgcctgcagatatactacatcatgt

SEQ ID NO: 64827 - DNA, 2216 bp, Zea Mays
ccactacacaccaccacgttggaaatatagcaaacaactagagacgttagattaaaaggagttgtgatgatttagtcgtgcttaacgttcggcaacgtcagctcgcacttcggctgattgcaaattctgataggcacgacaccgaccgactgacgcactgcacactcatcacgctagccgccgtctcgtcaccactaaccacgatctctatctctctctgccaggtgggtcccagagacgccggcgccgccgctatacaaaattacaggcacgacgacatccatcgcagtcacccacgagcccaacaaaccactcccacccggtggctcgtcctcggacgccaagccactccgcgccccaatccggaagcgccgccgccgccgatcgaccggccgtcgacccatgctccgctcggcgctcttccgctcagcccccgggctccgccggtctccggcgacggcccacttatccaccgccgccgccgccgccgcagcgtggctctccaacggccctgcctccgccccgtctagggtgcgcctcctcatcggcggggagttcgtcgagtcgcgcgccgacgagcacgtcgacgtcaccaaccccgcgacgcaggaggtggtgtcccggatcccgctcaccacggccgatgagttcaaagctgccgtcgatgccgccaggacggccttccccggctggcggaacacgcccgtcacgacgcggcagcgcgtcatgttcaagttccaggagctcatccgggctaacatggacaagcttgcagagaacatcactacggagcaggggaagacgctaaaagatgcttggggcgacgtgttccgcggcctagaggtggtggagcatgcttgtggaatgggaacactgcaaatgggcgaatatgtatcaaatgtttctaatgggattgacaccttcagcattcgggagccacttggtgtttgcgctgggatatgcccatttaattttcctgctatgattcccctatggatgtttcccatagcagttacgtgtggcaatacttttgttcttaagccatcggaaaaggacccaggggctgctatgatgcttgcggagctagcaatggaagctggtttgcctaagggtgttttgaacatcgttcatggcaccaatgatgttgtcaataatatttgtgacgatgaggatattaaggctgtatcttttgttggttccaatacagctggtatgcatatttattctagagcatctgctgcaggcaagcgtgttcagtgcaatatgggagcaaagaatcatgcaattatccttcccgatgctgatagagatgctacattgaatgcccttattgctgctggatttggtgcagcagggcaaaggtgcatggcattgagcactgctgtttttgttggcggttcagaatcatgggaggatgaattagtcaaacgtgcaagtggccttgttgttagttcaggaatggttaatgatgcagaccttggtccagtgatcagccgacaggaggaaatatttggtccagtgcttctcttaatgaaggcggagagcctagaagatgccatccaaatcataaacagaaacaagtatggcaatggtgcttccatatttacaacatctggcgtctctgccaggaaatttcaaacagacattgaagctggccaggtgggcatcaacgtgccgattccagtccccctgccgttcttctccttcacgggcagcaaagcttcattcgcaggagatttgaatttctacggcaaggctggcgtgcagttcttcacccagatcaagacgatcacgcagcagtggaaggagtcgccggtgcagcgggtctcgctctccatgcccacctcgcagaagtgagacgtcaaaggacgctcacgccactctccaaagctccactcctctggacatagacccacgcatggccacaagagaaggataattggtaggcatggcgacactccatgcacggccatgatactagtgtgtgctcgctttgctcttttgtctggacatcttgcatgcgcattcagaacatccaatgacgaaggtttagatatatgtgagcgctgcccattatgctgttaggattactgtaaaagccccaggtcctttgatcgagtgtcatgtgtaaacccacaataagaggagaaataaaaatgtcgccgtgctggtttgtggcatctctcacacccatttccgttcatctctttggcttc

SEQ ID NO: 64828 - DNA, 596 bp, Zea Mays
atttggcccaccaatcatccaaaggggctgctatgatgcttgcggagctagcaatggaagctggtttgcctaagggtgttttgaacatcgttcatggcaccaatgatgttgtcaataatatttgtgacgatgaggatattaaggctgtatcttttgttggttccaatacagctggtatgcatatttattctagagcatctgctgcaggcaagcgtgttcagtgcaatatgggagcaaagaatcatgcaattatccttcccgatgctgatagagatgctacattgaatgcccttattgctgctggatttggtgcagcagggcaaaggtgcatggcattgagcactgctgtttttgttggcggttcagaatcatgggaggatgaattagtcaaacgtgcaagtggccttgttgttagttcaggaatggttaatgatgcagaccttggtccagtgatcagccgacaggcaaaggatcgtatctgtaaattagttcaaagtggtgttgacctgtgtgctcgtatattgcttgatggaagaaagatagtggtgccttatccagttgtttattagcctgcctgcagatatactacatcatgt

SEQ ID NO: 64829 - DNA, 1274 bp, Zea Mays
cctcgcgcgcttacgttgtcggcggagcatgaccaagtgtccgtgataagccccggatgagcccccgatggccaaggtctcgcctcctcctcgggatcatcatgtcgtcgttggtccctcgagagcggcaaattaataacgggagcagcgcggaccagggacgacgggcctcctgctccgtcgtcgtcgtccccgcgggtgccggcgacgacgccgccgtggccggaccagttccacgcggtggtggtgacgaacctgagcgcgcgcggcggcgggctgcagctgatcgacctgtactacgactggccgcgagggcgcgacctgaacatcgtccgcgaccagctgtccggcgagcggcgctggagctggaacgtggagtggagcaacggcaccgccttcctgttcgactccgcgtcctgccgcaccttccagttcgccgtgggcctcctgccgcccgactggaaggcccgcggcgccgcctacctggggcgcgaccgcgtcgacggcttcgactgccacgtctggtccaacttcgtcttcgcccgctactacgaggacgtcgccaccggacgccccgtcagctggaacttcaatgggctgcagcggcatgtgctgagcttcgaggcgggggcagtgctgcaggactcctccaagtggcaggcgccggcttactgcttcaccaacaccaatggcagcagtgccgacgccgccgcttcgtcttcctgagatcacgtcgctgggcctccggagtccgggctccacctgcagctggacgctgcatgtcatttggcagtcggctctcatcttgatggttgactcaggagagccttttactattagtcagtaccgattctcgcgtcgcgtgggctagaatccgtgcgatgccacggaacataaattgacgagccttcaatagcgcgacggacgacgtgagtataatggtgggattgtttagtggtgctattaagaatcaactcaataatcataatacatattgaatcctgtcatttttattgaaagagatccaagaaattccaacacacgtttaagcatcgtctcggatgtttatctttcaaacgtctgacaagaaaaaatgatgttctgttaacaattaatcaaggcatgagaatttgtgaagcaccaaaaagattaagtttggcaacaatacacacacataattacaccatcgtatcaagaaaaaacaaaccagatgcatcagtaatccctattaacaaaaactacatctggatgacgatatggacatttcacaagat

SEQ ID NO: 64830 - DNA, 1354 bp, Zea Mays
gataagccccggatgagcccccgatggccaaggtctcgcctcctcctcgggatcatcatgtcgtcgttggtccctcgagagcggcaaattaataagtaaatgagcaactttttctcgcgtgtggtccagactcccgtcttcttcctcgaccgctaaccttaccggtccccaaatgtcgcctctcgtgctgctgctcctcgcgcacctactcgccacggccactgcagcgggagcagcgcggaccagggacgacgggcctcctgctccgtcgtcgtcgtccccgcgggtgccggcgacgacgccgccgtggccggaccagttccacgcggtggtggtgacgaacctgagcgcgcgcggcggcgggctgcagctgatcgacctgtactacgactggccgcgagggcgcgacctgaacatcgtccgcgaccagctgtccggcgagcggcgctggagctggaacgtggagtggagcaacggcaccgccttcctgttcgactccgcgtcctgccgcaccttccagttcgccgtgggcctcctgccgcccgactggaaggcccgcggcgccgcctacctggggcgcgaccgcgtcgacggcttcgactgccacgtctggtccaacttcgtcttcgcccgctactacgaggacgtcgccaccggacgccccgtcagctggaacttcaatgcggcatgtgctgagcttcgaggcgggggcagtgctgcaggactcctccaagtggcaggcgccggcttactgcttcaccaacaccaatggcagcagtgccgacgccgccgcttcgtcttcctgagatcacgtcgctgggcctccggagtccgggctccacctgcagctggacgctgcatgtcatttggcagtcggctctcatcttgatggttgactcaggagagccttttactattagtcagtaccgattctcgcgtcgcgtgggctagaatccgtgcgatgccacggaacataaattgacgagccttcaatagcgcgacggacgacgtgagtataatggtgggattgtttagtggtgctattaagaatcaactcaataatcataatacatattgaatcctgtcatttttattgaaagagatccaagaaattccaacacacgtttaagcatcgtctcggatgtttatctttcaaacgtctgacaagaaaaaatgatgttctgttaacaattaatcaaggcatgagaatttgtgaagcaccaaaaagattaagtttggcaacaatacacacacataattacaccatcgtatcaagaaaaaacaaaccagatgcatcagtaatccctattaacaaaaactacatctggatgacgatatggacatttcacaagat

SEQ ID NO: 64831 - DNA, 457 bp, Zea Mays
atggccgtctggccggcagggagggtggcggcgaggctctcttcttcgcgttggtggcgcgctccgcagcaggccggcaagacatccctcgtgcggctgcgtagagttgtctggatggctactgcggctgtggcggcgccggctggtgcccgcgcaagtgcaggggacggcggctggggtcgctggcccgtggcccaggcggtcggctccggtgctcgggggctagatctggaccctgtcgaccggatctgcctcaacagctggcagttgagccttgggcagtttacaccatttttgactaccgaaagtgatctaagaccttggcttcttctccttgaagagtgcaagcagcgacacaccagaaaccttaacaaccttgaacctgacaccaggaatgtctcccacagcatgacccttacgagttacgaccaaatccagcaatcaacacctcatcatt

SEQ ID NO: 64832 - DNA, 1018 bp, Zea Mays
aatttggatgtctgcttccaaccctgtctagctccctcggtccagcttcgactggctcgcagtggcaactggcaggtaggcacacgcgaagcgataaggtcggttaagccgtaacagtcgttgatgtcgccgccgccgtcgtccctcgtggtgctcccgctcctcctccccctcctcctcgccgctgtatcccacgctacggctaatgcggccggtgccggcgcccctcccccagtgccgacgccgtggccggagcagttccacgcggtggtcttcaccaatctcaccgagagcggcggccggctgcagctgatcgacctgtactacgactggcccaggggccgcaacctcaacctcatccgggaccagctctccagcgacccgctctacgacgtcgagtggaccaacggcacctcctacttcttcgactccgggtcctgccgcaccatgcgtttccccgtggggatcctgccgcctgactggctcgccgccggcgccgtctatctcggccgcgagcacgtcgacggcttcgactgccacctgtggaccaaggtcgacttcgtctgggatgcagcagcatgtgatgagctttgaggtgggaggagtgctggaagactccaagtggcaggcgccccctcgctgcttcagtggcggcaatgccgacaccgccaacgcggctgcggatggagttcatggcgaggaagccggtagtgttgatgtgatggacagcatgatcaggttcgccgtggctccggctgcagcagtagctgcatcatttgaccagtgagatttttgttttcctgatgtttggctgatgagagagtctctgccaacggtgatccacgcgtcctggtgattctgctacgctctgttgatcacattgtgctttgtataaccctggctgatttgtggtaacaccgacagtcactgtacatttcctggtactgatccactgaacttaactatcctgctgtcatggaacatgaggggcacaaatagacttgcgtttttggttgca

SEQ ID NO: 64833 - DNA, 489 bp, Zea Mays
gcgattctacaatttcggtgtgcgggacgggagtgctggatgcagcagcatgtgatgagctttgaggtgggaggagtgctggaagactccaagtggcaggcgccccctcgctgcttcagtggcggcaatgccgacaccgccaacgcggctgcggatggagttcatggcgaggaagccggtagtgttgatgtgatggacagcatgatcaggttcgccgtggctccggctgcagcagtagctgcatcatttgaccagtgagatttttgttttcctgatgtttggctgatgagagagtctctgccaacggtgatccacgcgtcctggtgattctgctacgctctgttgatcacattgtgctttgtataaccctggctgatttgtggtaacaccgacagtcactgtacatttcctggtactgatccactgaacttaactatcctgctgtcatggaacatgaggggcacaaatagacttgcgtttttggttgca

SEQ ID NO: 64834 - DNA, 3143 bp, Zea Mays
aaatatatttcgaaccgagtgggtattaatgttttgtacagggagggccctcctacgatgcttggacgcaattggcgattaatcgcgcgagaagcatcgcagcgtccccaaactgagctctcctcattttctcgccttcccttctcgttcccaccacgtgtacttctcttttctcttgatccacttcgttctagcgcgtcgtgcctatataaacccgcctccgcctccacttctccttcacgccccgccttgccttcatcctcctcctctcctccatctctcctcgccccagcgcgcgcgcggcatcgccgtcgagctacttactcgagcttcagttccagctactggagcacgcagttcatattaatacacagcttagctgtaccaagcggcatcttgcacgctagctaaactagaggaactcgctgcgcgcatgtctccaataatggcgctccaggcatcgtcgtcgtcgccttccgcgttccgtgcggtcccggccaccgccaacgcttcctgccggcgtcagttccaggtgcgcgctcaggtagccggcggcagcagcagtagcagcatcggagccgatggtgggaagatgatggtttccaaggagccggcggcggcggccacgtcgtcgggaccgtggaagatcgacttctccggcgagaagccgccgacgccgctgctggacaccgtgaactacccgctccacatgaagaacctgtcgatcttggagctggagcagctggcggcggagctccgcgcggaggtcgtgcacaccgtgtccaagaccggcgggcacctgagctccagcctgggcgttgtggagctgtcggtggcgctgcaccacgtgttcgacaccccggaggacaagatcatctgggacgtgggccaccaggcgtacccgcacaagatcctgacggggcggcggtcgcggatgcacaccatccgccagacctccgggctggcggggttccccaagcgcgacgagagcgcgcacgacgcgttcggggtcggccacagctccaccagcatctcggcggcgctgggcatggccgtggcgcgggacctcctggggcgcaagaaccacgtgatctccgtcatcggcgacggcgccatgacggccggccaggcctacgaggccatgaacaactcgggctacctggacgccaacatgatcgtggtgctgaacgacaacaagcaggtgtcgctcccgacggccacgctggacgggccgtccaagcccgtgggcgcgctgagccgggcgctgactaagctccagtccagcaccaagttccggcgcctccgcgaggcggccaagtccgtgacgaagcagatcggcgggccgacgcacgaggtggccgccaaggtggacgagtacgcgcgcggcatgatcagcgcctccgggtcgtcgctgttcgaggagctcgggctctactacatcggccccgtggacgggcactgcgtggtggccatccacgcggccatgggcggcggcacggggctgaactacttccagaagcggttcccggagcggtgcttcgacgtgggcatcgcggagcagcacgcggtgacgttcgcggcggggctggccgcggaggggctgaagccgttctgcgccatctactcgtcgttcctgcagcgcgggtacgaccaggtggtgcacgacgtggacctgcagcggctgcccgtgcggttcgcgctggaccgggcggggctggtgggcgccgacgggcccacgcactgcggcgccttcgacgtggcgtacatggcgtgcctgcccaacatggtggtgatggcgcccgcggacgaggcggagctgatgcacatggtggcgacggcggccgccatcgacgaccggcccagctgcttcaggttcccgcgcggcaacggcgtcggcgcggcgctcccgccggggaacaagggcgtggcgctggaggtgggcaggggcagggtgctggtgggcggcggcacgcgggtggcgctccttgggtacggcgccatggtgcaggcgtgcctcaaggccgcggaggcgctgaaggagcacgacgtgtacgtgacggtggccgacgcccggttctgcaagccgctggacacggcgctgatccgggagctcgccgccgagcacgaggtgctgatcaccgccgaggagggatccatcggcgggttcggctcccacgtcgcccactacctcagcctgaccggcctcctggacgggcccctcaaactgagatccatgttcctgccggaccggtacatcgaccatggcgcaccgcaggaccagatcgaggaggcagggctgacgccgcggcacatcgccgccaccgtgctgtccctgctggggaggccattggaggccatgcagctcaagtgaacgacgacgacgacgataacgacgacctagcttcaccatcaccaccaacagataaataaaaagcaaaccaaaccaaggcgtttgtacagtacaggagatgggtccaaggccttgggccggcctgttggcaccgtagtagcaaggatagcaaatgcttccaaacgcaggctgtcaagtgcaggtggatatgtctttctcctagccagtgacgacatagagcatacatctgcgcgggcggtcccacaagtcagctgatcctctgctagttttttttatttttattttaaagaacgtctttttgtataggatgctgcaagcatgtacgcatggtactagctacaagcatatatagaataacaaatcaaaattcatgtgatgatatacgtacccagtggccagtgctccatccatacacatacatacacaaagctagcatagaatatgaacgggttgtctcttcctgactgctgagagagagatggatggatacatgcatagttctagctgcttgtctgctgagaaagagccatcctcacgcgagttgtgatctcctcccccgctgggtttttgtcctggcgctacgtttgaagcccatggaatcatgcgagtggaggtggtagcatctgggccggatggtgagcagctagctagcaggatattcctaggtgcctggctctagctcgtctgagatcgatcttgtcctgacgctacgaccaattgcgcgcagatcagtattaacttgttccgactaagtacgtttggtactacagag

SEQ ID NO: 64835 - DNA, 593 bp, Zea Mays
gtcgctcccatgcctcagcagtgacgggcatggccaaaacagcgtcgcgcactgtgtaggataacattgtctgggtgcttcctgcctaggtgacttttgtcgcaacttggaggagaccactcaccagtttgcctttccgattggaatttcctgtccttgtccatgttctcgcagaggagatgggctggtttatgagaacatttgaggatgggaacacagctagcagcataggatccatgacataacagccctgttaattattgtgcagcagcggagaagatcgagaagactgtcgcacgcgtttgctatagggagtagactgtcgagaagactgtcgcacgcgttttcgaataagtccagtttttcgcctctgttttatgcacttaatgaataaactagcctttcatgttttgtccttcagtgtaacttgattttgttacctattgctttcactttcaatgattttggtttattctgttatgctgttatcatgtggcattttttcatctcatcaatatcacaaattctatcctcttcataatgttgctagctcttaggagatcctaaatgaatgtatatctgatctcggtcat

SEQ ID NO: 64836 - DNA, 724 bp, Zea Mays
gtacttttctcccctttaatatttccttccccctctccttgcatcctgttcgccttagcctccaaactgactactcgaatccttcttcgtcgctgctcctcactttcgttttgccacccactgtcatcatgggagcgtttggtgtggtcttggtgcccgccatgccctagcctttgtcggctgctccgtaagcctagttgtctgggtgcttcctgcctaggtgacttttgtcgcaacttggaggagaccactcaccagtttgcctttccgattggaatttcctgtccttgtccatgttctcgcagaggagatgggctggtttatgagaacatttgaggatgggaacacagctagcagcataggatccatgacataacagccctgttaattattgtgcagcagcggagaagatcgagaagactgtcgcacgcgtttgctatagggagtagactgtcgagaagactgtcgcacgcgttttcgaataagtccagtttttcgcctctgttttatgcacttaatgaataaactagcctttcatgttttgtccttcagtgtaacttgattttgttacctattgctttcactttcaatgattttggtttattctgttatgctgttatcatgtggcattttttcatctcatcaatatcacaaattctatcctcttcataatgttgctagctcttaggagatcctaaatgaatgtatatctgatctcggtcat

SEQ ID NO: 64837 - DNA, 768 bp, Zea Mays
cttttctcccctttaatatttccttccccctctccttgcatcctgttcgccttagcctccaaactgactactcgaatccttcttcgtcgctgctcctcactttcgttttgccacccactgtcatcatgggagcgtttggtgtggtcttggtgcccgccatgccctagcctttgtcggctgctccgtaagcctagttgtctgggtgcttcctgcctaggtgacttttgtcgcaacttggaggagaccactcaccagtttgcctttccgattggaatttcctgtccttgtccatgttctcgcagaggagatgggctggtttatgagaacatttgaggatgggaacacagctagcagcataggatccatgacataacagccctgttaattattgtgcagcagcggagaagatcgagaagactgtcgcacgcgtttgctatagggagtagactgtcgagaagactgtcgcacgcgttttcgaataacccttagagtgttgatcaagccgacggtctccatagaagcaacctgcaaggttagtccagcaagtagcaccaattatagtctgtaagaatagcaatactaaatcttctatgtgaaatttatgcattggcagcgtacatggattagtagttttgtgagacaaagttaaatagaggcaacacaggagaattgggacagggtgcacggttccacacatattcttatgcttgtgtgatggcttgattctttcctctgaaagtaattcttaagctatgatttattttctgc

SEQ ID NO: 64838 - DNA, 450 bp, Zea Mays
tagagtaactttttgagtaccaatgatgtaaagggacacaagctctagcaatgtttctgcttctcatgtaggccgtgtaagacgtcgcaaacatccaactgaggctaccatagatgggaatagagttaatggacaaccattgcttgtcagtgatcaggacaaatataaatcagtgcttacccatacgtattctacagtatggatgattggaggctttgcctttattatttatatgggtcatctatatatctgggctatggtggttgtgattcaaatatacatggcaagagaacttttcaacttactcagaaaatccagtgaagagaaacaactgccagggttcagggtcctgaattggcactttttttcacggcaatgctgtacacttatgggcgctttcttagtcgtcaactggtgaatatagtgacttcagatcacttgctttataag

SEQ ID NO: 64839 - DNA, 2709 bp, Zea Mays
ctaaattttaattatctcgcaagggttcgagtttggtgccattttcatttcgataatctatgtaattaaaaggggttcacaggttttgtcgttatttaacaaataagcagaccgaggtaattagaaccgaaccgagtaaaatgcttaattcagttttgaatcagatttgaagtatgctgaaaataatatcaactagctgtttttgggtcctcataacttttgatctataaacagtttgaaggtggacattataacaaggttgtagagctatactagggatacaaatttgcttaggcaacctgcccctaaaaccatgtgcaactgggtgtaaatctggtccaaagagaggctgacaggtttggatttcagacttggtgtaattgtccaagtcagaatttcagtgtgtttggctcaactttggagctttgtggtgcctgatccatgtggttttgggctaagattgatgtatcaagtttgaagaccacatgttggtgtgtaactttggttaaaggtcatatccctaaagctacttggaacttggagaaaaggtggtccaaagtggagctgtcagacttgtgatttctggacttcgattcagaaattgatgtgcagtttcagcatttttagcaaacttcagatctctgttgtgataaacttttgatgttatggcatgcactctccacagagaagtcttagagggtagtgtggtgagtaacttctattaagtttcatctccttgagcttgtttagaaaggggagaaaatgctgctccaagtcgctatgtcagacattggtgtgctgaaccaaattcagctaggctgaattgttgagttcgctggtgctgccccaactttggtgctcgataacttgaggtcagttgagcttttgatagtaaccattaaaacaaagttgaagactgtgtatcagtgagcaatcttggtataggtccgttgtaggttgatgcactggtgttggagtaaattgtgttcaaactctctctgtcaggtgcgagttcagcttttggttcagttagctgaatctgaatttcagtattttcatcccactttgaagcaccataacttttgatccatgaatctttgacctaaggctgctgcagcaaacatttaaatctatgtgttgggaacaatctttgttaactaagattggcatgtattgcttgcactagtgaggatcaaaggggtttaaagatgggggttcatttggcgccaggtgcagttttggaatctgaaacgtgattcagcttttctgaatttttagaagacacatattcctctcagttttggacccttctaattattaattcctgaactttggtggatgatcattacaccaaatataaagagttattatcggagaaccattcttattaagcattgatttcctgtcattacttagaactggaagaaaatcgtccttcaattccctctgttttgcaagttggaaactgaaacttgtgtcagttttgggggccagggttcaacatgctcgcctatgtctcagccatcctcatcccttttattttctagagcatgtctatctccatggaatatccccaccgcctactcttcttcttatcccaagagctaccgtattctttttctctcatacggatagagatagctggaaggagaatttcctcacgtatctctccctctgtgctgtgcaaccggccacgtactgaagctcttcctcacgccacctctgcatctcattcacgtcatttatttcccacgtatttagctcctggaaacttccttcacaagatgcgttgaacaccctgggaatcacccacgccacccatctcaccactgcaccactgcgcgcttcgtactgctggccgggctgctccagcaccaggaacgctcgctcctgctcgtcgacgttagattttcccagacgcgcgagctccccagcaactccaacacgttgctcgcctcgctcagtcttcaagccatcgtgccgctggttctagccaaagtcgggcgcgttctttccttcgccaggcagcacctccagtcgtcgtttcttttccacggctgcacgctcaccgactcaagcgcttggccatggagctcggtttcgtgtgtgcctgtgctgggtcgccgggtcacatgctcgtccgttttgatgttgtgcacgttccggcttgtggaactcgccggcgttgtcagctactactagacctcacagtgcatcggcgctctcgatatcgtcctgagttcactccgcgtgctgcgacgtctcgctcacctcatcgccaagtcgtcgtcgccctcgcggttatcgggtcgattcgatcagggtaagctgatctattattcccgctagttaaatctagtaaaactagaaaaatcgtgattgttgtgtttagtgagttatagatgtctagtgctttcgtaggattgtgtcgatgtcttgccgctaaatatttgattctcttttttgtatcatccggatactttatgctcatacatgtgcattgtgcatctcatgaggtacgataattaatcaagtaagacgaaggaaaagagtcaagtcgataccaagcgcgggctaatccgcaggatgatgctgatgaacgaaccggaagatggataatctgaacgagtgccaagccaattggtgctcgtcaagtggtcgcctaacaaacactaacctagtgttacccaggcaagccccggtgcatgc

SEQ ID NO: 64840 - DNA, 896 bp, Zea Mays
gaacaccctgggaatcacccacgccacccatctcaccactgcaccactgcgcgcttcgtactgctggccgggctgctccagcaccaggaacgctcgctcctgctcgtcgacgttagattttcccagacgcgcgagctccccagcaactccaacacgttgctcgcctcgctcagtcttcaagccatcgtgccgctggttctagccaaagtcgggcgcgttctttccttcgccaggcagcacctccagtcgtcgtttcttttccacggctgcacgctcaccgactcaagcgcttggccatggagctcggtttcgtgtgtgcctgtgctgggtcgccgggtcacatgctcgtccgttttgatgttgtgcacgttccggcttgtggaactcgccggcgttgtcagctactactagacctcacagtgcatcggcgctctcgatatcgtcctgagttcactccgcgtgctgcgacgtctcgctcacctcatcgccaagttgtcgtcgccctcgcggttatcaggtcgattcgatcagggtaagctgatctattattcccgctagttaaatctagtaaaactagaaaaatcgtgattgttgtgtttagtgagttatagatgtctagtgctttcgtaggattgtgtcgatgtcttgccgctaaatatttgattctcttttttgtatcatccggatactttatgctcatacatgtgcattgtgcatctcatgaggtacgataattaatcaagtaagacgaaggaaaagagtcaagtcgataccaagcgcgggctaatccgcaggatgatgctgatgaacgaaccggaagatggataatctgaacgagtgccaagccaatgggtgctcgtcaagtggtcgcctaacaaacactaacctagtgttac

SEQ ID NO: 64841 - DNA, 763 bp, Zea Mays
cactgcgcgcttcgtactgctggccgggctgctccagcaccaggaacgctcgctcctgctcgtcgacgttagattttcccagacgcgcgagctccccagcaactccaacacgttgctcgcctcgctcagtcttcaagccatcgtgccgctggttctagccaaagtcgggcgcgttctttccttcgccaggcagcacctccagtcgtcgtttcttttccacggctgcacgctcaccgactcaagcgcttggccatggagctcggtttcgtgtgtgcctgtgctgggtcgccgggtcacatgctcgtccgttttgatgttgtgcacgttccggcttgtggaactcgccggcgttgtcagctactactagacctcacagtggtactgtgatgccgccgtggagacgtctactgtgccatctattctctgttgtctcgctacacctgattgtcatcctcgtccttgtctcgatctcgctacggcagcatcggcgctctcgatatcgtcctgagttcactccgcgtgctgcgacgtctcgctcacctcatcgccaagtcgtcgtcgccctcgcggttatcgggtcgattcgatcaggacgaaggaaaagagtcaagtcgataccaagcgcgggctaatccgcaggatgatgctgatgaacgaaccggaagatggataatctgaacgagtgccaagccaattggtgctcgtcaagtggtcgcctaacaaacactaacctagtgttacccaggcaagccccggtgcatgc

SEQ ID NO: 64842 - DNA, 848 bp, Zea Mays
gcgcttcgtactgctggcccgggctgctccagcaccaggaacgctcgctcctgctcgtcgacgttagattttcccagacgcgcgagctccccagcaactccaacacgttgctcgcctcgctcagtcttcaagccatcgtgccgctggttctagccaaagtcgggcgcgttctttcctttcgccaggcagcacctccagtcgtcgtttcttttccacggctgcacgctcaccgactcaagcgcttggccatggagctcggtttcgtgtgtgcctgtgctgggtcgccgggtcacatgctcgtccgttttgatgttgtgcacgttccggcttgtggaactcgccggcgttgtcagctactactagacctcacagtgcatcggcgctctcgatatcgtcctgagttcactccgcgtgctgcgacgtctcgctcacctcatcgccaagttgtcgtcgccctcgcggttatcaggtcgattcgatcagggtaagctgatctattattcccgctagttaaatctagtaaaactagaaaaatcgtgattgttgtgtttagtgagttatagatgtctagtgctttcgtaggattgtgtcgatgtcttgccgctaaatatttgattctcttttttgtatcatccggatactttatgctcatacatgtgcattgtgcatctcatgaggtacgataattaatcaagtaagacgaaggaaaagagtcaagtcgataccaagcgcgggctaatccgcaggatgatgctgatgaacgaaccggaagatggataatctgaacgagtgccaagccaatgggtgctcgtcaagtggtcgcctaacaaacactaacctagtgttac

SEQ ID NO: 64843 - DNA, 1278 bp, Zea Mays
ctgagtaattccatactcagggttttattccctgtttttttttcaggttatagttttgtgctgctgttgatggtgttaagtgtcggtgggctcggccttcttatataataactttttgagtaccaatgatgtaaagggacacaagctctagcaatgtttctgcttctcatgtaggccgtgtaagacgtcgcaaacatccaactgaggctaccatagatgggaatagagttaatggacaaccattgcttgtcagtgatcaggacaaatataaatcagtgcttacccatacgtattctacagtatggatgattggaggctttgcctttattatttatatgggtcatctatatatctgggctatggtggttgtgattcaaatatacatggcaagagaacttttcaacttactcagaaaatccagtgaagagaaacaactgccagggttcagggtcctgaattgatctagatgccaaccattaggcatgattcgattctagaagatcctgatggtgacacctcacaaccacaacacatctcggactactaccatgtcagtctcaagaatgtgatgataacatgaccattcaaattggtgaagtacttcagatgcaaattgaggttcaaagatagttaaatgaactacttgagaaatggtcatttgttaaatctgagcagaaaagatcggaaatccaagggcttatggaattggtattgcaaagatcttcatgtgattcggatccttataaggaaagataatttatatacatgagggagccacctattgattcttttgatgtctctacatgtgttgctgcggaggaagccgacagcgcagctatggtcgttgagaagaaggttgtcgcgtctgtgtagcttgtcgccgttgctgcgcacaaggcgggctgcgccatggatgctatctgtttgtattacttttggttggttgcattaagtgttgtactgtgtgtttggtaatgcagttacttttgtattcagtgaactgtttggtaatgcggttccttctgtatttagtgaattgtgtggtactgcgtacacactgtagttccttttgtattaagtgtagtagtgatgaggtaatgcattgcacttgtactactgagctaaatctatgtacttgtgcctgttgtggctaaaaagcatatgttaagaaaatactgctttctgtgaatgaggtactagcaatctgtgtacattatggctctaaatggctaagtctgtgtacttgtgtttatatgaaatctgaaatatctgttgagg

SEQ ID NO: 64844 - DNA, 512 bp, Zea Mays
ttcaggttatagttttgtgctgctgttgatggtgttaagtgtcggtgggctcggccttcttatataataactttttgagtaccaatgatgtaaagggacacaagctctagcaatgtttctgcttctcatgtaggccgtgtaagacgtcgcaaacatccaactgaggctaccatagatgggaatagagttaatggacaaccattgcttgtcagtgatcaggacaaatataaatcagtgcttacccatacgtattctacagtatggatgattggaggctttgcctttattatttatatgggtcatctatatatctgggctatggtggttgtgattcaaatatacatggcaagagaacttttcaacttactcagaaaatccagtgaagagaaacaactgccagggttcagggtcctgaattggcactttttttcacggcaatgctgtacacttatgggcgctttcttagtcgtcaactggtgaatatagtgacttcagatcacttgctttataag

SEQ ID NO: 64845 - DNA, 3365 bp, Zea Mays
taaggatcgaaatatgcacgctaaaagtttagagaccaagatgatacaattttacaagtttagggatctagatgcacattttgagagtttagggaccgagatgatctaacactacaagtttagagagtgacgatgtattttactcttttcttatggtttctaatttttctttgtttcatgcttctagaaaaaccgtgttagcatttcaatggaacttgtgacagctgtgttaggagatcatgggcaaaggcccaaggatgattatgctgtggttacagctgtgactgagttgggcaatggcaagccaaaattctattctactccagaggtgattgcattctgtcggaagtggcgcctacctaccaaccatgtgtggttattttcgacaaggaaatctgcctcctcattttttgctgcttatgatgcattatgtgaagaaggaactgcaacacctgtatgcaaaacccttgatgaaatagctgatatagctgtaccagggtcaaaagatcatgtaaaagtgcaaggtgagatccttgaaggtctggttgcccggattgtgcctcgtcaaagtttagtgcaaatggaagaggttttgaaaaactttcctcaggctccatttgacgccggcgactcagatttgggaccaagtttacgagaaatttgtgctgctaataggtcagatgaaaagcagcaaatcaaggcactgcttgaaaatgttggagcttcaatgtgtccagatcattcggattggtttggaactggtggacttgatgctcagtcgcgaaatgctgatagatcagttgttacaaaatttttgcaagcacatcctgcagactatgcaactaagaaactgcaggagatgattcgcttgatgaaacagaggcacttctcagcagctttcaaatgctactggaactaccacaagatcgattctctttcaaatgacaatttgtattacaaaatggttatccatgtgcataatgattctgtttttagacgataccagcaagagatgaggagaaaccaagggctgtggcctctgtatagaggtttctttgttgatgtgaatttgttcaaggcaaacaataagaaggcagctgaactagccaaagatggtaacactttactgaaaaatatcaatggtgccttggattcaaatggttcagttgtggatggtttggctgatgaggattcaaatctaatggttaaactaaaattcttgacatacaagttgcgaacatttttaattcgtaatggattgtctacccttttcaaagatggaccatctgcttatagaacttactacctaaggcaaatgaagaactggggaacatcaacaaacaaacagagagagcttatcaaattgttggacgagtgggctgtattcattagaaggaagtacgggaataagccactctcatcctcgacatatcttagtgaagcagagcctttccttgaacaatacgccaaacgaagccctgcaaaccaggctttgattggggctgctggtaaccttgttcaaactgaaaatttcttggccattcttgacgcaaagagggatgaagagggtgatctccggacagatcatggggcagcaccttctggtcctgtgtcaacatctgttgatgtggttcccaaaacagagggccttatagtgttctttccgggtatacctggttgtgcaaagtcagctctgtgtaaggaaatattgaacacacctggtggccttggagatgatcgcccttttcatagcttgatgggggatcttattaaaggaagatactggcaaaaggtcgctgatgaaagaagaaagaagccagctagaataacccttgctgataaaaatgcaccaaatgaagaagtttggaagcagatcgaggatatgtgtgggtccacaaaggcagctgctgtccctgtggttcctgactcagaaggcacggattcaaatccattttctcttgaggctcttgccgttttcatgtttcgcgtcctccagcgggtcaatcatcctggaaatctggacaaggcctcacctaatgcaggctatgttttgctaatgttttaccacttgtatgatggcaagagtcgaagagaatttgaaaatgaactttatgaacgttttggctcccttgttaagatgcctctcctgaagccagatagagcgccattgcctgatgcggtgaaagccatcttagatgaggggattagcttgttcaagatgcatcggagcaggcatggaagagcagagccatcaaaaggttcatacgctaaagaatgggcacaatgggaacaaaggttgcgtgcgaccttgtttgggaatgctgatcatcttaactcaattcaggttccttttgactatgctgtgaaagcagtactggaacagttaaaagctgttgcaaagggtgatctcaaaacacctgatactgggaagcggaagtttggaaatatcatgtttgctgctgttcgattaaccccgcctgatatattgggccttctccgtaaggtggcagagaaggacacggctgtcgacagttttgtgaacaagataagactggaggacaacctaacgaaggttcacgtcacccttgcccacaaacgaggccatggtgtgtctgctgtcgcaagctatggcatctaccagcaccaggaagtccccgtgtcattcaacgcattgtactacactgacaagatggccgctctcgaggcacagctgggagcagtaaacgatgagccgatcaattccaggaacgagtggccacatgccactctgtggacggctccaggcgtcactccaaaggaggcaaacatgctgccgcagctggcttcagaaggaaaagcagaacgggtgccgattgaccctcccatcaccatatcgggggtggtggacttctactgatttgtctcctcggttttaggatacggatgtgcagaggtgaaggtggaataaagaataatttgctgctgcgggccttacgttattagctgattgtggacaagacaatcgtcgagtcttacaccacataaatttttgatactataggactgacctggactgctgcatttctacttccatgttttccaataagtgcaagataccatcgattttttaagccagcacttagcactagaggagataattatctgtatagcaagcacatcattctactttctagtgtatttttgaatttccagaggccgtttgacaggacagttgaccagaaataaagttcgtgttggtggtatgttacctttattttgtgtacttattacaaagttgcaacaccgaatgcttcgttgactggctaacataatgctggtgagtggaaaacagaatcaattttgaataatgaagctgaaggattagg

SEQ ID NO: 64846 - DNA, 3362 bp, Zea Mays
taaggatcgaaatatgcacgctaaaagtttagagaccaagatgatacaattttacaagtttagggatctagatgcacattttgagagtttagggaccgagatgatctaacactacaagtttagagagtgacgatgtattttactcttttcttatggtttctaatttttctttgtttcatgcttctagaaaaaccgtgttagcatttcaatggaacttgtgacagctgtgttaggagatcatgggcaaaggcccaaggatgattatgctgtggttacagctgtgactgagttgggcaatggcaagccaaaattctattctactccagaggtgattgcattctgtcggaagtggcgcctacctaccaaccatgtgtggttattttcgacaaggaaatctgcctcctcattttttgctgcttatgatgcattatgtgaagaaggaactgcaacacctgtatgcaaaacccttgatgaaatagctgatatagctgtaccagggtcaaaagatcatgtaaaagtgcaaggtgagatccttgaaggtctggttgcccggattgtgcctcgtcaaagtttagtgcaaatggaagaggttttgaaaaactttcctcaggctccatttgacgccggcgactcagatttgggaccaagtttacgagaaatttgtgctgctaataggtcagatgaaaagcagcaaatcaaggcactgcttgaaaatgttggagcttcaatgtgtccagatcattcggattggtttggaactggtggacttgatgctcagtcgcgaaatgctgatagatcagttgttacaaaatttttgcaagcacatcctgcagactatgcaactaagaaactgcaggagatgattcgcttgatgaaacagaggcacttctcagcagctttcaaatgctactggaactaccacaagatcgattctctttcaaatgacaatttgtattacaaaatggttatccatgtgcataatgattctgtttttagacgataccagcaagagatgagaaaccaagggctgtggcctctgtatagaggtttctttgttgatgtgaatttgttcaaggcaaacaataagaaggcagctgaactagccaaagatggtaacactttactgaaaaatatcaatggtgccttggattcaaatggttcagttgtggatggtttggctgatgaggattcaaatctaatggttaaactaaaattcttgacatacaagttgcgaacatttttaattcgtaatggattgtctacccttttcaaagatggaccatctgcttatagaacttactacctaaggcaaatgaagaactggggaacatcaacaaacaaacagagagagcttatcaaattgttggacgagtgggctgtattcattagaaggaagtacgggaataagccactctcatcctcgacatatcttagtgaagcagagcctttccttgaacaatacgccaaacgaagccctgcaaaccaggctttgattggggctgctggtaaccttgttcaaactgaaaatttcttggccattcttgacgcaaagagggatgaagagggtgatctccggacagatcatggggcagcaccttctggtcctgtgtcaacatctgttgatgtggttcccaaaacagagggccttatagtgttctttccgggtatacctggttgtgcaaagtcagctctgtgtaaggaaatattgaacacacctggtggccttggagatgatcgcccttttcatagcttgatgggggatcttattaaaggaagatactggcaaaaggtcgctgatgaaagaagaaagaagccagctagaataacccttgctgataaaaatgcaccaaatgaagaagtttggaagcagatcgaggatatgtgtgggtccacaaaggcagctgctgtccctgtggttcctgactcagaaggcacggattcaaatccattttctcttgaggctcttgccgttttcatgtttcgcgtcctccagcgggtcaatcatcctggaaatctggacaaggcctcacctaatgcaggctatgttttgctaatgttttaccacttgtatgatggcaagagtcgaagagaatttgaaaatgaactttatgaacgttttggctcccttgttaagatgcctctcctgaagccagatagagcgccattgcctgatgcggtgaaagccatcttagatgaggggattagcttgttcaagatgcatcggagcaggcatggaagagcagagccatcaaaaggttcatacgctaaagaatgggcacaatgggaacaaaggttgcgtgcgaccttgtttgggaatgctgatcatcttaactcaattcaggttccttttgactatgctgtgaaagcagtactggaacagttaaaagctgttgcaaagggtgatctcaaaacacctgatactgggaagcggaagtttggaaatatcatgtttgctgctgttcgattaaccccgcctgatatattgggccttctccgtaaggtggcagagaaggacacggctgtcgacagttttgtgaacaagataagactggaggacaacctaacgaaggttcacgtcacccttgcccacaaacgaggccatggtgtgtctgctgtcgcaagctatggcatctaccagcaccaggaagtccccgtgtcattcaacgcattgtactacactgacaagatggccgctctcgaggcacagctgggagcagtaaacgatgagccgatcaattccaggaacgagtggccacatgccactctgtggacggctccaggcgtcactccaaaggaggcaaacatgctgccgcagctggcttcagaaggaaaagcagaacgggtgccgattgaccctcccatcaccatatcgggggtggtggacttctactgatttgtctcctcggttttaggatacggatgtgcagaggtgaaggtggaataaagaataatttgctgctgcgggccttacgttattagctgattgtggacaagacaatcgtcgagtcttacaccacataaatttttgatactataggactgacctggactgctgcatttctacttccatgttttccaataagtgcaagataccatcgattttttaagccagcacttagcactagaggagataattatctgtatagcaagcacatcattctactttctagtgtatttttgaatttccagaggccgtttgacaggacagttgaccagaaataaagttcgtgttggtggtatgttacctttattttgtgtacttattacaaagttgcaacaccgaatgcttcgttgactggctaacataatgctggtgagtggaaaacagaatcaattttgaataatgaagctgaaggattagg

SEQ ID NO: 64847 - DNA, 3214 bp, Zea Mays
ttctagaaaaaccgtgttagcatttcaatggaacttgtgacagctgtgttaggagatcatgggcaaaggcccaaggatgattatgctgtggttacagctgtgactgagttgggcaatggcaagccaaaattctattctactccagaggtgattgcattctgtcggaagtggcgcctacctaccaaccatgtgtggttattttcgacaaggaaatctgcctcctcattttttgctgcttatgatgcattatgtgaagaaggaactgcaacacctgtatgcaaaacccttgatgaaatagctgatatagctgtaccagggtcaaaagatcatgtaaaagtgcaaggtgagatccttgaaggtctggttgcccggattgtgcctcgtcaaagtttagtgcaaatggaagaggttttgaaaaactttcctcaggctccatttgacgccggcgactcagatttgggaccaagtttacgagaaatttgtgctgctaataggtcagatgaaaagcagcaaatcaaggcactgcttgaaaatgttggagcttcaatgtgtccagatcattcggattggtttggaactggtggacttgatgctcagtcgcgaaatgctgatagatcagttgttacaaaatttttgcaagcacatcctgcagactatgcaactaagaaactgcaggagatgattcgcttgatgaaacagaggcacttctcagcagctttcaaatgctactggaactaccacaagatcgattctctttcaaatgacaatttgtattacaaaatggttatccatgtgcataatgattctgtttttagacgataccagcaagagatgagaaaccaagggctgtggcctctgtatagaggtttctttgttgatgtgaatttgttcaaggcaaacaataagaaggcagctgaactagccaaagatggtaacactttactgaaaaatatcaatggtgccttggattcaaatggttcagttgtggatggtttggctgatgaggattcaaatctaatggttaaactaaaattcttgacatacaagttgcgaacatttttaattcgtaatggattgtctacccttttcaaagatggaccatctgcttatagaacttactacctaaggcaaatgaagaactggggaacatcaacaaacaaacagagagagcttatcaaattgttggacgagtgggctgtattcattagaaggaagtacgggaataagccactctcatcctcgacatatcttagtgaagcagagcctttccttgaacaatacgccaaacgaagccctgcaaaccaggctttgattggggctgctggtaaccttgttcaaactgaaaatttcttggccattcttgacgcaaagagggatgaagagggtgatctccggacagatcatggggcagcaccttctggtcctgtgtcaacatctgttgatgtggttcccaaaacagagggccttatagtgttctttccgggtatacctggttgtgcaaagtcagctctgtgtaaggaaatattgaacacacctggtggccttggagatgatcgcccttttcatagcttgatgggggatcttattaaaggaagatactggcaaaaggtcgctgatgaaagaagaaagaagccagctagaataacccttgctgataaaaatgcaccaaatgaagaagctactttaacagtagagatagaactgataaatcattgtttccagatcgaggatatgtgtgggtccacaaaggcagctgctgtccctgtggttcctgactcagaaggcacggattcaaatccattttctcttgaggctcttgccgttttcatgtttcgcgtcctccagcgggtcaatcatcctggaaatctggacaaggcctcacctaatgcaggctatgttttgctaatgttttaccacttgtatgatggcaagagtcgaagagaatttgaaaatgaactttatgaacgttttggctcccttgttaagatgcctctcctgaagccagatagagcgccattgcctgatgcggtgaaagccatcttagatgaggggattagcttgttcaagatgcatcggagcaggcatggaagagcagagccatcaaaaggttcatacgctaaagaatgggcacaatgggaacaaaggttgcgtgcgaccttgtttgggaatgctgatcatcttaactcaattcaggttccttttgactatgctgtgaaagcagtactggaacagttaaaagctgttgcaaagggtgatctcaaaacacctgatactgggaagcggaagtttggaaatatcatgtttgctgctgttcgattaaccccgcctgatatattgggccttctccgtaaggtggcagagaaggacacggctgtcgacagttttgtgaacaagataagactggaggacaacctaacgaaggttcacgtcacccttgcccacaaacgaggccatggtgtgtctgctgtcgcaagctatggcatctaccagcaccaggaagtccccgtgtcattcaacgcattgtactacactgacaagatggccgctctcgaggcacagctgggagcagtaaacgatgagccgatcaattccaggaacgagtggccacatgccactctgtggacggctccaggcgtcactccaaaggaggcaaacatgctgccgcagctggcttcagaaggaaaagcagaacgggtgccgattgaccctcccatcaccatatcgggggtggtggacttctactgatttgtctcctcggttttaggatacggatgtgcagaggtgaaggtggaataaagaataatttgctgctgcgggccttacgttattagctgattgtggacaagacaatcgtcgagtcttacaccacataaatttttgatactataggactgacctggactgctgcatttctacttccatgttttccaataagtgcaagataccatcgattttttaagccagcacttagcactagaggagataattatctgtatagcaagcacatcattctactttctagtgtatttttgaatttccagaggccgtttgacaggacagttgaccagaaataaagttcgtgttggtggtatgttacctttattttgtgtacttattacaaagttgcaacaccgaatgcttcgttgactggctaacataatgctggtgagtggaaaacagaatcaattttgaataatgaagctgaaggattagg

SEQ ID NO: 64848 - DNA, 3136 bp, Zea Mays
ctagaaaaaccgtgttagcatttcaatggaacttgtgacagctgtgttaggagatcatgggcaaaggcccaaggatgattatgctgtggttacagctgtgactgagttgggcaatggcaagccaaaattctattctactccagaggtgattgcattctgtcggaagtggcgcctacctaccaaccatgtgtggttattttcgacaaggaaatctgcctcctcattttttgctgcttatgatgcattatgtgaagaaggaactgcaacacctgtatgcaaaacccttgatgaaatagctgatatagctgtaccagggtcaaaagatcatgtaaaagtgcaaggtgagatccttgaaggtctggttgcccggattgtgcctcgtcaaagtttagtgcaaatggaagaggttttgaaaaactttcctcaggctccatttgacgccggcgactcagatttgggaccaagtttacgagaaatttgtgctgctaataggtcagatgaaaagcagatcattcggattggtttggaactggtggacttgatgctcagtcgcgaaatgctgatagatcagttgttacaaaatttttgcaagcacatcctgcagactatgcaactaagaaactgcaggagatgattcgcttgatgaaacagaggcacttctcagcagctttcaaatgctactggaactaccacaagatcgattctctttcaaatgacaatttgtattacaaaatggttatccatgtgcataatgattctgtttttagacgataccagcaagagatgaggagaaaccaagggctgtggcctctgtatagaggtttctttgttgatgtgaatttgttcaaggcaaacaataagaaggcagctgaactagccaaagatggtaacactttactgaaaaatatcaatggtgccttggattcaaatggttcagttgtggatggtttggctgatgaggattcaaatctaatggttaaactaaaattcttgacatacaagttgcgaacatttttaattcgtaatggattgtctacccttttcaaagatggaccatctgcttatagaacttactacctaaggcaaatgaagaactggggaacatcaacaaacaaacagagagagcttatcaaattgttggacgagtgggctgtattcattagaaggaagtacgggaataagccactctcatcctcgacatatcttagtgaagcagagcctttccttgaacaatacgccaaacgaagccctgcaaaccaggctttgattggggctgctggtaaccttgttcaaactgaaaatttcttggccattcttgacgcaaagagggatgaagagggtgatctccggacagatcatggggcagcaccttctggtcctgtgtcaacatctgttgatgtggttcccaaaacagagggccttatagtgttctttccgggtatacctggttgtgcaaagtcagctctgtgtaaggaaatattgaacacacctggtggccttggagatgatcgcccttttcatagcttgatgggggatcttattaaaggaagatactggcaaaaggtcgctgatgaaagaagaaagaagccagctagaataacccttgctgataaaaatgcaccaaatgaagaagtttggaagcagatcgaggatatgtgtgggtccacaaaggcagctgctgtccctgtggttcctgactcagaaggcacggattcaaatccattttctcttgaggctcttgccgttttcatgtttcgcgtcctccagcgggtcaatcatcctggaaatctggacaaggcctcacctaatgcaggctatgttttgctaatgttttaccacttgtatgatggcaagagtcgaagagaatttgaaaatgaactttatgaacgttttggctcccttgttaagatgcctctcctgaagccagatagagcgccattgcctgatgcggtgaaagccatcttagatgaggggattagcttgttcaagatgcatcggagcaggcatggaagagcagagccatcaaaaggttcatacgctaaagaatgggcacaatgggaacaaaggttgcgtgcgaccttgtttgggaatgctgatcatcttaactcaattcaggttccttttgactatgctgtgaaagcagtactggaacagttaaaagctgttgcaaagggtgatctcaaaacacctgatactgggaagcggaagtttggaaatatcatgtttgctgctgttcgattaaccccgcctgatatattgggccttctccgtaaggtggcagagaaggacacggctgtcgacagttttgtgaacaagataagactggaggacaacctaacgaaggttcacgtcacccttgcccacaaacgaggccatggtgtgtctgctgtcgcaagctatggcatctaccagcaccaggaagtccccgtgtcattcaacgcattgtactacactgacaagatggccgctctcgaggcacagctgggagcagtaaacgatgagccgatcaattccaggaacgagtggccacatgccactctgtggacggctccaggcgtcactccaaaggaggcaaacatgctgccgcagctggcttcagaaggaaaagcagaacgggtgccgattgaccctcccatcaccatatcgggggtggtggacttctactgatttgtctcctcggttttaggatacggatgtgcagaggtgaaggtggaataaagaataatttgctgctgcgggccttacgttattagctgattgtggacaagacaatcgtcgagtcttacaccacataaatttttgatactataggactgacctggactgctgcatttctacttccatgttttccaataagtgcaagataccatcgattttttaagccagcacttagcactagaggagataattatctgtatagcaagcacatcattctactttctagtgtatttttgaatttccagaggccgtttgacaggacagttgaccagaaataaagttcgtgttggtggtatgttacctttattttgtgtacttattacaaagttgcaacaccgaatgcttcgttgactggctaacataatgctggtgagtggaaaacagaatcaattttgaataatgaagctgaaggattagg

SEQ ID NO: 64849 - DNA, 3166 bp, Zea Mays
ctagaaaaaccgtgttagcatttcaatggaacttgtgacagctgtgttaggagatcatgggcaaaggcccaaggatgattatgctgtggttacagctgtgactgagttgggcaatggcaagccaaaattctattctactccagaggtgattgcattctgtcggaagtggcgcctacctaccaaccatgtgtggttattttcgacaaggaaatctgcctcctcattttttgctgcttatgatgcattatgtgaagaaggaactgcaacacctgtatgcaaaacccttgatgaaatagctgatatagctgtaccagggtcaaaagatcatgtaaaagtgcaaggtgagatccttgaaggtctggttgcccggattgtgcctcgtcaaagtttagtgcaaatggaagaggttttgaaaaactttcctcaggctccatttgacgccggcgactcagatttgggaccaagtttacgagaaatttgtgctgctaatagcaaatcaaggcactgcttgaaaatgttggagcttcaatgtgtccagatcattcggattggtttggaactggtggacttgatgctcagtcgcgaaatgctgatagatcagttgttacaaaatttttgcaagcacatcctgcagactatgcaactaagaaactgcaggagatgattcgcttgatgaaacagaggcacttctcagcagctttcaaatgctactggaactaccacaagatcgattctctttcaaatgacaatttgtattacaaaatggttatccatgtgcataatgattctgtttttagacgataccagcaagagatgaggagaaaccaagggctgtggcctctgtatagaggtttctttgttgatgtgaatttgttcaaggcaaacaataagaaggcagctgaactagccaaagatggtaacactttactgaaaaatatcaatggtgccttggattcaaatggttcagttgtggatggtttggctgatgaggattcaaatctaatggttaaactaaaattcttgacatacaagttgcgaacatttttaattcgtaatggattgtctacccttttcaaagatggaccatctgcttatagaacttactacctaaggcaaatgaagaactggggaacatcaacaaacaaacagagagagcttatcaaattgttggacgagtgggctgtattcattagaaggaagtacgggaataagccactctcatcctcgacatatcttagtgaagcagagcctttccttgaacaatacgccaaacgaagccctgcaaaccaggctttgattggggctgctggtaaccttgttcaaactgaaaatttcttggccattcttgacgcaaagagggatgaagagggtgatctccggacagatcatggggcagcaccttctggtcctgtgtcaacatctgttgatgtggttcccaaaacagagggccttatagtgttctttccgggtatacctggttgtgcaaagtcagctctgtgtaaggaaatattgaacacacctggtggccttggagatgatcgcccttttcatagcttgatgggggatcttattaaaggaagatactggcaaaaggtcgctgatgaaagaagaaagaagccagctagaataacccttgctgataaaaatgcaccaaatgaagaagtttggaagcagatcgaggatatgtgtgggtccacaaaggcagctgctgtccctgtggttcctgactcagaaggcacggattcaaatccattttctcttgaggctcttgccgttttcatgtttcgcgtcctccagcgggtcaatcatcctggaaatctggacaaggcctcacctaatgcaggctatgttttgctaatgttttaccacttgtatgatggcaagagtcgaagagaatttgaaaatgaactttatgaacgttttggctcccttgttaagatgcctctcctgaagccagatagagcgccattgcctgatgcggtgaaagccatcttagatgaggggattagcttgttcaagatgcatcggagcaggcatggaagagcagagccatcaaaaggttcatacgctaaagaatgggcacaatgggaacaaaggttgcgtgcgaccttgtttgggaatgctgatcatcttaactcaattcaggttccttttgactatgctgtgaaagcagtactggaacagttaaaagctgttgcaaagggtgatctcaaaacacctgatactgggaagcggaagtttggaaatatcatgtttgctgctgttcgattaaccccgcctgatatattgggccttctccgtaaggtggcagagaaggacacggctgtcgacagttttgtgaacaagataagactggaggacaacctaacgaaggttcacgtcacccttgcccacaaacgaggccatggtgtgtctgctgtcgcaagctatggcatctaccagcaccaggaagtccccgtgtcattcaacgcattgtactacactgacaagatggccgctctcgaggcacagctgggagcagtaaacgatgagccgatcaattccaggaacgagtggccacatgccactctgtggacggctccaggcgtcactccaaaggaggcaaacatgctgccgcagctggcttcagaaggaaaagcagaacgggtgccgattgaccctcccatcaccatatcgggggtggtggacttctactgatttgtctcctcggttttaggatacggatgtgcagaggtgaaggtggaataaagaataatttgctgctgcgggccttacgttattagctgattgtggacaagacaatcgtcgagtcttacaccacataaatttttgatactataggactgacctggactgctgcatttctacttccatgttttccaataagtgcaagataccatcgattttttaagccagcacttagcactagaggagataattatctgtatagcaagcacatcattctactttctagtgtatttttgaatttccagaggccgtttgacaggacagttgaccagaaataaagttcgtgttggtggtatgttacctttattttgtgtacttattacaaagttgcaacaccgaatgcttcgttgactggctaacataatgctggtgagtggaaaacagaatcaattttgaataatgaagctgaaggattagg

SEQ ID NO: 64850 - DNA, 3215 bp, Zea Mays
ctagaaaaaccgtgttagcatttcaatggaacttgtgacagctgtgttaggagatcatgggcaaaggcccaaggatgattatgctgtggttacagctgtgactgagttgggcaatggcaagccaaaattctattctactccagaggtgattgcattctgtcggaagtggcgcctacctaccaaccatgtgtggttattttcgacaaggaaatctgcctcctcattttttgctgcttatgatgcattatgtgaagaaggaactgcaacacctgtatgcaaaacccttgatgaaatagctgatatagctgtaccagggtcaaaagatcatgtaaaagtgcaaggtgagatccttgaaggtctggttgcccggattgtgcctcgtcaaagtttagtgcaaatggaagaggttttgaaaaactttcctcaggctccatttgacgccggcgactcagatttgggaccaagtttacgagaaatttgtgctgctaataggtcagatgaaaagcagcaaatcaaggcactgcttgaaaatgttggagcttcaatgtgtccagatcattcggattggtttggaactggtggacttgatgctcagtcgcgaaatgctgatagatcagttgttacaaaatttttgcaagcacatcctgcagactatgcaactaagaaactgcaggagatgattcgcttgatgaaacagaggcacttctcagcagctttcaaatgctactggaactaccacaagatcgattctctttcaaatgacaatttgtattacaaaatggttatccatgtgcataatgattctgtttttagacgataccagcaagagatgaggagaaaccaagggctgtggcctctgtatagaggtttctttgttgatgtgaatttgttcaaggcaaacaataagaaggcagctgaactagccaaagatggtaacactttactgaaaaatatcaatggtgccttggattcaaatggttcagttgtggatggtttggctgatgaggattcaaatctaatggttaaactaaaattcttgacatacaagttgcgaacatttttaattcgtaatggattgtctacccttttcaaagatggaccatctgcttatagaacttactacctaaggcaaatgaagaactggggaacatcaacaaacaaacagagagagcttatcaaattgttggacgagtgggctgtattcattagaaggaagtacgggaataagccactctcatcctcgacatatcttagtgaagcagagcctttccttgaacaatacgccaaacgaagccctgcaaaccaggctttgattggggctgctggtaaccttgttcaaactgaaaatttcttggccattcttgacgcaaagagggatgaagagggtgatctccggacagatcatggggcagcaccttctggtcctgtgtcaacatctgttgatgtggttcccaaaacagagggccttatagtgttctttccgggtatacctggttgtgcaaagtcagctctgtgtaaggaaatattgaacacacctggtggccttggagatgatcgcccttttcatagcttgatgggggatcttattaaaggaagatactggcaaaaggtcgctgatgaaagaagaaagaagccagctagaataacccttgctgataaaaatgcaccaaatgaagaagctactttaacagtagagatagaactgataaatcattgtttccagatcgaggatatgtgtgggtccacaaaggcagctgctgtccctgtggttcctgactcagaaggcacggattcaaatccattttctcttgaggctcttgccgttttcatgtttcgcgtcctccagcgggtcaatcatcctggaaatctggacaaggcctcacctaatgcaggctatgttttgctaatgttttaccacttgtatgatggcaagagtcgaagagaatttgaaaatgaactttatgaacgttttggctcccttgttaagatgcctctcctgaagccagatagagcgccattgcctgatgcggtgaaagccatcttagatgaggggattagcttgttcaagatgcatcggagcaggcatggaagagcagagccatcaaaaggttcatacgctaaagaatgggcacaatgggaacaaaggttgcgtgcgaccttgtttgggaatgctgatcatcttaactcaattcaggttccttttgactatgctgtgaaagcagtactggaacagttaaaagctgttgcaaagggtgatctcaaaacacctgatactgggaagcggaagtttggaaatatcatgtttgctgctgttcgattaaccccgcctgatatattgggccttctccgtaaggtggcagagaaggacacggctgtcgacagttttgtgaacaagataagactggaggacaacctaacgaaggttcacgtcacccttgcccacaaacgaggccatggtgtgtctgctgtcgcaagctatggcatctaccagcaccaggaagtccccgtgtcattcaacgcattgtactacactgacaagatggccgctctcgaggcacagctgggagcagtaaacgatgagccgatcaattccaggaacgagtggccacatgccactctgtggacggctccaggcgtcactccaaaggaggcaaacatgctgccgcagctggcttcagaaggaaaagcagaacgggtgccgattgaccctcccatcaccatatcgggggtggtggacttctactgatttgtctcctcggttttaggatacggatgtgcagaggtgaaggtggaataaagaataatttgctgctgcgggccttacgttattagctgattgtggacaagacaatcgtcgagtcttacaccacataaatttttgatactataggactgacctggactgctgcatttctacttccatgttttccaataagtgcaagataccatcgattttttaagccagcacttagcactagaggagataattatctgtatagcaagcacatcattctactttctagtgtatttttgaatttccagaggccgtttgacaggacagttgaccagaaataaagttcgtgttggtggtatgttacctttattttgtgtacttattacaaagttgcaacaccgaatgcttcgttgactggctaacataatgctggtgagtggaaaacagaatcaattttgaataatgaagctgaaggattagg

SEQ ID NO: 64851 - DNA, 1458 bp, Zea Mays
gaaaaaccgtgttagcatttcaatggaacttgtgacagctgtgttaggagatcatgggcaaaggcccaaggatgattatgctgtggttacagctgtgactgagttgggcaatggcaagccaaaattctattctactccagaggtgattgcattctgtcggaagtggcgcctacctaccaaccatgtgtggttattttcgacaaggaaatctgcctcctcattttttgctgcttatgatgcattatgtgaagaaggaactgcaacacctgtatgcaaaacccttgatgaaatagctgatatagctgtaccagggtcaaaagatcatgtaaaagtgcaaggtgagatccttgaaggtctggttgcccggattgtgcctcgtcaaagtttagtgcaaatggaagaggttttgaaaaactttcctcaggctccatttgacgccggcgactcagatttgggaccaagtttacgagaaatttgtgctgctaataggtcagatgaaaagcagcaaatcaaggcactgcttgaaaatgttggagcttcaatgtgtccagatcattcggattggtttggaactggtggacttgatgctcagtcgcgaaatgctgatagatcagttgttacaaaatttttgcaagcacatcctgcagactatgcaactaagaaactgcaggagatgattcgcttgatgaaacagaggcacttctcagcagctttcaaatgctactggaactaccacaagatcgattctctttcaaatgacaatttgtattacaaaatggttatccatgtgcataatgattctgtttttagacgataccagcaagagatgaggtgagcttgtgaagtcagccttgttattacattaccctttatatcattaactctaaaacctatgctgctgtcgtcaggagaaaccaagggctgtggcctctgtatagaggtttctttgttgatgtgaatttgttcaaggcaaacaataagaaggcagctgaactagccaaagatggtaacactttactgaaaaatatcaatggtgccttggattcaaatggttcagttgtggatggtttggctgatgaggattcaaatctaatggttaaactaaaattcttgacatacaagttgcgaacatttttaattcgtaatggattgtctacccttttcaaagatggaccatctgcttatagaacttactacctaaggcaaatgaagaactggggaacatcaacaaacaaacagagagagcttatcaaattgttggacgagtggtatacctggttgtgcaaagtcagctctgtgtaaggaaatattgaacacacctggtggccttggagatgatcgcccttttcatagcttgatgggggatcttattaaagttcaaatgcagcgcctgtccacttaagaaagggcctcaacttcatcatcattttgggagcatggattgtggaatattcataa

SEQ ID NO: 64852 - DNA, 3210 bp, Zea Mays
gaaaaaccgtgttagcatttcaatggaacttgtgacagctgtgttaggagatcatgggcaaaggcccaaggatgattatgctgtggttacagctgtgactgagttgggcaatggcaagccaaaattctattctactccagaggtgattgcattctgtcggaagtggcgcctacctaccaaccatgtgtggttattttcgacaaggaaatctgcctcctcattttttgctgcttatgatgcattatgtgaagaaggaactgcaacacctgtatgcaaaacccttgatgaaatagctgatatagctgtaccagggtcaaaagatcatgtaaaagtgcaaggtgagatccttgaaggtctggttgcccggattgtgcctcgtcaaagtttagtgcaaatggaagaggttttgaaaaactttcctcaggctccatttgacgccggcgactcagatttgggaccaagtttacgagaaatttgtgctgctaataggtcagatgaaaagcagcaaatcaaggcactgcttgaaaatgttggagcttcaatgtgtccagatcattcggattggtttggaactggtggacttgatgctcagtcgcgaaatgctgatagatcagttgttacaaaatttttgcaagcacatcctgcagactatgcaactaagaaactgcaggagatgattcgcttgatgaaacagaggcacttctcagcagctttcaaatgctactggaactaccacaagatcgattctctttcaaatgacaatttgtattacaaaatggttatccatgtgcataatgattctgtttttagacgataccagcaagagatgaggtgagcttgtgaagtcagccttgttattacattaccctttatatcattaactctaaaacctatgctgctgtcgtcaggagaaaccaagggctgtggcctctgtatagaggtttctttgttgatgtgaatttgttcaaggcaaacaataagaaggcagctgaactagccaaagatggtaacactttactgaaaaatatcaatggtgccttggattcaaatggttcagttgtggatggtttggctgatgaggattcaaatctaatggttaaactaaaattcttgacatacaagatggaccatctgcttatagaacttactacctaaggcaaatgaagaactggggaacatcaacaaacaaacagagagagcttatcaaattgttggacgagtgggctgtattcattagaaggaagtacgggaataagccactctcatcctcgacatatcttagtgaagcagagcctttccttgaacaatacgccaaacgaagccctgcaaaccaggctttgattggggctgctggtaaccttgttcaaactgaaaatttcttggccattcttgacgcaaagagggatgaagagggtgatctccggacagatcatggggcagcaccttctggtcctgtgtcaacatctgttgatgtggttcccaaaacagagggccttatagtgttctttccgggtatacctggttgtgcaaagtcagctctgtgtaaggaaatattgaacacacctggtggccttggagatgatcgcccttttcatagcttgatgggggatcttattaaaggaagatactggcaaaaggtcgctgatgaaagaagaaagaagccagctagaataacccttgctgataaaaatgcaccaaatgaagaagtttggaagcagatcgaggatatgtgtgggtccacaaaggcagctgctgtccctgtggttcctgactcagaaggcacggattcaaatccattttctcttgaggctcttgccgttttcatgtttcgcgtcctccagcgggtcaatcatcctggaaatctggacaaggcctcacctaatgcaggctatgttttgctaatgttttaccacttgtatgatggcaagagtcgaagagaatttgaaaatgaactttatgaacgttttggctcccttgttaagatgcctctcctgaagccagatagagcgccattgcctgatgcggtgaaagccatcttagatgaggggattagcttgttcaagatgcatcggagcaggcatggaagagcagagccatcaaaaggttcatacgctaaagaatgggcacaatgggaacaaaggttgcgtgcgaccttgtttgggaatgctgatcatcttaactcaattcaggttccttttgactatgctgtgaaagcagtactggaacagttaaaagctgttgcaaagggtgatctcaaaacacctgatactgggaagcggaagtttggaaatatcatgtttgctgctgttcgattaaccccgcctgatatattgggccttctccgtaaggtggcagagaaggacacggctgtcgacagttttgtgaacaagataagactggaggacaacctaacgaaggttcacgtcacccttgcccacaaacgaggccatggtgtgtctgctgtcgcaagctatggcatctaccagcaccaggaagtccccgtgtcattcaacgcattgtactacactgacaagatggccgctctcgaggcacagctgggagcagtaaacgatgagccgatcaattccaggaacgagtggccacatgccactctgtggacggctccaggcgtcactccaaaggaggcaaacatgctgccgcagctggcttcagaaggaaaagcagaacgggtgccgattgaccctcccatcaccatatcgggggtggtggacttctactgatttgtctcctcggttttaggatacggatgtgcagaggtgaaggtggaataaagaataatttgctgctgcgggccttacgttattagctgattgtggacaagacaatcgtcgagtcttacaccacataaatttttgatactataggactgacctggactgctgcatttctacttccatgttttccaataagtgcaagataccatcgattttttaagccagcacttagcactagaggagataattatctgtatagcaagcacatcattctactttctagtgtatttttgaatttccagaggccgtttgacaggacagttgaccagaaataaagttcgtgttggtggtatgttacctttattttgtgtacttattacaaagttgcaacaccgaatgcttcgttgactggctaacataatgctggtgagtggaaaacagaatcaattttgaataatgaagctgaaggattagg

SEQ ID NO: 64853 - DNA, 1660 bp, Zea Mays
attgaagggagattgtggttgcgagttggtaattgggtatgtgatttctgaatacaaaagaaaagaaatggaagatactggcaaaaggtcgctgatgaaagaagaaagaagccagctagaataacccttgctgataaaaatgcaccaaatgaagaagtttggaagcagatcgaggatatgtgtgggtccacaaaggcagctgctgtccctgtggttcctgactcagaaggcacggattcaaatccattttctcttgaggctcttgccgttttcatgtttcgcgtcctccagcgggtcaatcatcctggaaatctggacaaggcctcacctaatgcaggctatgttttgctaatgttttaccacttgtatgatggcaagagtcgaagagaatttgaaaatgaactttatgaacgttttggctcccttgttaagatgcctctcctgaagccagatagagcgccattgcctgatgcggtgaaagccatcttagatgaggggattagcttgttcaagatgcatcggagcaggcatggaagagcagagccatcaaaaggttcatacgctaaagaatgggcacaatgggaacaaaggttgcgtgcgaccttgtttgggaatgctgatcatcttaactcaattcaggttccttttgactatgctgtgaaagcagtactggaacagttaaaagctgttgcaaagggtgatctcaaaacacctgatactgggaagcggaagtttggaaatatcatgtttgctgctgttcgattaaccccgcctgatatattgggccttctccgtaaggtggcagagaaggacacggctgtcgacagttttgtgaacaagataagactggaggacaacctaacgaaggttcacgtcacccttgcccacaaacgaggccatggtgtgtctgctgtcgcaagctatggcatctaccagcaccaggaagtccccgtgtcattcaacgcattgtactacactgacaagatggccgctctcgaggcacagctgggagcagtaaacgatgagccgatcaattccaggaacgagtggccacatgccactctgtggacggctccaggcgtcactccaaaggaggcaaacatgctgccgcagctggcttcagaaggaaaagcagaacgggtgccgattgaccctcccatcaccatatcgggggtggtggacttctactgatttgtctcctcggttttaggatacggatgtgcagaggtgaaggtggaataaagaataatttgctgctgcgggccttacgttattagctgattgtggacaagacaatcgtcgagtcttacaccacataaatttttgatactataggactgacctggactgctgcatttctacttccatgttttccaataagtgcaagataccatcgattttttaagccagcacttagcactagaggagataattatctgtatagcaagcacatcattctactttctagtgtatttttgaatttccagaggccgtttgacaggacagttgaccagaaataaagttcgtgttggtggtatgttacctttattttgtgtacttattacaaagttgcaacaccgaatgcttcgttgactggctaacataatgctggtgagtggaaaacagaatcaattttgaataatgaagctgaaggattagg

SEQ ID NO: 64854 - DNA, 1493 bp, Zea Mays
cttagcttgaacttccaaattacagctatgaacttattatgggcttgaagagtccttgagtggcacggattcaaatccattttctcttgaggctcttgccgttttcatgtttcgcgtcctccagcgggtcaatcatcctggaaatctggacaaggcctcacctaatgcaggctatgttttgctaatgttttaccacttgtatgatggcaagagtcgaagagaatttgaaaatgaactttatgaacgttttggctcccttgttaagatgcctctcctgaagccagatagagcgccattgcctgatgcggtgaaagccatcttagatgaggggattagcttgttcaagatgcatcggagcaggcatggaagagcagagccatcaaaaggttcatacgctaaagaatgggcacaatgggaacaaaggttgcgtgcgaccttgtttgggaatgctgatcatcttaactcaattcaggttccttttgactatgctgtgaaagcagtactggaacagttaaaagctgttgcaaagggtgatctcaaaacacctgatactgggaagcggaagtttggaaatatcatgtttgctgctgttcgattaaccccgcctgatatattgggccttctccgtaaggtggcagagaaggacacggctgtcgacagttttgtgaacaagataagactggaggacaacctaacgaaggttcacgtcacccttgcccacaaacgaggccatggtgtgtctgctgtcgcaagctatggcatctaccagcaccaggaagtccccgtgtcattcaacgcattgtactacactgacaagatggccgctctcgaggcacagctgggagcagtaaacgatgagccgatcaattccaggaacgagtggccacatgccactctgtggacggctccaggcgtcactccaaaggaggcaaacatgctgccgcagctggcttcagaaggaaaagcagaacgggtgccgattgaccctcccatcaccatatcgggggtggtggacttctactgatttgtctcctcggttttaggatacggatgtgcagaggtgaaggtggaataaagaataatttgctgctgcgggccttacgttattagctgattgtggacaagacaatcgtcgagtcttacaccacataaatttttgatactataggactgacctggactgctgcatttctacttccatgttttccaataagtgcaagataccatcgattttttaagccagcacttagcactagaggagataattatctgtatagcaagcacatcattctactttctagtgtatttttgaatttccagaggccgtttgacaggacagttgaccagaaataaagttcgtgttggtggtatgttacctttattttgtgtacttattacaaagttgcaacaccgaatgcttcgttgactggctaacataatgctggtgagtggaaaacagaatcaattttgaataatgaagctgaaggattagg

SEQ ID NO: 64855 - DNA, 1868 bp, Zea Mays
caagggtttaaatatgatttttttgaaaaaaaagattaaaataaaaaaattcggtcgagggcgtgtttgtgcggagcgagcgcgtgtgcgtgtgtgtatgaaagctaggatgtacggaacatgtgagaagaagagattatcgctcacagcatgcaaaacagaacaatctcctctccgaattcaatcatccctccgccgcaccactcttcctccgcctctgctccgcttctgcactcagcgtcctccggttgctgacggatccctcttcgccgccgccgccgcggacccaccgtgggagaggaggcgatgcgaggcgaggaggcgggagcgatggaggccgccgactacgggaagctcttcgtcggcggcatctcatgggagacgagcgaggaccgcctccgcgagtacttcggccgcttcggcgaggtcaccgaggctgccatcatgcgggaccgcagcacggggcgtgcccgcgggttcgggttcgtggtcttcaccgacgcagcggtcgccgagcgcgtcaccatggagaaacatatgatcgacggacgaatggtggaagcaaagaaggctgttcccagagacgaccacagtattgtgagcaagagcaatggcagaagcacagggtcacctggaccgggacgcactaggaagatctttgttggaggcctgccctcgagcatcacggaggctgacttcaggaggtattttgagcagttcggtgtcataactgatgtggtcaagaaggctgttccaaaggagcagtctcctggacctgttgcacgctcacccgtgggagtggggcagaactatgctgcgaacagggttcatagcttcctcaatggcttcaaccagggttacaatccaatccccatgggaggttacggcatgagggtggatggaaggtatggcttcctttcaggtgcacgaaatgggttctcttcttttggcccagggtatgggatgggtatgaatgttgaaggtgggatgagcggaacatttggtgcaacctctggtttcatcagcaactccaacgggaggcaaatgggttcgtacttcaatgcaagttcgaacagattgggtagccctattgggtaccttggtcttaatgatgttcctgggtcaatgttgggttccatgtctaggaatgtttggggtaatgggagtctaaactatccgagcaatcctgcaaacatgagtgcttttgcttcaccaggaaatgggggccaagtcagtcttacaggtgacaattggggaggtcttccttctgctcatgggataggcaacatttcaggccttggatcagggaaccttggtcgtggagctggagataataactttggtttgccttctggcagctatggaagaagcaactcaactggtacaattggtgagcctttttctgcagcaggcaatacatatgatgtaaacaatgcagatacatatgggagcagctctgtttatggtggcacagtctggaggttcacatcatctgaggttgacatgcattcttttggtcatgatattggaaatgttggtccgacaatcaaatgagacatgtcagcaagtcacatgggcaactaccctgttaacaacaatcagccaagcagaggatatttgactggaaatggacttttggcgacatgattatcagagtgctcgtgcagaatgctacctgccagtcatggccagttgacgctcacggaggggtgctccaggacgaacggtaattcaattttgacgtgggaccttggccgccagcaatctacaacagttgctggaaccaccgagcttgccttctacagcgggtggtttctcactgcacatcggcttgtgtctgtgtgattagccccctcttgattttggat

SEQ ID NO: 64856 - DNA, 2065 bp, Zea Mays
tttaaatatgatttttttgaaaaaaaagattaaaataaaaaaattcggtcgagggcgtgtttgtgcggagcgagcgcgtgtgcgtgtgtgtatgaaagctaggatgtacggaacatgtgagaagaagagattatcgctcacagcatgcaaaacagaacaatctcctctccgaattcaatcatccctccgccgcaccactcttcctccgcctctgctccgcttctgcactcagcgtcctccggttgctgacggatccctcttcgccgccgccgccgcggacccaccgtgggagaggaggcgatgcgaggcgaggaggcgggagcgatggaggccgccgactacgggaagctcttcgtcggcggcatctcatgggagacgagcgaggaccgcctccgcgagtacttcggccgcttcggcgaggtcaccgaggctgccatcatgcgggaccgcagcacggggcgtgcccgcgggttcgggttcgtggtcttcaccgacgcagcggtcgccgagcgcgtcaccatggagaaacatatgatcgacggacgaatggtggaagcaaagaaggctgttcccagagacgaccacagtattgtgagcaagagcaatggcagaagcacagggtcacctggaccgggacgcactaggaagatctttgttggaggcctgccctcgagcatcacggaggctgacttcaggaggtattttgagcagttcggtgtcataactgatgtggttgtgatgtatgatcacaacacgcagagaccgaggggctttggattcatcacctatgattcatcacctatgtacctgggtcattatgaccctttattttccctctactttaatatatgggtgcgcagtcctcctgcgctctttcgagaaaaaaaaaagccctgcacaagagctttcatgagctaaatggtaaaatggttgaggtcaagaaggctgttccaaaggagcagtctcctggacctgttgcacgctcacccgtgggagtggggcagaactatgctgcgaacagggttcatagcttcctcaatggcttcaaccagggttacaatccaatccccatgggaggttacggcatgagggtggatggaaggtatggcttcctttcaggtgcacgaaatgggttctcttcttttggcccagggtatgggatgggtatgaatgttgaaggtgggatgagcggaacatttggtgcaacctctggtttcatcagcaactccaacgggaggcaaatgggttcgtacttcaatgcaagttcgaacagattgggtagccctattgggtaccttggtcttaatgatgttcctgggtcaatgttgggttccatgtctaggaatgtttggggtaatgggagtctaaactatccgagcaatcctgcaaacatgagtgcttttgcttcaccaggaaatgggggccaagtcagtcttacaggtgacaattggggaggtcttccttctgctcatgggataggcaacatttcaggccttggatcagggaaccttggtcgtggagctggagataataactttggtttgccttctggcagctatggaagaagcaactcaactggtacaattggtgagcctttttctgcagcaggcaatacatatgatgtaaacaatgcagatacatatgggagcagctctgtttatggtggcacagtctggaggttcacatcatctgaggttgacatgcattcttttggtcatgatattggaaatgttggtccgacaatcaaatgagacatgtcagcaagtcacatgggcaactaccctgttaacaacaatcagccaagcagaggatatttgactggaaatggacttttggcgacatgattatcagagtgctcgtgcagaatgctacctgccagtcatggccagttgacgctcacggaggggtgctccaggacgaacggtaattcaattttgacgtgggaccttggccgccagcaatctacaacagttgctggaaccaccgagcttgccttctacagcgggtggtttctcactgcacatcggcttgtgtctgtgtgattagccccctcttgattttggat

SEQ ID NO: 64857 - DNA, 1907 bp, Zea Mays
aaaataaaaaaattcggtcgagggcgtgtttgtgcggagcgagcgcgtgtgcgtgtgtgtatgaaagctaggatgtacggaacatgtgagaagaagagattatcgctcacagcatgcaaaacagaacaatctcctctccgaattcaatcatccctccgccgcaccactcttcctccgcctctgctccgcttctgcactcagcgtcctccggttgctgacggatccctcttcgccgccgccgccgcggacccaccgtgggagaggaggcgatgcgaggcgaggaggcgggagcgatggaggccgccgactacgggaagctcttcgtcggcggcatctcatgggagacgagcgaggaccgcctccgcgagtacttcggccgcttcggcgaggtcaccgaggctgccatcatgcgggaccgcagcacggggcgtgcccgcgggttcgggttcgtggtcttcaccgacgcagcggtcgccgagcgcgtcaccatggagaaacatatgatcgacggacgaatggtggaagcaaagaaggctgttcccagagacgaccacagtattgtgagcaagagcaatggcagaagcacagggtcacctggaccgggacgcactaggaagatctttgttggaggcctgccctcgagcatcacggaggctgacttcaggaggtattttgagcagttcggtgtcataactgatgtggtcaagaaggctgttccaaaggagcagtctcctggacctgttgcacgctcacccgtgggagtggggcagaactatgctgcgaacagggttcatagcttcctcaatggcttcaaccagggttacaatccaatccccatgggaggttacggcatgagggtggatggaaggtatggcttcctttcaggtgcacgaaatgggttctcttcttttggcccagggtatgggatgggtatgaatgttgaaggtgggatgagcggaacatttggtgcaacctctggtttcatcagcaactccaacgggaggcaaatgggttcgtacttcaatgcaagttcgaacagattgggtagccctattgggtaccttggtcttaatgatgttcctgggtcaatgttgggttccatgtctaggaatgtttggggtaatgggagtctaaactatccgagcaatcctgcaaacatgagtgcttttgcttcaccaggaaatgggggccaagtcagtcttacaggtgacaattggggaggtcttccttctgctcatgggataggcaacatttcaggccttggatcagggaaccttggtcgtggagctggagataataactttggtttgccttctggcagctatggaagaagcaactcaactggtacaattggtgagcctttttctgcagcaggcaatacatatgatgtaaacaatgcagatacatatgggagcagctctgtttatggtggcacagtctggaggttcacatcatctgaggttgacatgcattcttttggtcatgatattggaaatgttggtccgacaatcaaatgagacatgtcagcaagtcacatgggcaactaccctgttaacaacaatcagccaagcagagtgatatattgtgcacttcaactgtacaagaagcactgtgcaaacttcttgctctttatttggtgatattgggataggatatttgactggaaatggacttttggcgacatgattatcagagtgctcgtgcagaatgctacctgccagtcatggccagttgacgctcacggaggggtgctccaggacgaacggtaattcaattttgacgtgggaccttggccgccagcaatctacaacagttgctggaaccaccgagcttgccttctacagcgggtggtttctcactgcacatcggcttgtgtctgtgtgattagccccctcttgattttggat

SEQ ID NO: 64858 - DNA, 1303 bp, Zea Mays
gtcgagggcgtgtttgtgcggagcgagcgcgtgtgcgtgtgtgtatgaaagctaggatgtacggaacatgtgagaagaagagattatcgctcacagcatgcaaaacagaacaatctcctctccgaattcaatcatccctccgccgcaccactcttcctccgcctctgctccgcttctgcactcagcgtcctccggttgctgacggatccctcttcgccgccgccgccgcggacccaccgtgggagaggaggcgatgcgaggcgaggaggcgggagcgatggaggccgccgactacgggaagctcttcgtcggcggcatctcatgggagacgagcgaggaccgcctccgcgagtacttcggccgcttcggcgaggtcaccgaggctgccatcatgcgggaccgcagcacggggcgtgcccgcgggttcgggttcgtggtcttcaccgacgcagcggtcgccgagcgcgtcaccatggagaaacatatgatcgacggacgaatggtggaagcaaagaaggctgttcccagagacgaccacagtattgtgagcaagagcaatggcagaagcacagggtcacctggaccgggacgcactaggaagatctttgttggaggcctgccctcgagcatcacggaggctgacttcaggaggaaatgggggccaagtcagtcttacaggtgacaattggggaggtcttccttctgctcatgggataggcaacatttcaggccttggatcagggaaccttggtcgtggagctggagataataactttggtttgccttctggcagctatggaagaagcaactcaactggtacaattggtgagcctttttctgcagcaggcaatacatatgatgtaaacaatgcagatacatatgggagcagctctgtttatggtggcacagtctggaggttcacatcatctgaggttgacatgcattcttttggtcatgatattggaaatgttggtccgacaatcaaatgagacatgtcagcaagtcacatgggcaactaccctgttaacaacaatcagccaagcagaggatatttgactggaaatggacttttggcgacatgattatcagagtgctcgtgcagaatgctacctgccagtcatggccagttgacgctcacggaggggtgctccaggacgaacggtaattcaattttgacgtgggaccttggccgccagcaatctacaacagttgctggaaccaccgagcttgccttctacagcgggtggtttctcactgcacatcggcttgtgtctgtgtgattagccccctcttgattttggat

SEQ ID NO: 64859 - DNA, 1699 bp, Zea Mays
aagaagagattatcgctcacagcatgcaaaacagaacaatctcctctccgaattcaatcatccctccgccgcaccactcttcctccgcctctgctccgcttctgcactcagcgtcctccggttgctgacggatccctcttcgccgccgccgccgcggacccaccgtgggagaggaggcgatgcgaggcgaggaggcgggagcgatggaggccgccgactacgggaagctcttcgtcggcggcatctcatgggagacgagcgaggaccgcctccgcgagtacttcggccgcttcggcgaggtcaccgaggctgccatcatgcgggaccgcagcacggggcgtgcccgcgggttcgggttcgtggtcttcaccgacgcagcggtcgccgagcgcgtcaccatggagaaacatatgatcgacggacgaatggtggaagcaaagaaggctgttcccagagacgaccacagtattgtgagcaagagcaatggcagaagcacagggtcacctggaccgggacgcactaggaagatctttgttggaggcctgccctcgagcatcacggaggctgacttcaggaggtattttgagcagttcggtgtcataactgatgtggtcaagaaggctgttccaaaggagcagtctcctggacctgttgcacgctcacccgtgggagtggggcagaactatgctgcgaacagggttcatagcttcctcaatggcttcaaccagggttacaatccaatccccatgggaggttacggcatgagggtggatggaaggtatggcttcctttcaggtgcacgaaatgggttctcttcttttggcccagggtatgggatgggtatgaatgttgaaggtgggatgagcggaacatttggtgcaacctctggtttcatcagcaactccaacgggaggcaaatgggttcgtacttcaatgcaagttcgaacagattgggtagccctattgggtaccttggtcttaatgatgttcctgggtcaatgttgggttccatgtctaggaatgtttggggtaatgggagtctaaactatccgagcaatcctgcaaacatgagtgcttttgcttcaccaggaaatgggggccaagtcagtcttacaggtgacaattggggaggtcttccttctgctcatgggataggcaacatttcaggccttggatcagggaaccttggtcgtggagctggagataataactttggtttgccttctggcagctatggaagaagcaactcaactggtacaattggtgagcctttttctgcagcaggcaatacatatgatgtaaacaatgcagatacatatgggagcagctctgtttatggtggcacagtctggaggttcacatcatctgaggttgacatgcattcttttggtcatgatattggaaatgttggtccgacaatcaaatgagacatgtcagcaagtcacatgggcaactaccctgttaacaacaatcagccaagcagagagtgctcgtgcagaatgctacctgccagtcatggccagttgacgctcacggaggggtgctccaggacgaacggtaattcaattttgacgtgggaccttggccgccagcaatctacaacagttgctggaaccaccgagcttgccttctacagcgggtggtttctcactgcacatcggcttgtgtctgtgtgattagccccctcttgattttggat

SEQ ID NO: 64860 - DNA, 3050 bp, Zea Mays
aagaagagattatcgctcacagcatgcaaaacagaacaatctcctctccgaattcaatcatccctccgccgcaccactcttcctccgcctctgctccgcttctgcactcagcgtcctccggttgctgacggatccctcttcgccgccgccgccgcggacccaccgtgggagaggaggcgatgcgaggcgaggaggcgggagcgatggaggccgccgactacgggaagctcttcgtcggcggcatctcatgggagacgagcgaggaccgcctccgcgagtacttcggccgcttcggcgaggtcaccgaggctgccatcatgcgggaccgcagcacggggcgtgcccgcgggttcgggttcgtggtcttcaccgacgcagcggtcgccgagcgcgtcaccatggagaaacatatgatcgacggacgaatggtggaagcaaagaaggctgttcccagagacgaccacagtattgtgagcaagagcaatggcagaagcacagggtcacctggaccgggacgcactaggaagatctttgttggaggcctgccctcgagcatcacggaggctgacttcaggaggtattttgagcagttcggtgtcataactgatgtggttgtgatgtatgatcacaacacgcagagaccgaggggctttggattcatcacctatgattcatcacctatgtacctgggtcattatgaccctttattttccctctactttaatatatgggtgcgcagtcctcctgcgctctttcgagaaaaaaaaaagccctgcacaagagctttcatgagctaaatggtaaaatggttgaggtcaagaaggctgttccaaaggagcagtctcctggacctgttgcacgctcacccgtgggagtggggcagaactatgctgcgaacagggttcatagcttcctcaatggcttcaaccagggttacaatccaatccccatgggaggttacggcatgagggtggatggaaggtatggcttcctttcaggtgcacgaaatgggttctcttcttttggcccagggtatgggatgggtatgaatgttgaaggtgggatgagcggaacatttggtgcaacctctggtttcatcagcaactccaacgggaggcaaatgggttcgtacttcaatgcaagttcgaacagattgggtagccctattgggtaccttggtcttaatgatgttcctgggtcaatgttgggttccatgtctaggaatgtttggggtaatgggagtctaaactatccgagcaatcctgcaaacatgagtgcttttgcttcaccaggaaatgggggccaagtcagtcttacaggtgacaattggggaggtcttccttctgctcatgggataggcaacatttcaggccttggatcagggaaccttggtcgtggagctggagataataactttggtttgccttctggcagctatggaagaagcaactcaactggtacaattggtgagcctttttctgcagcaggcaatacatatgatgtaaacaatgcagatacatatgggagcagctctgtttatggtggcacagtctggaggttcacatcatctgaggttgacatgcattcttttggtcatgatattggaaatgttggtccgacaatcaaatgagacatgtcagcaagtcacatgggcaactaccctgttaacaacaatcagccaagcagaggtcagtttccatttcaacatttttctctggaattcttaattacacatagattttcctttttgtaaaaaggaagtatgctgcataaatgtgttaatcacttcaatggcttgggaaaaaagtgaagcatgtctccactttttggtttaggaaagcattgcatctattcaatctgtatacaagtttcatggcactgcctttgttgtgggctcctttaaattttatttataattgaagtaacttgagtactgcacatgtaacatatttggttagtctgtgctaattagaggttgagttttgttacatgttgactgactgatgtagtgatgttctcccatgtcaaaataaaaacgagaaatcatatagttttgatgtcctgtggtcctatgacatttatagaacttgacaatagataatatgtacatgtatagaacactttgtagacttgttcttgtctgaacactgacggctacattagggccatagagggccctcaccccccccccccccctcctgccgtgcgtcaagttccaagtatcgtcatgtgcaagtgcatgcatatttccatgcagtctgcttgcatggctgcatgcatagctgttttgtctattcctgcttaccattagaccttaactgactagttgcctgctgcatgcaagcttgctagctatctggcagctcatgatgcatgcttgcccacagcagcatgttcttgttgtttgtttggcccctgcttgctttcagcactagctccgccactgcgtatcaacgtgacatgtgcatcttcacagttagatagataatttagattgttactttgcagcatagtgaatttgtcatgctattcagctattgtttccatgtattcaaattgagtttttgattttatttgtattttctaagcattttattggtttcttcagttgagttacaacttacgcaaataatattaataggagtagactactagactgtagtactgaattgtaatcgaagtatttgaattcactggtttatttgcccttgcacttagtgatatattgtgcacttcaactgtacaagaagcactgtgcaaacttcttgctctttatttggtgatattgggataggatatttgactggaaatggacttttggcgacatgattatcagagtgctcgtgcagaatgctacctgccagtcatggccagttgacgctcacggaggggtgctccaggacgaacggtaattcaattttgacgtgggaccttggccgccagcaatctacaacagttgctggaaccaccgagcttgccttctacagcgggtggtttctcactgcacatcggcttgtgtctgtgtgattagccccctcttgattttggat

SEQ ID NO: 64861 - DNA, 1830 bp, Zea Mays
aagaagagattatcgctcacagcatgcaaaacagaacaatctcctctccgaattcaatcatccctccgccgcaccactcttcctccgcctctgctccgcttctgcactcagcgtcctccggttgctgacggatccctcttcgccgccgccgccgcggacccaccgtgggagaggaggcgatgcgaggcgaggaggcgggagcgatggaggccgccgactacgggaagctcttcgtcggcggcatctcatgggagacgagcgaggaccgcctccgcgagtacttcggccgcttcggcgaggtcaccgaggctgccatcatgcgggaccgcagcacggggcgtgcccgcgggttcgggttcgtggtcttcaccgacgcagcggtcgccgagcgcgtcaccatggagaaacatatgatcgacggacgaatggtggaagcaaagaaggctgttcccagagacgaccacagtattgtgagcaagagcaatggcagaagcacagggtcacctggaccgggacgcactaggaagatctttgttggaggcctgccctcgagcatcacggaggctgacttcaggaggtattttgagcagttcggtgtcataactgatgtggttgtgatgtatgatcacaacacgcagagaccgaggggctttggattcatcacctatgattcatcacctatgtacctgggtcattatgaccctttattttccctctactttaatatatgggtgcgcagtcctcctgcgctctttcgagaaaaaaaaaagccctgcacaagagctttcatgagctaaatggtaaaatggttgaggtcaagaaggctgttccaaaggagcagtctcctggacctgttgcacgctcacccgtgggagtggggcagaactatgctgcgaacagggttcatagcttcctcaatggcttcaaccagggttacaatccaatccccatgggaggttacggcatgagggtggatggaaggtatggcttcctttcaggtgcacgaaatgggttctcttcttttggcccagggtatgggatgggtatgaatgttgaaggtgggatgagcggaacatttggtgcaacctctggtttcatcagcaactccaacgggaggcaaatgggttcgtacttcaatgcaagttcgaacagattgggtagccctattgggtaccttggtcttaatgatgttcctgggtcaatgttgggttccatgtctaggaatgtttggggtaatgggagtctaaactatccgagcaatcctgcaaacatgagtgcttttgcttcaccaggaaatgggggccaagtcagtcttacaggtgacaattggggaggtcttccttctgctcatgggataggcaacatttcaggccttggatcagggaaccttggtcgtggagctggagataataactttggtttgccttctggcagctatggaagaagcaactcaactggtacaattggtgagcctttttctgcagcaggcaatacatatgatgtaaacaatgcagatacatatgggagcagctctgtttatggtggcacagtctggaggttcacatcatctgaggttgacatgcattcttttggtcatgatattggaaatgttggtccgacaatcaaatgagacatgtcagcaagtcacatgggcaactaccctgttaacaacaatcagccaagcagaggtaattcaattttgacgtgggaccttggccgccagcaatctacaacagttgctggaaccaccgagcttgccttctacagcgggtggtttctcactgcacatcggcttgtgtctgtgtgattagccccctcttgattttggat

SEQ ID NO: 64862 - DNA, 1902 bp, Zea Mays
aagaagagattatcgctcacagcatgcaaaacagaacaatctcctctccgaattcaatcatccctccgccgcaccactcttcctccgcctctgctccgcttctgcactcagcgtcctccggttgctgacggatccctcttcgccgccgccgccgcggacccaccgtgggagaggaggcgatgcgaggcgaggaggcgggagcgatggaggccgccgactacgggaagctcttcgtcggcggcatctcatgggagacgagcgaggaccgcctccgcgagtacttcggccgcttcggcgaggtcaccgaggctgccatcatgcgggaccgcagcacggggcgtgcccgcgggttcgggttcgtggtcttcaccgacgcagcggtcgccgagcgcgtcaccatggagaaacatatgatcgacggacgaatggtggaagcaaagaaggctgttcccagagacgaccacagtattgtgagcaagagcaatggcagaagcacagggtcacctggaccgggacgcactaggaagatctttgttggaggcctgccctcgagcatcacggaggctgacttcaggaggtattttgagcagttcggtgtcataactgatgtggttgtgatgtatgatcacaacacgcagagaccgaggggctttggattcatcacctatgattcatcacctatgtacctgggtcattatgaccctttattttccctctactttaatatatgggtgcgcagtcctcctgcgctctttcgagaaaaaaaaaagccctgcacaagagctttcatgagctaaatggtaaaatggttgaggtcaagaaggctgttccaaaggagcagtctcctggacctgttgcacgctcacccgtgggagtggggcagaactatgctgcgaacagggttcatagcttcctcaatggcttcaaccagggttacaatccaatccccatgggaggttacggcatgagggtggatggaaggtatggcttcctttcaggtgcacgaaatgggttctcttcttttggcccagggtatgggatgggtatgaatgttgaaggtgggatgagcggaacatttggtgcaacctctggtttcatcagcaactccaacgggaggcaaatgggttcgtacttcaatgcaagttcgaacagattgggtagccctattgggtaccttggtcttaatgatgttcctgggtcaatgttgggttccatgtctaggaatgtttggggtaatgggagtctaaactatccgagcaatcctgcaaacatgagtgcttttgcttcaccaggaaatgggggccaagtcagtcttacaggtgacaattggggaggtcttccttctgctcatgggataggcaacatttcaggccttggatcagggaaccttggtcgtggagctggagataataactttggtttgccttctggcagctatggaagaagcaactcaactggtacaattggtgagcctttttctgcagcaggcaatacatatgatgtaaacaatgcagatacatatgggagcagctctgtttatggtggcacagtctggaggttcacatcatctgaggttgacatgcattcttttggtcatgatattggaaatgttggtccgacaatcaaatgagacatgtcagcaagtcacatgggcaactaccctgttaacaacaatcagccaagcagagagtgctcgtgcagaatgctacctgccagtcatggccagttgacgctcacggaggggtgctccaggacgaacggtaattcaattttgacgtgggaccttggccgccagcaatctacaacagttgctggaaccaccgagcttgccttctacagcgggtggtttctcactgcacatcggcttgtgtctgtgtgattagccccctcttgattttggat

SEQ ID NO: 64863 - DNA, 2505 bp, Zea Mays
aagaagagattatcgctcacagcatgcaaaacagaacaatctcctctccgaattcaatcatccctccgccgcaccactcttcctccgcctctgctccgcttctgcactcagcgtcctccggttgctgacggatccctcttcgccgccgccgccgcggacccaccgtgggagaggaggcgatgcgaggcgaggaggcgggagcgatggaggccgccgactacgggaagctcttcgtcggcggcatctcatgggagacgagcgaggaccgcctccgcgagtacttcggccgcttcggcgaggtcaccgaggctgccatcatgcgggaccgcagcacggggcgtgcccgcgggttcgggttcgtggtcttcaccgacgcagcggtcgccgagcgcgtcaccatggagaaacatatgatcgacggacgaatggtggaagcaaagaaggctgttcccagagacgaccacagtattgtgagcaagagcaatggcagaagcacagggtcacctggaccgggacgcactaggaagatctttgttggaggcctgccctcgagcatcacggaggctgacttcaggaggaaatgggggccaagtcagtcttacaggtgacaattggggaggtcttccttctgctcatgggataggcaacatttcaggccttggatcagggaaccttggtcgtggagctggagataataactttggtttgccttctggcagctatggaagaagcaactcaactggtacaattggtgagcctttttctgcagcaggcaatacatatgatgtaaacaatgcagatacatatgggagcagctctgtttatggtggcacagtctggaggttcacatcatctgaggttgacatgcattcttttggtcatgatattggaaatgttggtccgacaatcaaatgagacatgtcagcaagtcacatgggcaactaccctgttaacaacaatcagccaagcagaggtcagtttccatttcaacatttttctctggaattcttaattacacatagattttcctttttgtaaaaaggaagtatgctgcataaatgtgttaatcacttcaatggcttgggaaaaaagtgaagcatgtctccactttttggtttaggaaagcattgcatctattcaatctgtatacaagtttcatggcactgcctttgttgtgggctcctttaaattttatttataattgaagtaacttgagtactgcacatgtaacatatttggttagtctgtgctaattagaggttgagttttgttacatgttgactgactgatgtagtgatgttctcccatgtcaaaataaaaacgagaaatcatatagttttgatgtcctgtggtcctatgacatttatagaacttgacaatagataatatgtacatgtatagaacactttgtagacttgttcttgtctgaacactgacggctacattagggccatagagggccctcaccccccccccccccctcctgccgtgcgtcaagttccaagtatcgtcatgtgcaagtgcatgcatatttccatgcagtctgcttgcatggctgcatgcatagctgttttgtctattcctgcttaccattagaccttaactgactagttgcctgctgcatgcaagcttgctagctatctggcagctcatgatgcatgcttgcccacagcagcatgttcttgttgtttgtttggcccctgcttgctttcagcactagctccgccactgcgtatcaacgtgacatgtgcatcttcacagttagatagataatttagattgttactttgcagcatagtgaatttgtcatgctattcagctattgtttccatgtattcaaattgagtttttgattttatttgtattttctaagcattttattggtttcttcagttgagttacaacttacgcaaataatattaataggagtagactactagactgtagtactgaattgtaatcgaagtatttgaattcactggtttatttgcccttgcacttagtgatatattgtgcacttcaactgtacaagaagcactgtgcaaacttcttgctctttatttggtgatattgggataggatatttgactggaaatggacttttggcgacatgattatcagagtgctcgtgcagaatgctacctgccagtcatggccagttgacgctcacggaggggtgctccaggacgaacggtagaagcttcctacatatatgactgcagctagtattttattggttcccctttatgatttgacttttcatcttatgtgtgaaagcagtatagtgcatcgcgctggcatagaataagttggaccgtactatcataaattgttaattcctaaaattgagctacctttgctaggtaattcaattttgacgtgggaccttggccgccagcaatctacaacagttgctggaaccaccgagcttgccttctacagcgggtggtttctcactgcacatcggcttgtgtctgtgtgattagccccctcttgattttggat

SEQ ID NO: 64864 - DNA, 1889 bp, Zea Mays
aagaagagattatcgctcacagcatgcaaaacagaacaatctcctctccgaattcaatcatccctccgccgcaccactcttcctccgcctctgctccgcttctgcactcagcgtcctccggttgctgacggatccctcttcgccgccgccgccgcggacccaccgtgggagaggaggcgatgcgaggcgaggaggcgggagcgatggaggccgccgactacgggaagctcttcgtcggcggcatctcatgggagacgagcgaggaccgcctccgcgagtacttcggccgcttcggcgaggtcaccgaggctgccatcatgcgggaccgcagcacggggcgtgcccgcgggttcgggttcgtggtcttcaccgacgcagcggtcgccgagcgcgtcaccatggagaaacatatgatcgacggacgaatggtggaagcaaagaaggctgttcccagagacgaccacagtattgtgagcaagagcaatggcagaagcacagggtcacctggaccgggacgcactaggaagatctttgttggaggcctgccctcgagcatcacggaggctgacttcaggaggtattttgagcagttcggtgtcataactgatgtggttgtgatgtatgatcacaacacgcagagaccgaggggctttggattcatcacctatgattcatcacctatgtacctgggtcattatgaccctttattttccctctactttaatatatgggtgcgcagtcctcctgcgctctttcgagaaaaaaaaaagccctgcacaagagctttcatgagctaaatggtaaaatggttgaggtcaagaaggctgttccaaaggagcagtctcctggacctgttgcacgctcacccgtgggagtggggcagaactatgctgcgaacagggttcatagcttcctcaatggcttcaaccagggttacaatccaatccccatgggaggttacggcatgagggtggatggaaggtatggcttcctttcaggtgcacgaaatgggttctcttcttttggcccagggtatgggatgggtatgaatgttgaaggtgggatgagcggaacatttggtgcaacctctggtttcatcagcaactccaacgggaggcaaatgggttcgtacttcaatgcaagttcgaacagattgggtagccctattgggtaccttggtcttaatgatgttcctgggtcaatgttgggttccatgtctaggaatgtttggggtaatgggagtctaaactatccgagcaatcctgcaaacatgagtgcttttgcttcaccaggaaatgggggccaagtcagtcttacaggtgacaattggggaggtcttccttctgctcatgggataggcaacatttcaggccttggatcagggaaccttggtcgtggagctggagataataactttggtttgccttctggcagctatggaagaagcaactcaactggtacaattggtgagcctttttctgcagcaggcaatacatatgatgtaaacaatgcagatacatatgggagcagctctgtttatggtggcacagtctggaggttcacatcatctgaggttgacatgcattcttttggtcatgatattggaaatgttggtccgacaatcaaatgagacatgtcagcaagtcacatgggcaactaccctgttaacaacaatcagccaagcagagaatgctacctgccagtcatggccagttgacgctcacggaggggtgctccaggacgaacggtaattcaattttgacgtgggaccttggccgccagcaatctacaacagttgctggaaccaccgagcttgccttctacagcgggtggtttctcactgcacatcggcttgtgtctgtgtgattagccccctcttgattttggat

SEQ ID NO: 64865 - DNA, 1695 bp, Zea Mays
ctctgccccgatcggcgccggtccgccggatcacgccggggccagccggatctgctacggatctcgcctgccacgtgcgtagttctgcgatcgccacgtcgcgctcggctaggatccagtgggagaggaggcgatgcgaggcgaggaggcgggagcgatggaggccgccgactacgggaagctcttcgtcggcggcatctcatgggagacgagcgaggaccgcctccgcgagtacttcggccgcttcggcgaggtcaccgaggctgccatcatgcgggaccgcagcacggggcgtgcccgcgggttcgggttcgtggtcttcaccgacgcagcggtcgccgagcgcgtcaccatggagaaacatatgatcgacggacgaatggtggaagcaaagaaggctgttcccagagacgaccacagtattgtgagcaagagcaatggcagaagcacagggtcacctggaccgggacgcactaggaagatctttgttggaggcctgccctcgagcatcacggaggctgacttcaggaggtattttgagcagttcggtgtcataactgatgtggtcaagaaggctgttccaaaggagcagtctcctggacctgttgcacgctcacccgtgggagtggggcagaactatgctgcgaacagggttcatagcttcctcaatggcttcaaccagggttacaatccaatccccatgggaggttacggcatgagggtggatggaaggtatggcttcctttcaggtgcacgaaatgggttctcttcttttggcccagggtatgggatgggtatgaatgttgaaggtgggatgagcggaacatttggtgcaacctctggtttcatcagcaactccaacgggaggcaaatgggttcgtacttcaatgcaagttcgaacagattgggtagccctattgggtaccttggtcttaatgatgttcctgggtcaatgttgggttccatgtctaggaatgtttggggtaatgggagtctaaactatccgagcaatcctgcaaacatgagtgcttttgcttcaccaggaaatgggggccaagtcagtcttacaggtgacaattggggaggtcttccttctgctcatgggataggcaacatttcaggccttggatcagggaaccttggtcgtggagctggagataataactttggtttgccttctggcagctatggaagaagcaactcaactggtacaattggtgagcctttttctgcagcaggcaatacatatgatgtaaacaatgcagatacatatgggagcagctctgtttatggtggcacagtctggaggttcacatcatctgaggttgacatgcattcttttggtcatgatattggaaatgttggtccgacaatcaaatgagacatgtcagcaagtcacatgggcaactaccctgttaacaacaatcagccaagcagaggatatttgactggaaatggacttttggcgacatgattatcagagtgctcgtgcagaatgctacctgccagtcatggccagttgacgctcacggaggggtgctccaggacgaacggtaattcaattttgacgtgggaccttggccgccagcaatctacaacagttgctggaaccaccgagcttgccttctacagcgggtggtttctcactgcacatcggcttgtgtctgtgtgattagccccctcttgattttggat

SEQ ID NO: 64866 - DNA, 1487 bp, Zea Mays
cacgtcgcgctcggctaggatccagtgggagaggaggcgatgcgaggcgaggaggcgggagcgatggaggccgccgactacgggaagctcttcgtcggcggcatctcatgggagacgagcgaggaccgcctccgcgagtacttcggccgcttcggcgaggtcaccgaggctgccatcatgcgggaccgcagcacggggcgtgcccgcgggttcgggttcgtggtcttcaccgacgcagcggtcgccgagcgcgtcaccatggagaaacatatgatcgacggacgaatggtggaagcaaagaaggctgttcccagagacgaccacagtattgtgagcaagagcaatggcagaagcacagggtcacctggaccgggacgcactaggaagatctttgttggaggcctgccctcgagcatcacggaggctgacttcaggaggtattttgagcagttcggtgtcataactgatgtggtcaagaaggctgttccaaaggagcagtctcctggacctgttgcacgctcacccgtgggagtggggcagaactatgctgcgaacagggttcatagcttcctcaatggcttcaaccagggttacaatccaatccccatgggaggttacggcatgagggtggatggaaggtatggcttcctttcaggtgcacgaaatgggttctcttcttttggcccagggtatgggatgggtatgaatgttgaaggtgggatgagcggaacatttggtgcaacctctggtttcatcagcaactccaacgggaggcaaatgggttcgtacttcaatgcaagttcgaacagattgggtagccctattgggtaccttggtcttaatgatgttcctgggtcaatgttgggttccatgtctaggaatgtttggggtaatgggagtctaaactatccgagcaatcctgcaaacatgagtgcttttgcttcaccaggaaatgggggccaagtcagtcttacaggtgacaattggggaggtcttccttctgctcatgggataggcaacatttcaggccttggatcagggaaccttggtcgtggagctggagataataactttggtttgccttctggcagctatggaagaagcaactcaactggtacaattggtgagcctttttctgcagcaggcaatacatatgatgtaaacaatgcagatacatatgggagcagctctgtttatggtggcacagtctggaggttcacatcatctgaggttgacatgcattcttttggtcatgatattggaaatgttggtccgacaatcaaatgagacatgtcagcaagtcacatgggcaactaccctgttaacaacaatcagccaagcagaggtaattcaattttgacgtgggaccttggccgccagcaatctacaacagttgctggaaccaccgagcttgccttctacagcgggtggtttctcactgcacatcggcttgtgtctgtgtgattagccccctcttgattttggat

SEQ ID NO: 64867 - DNA, 2940 bp, Zea Mays
attttgacgaacgccgctcgattaaatgacccatttttacgagttcaccgagaggcggtgtatttcgcagagcgcctgttttgccaaattcctcgtttggttccacgccggacgcatcctcccacgctcgggccgggcgcgtgaacccctcgccgccgtcgcagtcccgttgccggagggcgagagggacgagaaagaagagggcaagatgaagacgaccaaggggggcaaggcgatgaaccccacagacgcgttccgcaaggagcagcggaagaaggagctcaagcggaacaaaaaggaaaggaagaaagtgcgggatgttggcattttgaaaaaggatccggaggctatatgggagcagattgagaaattggagaagatgaaggctgatggtgctctggacaaggctaggaagcataagaaaagacagcttgaggatacatacaatcttattgttaagaaacgaatatgaacagaaaatgaaagagaagggtgaacaaccgattatgttcagccatcttgcaccaccaaagaggcggcctacaggagatgaagatggtagagctaatcctaagcccgaggactctgtttactatcatccaaccttaaatccatctggagcaccgccacctggaaaacctccgatggccaaggatcccaccgccttcctcatccagcactggggcctcatcttccatgtcagagtctgaagcaggtccaacgaccctgccaccccctccaccaccaccgccattgccagacacctcagagtccattgatccacctgctcctcctttccctttgcctccactcccgccactgcccccaccaccacctaaacctaacagtgacgcagcattgccaggcttacctctgcctcctcctggtccacctctgagagaatctgtatcaggtcatacagtacttccgccgccactgcctccatcacagaggtcttcaaatccaccaccagcatctagtgcgaatgaaagcaaaacagattctgcttgggtatctactttggatctcttttgcatatttactagtgcttctaatccatttgttaatgcatcaaacccctttccctattgttcaaatgtttggatactggcctttgtgactttgtctgatgtaaccttgtttgcagcccttagttgtgttgcctccaccacccccgccacctgggttgtcaccaaaatcatatgacatggaggctgctggcacttcaaaggacactcctggacttaaagaagatactgcagcgagagtcttaccaccaccgcctccacctagtttgccgcctttacctccaatgcaatctgatatgctatctcctggagtcatgagattaccaccacctccgccaccaccagattcaaggccatcgcttatggctcctggtgttagcaggccccctccacctcctccaggattcccccgtctcaaatgccaataccaccatatgcatcctgtttggttcagctttttttttgactagcttttccgagaatctagctgtggggagaatctggctgtgtagagaatctgagtattattaggattatgtgcggaggaagataaagttgtccatgtggctcaggatctatacagtgacagattactactattgcgacgactcaaccgattatatgtttatgttgattttgaatggtttttacccaaacgaattttatagaagctggctgaaaagctgagtgtttagcagtccgcagcagcttttggtggtcagaagctgcgaaaaaccgaaacaaacagggacatggtgtcctccctggtccgccaccgatgcttaggcctccatttttgctaggaccctctatgcaactagatgagcttgctgcctttgccccaaggcctcagttacctcagcagccatcatatgtaaagtcggctgccccaacagttgttaagagaccattagcacagcacactcctgagctgacggctatggttcctgcatcagttcgtgtcaagagagaatctgcgctccccaaaccaaaaccaaaggtgcagcagcagcagcagctatcaacagcatccatttcaaggccttcagtgaccctcataagaagtgatgctcggccttcttcagcggcacccaagccgccaagtatggacgactcctacttggcattcttggaagatatgaaggaactaggggcacttgatgggtaactcatagagtaactgcctgagtgcacttaacagcttaattcatggaaaacctggacatgggaccttttttttttgcaatgtggtaaatggatagtctctgctcagtcaaccggagctgccgcggagaaagaaaatcatgcagtagtttaattgaaaacccgggaaaacgattgtagtctggctgctggagacctaaaggctctttgtggcccaactgtacacgtttgagatatttggaacttgaatagctgctggctctagcgaaggatatcttacaggtgctctttatgattcatgattgcactggctgatttgcagataataccattacaccagtcgtggggaggactactgttgtgccttaatttttgtatggtgcatttgccttgaaaaccatgacggagttgctgtcctgggaccccatgtaaacttgtgacattcacaaatgtcggtattggttctatagactatagtccggcgacattactggatacgagccacggcttctatataaaagtttcgtgctttctgtgctgaaatctgaaattaacagttttttatttggccagatgggaatatctgtttgcaaactgtgtaacgtatgatgcgatatgcctgcaaagtggcctcatctggccatctttgtacgtgagtcgcactaacatatgatgagtctatggcagattcatgtttcaggcctccacgtcttctgaaggaatcgtcgaagaatttgtcagttcaaac

SEQ ID NO: 64868 - DNA, 2806 bp, Zea Mays
attaaatgacccatttttacgagttcaccgagaggcggtgtatttcgcagagcgcctgttttgccaaattcctcgtttggttccacgccggacgcatcctcccacgctcgggccgggcgcgtgaacccctcgccgccgtcgcagtcccgttgccggagggcgagagggacgagaaagaagagggcaagatgaagacgaccaaggggggcaaggcgatgaaccccacagacgcgttccgcaaggagcagcggaagaaggagctcaagcggaacaaaaaggaaaggaagaaagtgcgggatgttggcattttgaaaaaggatccggaggctatatgggagcagattgagaaattggagaagatgaaggctgatggtgctctggacaaggctaggaagcataagaaaagacagcttgaggatacatacaatcttattgttaagaaacgtaaggaatatgaacagaaaatgaaagagaagggtgaacaaccgattatgttcagccatcttgcaccaccaaagaggcggcctacaggagatgaagatggtagagctaatcctaagcccgaggactctgtttactatcatccaaccttaaatccatctggagcaccgccacctggaaaacctccgatgtacaaatcatctatagggccaaggatcccaccgccttcctcatccagcactggggcctcatcttccatgtcagagtctgaagcaggtccaacgaccctgccaccccctccaccaccaccgccattgccagacacctcagagtccattgatccacctgctcctcctttccctttgcctccactcccgccactgcccccaccaccacctaaacctaacagtgacgcagcattgccaggcttacctctgcctcctcctggtccacctctgagagaatctgtatcaggtcatacagtacttccgccgccactgcctccatcacagaggtcttcaaatccaccaccagcatctagtgcgaatgaaagcaaaacagattctgcttggcccttagttgtgttgcctccaccacccccgccacctgggttgtcaccaaaatcatatgacatggaggctgctggcacttcaaaggacactcctggacttaaagaagatactgcagcgagagtcttaccaccaccgcctccacctagtttgccgcctttacctccaatgcaatctgatatgctatctcctggagtcatgagattaccaccacctccgccaccaccagattcaaggccatcgcttatggctcctggtgttagcaggccccctccacctcctccaggattcccccgtctcaaatgccaataccaccatatgcatcctgtttggttcagctttttttttgactagcttttccgagaatctagctgtggggagaatctggctgtgtagagaatctgagtattattaggattatgtgcggaggaagataaagttgtccatgtggctcaggatctatacagtgacagattactactattgcgacgactcaaccgattatatgtttatgttgattttgaatggtttttacccaaacgaattttatagaagctggctgaaaagctgagtgtttagcagtccgcagcagcttttggtggtcagaagctgcgaaaaaccgaaacaaacagggacatggtgtcctccctggtccgccaccgatgcttaggcctccatttttgctaggaccctctatgcaactagatgagcttgctgcctttgccccaaggcctcagttacctcagcagccatcatatgtaaagtcggctgccccaacagttgttaagagaccattagcacagcacactcctgagctgacggctatggttcctgcatcagttcgtgtcaagagagaatctgcgctccccaaaccaaaaccaaaggtgcagcagcagcagcagctatcaacagcatccatttcaaggccttcagtgaccctcataagaagtgatgctcggccttcttcagcggcacccaagccgccaagtatggacgactcctacttggcattcttggaagatatgaaggaactaggggcacttgatgggtaactcatagagtaactgcctgagtgcacttaacagcttaattcatggaaaacctggacatgggaccttttttttttgcaatgtggtaaatggatagtctctgctcagtcaaccggagctgccgcggagaaagaaaatcatgcagtagtttaattgaaaacccgggaaaacgattgtagtctggctgctggagacctaaaggctctttgtggcccaactgtacacgtttgagatatttggaacttgaatagctgctggctctagcgaaggatatcttacaggtgctctttatgattcatgattgcactggctgatttgcagataataccattacaccagtcgtggggaggactactgttgtgccttaatttttgtatggtgcatttgccttgaaaaccatgacggagttgctgtcctgggaccccatgtaaacttgtgacattcacaaatgtcggtattggttctatagactatagtccggcgacattactggatacgagccacggcttctatataaaagtttcgtgctttctgtgctgaaatctgaaattaacagttttttatttggccagatgggaatatctgtttgcaaactgtgtaacgtatgatgcgatatgcctgcaaagtggcctcatctggccatctttgtacgtgagtcgcactaacatatgatgagtctatggcagattcatgtttcaggcctccacgtcttctgaaggaatcgtcgaagaatttgtcagttcaaac

SEQ ID NO: 64869 - DNA, 2598 bp, Zea Mays
cccatttttacgagttcaccgagaggcggtgtatttcgcagagcgcctgttttgccaaattcctcgtttggttccacgccggacgcatcctcccacgctcgggccgggcgcgtgaacccctcgccgccgtcgcagtcccgttgccggagggcgagagggacgagaaagaagagggcaagatgaagacgaccaaggggggcaaggcgatgaaccccacagacgcgttccgcaaggagcagcggaagaaggagctcaagcggaacaaaaaggaaaggaagaaagtgcgggatgttggcattttgaaaaaggatccggaggctatatgggagcagattgagaaattggagaagatgaaggctgatggtgctctggacaaggctaggaagcataagaaaagacagcttgaggatacatacaatcttattgttaagaaacgtaaggaatatgaacagaaaatgaaagagaagggtgaacaaccgattatgttcagccatcttgcaccaccaaagaggcggcctacaggagatgaagatggtagagctaatcctaagcccgaggactctgtttactatcatccaaccttaaatccatctggagcaccgccacctggaaaacctccgatggccaaggatcccaccgccttcctcatccagcactggggcctcatcttccatgtcagagtctgaagcaggtccaacgaccctgccaccccctccaccaccaccgccattgccagacacctcagagtccattgatccacctgctcctcctttccctttgcctccactcccgccactgcccccaccaccacctaaacctaacagtgacgcagcattgccaggcttacctctgcctcctcctggtccacctctgagagaatctgtatcaggtcatacagtacttccgccgccactgcctccatcacagaggtcttcaaatccaccaccagcatctagtgcgaatgaaagcaaaacagattctgcttgggtatctactttggatctcttttgcatatttactagtgcttctaatccatttgttaatgcatcaaacccctttccctattgttcaaatgtttggatactggcctttgtgactttgtctgatgtaaccttgtttgcagcccttagttgtgttgcctccaccacccccgccacctgggttgtcaccaaaatcatatgacatggaggctgctggcacttcaaaggacactcctggacttaaagaagatactgcagcgagagtcttaccaccaccgcctccacctagtttgccgcctttacctccaatgcaatctgatatgctatctcctggagtcatgagattaccaccacctccgccaccaccagattcaaggccatcgcttatggctcctggtgttagcaggccccctccacctcctccaggattcccccgtctcaaatgccaataccaccatatggtgtcctccctggtccgccaccgatgcttaggcctccatttttgctaggaccctctatgcaactagatgagcttgctgcctttgccccaaggcctcagttacctcagcagccatcatatgtaaagtcggctgccccaacagttgttaagagaccattagcacagcacactcctgagctgacggctatggttcctgcatcagttcgtgtcaagagagaatctgcgctccccaaaccaaaaccaaaggtgcagcagcagcagcagctatcaacagcatccatttcaaggccttcagtgaccctcataagaagtgatgctcggccttcttcagcggcacccaagccgccaagtatggacgactcctacttggcattcttggaagatatgaaggaactaggggcacttgatgggtaactcatagagtaactgcctgagtgcacttaacagcttaattcatggaaaacctggacatgggaccttttttttttgcaatgtggtaaatggatagtctctgctcagtcaaccggagctgccgcggagaaagaaaatcatgcagtagtttaattgaaaacccgggaaaacgattgtagtctggctgctggagacctaaaggctctttgtggcccaactgtacacgtttgagatatttggaacttgaatagctgctggctctagcgaaggatatcttacaggtgctctttatgattcatgattgcactggctgatttgcagataataccattacaccagtcgtggggaggactactgttgtgccttaatttttgtatggtgcatttgccttgaaaaccatgacggagttgctgtcctgggaccccatgtaaacttgtgacattcacaaatgtcggtattggttctatagactatagtccggcgacattactggatacgagccacggcttctatataaaagtttcgtgctttctgtgctgaaatctgaaattaacagttttttatttggccagatgggaatatctgtttgcaaactgtgtaacgtatgatgcgatatgcctgcaaagtggcctcatctggccatctttgtacgtgagtcgcactaacatatgatgagtctatggcagattcatgtttcaggcctccacgtcttctgaaggaatcgtcgaagaatttgtcagttcaaac

SEQ ID NO: 64870 - DNA, 1929 bp, Zea Mays
gaggcggtgtatttcgcagagcgcctgttttgccaaattcctcgtttggttccacgccggacgcatcctcccacgctcgggccgggcgcgtgaacccctcgccgccgtcgcagtcccgttgccggagggcgagagggacgagaaagaagagggcaagatgaagacgaccaaggggggcaaggcgatgaaccccacagacgcgttccgcaaggagcagcggaagaaggagctcaagcggaacaaaaaggaaaggaagaaagtgcgggatgttggcattttgaaaaaggatccggaggctatatgggagcagattgagaaattggagaagatgaaggctgatggtgctctggacaaggctaggaagcataagaaaagacagcttgaggatacatacaatcttattgttaagaaacgaatatgaacagaaaatgaaagagaagggtgaacaaccgattatgttcagccatcttgcaccaccaaagaggcggcctacaggagatgaagatggtagagctaatcctaagcccgaggactctgtttactatcatccaaccttaaatccatctggagcaccgccacctggaaaacctccgatggccaaggatcccaccgccttcctcatccagcactggggcctcatcttccatgtcagagtctgaagcaggtccaacgaccctgccaccccctccaccaccaccgccattgccagacacctcagagtccattgatccacctgctcctcctttccctttgcctccactcccgccactgcccccaccaccacctaaacctaacagtgacgcagcattgccaggcttacctctgcctcctcctggtccacctctgagagaatctgtatcaggtcatacagtacttccgccgccactgcctccatcacagaggtcttcaaatccaccaccagcatctagtgcgaatgaaagcaaaacagattctgcttgggttcctgcatcagttcgtgtcaagagagaatctgcgctccccaaaccaaaaccaaaggtgcagcagcagcagcagctatcaacagcatccatttcaaggccttcagtgaccctcataagaagtgatgctcggccttcttcagcggcacccaagccgccaagtatggacgactcctacttggcattcttggaagatatgaaggaactaggggcacttgatgggtaactcatagagtaactgcctgagtgcacttaacagcttaattcatggaaaacctggacatgggaccttttttttttgcaatgtggtaaatggatagtctctgctcagtcaaccggagctgccgcggagaaagaaaatcatgcagtagtttaattgaaaacccgggaaaacgattgtagtctggctgctggagacctaaaggctctttgtggcccaactgtacacgtttgagatatttggaacttgaatagctgctggctctagcgaaggatatcttacaggtgctctttatgattcatgattgcactggctgatttgcagataataccattacaccagtcgtggggaggactactgttgtgccttaatttttgtatggtgcatttgccttgaaaaccatgacggagttgctgtcctgggaccccatgtaaacttgtgacattcacaaatgtcggtattggttctatagactatagtccggcgacattactggatacgagccacggcttctatataaaagtttcgtgctttctgtgctgaaatctgaaattaacagttttttatttggccagatgggaatatctgtttgcaaactgtgtaacgtatgatgcgatatgcctgcaaagtggcctcatctggccatctttgtacgtgagtcgcactaacatatgatgagtctatggcagattcatgtttcaggcctccacgtcttctgaaggaatcgtcgaagaatttgtcagttcaaac

SEQ ID NO: 64871 - DNA, 3163 bp, Zea Mays
gtatttcgcagagcgcctgttttgccaaattcctcgtttggttccacgccggacgcatcctcccacgctcgggccgggcgcgtgaacccctcgccgccgtcgcagtcccgttgccggagggcgagagggacgagaaagaagagggcaagatgaagacgaccaaggggggcaaggcgatgaaccccacagacgcgttccgcaaggagcagcggaagaaggagctcaagcggaacaaaaaggaaaggaagaaagtgcgggatgttggcattttgaaaaaggatccggaggctatatgggagcagattgagaaattggagaagatgagtaagtaaactagctgcattgggaaaaacgaatcagaaagtgatgaagtgatctttgtaagaagtttatagtcactttcataaaccttaagttctatatacaattatgcatatatcaagagatcatgttacttacttgttctgctttagttatgacaacatagttcatttgatctgtagccatagcattatttgcacattgttcgtcaacatttgctaaacactcatacactattgtttttcccctaacttagtttgaatgcaaattttagttgatttgactcttgcagttggctaattatctctctggtctggtctttctagtatgaccctattgttgaaacaactcactttgcctctttgaattgctagctactttggccctgttttcaacatgaggctgatggtgctctggacaaggctaggaagcataagaaaagacagcttgaggatacatacaatcttattgttaagaaacgtaaggaatatgaacagaaaatgaaagagaagggtgaacaaccgattatgttcagccatcttgcaccaccaaagaggcggcctacaggagatgaagatggtagagctaatcctaagcccgaggactctgtttactatcatccaaccttaaatccatctggagcaccgccacctggaaaacctccgatgtacaaatcatctatagggccaaggatcccaccgccttcctcatccagcactggggcctcatcttccatgtcagagtctgaagcaggtccaacgaccctgccaccccctccaccaccaccgccattgccagacacctcagagtccattgatccacctgctcctcctttccctttgcctccactcccgccactgcccccaccaccacctaaacctaacagtgacgcagcattgccaggcttacctctgcctcctcctggtccacctctgagagaatctgtatcaggtcatacagtacttccgccgccactgcctccatcacagaggtcttcaaatccaccaccagcatctagtgcgaatgaaagcaaaacagattctgcttggcccttagttgtgttgcctccaccacccccgccacctgggttgtcaccaaaatcatatgacatggaggctgctggcacttcaaaggacactcctggacttaaagaagatactgcagcgagagtcttaccaccaccgcctccacctagtttgccgcctttacctccaatgcaatctgatatgctatctcctggagtcatgagattaccaccacctccgccaccaccagattcaaggccatcgcttatggctcctggtgttagcaggccccctccacctcctccaggattcccccgtctcaaatgccaataccaccatatgcatcctgtttggttcagctttttttttgactagcttttccgagaatctagctgtggggagaatctggctgtgtagagaatctgagtattattaggattatgtgcggaggaagataaagttgtccatgtggctcaggatctatacagtgacagattactactattgcgacgactcaaccgattatatgtttatgttgattttgaatggtttttacccaaacgaattttatagaagctggctgaaaagctgagtgtttagcagtccgcagcagcttttggtggtcagaagctgcgaaaaaccgaaacaaacagggacatggtgtcctccctggtccgccaccgatgcttaggcctccatttttgctaggaccctctatgcaactagatgagcttgctgcctttgccccaaggcctcagttacctcagcagccatcatatgtaaagtcggctgccccaacagttgttaagagaccattagcacagcacactcctgagctgacggctatggttcctgcatcagttcgtgtcaagagagaatctgcgctccccaaaccaaaaccaaaggtgcagcagcagcagcagctatcaacagcatccatttcaaggccttcagtgaccctcataagaagtgatgctcggccttcttcagcggcacccaagccgccaagtatggacgactcctacttggcattcttggaagatatgaaggaactaggggcacttgatgggtaactcatagagtaactgcctgagtgcacttaacagcttaattcatggaaaacctggacatgggaccttttttttttgcaatgtggtaaatggatagtctctgctcagtcaaccggagctgccgcggagaaagaaaatcatgcagtagtttaattgaaaacccgggaaaacgattgtagtctggctgctggagacctaaaggctctttgtggcccaactgtacacgtttgagatatttggaacttgaatagctgctggctctagcgaaggatatcttacaggtgctctttatgattcatgattgcactggctgatttgcagataataccattacaccagtcgtggggaggactactgttgtgccttaatttttgtatggtgcatttgccttgaaaaccatgacggagttgctgtcctgggaccccatgtaaacttgtgacattcacaaatgtcggtattggttctatagactatagtccggcgacattactggatacgagccacggcttctatataaaagtttcgtgctttctgtgctgaaatctgaaattaacagttttttatttggccagatgggaatatctgtttgcaaactgtgtaacgtatgatgcgatatgcctgcaaagtggcctcatctggccatctttgtacgtgagtcgcactaacatatgatgagtctatggcagattcatgtttcaggcctccacgtcttctgaaggaatcgtcgaagaatttgtcagttcaaac

SEQ ID NO: 64872 - DNA, 2921 bp, Zea Mays
gtatttcgcagagcgcctgttttgccaaattcctcgtttggttccacgccggacgcatcctcccacgctcgggccgggcgcgtgaacccctcgccgccgtcgcagtcccgttgccggagggcgagagggacgagaaagaagagggcaagatgaagacgaccaaggggggcaaggcgatgaaccccacagacgcgttccgcaaggagcagcggaagaaggagctcaagcggaacaaaaaggaaaggaagaaagtgcgggatgttggcattttgaaaaaggatccggaggctatatgggagcagattgagaaattggagaagatgagtaagtaaactagctgcattgggaaaaacgaatcagaaagtgatgaagtgatctttaggctgatggtgctctggacaaggctaggaagcataagaaaagacagcttgaggatacatacaatcttattgttaagaaacgtaaggaatatgaacagaaaatgaaagagaagggtgaacaaccgattatgttcagccatcttgcaccaccaaagaggcggcctacaggagatgaagatggtagagctaatcctaagcccgaggactctgtttactatcatccaaccttaaatccatctggagcaccgccacctggaaaacctccgatgtacaaatcatctatagggccaaggatcccaccgccttcctcatccagcactggggcctcatcttccatgtcagagtctgaagcaggtccaacgaccctgccaccccctccaccaccaccgccattgccagacacctcagagtccattgatccacctgctcctcctttccctttgcctccactcccgccactgcccccaccaccacctaaacctaacagtgacgcagcattgccaggcttacctctgcctcctcctggtccacctctgagagaatctgtatcaggtcatacagtacttccgccgccactgcctccatcacagaggtcttcaaatccaccaccagcatctagtgcgaatgaaagcaaaacagattctgcttggcccttagttgtgttgcctccaccacccccgccacctgggttgtcaccaaaatcatatgacatggaggctgctggcacttcaaaggacactcctggacttaaagaagatactgcagcgagagtcttaccaccaccgcctccacctagtttgccgcctttacctccaatgcaatctgatatgctatctcctggagtcatgagattaccaccacctccgccaccaccagattcaaggccatcgcttatggctcctggtgttagcaggccccctccacctcctccaggattcccccgtctcaaatgccaataccaccatatgcatcctgtttggttcagctttttttttgactagcttttccgagaatctagctgtggggagaatctggctgtgtagagaatctgagtattattaggattatgtgcggaggaagataaagttgtccatgtggctcaggatctatacagtgacagattactactattgcgacgactcaaccgattatatgtttatgttgattttgaatggtttttacccaaacgaattttatagaagctggctgaaaagctgagtgtttagcagtccgcagcagcttttggtggtcagaagctgcgaaaaaccgaaacaaacagggacatggtgtcctccctggtccgccaccgatgcttaggcctccatttttgctaggaccctctatgcaactagatgagcttgctgcctttgccccaaggcctcagttacctcagcagccatcatatgtaaagtcggctgccccaacagttgttaagagaccattagcacagcacactcctgagctgacggctatggttcctgcatcagttcgtgtcaagagagaatctgcgctccccaaaccaaaaccaaaggtgcagcagcagcagcagctatcaacagcatccatttcaaggccttcagtgaccctcataagaagtgatgctcggccttcttcagcggcacccaagccgccaagtatggacgactcctacttggcattcttggaagatatgaaggaactaggggcacttgatgggtaactcatagagtaactgcctgagtgcacttaacagcttaattcatggaaaacctggacatgggaccttttttttttgcaatgtggtaaatggatagtctctgctcagtcaaccggagctgccgcggagaaagaaaatcatgcagtagtttaattgaaaacccgggaaaacgattgtagtctggctggagatgtctgaacaagctgtacaagctcaagctgggagatatttgtggcccaacttgaatagctggagaccttttgcacacttgaatagctgtacaagctggagacctaaaggctctttgtggcccaactgtacacgtttgagatatttggaacttgaatagctgctggctctagcgaaggatatcttacaggtgctctttatgattcatgattgcactggctgatttgcagataataccattacaccagtcgtggggaggactactgttgtgccttaatttttgtatggtgcatttgccttgaaaaccatgacggagttgctgtcctgggaccccatgtaaacttgtgacattcacaaatgtcggtattggttctatagactatagtccggcgacattactggatacgagccacggcttctatataaaagtttcgtgctttctgtgctgaaatctgaaattaacagttttttatttggccagatgggaatatctgtttgcaaactgtgtaacgtatgatgcgatatgcctgcaaagtggcctcatctggccatctttgtacgtgagtcgcactaacatatgatgagtctatggcagattcatgtttcaggcctccacgtcttctgaaggaatcgtcgaagaatttgtcagttcaaac
